United States Patent Application Publication US 2014/0057251 A1 - sequence listing, part 166

SEQ ID NO: 319482 - DNA, 1850 bp, Cannabis indica
ctccactctacttttaattttttttccttttttttttttctgaattagttcttttaatttgttaaaaggagaggaaatggttgatatttgagttctactttaattccaaccacaaatctttatttttattgataagttttattttcatcccatcaaataatacgtacacttattttatgttaattttaaaatttaaattaaatttttaaaattaatacttaaatttaaaaatttttaaatttttttatattaattttaagtacttattttaattttattttatatatatatatattttttttatctaaatcatgtatatttcttttaaagaaaatttcatatatattgatttttttttgtcaaataatattttttttttttttgagaaacggacacttcattaaacaactaaacgattacaaggaaatagcaagtcacgttcaatcgcgtgacgagcacaagggggaaaaaccccaatccacatagcactaactttgtatgtcaaagcataattggctaatacatgggcaactacattctcttcccgaaatacaaaccgtaccccattagttgagtgatgctgaagtaagcgttgaatctccacaatgaggccaccctcttgccaacaacccacctccgcttcattaataacatgaacagcttgcaggaaatctgatcgaacttcaaacaagaccactcgtctctggatggctgccttaataccatccatcacttatcgccattagctccgccactagcggagtgccagcaaagcggaccacagtatctgatgcaaagctaacaaccccctcggaatgactaccccagtcgccgccccctctccttgaagagaaaacccagcatctacattaacagaaaaacatccaacatttggctgctcccatctctgctccgcccttttagccaccccagactttgcccccagtaccttgctgaaaaatcttaaatatatttcccacaccattctaatacatccccagctttaggaagataccctccatgtataaaattattccgaaccgaccaaaaatgccaagaaacaaccacaatgaactcgaaagaggaagaagaacaaaccttttagattgtaaattaaattcttcatctttgtttttgtcgggtgccagtttagtataactgtactatgagaaaaaataaattatagggctatgaggaaaagtggaaaaaaagactaccttaaatgtttgctaaattatagatttaaaagtgttgtaacattaaattctaattataataataatatattataatttagttatttatataatcacaaatgtaaaaatttaggttatataaatttttattttcaacgtctatattttttattttcttaatttatatgcattaattcataaaaaaaaataatttaaaaataatcataagtattttaaaaagaatacaagtatataaaaaagtttaagttgttcaaaaaaaattgatgtgattttttaacaatgcacatttaaattataaaattaaaatttatatactttattattaataacatatccaataaacacatattaatatgctctattagctaatttaattctcttaaagtcaaaaattctaacatatgccaaacaactctaaattttaaactatgagatattgggttgtttatttttcaaactttcatatggagaaattttacttttagattttaggaattttattaaatgcacaacacacagttaataaaattctctccaccaatgagaagtcgtaccgaaattcaataaatatcaacgacaaattcagaagagttctattttttcttttagttttgtcattcatttcaggtgaat

SEQ ID NO: 319483 - DNA, 600 bp, Cannabis indica
agagagagagagacgttatggttggtaaaatgggaaaaaaatgggaagagagttgtggtgtgagaagatgcatatacatgcaaaaggagtgtgttgtgtgtattaatattattaattacttacttaattatttattatttacaataataataattaataattgagatatataatagttattattatacattgacgttattaattatactatgtatacataacgcacacgtagccaactaataatatgactttgaactttgaagtagagttacaaacaaacaacaacttcggttacatttcatataaattgtattctaaatatcattttagacattattcttttgtaaaaattatgttgattggactttttttttttgtaaaatgataatttatgattttgtattttataaaatggtacaaaatagattttaaacttaatttttattaaattaaatctttataataatctaatctgaagatattataaaaaaaactgattacattatttacacttgtttgtgctagaaactaactgaggttgattatattgaaaaataaattgacaaaaattgagtttaaggtatattttgtaccatttta

SEQ ID NO: 319484 - DNA, 2012 bp, Cannabis indica
gaagagcaaacaaatgctgcagaacttgataacccagaacctatatatatatataacataaactaataatcgtaagaatttatcttaaaacataattatttcataaattaatgaaattcaactacaatcaacaccacctgtaggaacagttccatcaacaagaacatcaagtccaactgtctcatcaacttttacaccctttgatttagagtattcataatatcctttgtacccacaaatgaaatagtggccccatttatgatttttcaagtcaatttcctgcacaacaaacatttcttttttgatttttcaatactctaataattattattacatatactcatacatattaggcctataataaaatcattacctgatttggatcagcaggataagtgcaaagttggtacttattatcattgacattggcgattcttaaaagcttctcagtctcatcatcatcatcatcgcgccttcgaattgcgatgatagtgtcttgccttatcgccattggcaacacagagtacccttcgtaatctatatgttctccaatcaaattcactctccctatgcattcaaacaataatcaatcattacttttcctaattcatttacacaaacaacatatatatagggaaagatagagatagatagagagagagatggaatcaaaaaaatgaaaacctggagaacgagcgaagatttgaggaggatgaccaaagaggtcaagaaatttagcttttaaacggtgaaatcgagcctgagcttcttcgagttgagatccatggccataaacagggtccaaagttgagtagattgggattggaagatcttcgtgtttagccattgattcaattcctcgcaatctttctctttgttatgaatctgaagaaacagaggagaaagaatataacaaacattaacgataatttataattctgtttttatgatacaaatatatatataaatatatgcttggttgggggactaattaataaatattatctttttaaattatatttaaagtgagattaggaaaaggtgagtgttatagaataatgcctttttttttttggctttttacataattgaattgattagattcggataagatgagatgagatggaatcggatataataataataataatattaggaaaatattttataaaaataaataaataaataaaattgcactatattaaattgtaaaatttgtaaaataactatattaaatttacgttttaatgctttaaatttttgttcattgtacaaaaaaaaaaaaagaaaaatgctttaaatttttgttttgtaaaattttatcgtttataatctttttagtttatttttttttagaaaaaaaactatattcaatttacactaatgattgtttttggtcgttccatgccaccaaatatggttaatttactaataaaaagtttcatttggattctgttaaaaataaatagaaaaatcatattttctatataatgataaaaaaaaacaaatttttcagaaaaaaaaaaaaaaaagaagaacaagtgattacgaaaaacattaggaaaatgaagtagagagggaaatttctttattttttagattaaaaatatatatcttctttatttttttagattaaaatatatatctctcaatttgttgcattcaatttatttttaaagtaaaatatatgaacgcagtgtattgtttcaataagaatgaggaattttaggaccattaatgagatgattcataattttagattgtattcaaaattcaaggggaattttattttgagcattgctattaggcactagtggtgcctaacaccttctcgacatgtcgcgtttcgattggctagtgtcacgggctcaccttttcaggcagcggcacacccgtgcggcaccttgacttctctaagccaaggtcagccttccaaccatccgagtaacaatgggctcatttttcgcgcgaccgtgtgcttcgtgcacactttcgtctctcgaacaactccc

SEQ ID NO: 319485 - DNA, 1578 bp, Cannabis indica
ccaagatgcacttttaagagcttgttccactttgataggttcctcactatcatcatacaaggctgcttgacccacacaggcttttggtttaaatatccctagcttagctctagtcatcatcggatgagtaggagctaaagtgaatgatttcccttgctgaaattcaagttcttgatcatcaatatggtatgaatctctactaccactaccttcaatgttaggaataccagatagactatgataagataagttaggtacaatatcaaatacttgagtttgttgtggtggactctcttcaagggactgtcttgtaccttcagtagtagctaagttgccactgtttgattaaggaattatattggtagcagtgtttaagaagtttaagtgagagggtggaaaagaggttgattaagagggtacactaacatatacctgctgttcttcccgatgagtgtgtaagaaacctatcttgaaaggaaattcacactcattaaaaatcacattcttggatatataacctcccagttgtactaaggcatttatacccttcgtgtgaatcaatatagcctaaattgatgtagttgactgaatagaactaaaattttgtgccaacggtcaatggtagcttgatcttaccacaaaaagaaattttgtccccattgaagccatacatgatctggtcgcatggctccatgtcttttaaagacaaacccattctatccaaggtttatttgaaaaaggatgtttgacaatgctccatcgttaatcattactctagccaccatcgtattggctattttcacctcaacaacaagggggtcatgtgagggtagtggacatggtcgaagtcagattctccgaatgtgattggatcacacttgaagcatagagattttggaggcctttcctcaagctctaacatctctaatcttggatcatgtcatagaaatctagaatacctctctggtgctcttcttgaattaccttcaaggtatagacctccaactaccacatcaagcctacctaccgcttctataggctggagaggagcattgcatcttgttggcgcttttggcctcacatactgttggagggcaatatgcttttttcgaattaagaattctatcttatcctataactgattatactcattagtatcatgactttaattattgtggtagcgacaaaatttgttcatgtctaattctatgaagggaagaggctacagtacaacagtgtttactgagttgccacaaatatctcttctcttggggccaagagaatataataaattgttacaagtggtggtggcaggtggtcatcttgtcaacggcaggtggtgcctttataggtccacattcccaagtctaatccttttggaaacttgtttgtagactgtttccctaataggtattactccacattaggtggagggcccatcaatttgggatctcgagtctgagtccttttggactctctcttgtagttcacatccctttggggatcctcagtgcttgttgcacgctttgcagtacgaataccaagaatggtagaagtaccacacgcattaagggtttc

SEQ ID NO: 319486 - DNA, 1000 bp, Cannabis indica
atatttattatcaaattaaaaatcacaaaatcattggttactattatcacttattattaaccttttgtttttatttttctactaacgcttttgtccataatcacctccctgtggaatcgactgcctgatctatactacaaccaccgctagtggaagtcacatttgggcgttaaacagggccatatatcgagcatatcgggcccaactaaaatttcaaaattttgaaagactatcgagctctatgtcgagcaatgcatcaggcctatcgagcccatactacaatttaaaagttagaaagagtatcggaccttgtatcgggccatatattggacctatcgggttatacaaattttttttattaaaaatggagtgattttagtgataagtagattgttcaaaaagaaaagccaagtaaagattgttcaacaaatataataaaaagaaacacccaaagttcatggcaagttttgatagaataaatctataccccatctctgtcggaagagcggcacatgatcatcatctactccaacgaatggtagatccaatagcttatgctcgatatgttctatgacgtacattccgcaatcgccaccgcataagtagttaaacttaaaatttagtaaatcatattaataattttttttaatttaattagtaaacgtattctcaaaaatacacttaaattacctcgcttttgtctgtggtacaactttattgtccatgagattccaatccaacgttttgacttggcttttagaggttttcatttgagggaccatctgttgggttttgtgccctaaataaaactcatttcaatataatcagatttacttattacagtagaacctctattcaagaatacacttgggaccaagtaaattatattctaattgggaggttataactaaatagagttacattagaaaaaaaaaattaaaaaaccaaaaaatatcaatgtaacaataataacaataaataatcattaatactatatcat

SEQ ID NO: 319487 - DNA, 1090 bp, Cannabis indica
taacgaataagtcaaagaacatagataatacatttaagtcagaacccaaccatctcaggattaagatctattgacctaataagattaactaaatgatattgacttagaaagatataacggtaagtttatgatatcttatccaatgtcaattcggtctagtctgatgtatattgcatacatttgatactagcatactttgccaatgccttgaaaatgacataccacttatccaaagtgttagtaaactttattgttgattattatgtcagtataaatccagtatacttacaaatcatgggactaaactttgaaacataaaatcataattatttttcactgtatagagaacactataatcatgaataactatatgttcatagaatttatacattaaacatataatcatgaaaataattgtgtgaaccatgcaatataaaatgacatctgatcttttattaatttgtaaatctaattatattgaaataagttttatttaggttataaaatcccaacaaatccatgtacattatatcttcaaatttgcaaaaataaaagagaaacgaattagcggggtatatcattcttctaaactctcgcttgctctctataatggtaatttgatagaaaataaatgaacaacgagcttggagactaatatactatatttacatagttgagattttttattaaaatctctgccttaattaattgtcagaatttatgacaattaatgtagatataaaattaggaaattagttaaaagataatcattagtatgagaatatttaatcaataattactttgttttatcaaataaaataattaatcaattatcaaatataaaatattctaacatttccaatatcataaaatgttaatgtattgtacgttttgcaattaaatgttttgtagtatttatgataaagaaaaggttaattaggattttctttctcccgaattttgacatgtaccaaattatgtcccttgaatttttttggccgttaaaaatttcccttgaactattgagatcgttaattttaaggacttttgtctaatttcattcaattttactgtttcagtaattgtttat

SEQ ID NO: 319488 - DNA, 1172 bp, Cannabis indica
agacaaaaacagcggaaagaataaaacataatacgaaataagtgtggaaaagaagagaagcaacctttccgagaaggatttcgttagtgaatgggccatagacgtcagatgtgtcgaggaaagttacgccagaatgaatggcgtggtggatgagagcgatcatgtccgtgtcgggcttgggtggaccgtagaaggccgacatgcccatgcatcccaggccctgagccgagacttgcagaccttgtgaacccagcttagtccttctcactactgttgccatttttgtttcaaatacagaaagaggttgtaaacagttaacagagttagagtggtgagtgactgaatgttggggtgggcttctttttataaagactgtgaacgaggaagacaaagatgaatctgcagtacttttgaattggaggatgatctaaagtcaaaagtcaaccattccatatctgtagtcatgtttgcgtcacctcttacgttttattcatttcaaaagtcagtttttttggtcacttacgtgtcttctacaacaagagaaggttctcttacttgaattggggaagaaaagtcggtttcttttgtcaagttttactcctcacatgtttactaataaggaatcaaacagtggtgtgatgagggagtccaattttttacatttctttatttaaattatatattatattaattaaatttattctttaatattttattaattttatgagaatatttttcacaaaatttaagagctaattaattaagttgacattttttttttgaaaatataatgtatatgtatttattttttatgaacaaataattttcattttgacttagttaatttttttctctaagttaaaaattttggtacatgtttgacatcataattaaaaaattattttttgtttgtaaaaatagaaaattattttttgaaaacaattggacttatttgaccttgtttttttaaaacaaatttcagaaaataaagttgtaaaaaacaagaattttgaaaacaacaaaatgttgttttctgttttaaaaatcaattcacttttggtcaatattgtttttagaaaacactaaccaaacatgacttatgttttaaaaacttcaaaaactatttttgttctcaaatctaaaaacaattttttgaaaacaaaaaacagaaa

SEQ ID NO: 319489 - DNA, 785 bp, Cannabis indica
ttaacttgacaattgctactaagctttctttaagtgataaaagagatgtaaaattaaataaaaaaggtgatgaaatgaataattaagtgcacatatatttacttattcacatcttgggtatatattcacagatcaagcacttgtgtttgattatcattgagtaacatgtaatctagttaattaatatttgctaatattatttatttatttattgaggcatatattatacaatactaatatttattccaaataatgaaaagagattggaaaaatggagaggagtggagtgggggcaaggaatcaaaagatggtctgatatggttgcttgctctgttatgtcggtaaacacatctgatcatcatgattaattgaattgaatttgttatgataaaatgatacataacagatatttgggttgggtgtaaggatcttaattcaatcattcatattaattaatgactctttaatgtttgtaccaatttgcatcattgtatttgtagctgtatctgtacctctaacactttgattgtaacggctaatatcatacgaatacatattatagaaatgcaactttttattattatttaggacaaatagctttattttccaaaaatattacttttgtagaattttaacacttcaactattttgtgtagcaaaaatttcttatgttaggataactattattaaagtactttaattcttttaaagggttaccaatgaaaatattattgagataattagataaagtattatttttatattattataattttttatgttaa

SEQ ID NO: 319490 - DNA, 791 bp, Cannabis indica
ccttcgagttgtataagttgtttgtatctttgcttgtgattaataaagttagggatggtaattatactcgcgggttcaaatacctgcgtcgagtttaagtattcacacccaaattgaggtcggggttggggtattgatacccaccctaaaactgtcccgatatgactctaacatatatattatcttaaatttaaataataaatgttgttattaatttacttcacgctaaaatttttttattgattacatattaaggagatgatttttcattgttcaagaaaatgcatgtatttactatttatttaaattaattttttttactattaccaattaatgtacacactatttaattatatatctttactcatcatcattatcatctctatgaagagttattcactgttttaaaaaaaataaaaacaaattgcaaaagtaaaaaaaagaaaaaacttttcacttttatagtattttcttctctgttaaagttggaaggaagtcaaaccaaactaatgaaaaactttgcatcatcgaaagtgtttttgacgttggtgacgaagttaaccacccttatattacgtatcactatatttgaggtatttatattaaatcgtatgtatatgtatatatttgttagatatatgtacagtatattggtatatattagtgttttagttaggagtagttgtttaatagtttgattgggttataattttttcattcaatagactaacaatctgttatatatatatatatatattatactaggtgatcgttacgtgtcaagccacgta

SEQ ID NO: 319491 - DNA, 1062 bp, Cannabis indica
atacttttagttttatacacttacacttttttttacagattaaatactttatgttacaattttgtgcttctatcactactagtttgttaaatattttttattttttaaaaatataaatttaattaaagttaaacttaatgaaaaaagtgggactaaaaaaatatgaaatctatttttttaagtgtataataattgaaacatagagggatttagccgtaaatttctctttacactattatcgcatgttatgtttttttcctctctgaataattaaaatttattaattataagaaacccaaatctctaaattcttaaaaagaaaaaaaaatgactaaaactactttaaatgttttattatatttgagcaaagaaaatatcttataaactaataaacgtagtcacgttttgcacaatattgtaatagagtaaatataaattttaattatgtgttttaaaaagaagttagtggatgttctttctatttaactaaattacaatttacatattatattatacaaaataaaatataatgacatgctgattctaattataataaaatatttttaccttaattttttttaaaaaaattcttcttaacttcaataatgattgtgactcaatttttaatctatcttaactgtcattatttttaccaatatgcacataatattattacgttccacattgcaaaagataggtcgaaattatctccctaatttttcttaaaaaattatcatttaaataaataaagtaaaaaatcaataacttttgtgatacgagttctaaaataatatttattatttgtaaaaatagaaaaaatatatttattctttggttaattataattttgtaatatactttggggatgaaattatacattctgtacaattagtgtcgatacaaataaattatatttgtaagagagaaggcggaaactgtttaggtagtaccctttgttattattatttagaatgtaaagtcattttttgggaagttagttgacaaaatattttttcattttatggtaagattgttttgtcatacatacccgaattcttacct

SEQ ID NO: 319492 - DNA, 1185 bp, Cannabis indica
gtggagggtaatgatggttttaatggtgttggtggtggtttggtgcacatgatggttaattagttatggtgggtaatggttgatgaaaaatagggtttgaggagggtgagaagaaagaagaagggaaaaaatgaaaaagaaatttttatttttaaaatgattttttaataggatttatttatttttattttaagtaaacttatttgaatttttattttatttttaaatatttatttacgtgggccaataacattgtgtcatgtgtacattgtgtccatgtggatattaccctatgtacacatggacaactaacttgatacttaactgccaaaaattgatagaaagagctaagtgccaatagaacttgagtttaggagattttaccgttaaggtttgagttttggggattaactgctagcgaggtgacaatattaagagttatgctgtaattacatcttaaaaaatatatatttagtgacatatttagggtataaataagttgagtccttattacgagggatttgagaaagtgcatgagatgagcatgcacattccaagctaattgggagaaaaatttatttgaacttttttttatacaaaatggtaaaaatttaaaatatagtattataaaaatttttactaaaattaattgcaagaaattaacacatggttacaaggtaggttcaattaataattaatgtctcaaaatagtttgttcatatctaaattaaatactgcaattcatgggatatttggtgaaattgtcactcccattcattctaaagtaataaaatgttatttttaccattttttaaagaattattatataaaaaatacaaattgacattttatttacaaaaatacttccataagatgtggacaatatttatactttttatatgcttttaattaccaaaatacctctcacattatcacttacataatctagacgcaggttgctaggtggttggccgaaggttacatcagacgaaggtttcaattagacgaaggttgttgggtggttgaccgaaggttgcatcagacgaaagttgctaggtgggaccgaaggttgcatcagacgaaggtttcaatcctaggaagcatgaatcgtgggttactgttgcaactgtaatgcaacagttatatctattgcgagccaactaacgtgcaacttaattgcaacta

SEQ ID NO: 319493 - DNA, 1264 bp, Cannabis indica
cttttaaagtttttaagttgggcagcagaaaacaatttaaaataacaatttgggcccttttttaggggctcaaatagcccatttcactttcaaaatttgaggcacacgcctcttacacctcaacgcctcacgcctcagttcaacgcctcacccattaaggcgtacgtctgtcttctcctcagcaagctgcacgccttggtgcaatctttaaacgcctcaacttgaggcacgcctcaaaaacgcctttttaaacattgtatatatgtatataaagtgtggtagcaaagtggctatatattataaactggttaggaatacgtccatatgtacattgagaactgattagtgttggaatatattagttatatattaattgtagaatttaagaataattgtaatttgtttcctattttttctctagtttcttttttagtctctctagttttgtatataaatacatgctaatctattgaataagatatacaattcattcaccatattttacatgatattagagctgattttgggattggggattcgaaattcgaaattagggttcatcataaattggggtttgcaattagggtttgattttctttcatttttagggttctttttcggaaaccctcattagagtaatcgtttgttctcatcgccaactcagaatgatttccccagtcgtcgatctgccaaaactcgaagtccggtcaccggattcctcgtgcgcttggctcacgctctgcctgttgttactaccacctacccctgcgtgaaggcgtgtgcgacggagatttcgacgacaaatcttctccagttcgtgtttttggctcctcttaagcctactcgcatttgtctcaaattgtagtttggtatttctcccttcttcgtatttgggtgttctttatttgttcttcgttgttcgtttctgtcttgtctcttccgatatttgtttgaggttatggtagagacaaaatcaaatccaaaagcaatagttgtttttgatgtggtttctgtgatgtctaaaatcattgaccataaattaattggttcgaattatatggaatggagtaagatgattcgactttgtctaaggagtattgacaaagatgatcctctcatagaaaaaaacaagtcaagaaaagtgtggttacgtgaggatgctagcttgtttattcaagttcaaaattctattaataatgaggtaattagtttgattaatcattgtgaattggttaaaaaaataatagattacttggaatttttg

SEQ ID NO: 319494 - DNA, 2415 bp, Cannabis indica
taaaaattaaccaaaaaaaaatacaacgtgctttgacacgtagttactgtactagtatatatatatatatatatatcaacacctaaaaaattgttacaacctttttatactttttgttactaaatgttatttcaagttaaaaaaattctaactgaaaaaaattcttattactaaaaattgtatttagatatagttatcattaatttaattttaattacgtaatgacgacaaacaaatttataattttttgttattaatacatttaactaactttttataataataataataatatatataaattatgtttagttataatttttttaatttaaccacaaatttaactctaaaatgaaaggaagatatttttaatttaattatatagatatcttatattatatatataatcaatcatttagttcctgcatggaccacacaaattaatcttaattaatatataattattctcatctatataaaaagatgcgtacgttatcatttatatgttgtgttgatgtctaatcagtatcttttaatttttagatcatttgcatatataggcactgatcagaaagatgagcatgtaattactatcttcttccatgtcaagcacaataaaattaattaactggaaaaataaatttgaccacattaacaatgacatcttcaattacccccttgaattagttaaagaacagccagctagttacaatctccagtgcaatattaggttaatacttgcccccaaaccacatatatagaacattgattcattccatcctcccaatgtggtaaaactctcaggatctctcaattaaattaggagggagcttcttttgtaaaattgcactacatttcctcttgtgtccgtgcttgtgcttgttgacctaaccattttcttcaaccgacttctgttaattctttccacttctcaaggtaattgccttgtatttttcttttgaatttacttatgtagtgcttggaaaatttattatctattttagcagccaattgccctatttgaatctcaatgtttcgaatagaagaccgggtttctaccatgaattggcttattgcatcaccttccacccaaaaattgttgttgttgattagtgggttaaaaattttgttgttgttgtggcctattattggaagaaaccttgtttaggttgattatacaactgcccttattaatactgacgacgtccatcaagataagtatatactcacaatcttttgagtatccataagcttgagctttctccatcggtaaaatattcacatattaattaacctggcaactgtcataagggtgagaccctccacataactcataaatcacttgagcgtaatgcacttgagttatcatcatcttggtcaaggcttttacttggtatattaatttagtgatggcatcaacttcatgtaaacccgccactctcttcgattggcttttctcacttggccattgttgattattcatggtcatctcctcaagtaattcataagtctcgttatcacttttcctcataagagccccatcagaagcaacatctatgagtgtgcggggatttctagtcaacctattgtagaagttttggacctgcatccacttctcaatcttgtgatgggacacattctgatcaggtttttgaatctctctcaagctttataaagagactcattgtcgtgctggatgaaattgttgatctccaatctcaggctgataactttggctggaggaaataacttgaaaaggaacttcagagccagatccttccatatgttgattgagtcaggtggcagagacaccaacaaactctttgctcattccctaagtgataatgggaacaagcccaagagataatgggaacaaccccaagcgaataacatcatagctaattctattcatcttgaatgtttgacaaaactccacgaagttagctaaatgcatatttggatattcttatggtattttctcaaattggactgtggattgaaccatttgaagtatggctggcttaatttcaaaattattggcttttatggcatgtggtcttatacaagaccgaatgtctgtgaatgttggtaatataatccctcaaaaagcagttaggtgaattacgaccattagccaaatcttctacgacacccccattattgttgttattagccataaccgcttcttgttcaaccctttcaacaactctttctaacctcatgttttttctgttttgtatgcaggtcttctcaatctcaagatcaacatgcactcttgcacttggtccttgacgtcgcataaaccaaaagtacctgaaataagataagaagaatttaagaaaaataagtttgcaagaagtagaaaaagaaactaaagtagaatttaatctaattattataatatttatttaaaca

SEQ ID NO: 319495 - DNA, 674 bp, Cannabis indica
gttgcatcgtctgccttaataataagggaacttagaaacctataagaaaattaattaagaaaatcaataaactaataatgaccgcttgaagcgttttctcttaattaaactgtttgaaactgtactgaattctaaaaagttaagttctatttataggaaggtaaaaggactaattcgtaattaaatttattacaaattatacgtggaaaaaaatacagttacagaaaagttacaaccggagtgccacgtgtcactctctcattggttgcatgtgacacgtggcgcctgcagaacaaaggagaaaattgcatttttattgtttgaggaccacagttgaatgaggcccattgcgagcctgggaagtggcgcacacgcacggccagcaaaagtggtgagcggcacgcgcccgtggagacagagagggaataagggttgttggcttgggcaagggttattggcttgggcctgctaagcgaatgagaagaggccacgtggcctctttgtctactggagaagaggatttcggccgattgggccttgttgtttgggttgttttggctcttcaaaaaataccaaattttatatccctaggccatatttttgtcaacttttcattcttctattttatttttacaaatactattttctcaatcaaacacaaacaaaattaaatc

SEQ ID NO: 319496 - DNA, 1517 bp, Cannabis indica
tttccttctctcattagtattaaatttgagagaaaattttatattgtttctcaatacaggtgactaaagtaacataaatcttattaatggtatacactctttgaaaggggtatactacaaaaatttcgtaaaagatgttacatataaaataaaataaattgtaaatacacatataactttcttaaaaacaaataaaaactagatacttatcttcataatgtacgtcaccacattatattgctcgttgtttggagttatgattcattcatagtattgtgtttttttttttactaaagtgtttttttacttcctcaaagtttacatatcgtacttgtttaagatattcacaaagtttaaaaaatttagaataatttaaatacaaatatatgatttaaacaacttatgttatatgcataaaaataaaaaataaaatcacgtatacaataaaattagtttgaatcttttcgccatattaaattattttaaattttttatatactattatataaaacaaaaaaaagaaagaaaaaaaactaagcttaaaaacaatctgaataccgaaaacacaaaaaaatgtgcattggcacactcattttaggaggtgcgccttaaaattccacgattactttttttatgttgatgacataaaagtttttgtgtttatttaatgaaattattattattactttgaagaaaaataaaaaaatttcattaataaataaattagataacaattcattacataataatataacataattaataatttaatgaaatattaggtgttttaatttctataataatcctttaaatgatagctagagatctattaattaatttgatgttaattatatgtttattactggacacatgcataacacacatgacatatggctagtttatattctcatgcctataattttattttttatttttgaatgtcattctataaatttaagtatatgattttttttttaatttaatatggttgacatttttagaaatttgatataaagtttctctaactaattaaattataatattctttcaaaaaaatatcaaaatatataatataaaaaaacatatatttttatatatatggctgttaaaacgaataatttcattaattgtttgtgtatacattaaggtactgaattaattataaaaaagtcaaaaaaagtattccattttattctttatttatatatttttctaataatattttttttatgagaattgctaaaatacactattagtaactagttccttttgaggtgttatattgttattagtataattaagtagcaagtttcatataatttaagaaaataatttttagaaaatatcgctaaattaattgtaaggtgttacctctaaaaggtgttggacaccactattgcctaataacaagggcaatttttactaatataccaaattaacaaactaatcttacagttaccgaatatgaaaaaccgtgtttttgcaaatgtcagttgtatataagaaaatataaaaac

SEQ ID NO: 319497 - DNA, 1059 bp, Cannabis indica
taataaatgttaagttttatgtgatattttataaataaaaagtaataataaaaataaatttttattttgacttcataattattttaataaaattggacaaataaaaaaaaatataaagtatatgtgtagatagtttaaaatttgaattatataaaatttcctatttatttacgtactctcaaatgttcatatgtttttataaaatattattatgagcaccactaagttaatgggtccaactacaagacaaaaagtttgagtactaccactagcaagctagtagtagcttgaacttcacagctgttccacttggccagtttatatattgagaagaaaaatcctttaaagcaaagtttctccagctatgtatttcttacttctcatatatttttttttttctcgaaaagacttggagacagaaatcaagtgcaaaatcctacattgtgctactatactgtccctaaaaatatatatattttgattaaagtccctaaaaataatattagttttcccataaaaaaatttaaattagactataaagaaagaaaaaattattaatttagattttaactaagggaacatcagtggaagttttcttcttccaggattctcgatatcgacacaaaagcattttttttcctttttatgtgggcaataataataacaataagagaaatttcccgtattaattttttaatttatttttttttataattttatttattgtattttaatgtgtataaaaagagtattattatgaactgaggtttagtattacagaattgtggttctataattatttagtaattttttataatatttatttaaataaattaagtagaattagatatttagttatatgaatagaaatattgcatctcataaaagtattaatcaattctttagcatttttcctatacaaaatttgaggataataatacttaaaagttcgtttggaacgttatattaagtcgtattgtattatattatattaaattagattatacatcatatttttatataatactatgttaaactttaatttatactaaaatatta

SEQ ID NO: 319498 - DNA, 1181 bp, Cannabis indica
aaaatgtaaccataatagttacaataaaaatataactattggaacttgaggaaatcactaataatttttaaaatactgaatcaaattatatatttactctagaaattagaattataagtatccaaatgttgattaaatgaagggttacaaacttacaatgatagtattttttagggggactatcgatcttttccaacatctttttatgctctatacaaatttttcgtatgtgtatatcatacctacaactacaatcattcttatataatgcattttcattgtcgaaaacactagacaaaaaatgtttagttatgttacaaaaaagaataataaaactaaaaattattttgacttgataatgtctagtgtacagataaatatctttagatcccttgatcaaattgatttaagatataatttttggtttaagtaatgtatgtttctttcaagggatttaagatatacgttattatgtttagaggacagaataaaaaaaaaaagaagaaatatttggatttaaagttgggttacattggttttggttgtagttgagagaggcttaatacgagagttgagtcttccccgtatgtgcctctctttttcttctgtactaaaacactttgttagacaaaaagacactattttctctcctcattcacccctctctccacgctaaaattccaagaacagagtgattttcttattccttcttcgttatcctactccttcaactccattaattcattcttatctacccatgaaacctcaactctgctaaacaaaaggtacccttttcctctctcttcatatatatctttatatgctatatctgtctttgtttctgcttatttctttcgatgtgtttggtatcatactaaagcttggtagtagatgtgaatcagagtctaacatgaaaacccatttgcgcaggctttgtttttcacgtgactttttcacattttcaagctctcctatggaggttagtcaatattaaatcttcctcttgctttttcacttcttggcatacttgttttaacgtttcagaaggatgtaagtgcttatgcattgtacttagatgtttattaatccattgggtctcaaatgtgaattgttgtttttttttttctggggtttgaaacttttacatgataaaaatcttttggctgtaaactttgggttct

SEQ ID NO: 319499 - DNA, 581 bp, Cannabis indica
caataacaatgctctaataaaaaatagatgtttttatctctatgttgatgattaaaatagatgggttcccttttagcatatcaccatgttgtgtgctaaatctttagttggtgggtaattttgtcttaattcacatattaaattaattaattaataattatcaaggagtattatttttttaacaagatcatagaatactatttaaattttttaacacatatttataagaaaaatttacatcaaaaatacaaaaactcaaaaatattacaccaatacctttttacggttactactacttttttacttgaatattttacatgggatactatttttttttattattattttttttatttttttattgtagcaccgaattattacatttatactgtatatgttttatattgtattttcccatttatgccatttatagaatgcgttttgttttattatttttttaaaaaaaaagttgagacaaccttctcctatacgtttcctttataaacttttacttatattagattttttttttcattctaattctcattctttctctcatgttcattctttttttttttttt

SEQ ID NO: 319500 - DNA, 1558 bp, Cannabis indica
taaactaataccaacaagctccagaactataactaaagtgacaattatacacagcaccaaaattcccaaaatcaagcttaaaacctaacctatgcttactaaaaatcaaaataggaaagctaggaatcaataccttaaattgaatcttctttttcaggtttgcaaactacaaatccagcaacaaaatcccttctcttgctggttttttggggtgcacaaaagagagaggaaaagagagatgcttctaggttttcttcaatttttccttaacctttctttcttttattcaacaaatagtaataataattaaagataagctcataaaaagccagccatttatttcactagaggccaaaacaaaggtcttaaagagaaaagacctaattaaccctctaactaaataaactagctactaactccctagggcaaattagtcattaccaaacccgaaaattcaacaccaaacggaacacctcgagcaaataacatacattagaatatatgagatttgactctctaaaggccccagcgcagctttccacagcttccgaacacaaacacagatgttaggtaattaacataaaatagcataataatatatatgatgtattaaatatattaaatatatttccaaaatatgcatttcataattattaatttaatctcatttatgaatcctaattatttaataatttaaaacattaatcatatgcggtctttacaaagttagttgttaaaggtattagtcacaaaaattgatttttgtgactaaatatatttttattttttagtcacaattgttgttgtgagtaaaagtatattagtaacaatttgtatctaaatattatactttagtcataagtagctttttgtaataactaaaattcacatttagtcacaaaaaatttatattgtgattaaaagttgtcactaaaaatagttattttttgtagtagttggtcgttaatatacactcaccactactaaaaaaactctttttaatgtcatttttcatgtccaacaaaaatagtatcacatatatgttttatattatatacataacgattatagctataatccatattatacattagtctgataactagaatatttatataaaagaacttttaaaaatggtcgtttttaattttaaaatttttaatttataatatctaaatataaaaaaaataattattcctattactattcctaactaataaagtgtgattaagtatttctaaataaaactatatcatgacaaagtggcctacaaaaattttgtttaataaatattattttggaccttgtgttttgcaaaagttacaaattagaccatttattttgttaaatgacaaaatgggaccatgtattttctaaagttatacaaataagattctgaactgattttttgtcaaaatgaaatttaataataatatgatctagagatgttatgacaaaactagttatattttttaaatatgttcgtgttagaaattgtcttaaagttagttatattaaaaaaaaattgttaaaatttgaactcagggtcctattttta

SEQ ID NO: 319501 - DNA, 494 bp, Cannabis indica
acctgtgtgagatttactacttgattgcgtatacttgcgtagcgttcataaaatatagcaacagtctaggtctgggttcgggtcggggtctaaggtctagggtctaagtttgggtccaagtcggggcttgggtccatgtttggggtccgagtctgggtcgggattcggatccagggctcataattttaatatcgtgatttgtaaattgtctaagcatactccttgattagacaattatttatttttatttttttttgaaagaaactcgatactttgtaaactcaattttagtgcaatataatatctcgtattcttgaataaaaaaatattttgttttattttttaaattaaaaattcagtctcatcaagacttgactacgtagtagtaatgatttataagagttacactattccattaaaagaccataattataatcatcacttaattaaaatcaactatagtaatataatattaaattaattaaaaattacaa

SEQ ID NO: 319502 - DNA, 694 bp, Cannabis indica
gtacttatgctgctaaaaataaatattaaatttatgccggttacaaacaaaaaactttccgtacttatacggctatttacccttatttattttatttgttttctccctaaaatacaaataatctcatctccaagtgctcaacggtcattacactctctcctccatatatagacccatcaactccctatactcccctccatatccctacctcttttctttctctatccttatctttttttctctctctctctctgcatagttcagtctttaataattccgccattaaagcggaacctataacctttaaactttaactaaacaaagaaaagcagctaaagcatcaccatgaccaaagacatagaagtaacaggaactcacaaggattaccacgacccacctccggcggcattcttcgataccgccgagctcggaaaatggtctttctacagagccttaatagccgagttcgttgctacccttctctttctctacatcactgttttaaccgttatcggttacaaatcccaaatcgaccctaaagccggcggcgaccagtgtggtggagttggtattctcggcatcgcttgggcttttggaggcatgattttcgttctcgtttactgcactgccggaatttcaggtgggtttttcttttctcgatctacagtttaatttcctttttcttttttctttt

SEQ ID NO: 319503 - DNA, 664 bp, Cannabis indica
ttaccaaacacctttttgtcacagcttttttgaaaagctagcttttccaaaagctgtgccaaacgggccctaattacctaaacttcatttaatgttaacgaaattttaagttaacacatacgtaaaatataataatttgtgtaaaaacctaaaagaaacataagaccccaaactctcaatacaatcaatccataacaaaatagttgctattagagtagaaaattacacggtatactcatttttcattttttattttaatttttatcttcattttattactctttaacttatacccagttttataagttatattctcattatgtgcgttaaggactctaattttaataagttatgtgaggttatatttagtactttgattataaaagaaagtatttatcaattaaatatatttgattaatatgtaatgaaaatggtagttatcaatttatcccatattagagagtctagttgttcttgggtatgaaatatgggtattcacttggagttggaccacttcaatatggaccttggtactagtctaattagtaagggtatccatatccaatattatttagcctttgcccatcagtatgctatttcttctactcttaaaaaaagggaaacttacaaaaatactggaatttgggttaatttttacaaaaat

SEQ ID NO: 319504 - DNA, 1369 bp, Cannabis indica
tctctaaaggccagattatgtctatgccaattagggtgaaaatagagagttgtgtgttgacttagtagagctagaaccaacagagtttgatatcatacttgggatggattttctgtccaagtattcagtcagtattgactgtaagcaaaaaatagtaatttttcaacctgaggacgaagatccatttgtttatgttagatttgttcagggtctcgaatcccgattatttcaattttaagggctaaagatttatgacacagtggatgtgtaggattcttggcggttgtaattaattctagaaaatctgaaacatttggccccgaggaggtcaaagttgtaaaaagatttcttgatgtttttccttaggagttaccgggatcaccgccatagcgagtgatagattttgtaattgatctggcacctagggacaaaacctgtttcaaaggcaccatatagaatggctccaacagaacttaaggagctaaaaatacaacttcaagggatggtggatttaaggtttacccaacccagtgtgttgccctggtgagctctgattttgtttgtgagaaagaaggatgggcccctctgaatatgcattgattaccgggaatcaaacaagctgacaataaataataagtatgcattgcctaagattgatgatttgttcgatcaactccaggggaagactatattttcaaagattgacttgcaatttgattatcatcaactgagaattcaagaggaagatatttcaaaaaatacatttcggaccaagtatggtcattatgagtttttggtgatgtcattcggattgactaatgctccaaccacctttatagatctcatgaatagagtattcaaggatttcctcgataactgcatcatagtgtttatcgacgacatccttgtgtactcacagatagaagaagaacatgagcaacatctccaaatggtattacatcgatttaacaatcacaagctgtatgcaaaatttaaaatgtgtaaatttatgttgtcggaagtgtccttcctagggcatattgccggaaaagatggaattatggttgatttccgaaagatcaatcagtcaaaaattggccaaggccaagaacagtgactgaagtgcaaagttttctcagattggtagggtattattgatgttttgtcgaaggattttctaagatttgaataccactaacagtttaactaagaaaaactaacgggttgtatggtccaaaaaatgtgaaacaagtttccaagaattaaatcaactgttgatcacaacaccagtgttagctttgtcatcagaccaaaaaaagttcatcgtttactatgatggacccagacagggtctgggatgtgttctgat

SEQ ID NO: 319505 - DNA, 609 bp, Cannabis indica
cctttatatatgcttactcagggtcggccctaggcataagcgggctaagcccgcgccaagggcccactcatttttggggctcaaattaaaaaataccttttaaaaaatatatatatttttttaataatttttaaaaatgtcatttatctttatagtaagagcccaaaaattttattttgcctaatgcctctaatgattatgaaacatattttcactactccgatcacaaatgaaaacgaaaataggtgatctcaattctcacatctaggctctattatttcatgaagtttttgttgattcattaatttcttttgggccgagttgacgaggtctaatcatctaggtttgtatgttgcaccatgaatgtgtaagaatcaccatgggtaagtgtttgcggtgttattgtgccctttaaacggtaaaactgtgagtagcctgaaaagctgttggaagacggaagagttgggaaagaaaaaattacaaccacagttgggctgggctcccacccgtacccatataattaagggattaatgagaatagagatgttcatccgatccaatctgcactttttttggtcaaacaacatccaattcgcactaagtgcgaat

SEQ ID NO: 319506 - DNA, 592 bp, Cannabis indica
tctagttttttttttttttgcagatcaaagcttgtgtgggtttaaatctcaaagaatcaataactagaggtatttcgatccttaaattatgtcgtgtatatattcgtttattcctcattttatatacacatttatatatttcatctatacatataaattttctaacaacaatcagtagatttattcatcatagcccacatagcaagacaataagctaccttattacaccctctagaagagaaacaaaatctatacaaccaaaattcaaataatgcagacaattatcagctaaaataagacccctaattgtcttggacattctcactcagctgcaaccctttgatcacagtgggccagtcagacgcaacttggacgttctgcaggttccattttttcgccacctctaaccgtagtccaatggatataacttcaaccaaaggaatcgagaagcacctctgcatatatttggtgtcagccacaatcaagctactcttagaatttttaatgttgagaatcatggggttccatcttaaaaccaattaataatgagtggagtagcccatgttcttatatatggctcaatacttttaca

SEQ ID NO: 319507 - DNA, 1320 bp, Cannabis indica
tatgttttaaaagttgtaaacgggatcccggtacttgtaaataatttcataaattataaagtttaataatcaatatgaaagttttaatttgacacgtttttcaagaaaattctttgattagcaaagactgcattgtaattggaaaagcattgtagcgtgccttagctttagggcgttacagttttctaggtcttacctgctattactgtaagtttgtacaaggatatggtagcattgcccgtcctctcacggatcagcttgaaaaagatgctttttcctagtccccctcatcccaaatggcctctgaacgattgaaggaagccatgtgcacagttttggttttagctcttcttgatttcttcattccgtttgtacatgaggtcgatgcttccggtatggggcttggcacggttctgatgcaaaatgggcgtcccattgcctatttcagccgtactctgtccactcaggcccaatcgaagtccgcttacgaaagagaattgatggccattgtcctagccatccagaaatggcgaccgtatttattgggctgcaagtttcttgttcatactgatcaaagaagcttaaaatacttattggaacagtgtgttgtctcccgaacatcaaaaatggctcactaagatcttgggggtatgactttgatatccaatacaaacttggtttggagaaccgcgccgccgatgcgctatctcgtgtttcatctgaggtatacttggctgctatttcaattcttggtgtgttttctactactgatttacaagctactattgtagccaatcccgatctcgcaaagatcatgtcagacatcgctcaagatcaagattgtggaggtttttctatcactcatggctgtctcactttccatggatgattagtattgtcagttgcctctccatctatcccactcttaatgcaagagtaccagcaataaaatggggggccattctagggttttcaaaacattcgagcatctcgctgctaatttttattggcaaggtatgcgcaaagatgtccaaaacttcattgttgaatgctcagtttgtcagcaaaataaatacttagctcaatagccggcgggtttgcttcaaccccttcccattctcgagcaagtgtgggaagacatatccatggattttatcgagggcctcccgacgtctaccagctttgattctatttttgtggttgtggatcgcctcaccaagtatggacacttcattcctcttcgtcatcccttttcaaccgtcaccgtggcagtggtgtttgtcaaagaagtaatcaaacttcatggctttccttgctcca

SEQ ID NO: 319508 - DNA, 916 bp, Cannabis indica
aataaaattaagggtatttttgtcaatatacaacttatttatttgattacaatgttcattacagagttgaaccaaacatcataataccatttctattacaattcttatttcattacattaccatcatattataattaccattaccattctcattacattacattacattacattacatcaaagcaaacaccacctaagtgtctcccgaaccttgttcctagacagttgactagccattccctagaaaggagttccagcgcgctaactagttgtcactcctcgaatggtagatccggatagtcgactccaacagactttatcctatccggaagcgtcttcagcgtggtcctccagtctagaagctcgtttatgttcccgggagccctggtacttaagctgacgtggagacttagctaaagaggaattagttaagttagttatttctaactaacttaacaacctcgtttcttgcagccaccgactttgggatcttgatcctaagcctataaaaccaccttcacttatcattttgaagatagatggaataaacgagtttgagaactctgttaaaatgagattgagaatttgagagagaaaatattgagagataaagagagaggtgcagagaaatgagagagattgggtttaggttttataagaagaatcttctgtgaatgaagagatttttgggtgtaagtgtgaagagttgaaacactttgtgagaactcaacagacaatctcgtctcgactatattgtatctattcttgctcaatcaataaagaaggattacgatggtgttccagaactggagtagagccatagatcacatcgatctatcatacttgaactagtatatatcttggtgttgatttctttattttctgcatttattgtttttggttttaatactctatt

SEQ ID NO: 319509 - DNA, 764 bp, Cannabis indica
acttacttgaaataataaaaatgggttgtaaaatgagcattaatgtcatacaaaaccctaattaattagataagaaattcaaatagcctttctccatcttacaattaggccgtagaccattaatgtcatcatacctgtcattttcatttctttcaaattttaaataaaataataagaaaagctatattttatttgagtcatatttaatcaattaatttaaaattacccacacaaagttttagtataaaaaaaataaaaagagttaatttaaaataacaagttaggacttattagaacagaaaacacaataattatttattgtgtatagttcttctcttctaaccaaacatttggttctatacgtacatatctataccacttaatttaaaattgaataattattaattaagaccaaaaatcaaatcaattgatacacaataaataaagataaataataaatgaatagtctagtttgatcaagactaaaaatttggtacttattagtttggtggttttgatgaagaaaacagagttaatttgtctttgtctacaaaaatagataagagcaatatcagtaactttgtcctaaaagagttaagtgatgaacctctttcttcatttcagagaaaaacagttttttttttttgagtctttattactttctcaggatcactttattactgtcttttatttttttcctgttgcattcaagtcactcataataataataataataataataataataataataataataataa

SEQ ID NO: 319510 - DNA, 756 bp, Cannabis indica
gatcagtgctagctagttgaaattttccattagtgtcggcggggtctaccacattctgccattaacaccgtcgaactccaagagcgagagaaagagagagaaaagctcccgagagggagatggggctttggggtttcaggatcctctgaagacgacggtggcagcttcgacgattctctgaaggcgtgggggttctcttgggtttagatctagtgggttccttgggcaaatagataataaatttctggagttctttttatacttttgataaaaagttcaaggtttattttggatctgatgggtttgtggaagaatgacccattaaatttttgaatttttttattctgcaatttgatttatatatatgctgaagatgatgaacgagagcataagaatatctggtgttgtttattttttcttttgaagatttttttttgtaagattgttttaaagaattgattttgatattaaaaaagattagtcagatattgtttcgtaagttgtttttaaaaagtttctttatttttttttattttacttttaaaatattattttaattttaatgattcttatataaaattaaaaaaatgacttggacctattaaatgatgccaagtgtgtacctagttggcatttaacagataacttaacgttaggtaccccatttgcaacaaaatattgacggaaggtatttttaccaccaaaaaaataagttaggtatttatttgcaactcaaagttaaacttaagtatttat

SEQ ID NO: 319511 - DNA, 814 bp, Cannabis indica
tgttgaataaaatggattacattgaaatggaattttatttagggcataaaaacccaacacacctcttctttaagtctccatatagaaaggcattacagacatcaagttgtctaataagccatccttttgtcaaagccaatgtcaaaaccacccttattgtaataggtttaactactgtaaatgtctgagtaaaatcaaaactattttcttgatgaaaccccttagcaacaagccttgccttgtgtttaaggacagatccatctggattttccttgatcctgtaaacccatttgcaaccaattactttcctttctggttgtaatttgacaagagtataagttttgtttttgaccaaaactaaaactttatcactcatagctttgttctaaacaagttgactgagagcctcttgaagatatgttggctctctggtaactagtagggctttaggcttgtgtataccagacttggatctggttgtcaagagatttatgacaactagaaactgtagccttgttatttgcaaaactaggagcaatgtttgtgttacctgtgacagttatgtctgtaccggtagcaaattgaatactggttgcagtaagaggctcaacaatagttagaacttatgtgtccagatgttgatcagtttaagaaccaggaggctcaaggcatgttgtgggagaagagcctacttcacatgtttctattagtgaaggatgtggagtagatgttattgttggatatttattttaccaggatcttagatctactcacaagtatgttgtttaaacaccctaaatatgaactttctaaa

SEQ ID NO: 319512 - DNA, 998 bp, Cannabis indica
tttattaactaaattaattttattaattattgggcaatacttcatgtgacatgtagctataaatttattaccatttttttagtttgaggattgatgcggtgacatacactatataattgctcaaatttatttatatattttctatttttttatttcaattctcatattgtttttttttttttcaattttctctaaaattcacccaaataagaatatattatgcacaaaaatatcttcttactaaacaaattcctctgcaaaattacaatctataaatatttattaaaacaaactaaaatatattcaattatataatacgcttaacaaaatttaacaactaaaattgatcaaaaattacaatttataattcatttaataagaaaattaaaaatgttttatacaataaatatgaaatatatataactcaaataaactattttatatgtctttttttattttacatatagtttgatatctatttgtttttttgttttaagaaaaaaaaaatcttgaaatgataactaggaaaatcttggcatagaacctttaaagaaaaaaagaataataaggaaaggaaaattttactttttgaccctaataaaatactgttggaatttattttactaggatcttagatatactcacaagtatgttgtttaacataactacttgaggttagctcaagtggccatagatgggtgtgtgagtattggaggtcctgggttcgagtcccaggttaaacatgttgtaagatataaacgcttaaataaaaaaaaatatgttgtttaacaccctaaatatgaactttctaaaacgataaatatacacatataaagttaagaaaaccttacattgatgcagcggaatcaatgtctccttccactcagatctctaaccccttgtatcctttctgtcgcagagtattatcaagatctgagcccgaatatcgttctctttgtgtgtgatcccttcacagtcttccaatctatgattgaggt

SEQ ID NO: 319513 - DNA, 1144 bp, Cannabis indica
cggacaaacgagtcattcgacttcgttcgttagttcattgattcgttacgggtcgggtacaacccgcctggttgacaaacaacttaaaaacaggaaattattgaataaataataaaaaaaaaaattataaaaatatgattttacggaattttaaatagttttacaattttttttgattttattaacagaaaatacagtctttttatgttatattcttgttaaattgttgttgattttttattatttgtatgtcattttttgttgttatttagatgttattttcatgttacttttatgatgatttttttgttgttttcgtattatttctataaaaagtataaaaaatgtaaaaaaaaaactaatatcttatgtaattattccaaaaaaacaataaaaggttaaagcaaatatatcaaatatttttcttttgaataaatatcaaataaacttttaaatattctattaccaaagcaataaacttctaaactccaagagcactcacattagaccgatttataaattttttcctaaaaaagaaatagataaaaaggtgttacatcaataattctataatagttagcaaataaagaatgcaataatacatttttaccgatataaaatcaatatttattcaatgaaaacatattttaatatttgttttatatttttttttgaaaacaaaaaaaaaacatattttaatattatatattattatattttttcaaaaatactttaacaatatataaatactattttattcatattttaataatatgatagtatatacattaaaagtacatttttaaaagaaaatttgcggtaaaaatttcttaaaagttcacattaatgtagattagtccttaatttttaaaaataatggtaatctgaggtaccaagtggcctcagtgtttaacttgtttgatcgataggttggcctgaaacttcagtagtggtgaagttgttgggatgtataacacctcctaaagaacggtctggtaggatctagccttctaccgtttgtcccacagtttgtggccttggattggacggttgatcactgtgagtttgtgtagtatgcccaactgcatacccttctaatctgcccaagggaattcgggatgcaatagttgttggaaatatttta

SEQ ID NO: 319514 - DNA, 1107 bp, Cannabis indica
atttattttttccccacttaaatcaattacaatagttgtgaaaaaaacattgtaattgacctatcttagtgatttataagtgtcgagattgttacctatctcggcagtttactatgtaaccgtcgagattgctacttatcttggcagtttcgggtgtcgagattgcataaacgtatgagaagatggcacacctatctcggcggttcaaggtaaaactgttgagattgcttacccaatttcggcgattctcaactaccgtgattggtcatgactattgcagcaattagatctctggcggtcgggaaccaccgagatagggaaaatttcttgtagtgtgctaaaaataagattgaaacagttacttaccatgtatataagaaaaaacagtcatacttgcaacacaatatttgaactttattttcgatattataaattattctaaattttttaaaaatttacaagtagtcctaaataattacaatgatcatgaacaaaaattagattataaagctctcctaaataccaaaacagattatataatatttgtacttttcaattttcaacgacatcattgctgccttacccaaataataaaaaccaataaaaatatacgaggaagactaattaacaaagaaccactaaaatagggaaaatttcttgtagtgagtgataaaaataagattgaaacaattatttaccacacacataaaaaaaaatagtcatacaaaaacacaatatttgaactttatttttgacattgtaacttattctaaattttttaaaaatttaccggtaattttaaataattataacatgatcataaacaaaaattagattataaaattctccacaatatcaaaagagattatataatatttatacttttcaatttccaacaacaacattgctaccttacccaaataataaaaaccaataaaaatatataagactaattaacaagtaagaatggtaccgtctgtcacgaaaagaaatgtcaactgccttcatcaactattgagtattgtttttctaagaaaaaaaacctattgattattgaccatgtaaatgtaatttgtcaattaggggtggacaacatccaatttaatc

SEQ ID NO: 319515 - DNA, 1128 bp, Cannabis indica
ttgtttcccagatttgtttctattgtgtctgtcaattgattgacaatgacggttcgaattttttaccatgttgggtttcgcagcctattgtgtagttgcagctgaatctgccggtagacaaattcctattgctttcctggaaagagttaaggaggattttaacaaaagatatggtggaggaaaagcagctactgctgttgctcatggccttaacaaggagtttgggtattaaaattcatccttattcctgaaaatgtagcattatgttctacccaacatgctaactttttaatcaattttggttttgcaggtccaagctgaaggagcatatgcagtattgtgtggaccatcctcaagagatcagcaagctttctaaagttaaagctcaagtgtctgaagtgaagggtgttatgatggaaaatattgagaaggtaataaaacagctccctataagtttgatctgaccttagaaaagagcgaattgcaacccgtgaggggtaagctcaaatcgttaggcatgttgtttgctcccacatagctattgatgtagtaacctggtccccaaatattgtaaggttcagcgggaattctagtttcaaaaaaaaaaaaagtaaattacctgctttctgagatctatttggttcattaactaaatgaattcgatttgtggtatcctcggtttcttgcaggttcttgaccgtggtgagaagattgaattgttggtggataaaactgagaacctccgctcccaggtagttattgagcttcatattgtattcaaacatagttatttggtccgaagtttgggttttagacgaagtcgattgtcatggtctgatattttgttacaaatgctgtgttgcaggctcaagatttcaggcaacaggggactaagattagaagaaagatgtggctccagaacatgaaaataaaattgatcgttttgggtataatcattgccttgattctcattatcatattatctgtttgtcatggtttccattgttaaattccctagaggggtatccccgggggtatccctggactactcttctgccgtctcgctgctgcatctgcatctgaacctccacgctgctgtctcaacagcatcgtttttcgctacatttc

SEQ ID NO: 319516 - DNA, 1153 bp, Cannabis indica
tgtgtgccttgtcggagtgaacttcagcttatgttgtttccctagaacacaagcttcacaaaattgtaaggcacaagaatttaaattttcaattataccttgcttgtgcagttctttgaggccttgttcactgatatgtccaagtctgtgatgccacacctttatgtcagattctagtcctttcaccatacttgcttctccaactgggacagtttctccttggggaatatataaatcattgatttgttcacctttcatcactaccaaagaaactttagtgatcctcaagcttctgtccatggacttgtatccgtatccttcgtcctcaagcgcacctagggatatgaagttttgtctaagatccagaatgtgtcttacattcgtcaggactttgattccgccatcatactattcgatgaccacctttccggttccaatgaccctgcatgaatgatcattgcccattaggtctttacctccatcaactgaattataataaaaaaaatgactcttgattaggacacaaatgataagtgctttcggaatcgagaatccactccctattcattcaggattttaagatagataacaactctccgttcgtggagtagtcgtcactatctttagtgattgcaacagaatccttcccatggtgatggtgtcggaagtccttcctatctccattgtgagatttgttgaagccttgttgctccttgtacttcttacaaaatctttgaaagtgtccagactttccactaaagtaacacttccttgtgtccttctctttggaattagatcttgattgagaatgatggtgtttactctttgaacttgctttcttaggtgatcttcctcttgccaaatacacttcttctttcttagattccttctccaactgtaattcaaaatctttcgacttaagtgtggcaagaatatcttcgaatgcaattacgtctctgccatacttgatggctgccttaacttcttaatatacgattggaagtgatgtcaacaggatgatggtctcgctttcttcatcaaccttgtaatttatgttagccaaacctacaataatctcattaaatctatcaatattctcatctaaaaaaagggaagaaatcattataaaactgtataacctttctagcaaatt

SEQ ID NO: 319517 - DNA, 1770 bp, Cannabis indica
cacaattttttcacttttaatcaaaagttttaatgtgacttaaagtaagatttttttgtagtgactaacgtaatttttaaagttaagatcatttcgcatgtcaaccctattatctaaatgagtttacttttcatacacacgtggacagggctatttcattaattataaagagaatactaaaagtagaaattaaacgggaattaatattttagaggttttttcaccacatactgaaattttcaacttttttactattttattgtgggacaaattttttttcaaaaatactatgtactatgttaagtattcactgttgttccacaattggttttttagttgtttgttgttttaattgttctattttgttgttttacagttttttttgtaaaaagacagtatttttgtaaaaaaaaattgtgtgacagtaaaattataaacttttttctcaaaattcagtattattgtaaaaatcctaatattttaagtgttcataaatttacgacatttttttaatttatttgggctatggacattttacaatatttattttttttatgttttattttgccacatttttgtaatatctttttgtattcccaaataatccagaattcttttgccttcgagtgatgctagaattcaatttcctttgacattctgccatcgcttgaacaggctcttcctctccaaaccatctgccattggcatagtcagagatttgagggagccaaatcctgagtgactcatgcaacgaatcgattcgactcactaagtaactcaatttggctatcgaatcacaacagaaaagattcaacacttttttcaaattaaggcaatttaaataagaaaatggtggatctggcgaacacgccacttggccaaatgctattggacaagatcaatcctactatgatggactcggcacgccgctcgtcgaagaagcttgtcttaagaatggcatcaacttcgttcaaatgcttagtcccttttggagcttcaacaacatcaacagtaaagccttttcttttgttaatgtgtatatttgtatttgtgtatgtacacatatgcatttttatggtttggaagaagaaatttgatggtttgacttcgatttattgtagtacctgtatagacagctagtaatcaatcttataggttttagaaatcaaggcacaataattttatgctttaaatattgagcaaatgaatttggacgtatgtactacatgtattaatttccccattgttaacctcaaatttggccaaccgacagtggagtcgtatttaatactgatgcttgccatgtgttacacaataagaataataaagtaaaatagacactagatattatagaagtttagcctcctgagttagcgggtaatgacctactccccttttggttgtattgataccagagataatatcacttagatcacaatagtagtgggatctaaagaggctctcctaagattacaatgtgagaaccaaagttagaaaatctcaagtgagagacagagagagccttaggcatgcagaaaagagagggagagggagagttaaggtttcacacttagagcttaagaggttttagggcgctagagacttagtccatcagggttagactaatgctctttatatagtagatcttacatgaagattagccactaatatcccttaaaaataggaagataaagccttatttacataatgaaataataaataataaacaggataattatccctcgaaaataaggaagttgctaatatttt

SEQ ID NO: 319518 - DNA, 548 bp, Cannabis indica
aaacatttcgtttcaataaaatcccacaacatacagtaagacaatagaaaaaaaaatgatcacatgaaaaaagagaagtaaaattaattaatttgagattgacatcacataaataagaaaaagcaataactaattacaagcagagtttatcaactacaaaattacaatgaagatcatacgacatgtggagatttaaagattgagacacaatctagcataatagaaagaaagagaaaaaccataaataagaaaagataaaaggagagatatgttagggaaaaggaacaggtgtgaagggagattgttatcagaacttttgcctacgccagaatttcgttgggcttcgctggacaataatgtacagagatgcaaaggctggttatgatgggttgggtagtgtttacttcatcagccaatatatagtttgttttgccatatcgttatgggtgggagagacacaaagaataaaagagaatgagaaaggtcagaatttattttaataacggatattactaataaattacttgtaattaaaagctaaataaaaa

SEQ ID NO: 319519 - DNA, 804 bp, Cannabis indica
tttattgataacattaatgatattttactttttatcataatttacaatataaaatgctattgcacgttggagcataatagtaaatatagcattacttatttttgtattaaatttatcacaatatttatattttatattggagataatcttagaactttatgttttacactttagagcatttccaataaagtgatatgcactttttagttcatgtttataaaattgaattctatattaatagtagtgtacaatatatgctaaatttgatacatattaaaagttacacttaatttagactgcttgtgatgcaagatgtaaatattatgctaaatttagttaaaaaaacaagaaaatgttacatttgctacaattttaattagacaacttttgctattagagtataatagtattttaagttgtaaattatgacaaaaagtaaaaaatcaatgacgatcaattaaatatttaaaaaataactagtgataatattataattaaaaaatatacattaaagcttttcctgatcaatgacaaaattgtaactaaaaaaagaaataattacataaaatactaatttttgtaaattttttacattttacattcaaagttttttttttttattatatatatatatttgcggtattctataaaaaaagaaaaaataacaaaaaaacacataaaagtaacaaaaaaataataacaaaacaacacaaaaaaaaatatacaaataatagaaaattaacaataaaatagcaggagtacaacataaatatatcaaaagatcgttttttttttttttttgtt

SEQ ID NO: 319520 - DNA, 859 bp, Cannabis indica
tggttcggatgaggttccaggtacgagcgtgaagacgtacggttaggctcaccatagaaaccagtgaggcgccaaggagaaagattaggcacatggacttcaaggcttatgtggttttgggtatagttgagaagatgggcttcattagcattcttccaaaagatggcaagcccacccgatctgcctataccatccacagaatagcaagcttcaaagcccaacttgcttttaactctattcacaatagttttgtcacataaagtttcacaaaggaacaaaacttgggtttcttgtgagtacaaatgtcctcaaggaattgttggggcccgtgggttcccaagcccacggcaattccaactaatggtactcatgatgataggtgggcctggacaccaggacccaccttttctccattttttggcagcccaacatcattctcaacagacaagttgttggacaaggtaacatcttccataggcacatgtgaagtggccacgttctcatttatgatattttggcccattctttttctctttaggtccaatacttccatctctttatctgatgagaaagtggaaatattttcattaatgataaaggttgtgtcattaggaccaagattttctcctcccgaaatttcttgataagtaatatccctaatatttgcctccgatcgtgagggaataatggtgccagcagagttaactttgccttcattattgcttaccggaatcatgttcttccccgtccgtagccaagtaaatgcggtaaggaagtttttacgtttatttggagctttcatccaaatcccatacggtttctctatctgatctggtggtgtatgttgggttttatgccc

SEQ ID NO: 319521 - DNA, 1320 bp, Cannabis indica
agtttgtatgtatatatgtaaatggttactaatgtttggattttgatgacaggttatggctattgaggaaagaaaaattgagtccatcttgagagaaaggagggagaaataagaagaaataaagtcaaactctcaaatggaaaaaaccaacttgaaactcaactcaactcagccttaatttttgattatttagatgaaatttgtagttgttgtgttgtgtgggtgagaaagtaattatctttggtgaaaaaaagaagaaagaagaggatagcttagcttagcttcatcatcaaatctttggattgcggcaaaaaatttgtagaatttaattttggtcataaaataattacatttttgtagtcaatgttttctttgccatttttaaatttttgttatttaacaagtcaccaacagcaaattataaatttggaacatgtagtgtagtaaaattaaaaatcataaaaatatatcaaaatttaagaagttaagaattaagatgttcttttagtattattaggtgtgtcatggtaaattgcagcacttgtaaaaaatatgtaatgttttgagtaatggaattaaatttaaaatatataaaataaaaattaataataaattattaaatatatattttaaaatactttttgcaattacattggttgaattttttagtttaatttttttttttagttgttatgttatttaaaatattttgtaaaattttgaaaaatttaaaaaaaatttaacatcttaaaaaactagagtttagtttgttgtacttaagtttttttttattttatatgtgaaataagttatttgaatcatgttttctgtattaatttttttttttgaatttcttaaaattttacaagatattttaaataattatgatgtagaaattctcttaaatactaattaagattatatcagtaaataccttttttcattttgtattagaatggtacacaattttttttttttttacaataataaagggcctaattataaactttgcacaagactctcaaaatacttgggttagtctttcgtgctatacaattatagacatgatattaatcttttttgtttcattattcttctgttttttcataaatttttgttaattattattttatttatttttctaaattttacttaagagtaaataataatagaaaaaattatataagcatacatttagatagaatgactgacgactttcacttcaataactgaatctataccataatatcattatttaaacacaattttcgttgacgattgtttaaatataattgataaaagtaagatatatgattataa

SEQ ID NO: 319522 - DNA, 1522 bp, Cannabis indica
caccttcaatagtgattttaaacatccttcattgttcaattaattagaaacccttgagtgatagagtgccatgcccacacatagcaagtcaagtactcaatcatagtgagtaagatggtgataaccaaacccgaaggagagaaagagatctaggtttagatcttgataatgctttgcgacagaaaggaatcaagggctagagatctataacgggaggagtcattatattctgttacaaccaatgtaaggttttctaaactcttatgtgtttaatattattgttttatagaattcatatttaggatgctaattcaacgtacttgttagtaaatttagatcctggtaaaatattcctaacaatatctggcagcaaaacttatggccatgagcgagtttggatgttgtaggattcgccaagcttgcttggcaagcataacctaattaaagtggacaagcaatcaaaatcccaaacaaccattttgtttggagcggcaaagcttttgccaactttgccagtgggtagagggtttgttgttggaattaaaaccccaccaaaggttaaccataatggactctaaggaatgacagattgcaacagggagcctgaaacaagccatagtgtaggtgggaatggctggaacaacagatttaagaaggacctctttaccacctttggagaaaaccttgtgttttcaatttatctttgattggccaatgtactaaggaagtcccagatatttctcaaagtatctcttccatggatacccatgaaatctgagattaaggttttgtccctgagagccgtgtttggggagaaatagagcgaggatttttgaagcttaacttgttgcctcgtagctttttcatagttgagaaggatttccttgatggcattgtaggagttgatagaagcgtgggtaaaaagaatgttgtcatctgcaaagaaaaggtacaaaatcgtcgggcagttctggcaactcaaaaaccccgtagagactaagatctttcttactgagagatgagggaagagaagccttcagaacatatgaggaagatatagggcgagagggggtcaccttgtcggatacccctcgaggggctaacagatcccgagatctgaacgttaatattaaacttgaaagtgaccatagtgaggaaattgagagactagattagtgaaggtaggggaagtggaatttttccatgatggctctgataaaactccattccactttgtcgaaggctttagccatgtctaattttaaggtcatccagtcagttttatcacttgacttaagtttgatggagtgagtaatttcctaggccactaggatattatccgagatgaggcgtccttggaggaaggcactttggttgggagaaattaatttattgaggactaattttatcctattagcaattgtttttgaaataattttgtaagtgacattgcaaaggctaataggtttgaagtccttgatagtggttggtgttgggttttatgccctaaataaaactcttt

SEQ ID NO: 319523 - DNA, 971 bp, Cannabis indica
tcattaattgggtaaaataattaggtattttttataatatctgcaaaaatactattttacagtactcatttcattatttattgttcattaattgggtaaaataattatgaacaatacagttaatcttactcggtattgacatatttgactttaagcgttaatagtgaacactacacctaaccccactattctgacatattgtattttaccctattagtgggtgttttgcaataaatattagaatagtgggtattggacaaaatgcatgtcccttttggtagtacgcgcactccccaaatctaatacaagggacaaatccttgattcagtgggattcggagtcagatgtaggattgttacaattcaagatcccgaaatctacttataaatatacatagcatatacaatatcaaaagtgtcgtctaacggcataatcaaaagataacagtgatatctcgaagatcgcaacactccaggcttagtcgaccaaatatatcactatgatattttgtcaatccgtcgagtttctaccgttatcgatcataaacatatactatatacatatgacacacatacaaaatttctcataattaattataaatctcatatttacctattttggaataataagtctttattttctaatgcacattatttcataatttaatataatattaattaattaataatttttttatatctaattatgcggtcattatattgtcacatattttgagcttattcatcattgacaataatacaatatagggtaaattgtaacatccccgcttcaagcctccattgggtccttacacccacggaaataatggctcttatacacgagtatgtcactctggctgcatcatggactgatgattgaccctacagaccaacacgagtgttttcagcgtgctttgtcctcactcgcacgcatcctaggaaaacttcccaggaggtcacccatccttgaaa

SEQ ID NO: 319524 - DNA, 855 bp, Cannabis indica
ttttttatatttatataatggtcggtcggttttggaattataaccatgaaaattgaaaatcgtaattttggtattttttttttttttttttttgtgtaaaaaatcaatcaaactgaccgttgctcactcctagatcaaattgcaattgttgattcatgccttttttttcttgttggaaagaaaagggggaggaggggggtaccagtgtggctcccctctctgggattgccaagagagcttcaatcgtgtcccatttacgatggggtgcgtcaccagaaccgcaccgaacagttagtggtgaatgtctttcctaaaggaaagggtttgagaaaatgggttggcaccaaaggttcacatttaaggcatcgccatccatgttcgaacccatgacctcattcattgttggaacatattttatcacgatctacatttactagcaagtatgttggattatattctataatttaacaccttaaacatgaattcttaaaactgaaaataaacacatataaagtttagaaacccttacattgctggcagcggaatgttatgattccttccgtttagatctctaacccttgtccttttttgtcgtggagtaataacaagatctgaacctagatttccttcaagtgttagaattctttacaatttttcacactgtgattgagtacttgacttgatatgagtatgcatgtactctttactatgagttcgaaaactgatgaagaagaagagaagggattttgaaattgctatacaaggaggcttctttttttttttttttttttttacaaaaagaataaaaattaggttattagagttatgagaatgagagccatcttattcttttta

SEQ ID NO: 319525 - DNA, 606 bp, Cannabis indica
ttggtcccaagtgtattcttagaatatagaatataatttacttggtcccaagtgtattcttggatagaggttctactgtaaatggttacgagaacaccatagtgttttagattatcataagtgggaagccatttgtgggcaactttccacaagaagtgcttcactttaagtgggagattaagatgttagactttatcccacaaattaggagtaccgctagaactaaaatcttgtccaataccaaggacacgggttatatgccaatagccactcttaactaagtacaagtccaagttctcaaaatgccaaactaacaaattatttaaaggaatctgcgctcgggggataacaagaatagcacctgcctcattttttgaaaatttgttggtaatcaaacaactatgggcggccccgatttaccacacgaaaggccactcaataaattttcaagaggtcactcatcctgaaattacctcaagttaatagaattccttcgtgatgggttacaaaaaacaagacacaccttgttaatataggtagtaccaatcaatccatttaagctctcttcaactgtgtagtctcatacctacacagtcttaggatcat

SEQ ID NO: 319526 - DNA, 804 bp, Cannabis indica
aactatcatttctttaatccttatgatagtccatcttttgcttgttgtaatgccctttacaagtgttctaaaaaatattatgcgtgaggctttcagaagtgctctcttacttaattcatcttaaccagggtgctttcattaaaaatagattaatgacacatactatccttatatttccagatcttcttaagagatacgctagaaaaatatttcagctagatgtttgatgaaaattgattttagcaaagcgtatgacatagtagattggaactttgttcatgaattacttaagggtttgtgtttcccctctcagtttatagattggataatagtttgcctaaaagggtactacttatttgcttatgatgaatgagagaattcaaagtgcttttaaaggagaaaagggtcttcgtcaaggagatcctatgtctccactcttgtttgttctcatcatgaattatttgacgaggttgctttaacaagtttcaagcaataatgcctttggatttcatccgctttgtaagtccttaaaactaatcaatctttgttttgctgatgatttagttatcttttgcaaaggcaatgaaagatcactaaaccttgttcaaactgctttcaacaatttttgtgaggccacaggcctttcgaccaataaattctttgacttactttgggggagttattgataactgtaaaaggagcttgctgaatactttacagatggaagaaggttcatttcctctcaaatatcttgggatccatcttcgcccaacaatatagagagcctgttaggttatttttagt

SEQ ID NO: 319527 - DNA, 3069 bp, Cannabis indica
tcagttttgagcaccaggtgccccaggcacccagtgcccaggttaacatattgtcaacctggggtacttccaaccataatactaaagaactatcccaagaattttcttcgtcttcattcaaaatgaggaaacaagtgctttttagggagaaacagatcaacttggaggccagaacagagacctagcgcccaggttaacactttgtcaacctgggccacttccatcatcagtttagatgaaattttagggcatattcttcgctttcatcaacaattaagatttgagtgctttcaagaaacaaacagagccatctgggggtcagacctaggacctagcgcccatgttaacctggtgctaggctcagcgcccaggttgacactttttcaacctagaccaattccaaggagtttttttggggaagtattctaggaatattctctatttttcgtcaaatattaagatacaagtgtttccaagaatcaaacggagtcatttggtggccagaaactggacccaactcccagattgacattttgtcaacatgagctatttccaatcattttcccaaaagattattctggacattttttttgtcaacaaaaataaggaagaaacaagtgatttcaaggagaaaacgatatttctatagagcctgaacgggatcccagtacctaggtttacatggccttgcgcccacgttgacacaaattctactttgggtattcttcctagaatggtcaaaaatggggtaggataccttgttcgcaatcttggatgccataaaagtatcaaaacaagcttcaggaaggagtccgggaagcacccaacgcccaggttgacaactgggttcctttgctgggttctacttatcagaattcaattttgtttcgagcattcaactatgttctttgtagtaaacgagagctacaaattgtgacaggtcaaattcacattttgatatttcattctttcagcaaggtgggatatcgataagatcggggagtatctagtttttctaattttacaaaatagcgacatctctgagaacgggtgaacaacttcaccagagcattgaatctgactaagtggtgtcgacacataacttgagcatcaaaaaatacaattctgggatgttttggcacccacccagtgtccaggttgatgtcatctcagcgctaggttgtcaacttggtcgtagggtgctgcatagccttcagtaaaatgacaataactcactcaatattgattcgattgatgctattcaacttgagttttgaagatatttcaacgatctaccaagtcatgtctcacacctacatcacaattctaaagatttcggatccaaaattcgtcctcaacaaaattatgatttttctagtaaataacacaaaaacaattcgacagatgggattcaaagtctgaaaatcgacgattttcaccaagagtcgatcttcaccattggattatcatgaataataatcaatggtcaagaccaaccaatttttcttttttttgtattttttaaatattattttaataagatctcctttcctataaaaggaaagttcctctagctcatatttttcacattcttctaaattcccacaaggtcaaagtatctctctctactttttctctccagaaattctaacctcacacttagccagttttttgtaattcttgtgagaaataaaaacttgaagtagatgtaactccattaccatcgcgacatggggagtgaactattataaattttgtgtggctctctatattattaacttaaatttattattcatctcgtcaatctagcgagctggtgtttgccactttttagcgtcaacacttgatatttttgagaagcttgatactgttggcgagcacttttttgcataatccttgtttgctcattttgaaaatagttgtgtatattaggatcaactataaaattttaataagttttttcttttaaaaaaattataatgtttaattgattaattaaatattttattttaccaaattattttagattttaaatttttttagtagccatgatataattatatcataaattagttattttgggttattaatataaataatataaagtatgatatattttaagtaaattatatttatttagtgtgaatcattgaatctgttgcaccaaaaataaaaaatctacactaaattggtatagattatacaccaaattaatgtaactattgaagatggtcttaaaatgacattaaacgttgtccttaaaaaaaagtcactaaaatttctttttgtaatagctagttgtgattattcttcacaatgatgttatttgtaatattattaaattatgcttatttgtcttccttcttacttatatttatgtgaaatttgttccgacatgagataatagttagctctatgacattagagttagaaaatgagttatttgaaatgagagttcccattccaatattttcttgagattatttgttactttaatttatttaaaagtaacattatattaatgtaacgcattttgaataattaactgttccttaaattttattaaaaaatataaaaaatttaatattaaattacatcaatgcttgaccacttaaatattcattaatattttttgtacttatttattgatcttggcttaaaatagtatctattttattattattactttctttcaaactatttttttacctgaattctttcaaactattatatttcttagaatgagtgatatattttcgatcgagatgcacagaacatagaattttgtgaatcggctacatattataaattgtgtgtgtgttagtgactcatttgtgtaagagaatcaatatattattccacaaaaacatgtgcaatctttaattatttcaattaactttttatcatattttgtaccatcattttagttcgtgtgggtacaatatatttaaagataactagtttttgaacgtgcgttgcacgtgtaatatatagagttgaagattgtatgtaaaaaaaaaaaaaaaaatcatatgttattattatgaagataaattattaaaaaaaata

SEQ ID NO: 319528 - DNA, 1733 bp, Cannabis indica
gccttggcccccaatgttttgccatatacaaaaaagaaatagtctcttgggagattataaatgtgtatccaggttctcacatattcaaacagtcaaagtttcttccttggcgcccatgctttcaagataaaagtataaccttggacacaccaaggaccatgatcaagggcccaagtacggttttcagtgcttaaaaatcccaactcaaagcagttatggttgttagcaccttcattcaaagctaccacagtcacattaaacttccagactttttccacaaagttaataatagtggcctcattaactactatcggggccacaactttcccaagaagacaaaaagtggataatgcctgctgagatgaggcacaaggactaagcttgactgaagcttcctcataagaataacactttccattagtggagaagttggtggcattaactaaagccattgaaacagacaaagaaaagacaagctaccaaacaacaccaacctcaccaaacccctcaactctcaaccaaccccctaccccacagaaccaggagtaccccacgactgagacaacaaaaggaactaaggaataaaggaaaccaaaaaaaagagagcagagaaacctaagactcaaagaaaggaaacagacacaaaccacacactaccaagatggagaaacccaaagacacagccaaaaacctaacagatacaaacacataccaccaacactgaagaaaagagaaagaaaaaaaagcagggatatggaaatcacttagctaggagagagtggtagatgaccattctctctcataactaactccatctatctatcaattaaaatttattactctcatttcttcattttataatcaaaatatcattgctttattacgtttagttcttacttattggagattgatcaatgagtttgtgaattcatttactacagtattaatatttatatacatatactttttttatatcataaactttggctacatttaatattcatatgtaagcttaaattaatttatttaacatcaattattgaatcatgatcaccatttttatatataaatatatataatttctctttttgcagtctacatggatcaacaaaagagaatttgaagatggaacagcttatgatgtcgcaaagtgctttagaaatctatgtaattattactaaataacatgtaaatatagttaatagcatttgttaaaaaatagaatgattcaatttacataattttgtaatagctacgtatttgtcatatattgttttacctattctatcaatgaataatataattatattgtacatatatgtgttagcatatataaaaaacaatgaatttattcatattctccaatatatttaaattaataataaatatatataatttcatataaagatgaaaaacacaaaataaaatgaaaaaaaattaggtacatataccaacatttgtatgaaatgtgttgctataaatgtatttatgaaaactgatacgacaacacttttattaaaagtgttattactaagttatttataagaaattcaatactaccttaaaacaatgcttttacaagtgttgtcttaaatccctatcatttaacaacagtccaagaagcaacacttttataagtgttgctatttaatattctttaattaaaaaaagagatttttacacctcatgtcaaaattgacaccttttttacatttttatcaatacacggtttt

SEQ ID NO: 319529 - DNA, 1160 bp, Cannabis indica
aaatagacaagtaattgataaaatgaaccaaaacatacacaaatgaatgaaaaaatacttctgtttctttattgatattgaataaattggattacattaaaatggagttttattttaggacataaaacccaacaagtgggtctatcagtgtatatccactatttccctcaacatttgtcttaatggaggcatggtgggtaaaattgaccctgagtgtggtattagacaaggggatcccctttctccttatatcttcatttgggctgcaaacatcttctctcacattttggaggatgctctggctaaaggcaaaattaagggtatcaagctgagtagaaatgggctcgcttttctcttctctttttttgcagatgaccttattcccgtgggacgagcaaatattgctaaagttaaaggttattgggagtatcttgagagattctgcaattggtccggccaacgtatcaataaactaaaaacatcaatctttttagcaataatactaatgtcggtatgaaaagacgttgtaaggagtttttggggattgatggtactattggtaacattaactatttggtgcatcccctcttcagttaccaaaataaggatgcagacttccatttgtgaaaaccctctctaaagctggtcgtgccactatgattacattagctggccttgccgttccagtctacactatgcaaacgacaaaactttacgaaagaatggcatccaaagtagatggcttgattagggatttctagaggggttgtgagaaaggaaaccggggcatctacctgaaggctttggataagttgtgtctccccaaatctcggggtggtttaggttttcaaaaagttgcagagatgaatcaagttttcctggcaaaatagggttggcttctaattaatgagaatcaatcgctctgctgcagagttcttagggccaaatacatgaaagagagaaactttatgaattgttcctataataattatgattcctggttctggaaaaatgttgtcaaagcccaatctagtatgaagaaaggtgcctataagcttattaatgatgggaaagatacatagatatgggaagactcgtgggtgatccatggtaaagatttctctgtaaggccagttgttaatcatgttgggttttatgcc

SEQ ID NO: 319530 - DNA, 542 bp, Cannabis indica
agtaaaaaagttagaaatttcaatatgtggtgtaaaaatttgaccaattttaggctattagaatcccaactaagcattatttaaatcttgaagtttcctttttttctcataattaaccatctttatcttagaaagacttgaagattaccgaaataagtaaaaacggagatctccaaatatttctcttgaaaaatacacaaaaataaataacaagcataaatctgagaaataaaccaataaaatattttaaaaaacacactaaaatagactccaaaaatgcataaaaatagacttaaaaatacttcaacaatccaaagagattgataatcctttgaaaaactattggttgaagtgaagttggcacgtgtagaaaaaacaactcagttggtgagattggcacaacaatcggtaaggttgatagtccttggaataactattataagaggtttggaaaaaaccttggtaaaaaattctatggttgtaagggttagtctagcccattaacttggctcgataattgaactcaaagataggtccatagc

SEQ ID NO: 319531 - DNA, 675 bp, Cannabis indica
tgttaaagttaacgtagaaaccctaaaataatcgtcaagctaaaaattctgttacatagatacattttatataaaataaatatatttctctcacaaaatatttttttacatatataaaaaaagaaatggtaagtgtaatattattattagtgtaatttaatatataattttatttattttagtttcataaaaattataagaaattattacttaattataaaatgtgatgttattgtgctagacacattaatattattagcaatgctcatataaaatttaaaaaagtcaacggaattttgatggctggtgtggtcttctcgtattggtttaagaaaagtcaatcaaaatgccccccacatcatggctttctgtgactctgtccctctttgcctcccaattcactccctcatataaatccaattgattaaaaaaaaataaaaaattatatactctcttaattttttattccaaatgggtttccatcaattcgtgtccaccaaagttacaaactttttatgccctacctaacgttacattctatttattattattattattattattattattattattattatgagaattatcttctatactatttttttaactttttttttttttaaattttacggttcaaggtttctaaaatggttgtcaacgctagttgcaata

SEQ ID NO: 319532 - DNA, 1457 bp, Cannabis indica
aaataaaaggaaaaagaagagaaaaagagaaggaaatgatggatgattgattgatagaggtcatagtctattgacatgtagtgatgcatgcatgaaatgtgtgtacgtggtaaaattgtaataaaataaagttgaagagtaaaaatgtaggtttaaccgtgtggtagtattttagtaataaaatatgtattttatatttttagtgtaaaattttttatattttaagcaagaacaatgttttcggaaagtattaaataatgacacttctgtagttgtgacatgactacgtttttcttcctattaaatcatttactcactttactcatgtatatattatgcacgtggaggcatttattgttggttcttgttttatcagattttaatttacttataatttcacattctaaaatataaaatttataaaacaataactaaacccataaaaaaaaaattagaattttcacattagttgttgtagaaataatgactctttttgttcaattactctaacctttgagtttcgttctgtagcaaggtattgctaagtgatgaacttaaattattctttaaatttgataagtgatagttctggcacacagtagtgtatttactaatgaaacttaattttaaagaaaaaatggctatggaattgcaaaaataatagaaagaaaatagagaaagcttttcttgttaggtttagactagaatcacttagaatgacttaagttggtaaagtttttatctctttctttatataaccaacaaactaagattagatgagatgagctaaaataaagattatttggcttaaaattcaagctctagctgaattgagataagttgagaactatttttttttattacacattaatcaaatataattgtaaaataatttaattgataaatatccttttttataatcgaaatactaaatataatctcatataacttatcaaacttagagtttttaatgaacataataaaaatgtgacttataaaattaggtataaattaaagaataatacaagaaaagtaaaaattaaaataagtaatgaaaaataggtatagagtgtaattttcttgaatgaattgacatattgggctcatgaacttaagtcactttatttcatttaatgaaatgatgtcttttttttctttccaattttactatttattttatctaattatttaaatacgatttttaataataattataaataatattcaaataaagatataatttgaatatatttattaattagatttacaaattatcttaattaacaaataaattcttgttgttgcggtttttcgtcaactgatcttataatcagaaaaaaattgaaaaggaaagtaacttccttacctttgactcacgtgtagagagaaaaaaggaaaccaaaaaagatttttcaaaaaatagtcaatgtttccttaaatagaaaaaggaaaccaaa

SEQ ID NO: 319533 - DNA, 606 bp, Cannabis indica
tatacctatattaaatatatgagtactggtattaggtattagtagtacctaaaactaggtagatgtaacattttgtgattgattagcactatcccataaaattttttatataaaattatatgagactcgataatacttaattgtaccaataatgatattacaccttaaaaattaataaacaccactcacagagggagaatatataagatgaaagagcaaaattgtaaagaaattaatttgggactaattatcaatcataactatataaatggcttaatactctactatgttgagaattatgaggttctatcttaaaattaattggtcatgagtggagtagcctatattcttatatataactcaataccttaccatttattctatgtgagacaatgtccacagtagtcgagcctttacatttctctaaatatatatatacatatatatatatatatatatatctgtacttacaactttgaggtgtgctagtccatcaaaatccggactgttatcaccaaagacttgcaaaacctcgtctctagcccgagcttgccaatgaggaaacctacttaacatgatcatggtccaattgagtaagacagaggt

SEQ ID NO: 319534 - DNA, 1618 bp, Cannabis indica
tttttttttattattttactttaccgtgttaaataaaaacaagagataataataattttcagagtagtgtctatcctcaaataacaaatattgaagctttcactataaattttttttacttttagtcacaagaaaacttgtgactaaaagtaataaaattatggctaattacaaatcattatttttatgttgtgattaaaatgtccgtgattaaaggtattagtcactttagtcataatacttgttgtgactaaaaataaattagtaataacttgtatctaaaaattatgttttagtcacaaataattttttgttgtgactaaaaatcaaattatttaatcacagaaaaaatttgttgtaactaaaaatttgtagtgcttgagaattgtagttacaaacccccacaccacgttcacgtaggcagtgcaatattaattaattaattaattaagcaggagttcaagcaattaaatggcctaaaaaatttaacaaagcatacaaaaaaacatatataataagctataatattattaagcatcttcttagagttgtcttttgggtcatgcaatcgatcttgcatgtaatatatatatcatataatcacgtgtaatatataagtcgttagatcttaattaattaaattatataactcaatcgcataaaattataataattttgtaattgtattacatatatatattcaatggctttctcaaaaaatatccatttttagtttagttttgagtgagtggggggcctagttcccattatttcataccgcgcgtgctggactttttttctctccaaagtggaattaattgtgaaaaaacaaatgaaataataataaaatgaagtacaagggctcagttaaagctgactaatataccacatatcgcacgtgccgccagttaggcgaaaccaaaaaaaggctgcctacatatacatatagcatgatttggagctttccctgctgcttctagttctgaagtcgggtcataaaaaatagtgtagaagtctaggtcaaaaaaatagaaaaataatgtacaagcagatcatagagtaattacagtaagactcgtaaccactatatagaaaaacatatttatatgtacgtatacgtataaacaaaagcaaacaattcaatatatatataaatagcagccaaaagtcaccacctaatacgttatacctagtacttttattagtatatatggtgaaagaataagtgattatgtcatattttgatcgaattgcttattaagggtttgtggtataggatagatacgcatagaccatgtaattagaacattgctatttatttgacaacacttaattgaggtgtttgtcacataattgattaacgtacggtatttattattaaatttaaaaatttgaaatatctgatagtagaatgcactatgacttaatgcttatttgacacttcataatcataatactccttgacatttattgtctaattagtattatacctttatatattatttttatttattttggcaattattagtacccttatatattctctttaatttaaaacaaagagaaatgctaaagggcatcattggtgcctagcaccctcctacgtgtcaatatcgat

SEQ ID NO: 319535 - DNA, 1511 bp, Cannabis indica
cttaattagaaaataatttccataaataaaatattctaatattttatggtctcttgtgaatttttttactgaccctacatcgtatatagacgtttcgttaaaagttgaatagtattggtttctcccatgaaaggcagctgtatcaatacaacaacgacctaacaattttggaagaccttgactttaatccttcaccatagcttttaggcaaaatatcgaccatgtgattacacataccctaccaaactgttatctagaacagattcttttttttatttttattaaatatattgctaattttttggattatagattttcaagccttggaaccctcacaataagtaatgtaaaatagatattttttaaaatatatttcaataaggggtcttttagtttatttattttagaagaaatgatttcgttaaaatctcttaagtaaatctaatgagaaaaaactcaagagtaaaaaggccacaaaaaaatctgttaatgattggctttagcaaaaattattacactgtgctagtagatcagcaatcaaagtaaaataatgagcaaatatcatggaaattattacatgaagtaacaatgtcttgttactcttgtattacaaaacccaagtaaaagacaaaagatacttgatttttatcttacgaacaacgctcacacaatctaatatcatctaaagagccaatgccttagcaccatccacatttcccagtcaaatttccaggcagccatcacctcgctcaccacatttagaatcaccatccccatcttaatccaattataaggggtctttttattaatatacaacgtaaaagaactatacttaaaataatatttacacaagtattgtcacgattcgagccttaaaccgtggcagatatgtaatatccataacttatgtggtcaaagatcacactttgacccttgtaggaagataacacttataaatgatccttgaatttatatatcacaaaatacttatttaaaaataatggattaactcttatatcgataaaaaatattagtaacaaaattagaatcactcatttatataaaagaataataatatcctcaatagtcatcgactagatagatttaatagatcaataaaataccaaaataatatctagcatccatcattcatcttttctataactagtacatagctaatttaagtcatccaaaccatccatttcaacttaaatacaaaattagtttcattgaaagtttaataagtaaagtaggactaaagtaataacgacattcttcctcaataccatcctcatccactagcatcaaattggaaggggagaaaatagggagtgagcttataaagctagtagaaaaataactaatatcaaacgatccttggtttaatagaaattactgcatgattagcttttaaaaataaaatatctcatcaccattatcaaaatgtataaacaaagtagagagaccacaaataatcacaaaatcaatcgtcaaatgcatatcacaccatc

SEQ ID NO: 319536 - DNA, 1138 bp, Cannabis indica
caccagtcctacattaggacatttatttctattactatgaaattaataaatgaaatagttaatagtggggctactattatcctttttgtagtgacaaatcttgtatgtgttcctaagaaaagaaaaagaatttgtccatttttcaggctcgtgtgactgtttaccaaaaacacaggtcttcaaaaagtcataagaccatgtatggggcctttttcgtacccccacaaaaataacaatgaaagtaaaaattattatagttccaagattttacaatgtacaaaagtaaaaaattccttatattactaggcatcaatggcaatcagtacctccacaaccaaggggccgctctgagagcattggacatgagtagtgtcaaactttctaaatgtgatatgatcatactaggcctaggccttgggaggtttctcctttacttcaaacacatcaacacaaggattatgcatacctattgatggtgagagcttctcatttgacttagtggccaaaaaatataaggtaatctaagaaataagatgatgatgaagattaaaagatatataaatattagtggatgaatattttctctctattgcattaattgtttgagttacacaaacgattttccaaccatctctctcatctaagaatggggtatttataggttctaatagccttagatacacaatggttcctaatacacaacccgtcacttttgagctgcaaattgcgagagtaggaggtggtcttgcgccatgtacctttgtatggtgtcaggtggtccctagttgcagaaaaagttgttgcagagtacctattgtcgtgatgtgaggggctataggcaatgcatctccactacttgtacctcctcactttaagagcttacagagagcgtggttgtacacttttctcttactcacctcgtcctttgatcccccctccaaaaaacatctcatcaatatacattcaaatctcaccttacacttataagccaaaaaaacacactcacacatccacaccgatgcacgactcgcatgcgagccccaaacacacacacccatgcatgcaacatacacatgcacacacacacacacacacacacacacacacacacacacacactacacacacacacacacac

SEQ ID NO: 319537 - DNA, 1508 bp, Cannabis indica
acagaatgagaaactgagattattgcttgaagagcaaagaaaacacaattttttaacgttaataaagaaagttgagcctaaactattgggacactgagatataaggacgaagaactacttcaagcaacgaagagatcaatggagcttgaagatttactgagaaaattagaaagctgaaaaatcaaatatggcagagactggctcaagagaacgaagccatggttgatcattgaacaactcactagaggaagcgagagaaagagctatgtgttgtttcaacaatggcgccgaggacgccgagtcttgttgtgacgtgggcatggatgaggaagaagaagaaaacagacaagtagcagaacgggagcaaaacgacgacgtaatagtagtaacagaggagaacagagaacacaaaacgacaatggtttgcaaagcctgtaattctcgaagctcgagcgttcttttccttccttgcaggcacctttgttcatgtaaaatttgtgaaccctttctcgattcttgcccagtgtgtaggacaaccaagaaggctagcatagaggctttaattttctaggctactttcccgggaaaacaagaaagaaaaatgttaaaaaaaaagcatagttgattaccattaaggatatggattgcacataatctgatagcactctcttttcgatgcaaggattggtctttttatgtttaaattaaaatattttatttatttattttgctgtttctttttagggactctgaacatggatttgttttgtaccttaaacaaccaaaattaatagccagagttaaatagtacataaaaacagcatctttacctttcatagagcgctgtttacagtttcccattactctatttcttttcaaccttttaatttattggcattaatatcacttatcaaattctatcaactattgttatatttttggcggtattaattatttgattgacagagcgaggcattgaaagcaatgtcagatgaattttgcctagctgtgacaaagctatagctaagaaaaagccatcaaactttcctatattcaaaattaaaatatttagtggtacttatgtttgaacgtttctatttattttggtataaaactacaaaattgactggaaaatgacaccccatatttcagataggatatgacaaaagagacaaacgttacgtttacatgtgtttgcaattctactatatttttatttttaaataaaaagtgatgtttttataaagtttcagcatgaataagtataatttgtcatgattttttttttctgaacaagtaatttgtcaagaatagaggcaaaattgcaaaatggattagttgggggatgtaccaaaaaggaggtgggtggcgttgacaggagattctgctccctggggtcctcctattaatccgctgcttttctgagtaatttctttctttaattaattataaaagaaattacagtggagaatggcgtggttgaggcgatgggtcatttttttcttttt

SEQ ID NO: 319538 - DNA, 561 bp, Cannabis indica
atagtattatataaaaagatgatatatattatataatctaatttaatataataaaatacaatacaatacaatacgacctaatataacgttccaaactagtctttaaagaatattactattggagattctctcatgtgaaatgtttatttggtaaaaataataatgttaaaccattagggataaatagatattatctttttaatttttttaataaaaaatttgagtaaatgaagttaaaattatcttatttgctgtagcttttttttttatttatttattgttttaagagaaagtatcggttagatttatatttaatgttgaacatttttattctaattgaagttaacgttgaggttcataatttgccggaaaagtaactgatatggtagattttgctgatatatcaaataatattttatgtaattactataagatctaattttatgatattaatctagttttttattcaaaaaaaagttaacgttgaggcttgaagataaatatctttatatattaaaagtgcctatctaacggcatttcttggtttaacattcttggttt

SEQ ID NO: 319539 - DNA, 1012 bp, Cannabis indica
gatgcaagttatttttgtcactgaatgttaaaccagacgaggacggagatgacacttcctgtcctaacgggggccatttagtattttattttatatttctaataatattttataatttataatttatgtttgtattttttagtatattaatatcatttttatataaattttaagctgtgttttgaatgataataagtttatggaataataattaatgtataatattttaattttatgtagtttaatattttatattgaaaattttattataaactttattcttttattaaaagattgtcgtcgtgtttttgttcctattaggagattttctgccacatctccaataaaaaataagtgggaatgtgaattaaaatttttaacgagaatgaagatgagagcactcgtatgcatttctagtgaccatacttatttaatttatctctctcaatttgaattccaaatttagtataagaaggaaaaattctcaaatcttcaacacgtaaaaccttaacccaaatacattacacaatgaaaatgaagtaaacacgttagtaaaaaagtgttctaaataattaaagaattcttcaattacttaggctaatgattctcttaattgtttctctcctcaaaacataattgtagaggggtatttcaagaattaagagaattattagcataaatttgtaatttttcatacttggagaactgtttaattatttacagtacttgagcataaaaaattaaatatccctaataaattataccaattgcatttacatggtagtattggtaccatcagtgtgtttttttttttctctttgggaaatttgaaattccatgctttaaataccctataatttttcccctaaatgtataatcattaaaattggtcatatatgaccactttaatgattttcctaaactacccctcacatttcaaaccatctctctctcttcatctctctcagccaaactaagaatccatcccaaacccactctcagccgacgccac

SEQ ID NO: 319540 - DNA, 781 bp, Cannabis indica
aattagcgaatcccaaaaatggtggcaactccgctaccttagtgggaataggctaatccatgattgcctttattttaccttcatccattctcagcttcccctggccaacccaatgaccaaggaatttcacttcctttctacagaactcgcatttctccttttaaatgtacaaattttcctctctcagccttgtcaacaccttccttagatgttgcaagtgttgctctaaagagttactataaatcacaatatcatcaagatatactacaacgaattgatccgaaaatttgtatagtacatcgttcatcaaattgcagaatgtttcaggggcatttgtcaaactaaaaggcatcatcaagaatttaaaagacccatacattgttacacaagttgtctttgcttcgttccccaccacaatttgaacctgccagtacctcgcccagaggtccaacttggtgaagtatgatgcttttgtaagcctatcgaacaagtctgccgcatttggcaccagatacttgttcttcactgtgactttattcaaagccctataatccacacacattcgcaacgatcaatctgacttcttttgaaacaataccggagcaccatatggagctttggagggcaccatatatctggattccaccattccgttcaattgttttctgagttcttcaaactctgaaggacccatcttgtacagtgccttggctggcagaaccgctccaggtattaattcaattttgtgatcaatcgccctcctaggagggagttccttcgg

SEQ ID NO: 319541 - DNA, 698 bp, Cannabis indica
tgcaacataaaatgtgatttctgatctttattaattagtaaacctgattatattgaaatgggttttatttagggcacaaatcccaacaaatctatgattattaatcttctcaaaaagataataccacataaacaatagaatttaaattctatgtttacgaataattgtccattcttaaacaattattaggatttttttaatagaagatcttatgatctgttaggggtggaagaagttactgatatatgcagctaaaggatcttgatatcgaactcccaattaaattcaaaacaccacagagcctctataacacatatgggtggaagaagttattgatatatgtagttcaaacatcttttacattgaactctagattatattcaaaacactacgaaatctttatgtcacatatattttgattaaacatagatataatataataaacaaactagcaaactagtagaacttattcttgaccatgtatgtgttccaatttatgttacaatagaaatagatgccactgaagtcattgacacaaaattatagtaccttatcttagtggaaggattttagaaattccagccccttattatttggatgatactagtgataactgcaataatatgttcaagaaaggaactttaaaataaaacaaaagaaaagttaatctaacagttcacatggatagtaataactta

SEQ ID NO: 319542 - DNA, 1029 bp, Cannabis indica
gatcttctttgatttactgtcatttggttgcagcacatagagctagtttctcctaccccacctgctgccgaggtctcaacttttgacgtggtgggtcctgtgtgtgagtctgctgatttcctgggaaaggaaagagaacttccaaccccagcccaggtaaaaattgttaaacttgaagtaaatgatcaaaactcacccatatttggaagaaaatgctatttaaatattctattcatggtagtatttcctttacttggcttttctgatataaagtttcactgtgcagggagctggtctggtagttcatgatgcaggtgcttactgcatgagcatggcatcaacttacaatctgaagatgcgccctccagaatactgggtatgcaactctaacttgaggaaccatgtttaaactcacatacccaagaaaatgttcagaaaatattctactggtttacagtttggtttcacattactgagtttatgtttatgtgatgcttattgctcataggttgaagatgatggttcactggccaaaatccgtcacggagaaacctttgaagaccacgttcgattcttcgatggtctctgatttctgactttttgaactttcattgtgctgtttggttaagatttggtttgcattggatattttatcaccataccatcaaagatgttgctctggatctgattggatgattaatttgagaattggaaagtgaaaaaagctcccaaatcatagggagctccaaaagggtagagaacaaaatgttgagaaaatctagaaaaataaaataaaaaatcttctgcttgatattatcctaatttattttattgttttagaaaagtcgttgccaaacattgcaatcaaagtacacaattgggatcctattcacataaaatatgcataatatgatatagttatatttataatcacataaattaaaatggaaaagtctcacataaatatattaattgggattatagtgttcatgtgtgtaaattactagtaaccaggggcggacccacatt

SEQ ID NO: 319543 - DNA, 739 bp, Cannabis indica
tttacttttatgttcttttagttattttttttataaaagttattttcattttgaagttatgttatttttattttttaaaagttatttttattttgacgttatgctaatttcattttgaagttatgttatttttctttttatcaatgaataaagagttaattataaaagtataaatgaaaaatctaaattagtgagacattttaaaaaataaaatagagaaatcgataaaagtgctcttaggacataaaaattcaagtaaacaaatataacattagattagaaaaatactaaataaattaaattagtaatttttagtcatatttgtattttataaaatcattttattatttatgtaaatatatatatttttattactttcatcaaattaagatctagccataatttaataattctacagaatttttaatgacttaaaataatttttagtcgcatttggtacatgtcacaattgtttggacgaaacttattaccaaagactttttttttccttgatttaaaaaaagaacttattaccaatgcatatgatataggattaatttttgtaatgggaattcatattgtagttatttatgattgttgcccctgaaatcgcccaaaatacgtggaccagtcgaaatgggacacgtggatcagataatttgtaaatatttgataagtctttgtacgccacaaggaagcgccatgggcatgggtcccggaggaggcacccggaatacaa

SEQ ID NO: 319544 - DNA, 537 bp, Cannabis indica
aatttgcctaattttcaatcctaatataccgtccctaatgagattccataattataattaaatctaaattataattgagattccataattaaagtataaggagtgtgaggatgatttttttcgatagtaaaactaatcaacatgagtgggaagttatttccgcttcagatgattcatttaatcatttttaatatttaattgtaataatgtttttagtttgagcttgagactataattttttttgtctaatctcttgaactttgacatgtatcaaatcatgtttttgaactttttaggtcgttaaaaacagggttgttcatccgattcaatccgcacttttttggtcaaacaacatcaaatccgcactaagtgcggatttcatttttagatcgaatccaatccgcacaatagctcaaatccaatccaatccaatccgcaaaagtgcggattggatcggttactttggattggttactttttattattaaattatttaatatttataaaaaaaatatttttttttcacataacaagcaa

SEQ ID NO: 319545 - DNA, 730 bp, Cannabis indica
aattagtaattagtaattagtaaaccagcaagtacataaactaaaatattccactaaaatctccatatttaagtcatctaatgaaaaatgtgtataatatatttcaaggaagttcttttggattttttttaatctataattttctcctattgattacgtgaagatcttgactttaattaaaaaataaattaaaaatcaatgattcaatttttaaaatttaaaatttgagaccaaatacgaaaaacaacatataaagtctctctaagctattgatgagttgtttttgaattattcaagcagaatctataactcttacttgtagcatgagtcatctcgtaaataatctttataaaaaattttattagtaaaataattttttaaatatttttatcagtaaaataatcttatatagttggagaaacaatcatgaattatattgtgcgattataaataattaattagtatggtcgcaccatagatttacaccgtgcgatcatcatggtcacataaaatacacattgtcagtttgataaatttcattgttatctaaacgttctttttccccaattaacttattatttgttagatgatttaacaagttttttttttgaaggaaaatggtaactttattaataagaagattcaaccattacaatagaaagaaaatcagcaggaacatcatcctcactaaaaatacgatctggatacaaacaagagctacgagcaagac

SEQ ID NO: 319546 - DNA, 1875 bp, Cannabis indica
gggaggcgcttgtgacttgacttatgggccaaggaaatttagttcttaatttgtttggtaagtttcaacatttgatctaattgaatttttatgagtttccttataaagttttatatcttattcattgtattatgttaatttgttgatcttgaaggaattttttctaatttatttggcctatttttggaaagtgtcatgattttttcttgtttccttaatttttttttttaaaaaaaaaattggaaaaagagtggggtggtttttcattgtgttcgtgggctgacatttttttcttttaagttggtttcatttttgctcctctttcacatctttattcaaaccaatttctttgtcatttaatctcaccatcttctcttctacccgattactcatcttgttggtattttgtccctttgtttttcaatttctttttcaaaatttcatggctaagacaaagatcttagggcacccaaacaagatggtggaaaccaaaactgccccctcaaatacttcacctgtgacttcaaaattgcctcctactgacgcaatttcttcaattccaagagattcatcgcgtcctcaacgtgaatcaaagaatgtggctgtcaagaaagcctcgacctctattcccagaaaaagggatcccaaaaccgtggctcgaaaatcaatgagacccatgaaatttcgcacttcgtcatcttcatcttcaaagggatctccttctcttgatactgaatctcctcctgctgcaactggtaaggcatctgcagcattaactccaaagggcccttcctctcgaactcgttcccaacaagctttacttaagaaggaacttcacaccaaaaggcgccatgacagaccaattcctgctgccaagaaccttaagatgaatcccccctcggcctcctcgagttttgatggggaagaagatcccatggaagtgtcctctgatgactccaagaccaaaactgagtcttttccttctgaaaaatgtcttttagaagatgttggtgtctcctctgacagtgaggaaactaacctagagcctgagccacccttgcccaaatctgcagtagcctttcctcgttctactcctacagccaaagcctctgctgctgccaagggtaaacagcccatgaagagctccattcctggtaatatttctccctctcaagctgtaaattccaaattttattatcatgataaccagcgtgattagaacctatatgccacccgaaagtttgagagtgaaagaaattatgattttcatgctcatcgtgtctatgatattgtaaagtttgttcaatatcatcattgggaaaatactcttactagttttgaagggtatatagaaggcattgtcaaagaattttatgctaatttgtctgatgatatgcttgatgagaaatttgaaatttttggtaaagtttatgttcgagggcattggttttcctttactgagaaggatacttctgaggctttgcaactgcccgaaggtgtgtcaaatgctatagggactatggattgtcacctcatgattattgatctcactagtgtacgagttgactggcaatctggccaaagtcttcgcatcactcatctcacttatggccatgcttcactcatgcggtttgctcttaacaattggcttccaaactctaacaaaacagtggtgtctcaagacttggcaaattttctctttcgcatcacctcaggggcatccatcaatctggcttcttctatcttggaccagatggtttcatttcgaagaggtaaaaagtgtactcataagcttgtttttcccaacttaatctataaaattatttcctctcaaaaggatgtggcttattcccatgagacacttgagcctcccct

SEQ ID NO: 319547 - DNA, 917 bp, Cannabis indica
aggtaaagtttgattggaaaactacattgctatgacattctaggcttctagttttcttacttgaatagaattgaaatatacttattaaataatttacttgtaagaaatttaattttatatttatcagctgaacatggtaaaactcggagcattaagggtaataatatttttgtgctgactctgaatgttgattttttggcacgttgttgggtaattatgaatattctggtttattatagtgttactaagttaagacactttacataaaaaaaaaatttggtgcagatgctggtgttcgtttaggaaggaggattaggctcgacacagttgaaaaaaaacaaggatattggtacaattcttgagcagattagtaactcttcatttagttttgttgtcatgcttattagaaagagatagtatctttgaattatatggactcaagatacaaatcggttgatctcttaaagtaagataatagtattaatattgtattaattttaaatttttatataattcaaatttataggacacccatatattttgttcaaggccatatactgaaatagaatcacattcactctctatagtttgtcatctttatggtcttgataaaggttaatgaactcatatacatatattaacatagaatcaccacttatatagttgaatgttatgtctatttctgttattgttcttttgacatttagattaatcaattaacatcattatagttcttggctgttttatttcattactgttaaataataaaattatcaatggtttaataagattgcaaattttcttttcaaaaaaaaaaaactaaaaattaatactgtatacagtctacacagtatccaaaaaaagaaaaaactaaaaaaaaacaaataatccattatcaaaacattaaataaacaaac

SEQ ID NO: 319548 - DNA, 1555 bp, Cannabis indica
agtgatagagtacatgcccatagtcaagtactcaatcatagtgttgtaaagttatgctttttcagttccacgtgtgtacaatgggcagacctcaagaaaagtcctaggcaaggtcagtgaaacttggtgaattgcaagtgaccaagagaccataagtctgcgtgttcacttaaggggcacccacactgtacaatgcatcaaactagcaaagagaacttatgtagagaaattttaacatttagaataagctactaaacctgcctctacgtcgtgcaggcatactttggcttgacataaagaaaagtaaattcggatacttacatgtcaatgccacaagaagataacaaggattaaagatcgcctggtcggttacacaatccatgataaaaaagcaacagggccaaacaatagtattgttcaaaaatagagggcctataggccaaacatacgaacatgaatgacctggggctaaaaataagtaatgttctaaaaataaaaggcaataggccataaagaacatgaaaatattgtctctattatacaaccataatgttgaatactaatgaaaatattgtctatatgtgtgcagggctaggtggagttgagagtgaagctgcaagatctaaattgacaaagtctaggctagccacagcatcgacaggctggtcaacctagtggtcaacgtcctagctggccacctccttagaaactgggttggccagcccctcatcatggttccataaggatgaggcctctcgataggcggcagtctggtctgctctcaaagaccatatttcctccagccaatgtgttctccacgaaagcctcactgcccatgtatgacaaattagctcttcggttacgcagcttgaacacaaaggtaagttttgaggataattcaacatactcctcctttatggcatgttggccatcaagagccactctcatgctctcctcatgccctgcaagttcacactctagcctagagataaaggcaggttgcgtggtgttctccttgttcctagtgccaagcatggtctcaaagccagaaatcatgctctatttcgccacaaggggtgcctccatctcagacatggcattgtccttcactagaagagaagcctccatggtcttcatctgctcccgaagagcatttgaggacccccaagagctatcgcgtaaagagctcaacttcatcaaggcctaaaagcaaaacaagacaaaattagtatcaaagtacaacactagctagctagtcttcccttaagattgccatggccgaccaacccctcaagaggtacaacactggctggccagcctccccttgaggtttccatcgccagccagcccagcaagagatacaacattggctgaccaggcctatgtagcaaatcctttggccgaccagcttatagaagtgatagaaagatgaacaaagctaaaataaaaacttaccaaagaaagatcccaaaggccaatggagtagaccctgtttggctcacaatcaccaagctctttaagctcctcatccatgaaaggaaaagctctttctatg

SEQ ID NO: 319549 - DNA, 794 bp, Cannabis indica
atcaaatttcccatttattattgtgtttagttattcatgggaaaatttaattagattggaaatttaagtgtaggacagtatttttgtaaatttctcaatgtgttagtataaaaataaacttctctttattttcaatatatttgtaatatttctacaatatattatatgaagagttatttttaacaagccacatattatttaatattattataaattgagaaataaaaatattaattatttttattttgtgtataataaatagttaaatattcaaatataattaatttatttatatttactttttgagcttgatattttaatttttctatgaatcacaacttgaaagaaataagatattgttaatatttaggaccacaaagtggaattcctcatacatttagaattaggtggaattatagataacatgggtggtttactacagtgagtcagtgactagtcttttataaacaaaactatgcactgtcttcccttactagtcagttttgacaccataaaatatataatataattatttttttttttttaagaaaagctttattatatgtttattttaattaaattaaataaactatgtacactcccatatatacacctatcacattagccaaaaaaacttaccaaacctaatattttcggatacattaatatactagtaggggtgtttattggatcacatctaatgtttttatgcctatccagatccgattcaatcatatattggatatagattttactatcggatccgatccaatcaatttcagtcatctaatcga

SEQ ID NO: 319550 - DNA, 624 bp, Cannabis indica
tttaattttgtgttatttttcagatttgagcaaagtgttgcaaataaaattgggattcaaagccaatcaaaagttgaatggcccaacactcacttgcaatttgaacgtattacatatgttgagtcatgttgggtcttcacctgattctctttaaggcccatcattcacgtatatcaaaggatcacattccttattttttctcctcaactccaataatcactattgcacactacgacactaggtgtcccactctctccaatatgtggcaccacttgcttgatgcagctccaacaattgctgacgcaggcagcttccaagccattcttcaaacgccacgtgttcagcttgtctcccactctccaaccttttcttaagcgtgggccatatcaattatcagctttttaagccacttcccctactgaatagtacacgaattttaccagtttggagagcaagtgtccactataaagaggagctaaatacaatgaaaaagcaatcagatttttagtagtgttattataccaaaattttatctttttctttccttcttctttattttactttattaattttggtgtaaagacaatgccttttctaggctaatttctttggcaagactcaagt

SEQ ID NO: 319551 - DNA, 1583 bp, Cannabis indica
cctaatattttgctgttattaccaatactttatttcaattttaattacactttaataattgcactgttaaattcttaacgattttgttggaatgtcatcaaatattgtcgattatttgtaacaactatcatattagatcctaagcattatcatcacttatatttaggtctatagactcatttataggcgataatcgtgtgctagttaaatttttttttttttttttttgcaatgaaaaatcgtgtatagaaattttatagattttttttttttgaaaacattcatcatctttatttaaatgcaatttatattgattatatggcttaaatctagagtaacatcactacttctgattacacgatcaacaacaactaaataagatgctctagctaaaaagtgaacaacactattcgtagaccgtcaaataaaatgaacaaaaacatcacacaactcattcaacaacaacttgcagtaagaaataatactcccaataaagtaagaaaccattgggattgaactccgtaaagcttgtaccacattgtaaggctatcggtttcaattaccactttcttccatgacttctttttaacctaactcaaagcttctttcactcccaacacctccaccatttcaggttgcagcacacccgatcggcaacagctaaaagcttccaccatatcacctgcagcatctctagccaccccaacaaagctgtaggttgcagcttcagcaaaaatggctggatctacattaatcttcaagcagacggcttcaggttttacccatttttccaacccgtctacagcagtaaggaaagctacagtggagattcgactgtgatcttgagcacgggtcaagtcagtaagaagagcttgcgccaaagaagaaacacttgtaacaatagaaacttactattacatatataagagataaatgtcaatcatcaaattttccattctctattaaattatcggctagggtttttctttttaaatttttagctgcttgagattgttttttttttctccgtcctccctgggcttaggcatggctgagttggggtttgtagtttttctactgtggttagtcttgtctctataacatggtttttagtgtcttttatttaggttaatgcacttgatcttgtctctgtaacgtgattttgtttgattttatttcgttgttggtttgtctttttgttcttcaatgtctcgcaatcaaattgttgttagtggttgaaaataacaagttctctgcggctgaaggagttgttagtagtttaattatgtacctttcacaattaatgcaatgctcaagctaagaagttgaataaacctgctgcaatctttactgaatatatgtgtccttaaggctacaatctttttcatctaactttttttgaggaggaaattagactgtataccctttttatattgtcctctttaccttttttttaaactacttatcaatttgtccctgtctcttatgtcagggtattttgggtatagtacatataaaaaaatagtatatttctaattaaatataaattaagaggtaaatttagttaattgtataaataaaag

SEQ ID NO: 319552 - DNA, 1420 bp, Cannabis indica
gaaacaatggagaacgacccccgtgtccggggaatggcagcacatccaccaccgcttaaattgctggcaatggagcagctagccaaactgcagccactaggcagacaactgctgggcgtaccaccaacgccaccaccgtaggaggcgacgctattgatggtgccactaaaagaggtagtgctagaaattttgtcacacctactgacggcgcggggccagctcaaactggccgaggccctggcgtctttaggccacggagtgaaccccatgtgaatatcgagggaattgaccctgagatggatcagctgcgagatgcaataaaccgaatgcaaggccagttccagactgtgcaccaagcaaactcaagctcgggtggccttgatagaaagtcttgccaaccaaaggagagaattccaatcttgactagaagatcatgctcgtgaaatgaggaggcaccaagacgaccaagatcatcacacccaagatgctgccgacttaatgcagaactactttaaccaaaacactaaagggatgggtacaaatgcccacaagcaacaaatacctcaaacctatcctcaagaagtccctaccctgaggaaccagcgggagagggtggtctatggacccaaagagcggccaaggaaccaagagagggataggagtcacccctctaacagggttccccataataataatcgaccgctcctggtcgatgaacaagttctacccaatcattatatgggacgtgatgactcccacaatgcctgtctaaggcagaggtggaggaaactctaggaacaacaatggtgactgtggcggaaacggtggaaggacaccccaacatagggagtggcaaccccgctaccaacgcggccaaccacgagatggcgatgatcgcccaagaaatagtaggtctagggggagaagagaagaccccaaagtcaacaatgattatcgtccaaactacactgacggtcacggtgatgatgaagctaaaagtcgggccaacaaccaaccgaatctgagctggggggttatcaagccagagggccgtatgcccctaataggcaacatcaacctgagaatccgccccagttgggtaggatgaccaagtaccacccccgatcgatggaaggactgacaatcataatgcaggaggaaggcaatgaatcgtgtcagtttttgaacgggtaggcccccccaagggggtagagaccttcgggatgccctcaacagaaatagggataactgaagttccaacatagttaatccacctgatccaattcaaagagaccaagtgaatgttagcgttaatgttgctcaaccccaagcagccacagatccagtgatccaggctcggttggacgagttaaactgattggtcaaggaccttactgcaccaaaactcactgacttggag

SEQ ID NO: 319553 - DNA, 808 bp, Cannabis indica
cccacagtataaagtaaaaaaaaaaatggaaatttcaataagtggtgtaattatccctaaataaaaggaccataaaaatattaaaaaaaaatccgtaaaaaatataaaaaatttatcatttttgtatatttgtgaaataatcaacccaaaatgtaattagttttggactcttttgttgtgtgggctaaaacaaaaacagaataacatatggactttcttattcagggctcaaaaaacatgtcaatctaccaaataataaaaatcaataattacacaaacaaacaaaactccaattaattatataaatatttatgacactatacattaagatgattggtaccaacattaattttgatgaatttttattttttttatttattataataattattttttgcacattcatgtccaaattttaatacataaaaacaaaattctttataactcaaaacatctaaacataatatcataataattcacttacacacaataaatatatttctatttgtatatacactataataaatactataactagtttggttcaaaattgaattttcgatgatgaaattaatttgccagccaaagcatgtccaattaaaatcttcaacattgaatctaattaaatgaaagttaaatgtctaacttttatttttattgtttaggtgctgaaacatgtgtgctgccaaaattaaaatttaaattatttcaccaacttataaaaataagggaaaattttaaaaatttatttttataattttacggcttaaaaattttatttataaaaatacgtttataaaattttaaa

SEQ ID NO: 319554 - DNA, 974 bp, Cannabis indica
ttttttttttcatatttatacggtattttataaaaaattaaaaataatacgaaaataacaaaaaaaaaaattacataaagtaataaggaaataacaacatccaaataactacaaaaactaacatgtataaataactaaaaattaacaagactataaaatacattaaaagatcgtatttaaaatttctttgtaatttttttttgttatttttgtatatttgtaaaataatcccttaaacatttttttgttctcactattatctctgtatattcttcattggaaatgttgagtggaaaaatagtcaactgactcagagtttaataaatgctgattaattactagtaaggaggttagaataataaataaataaagaacacacaaaatttatagaggttctacctccttatatatgggtaatgatcccctttagttgtattacttgtgagataatacgaaacaaatcactaaggaggacaaagtgattcctagcttttgactctcaaagtgtttatagatatctttcagcaaaatgctcttagatgtgtaagtttgagtataactctcaatttttcggtcccatccccttgtgaatgccttcattatttataggggagagttgttacatatgcatccgtaaaaggagtgaacaaatgataaatatccctattttctaggatacaatgatgatttaataaagctcttttatttttggatagatttgttggatccgagtttgttggattcagttgtagatattgttggatattgttttactagaatctagatttactaccatgtatgttatttaacatcctaaatatgaatttctaaaaataatgtaatttaagcacatataaagattgagaaaccttacagtggttgtagcagaattaaatgactcattccgcttagatctctaacccttgtatcctttctgtagcagactatcaccaagatatgagcccgattctcct

SEQ ID NO: 319555 - DNA, 1420 bp, Cannabis indica
gtaataaaattgtagttttaatgtacacgggttttttttttaaaaaaaaaaaaaaaagaaggcccaatcaaaaaatttgcacgatgcctccaaaatgcttgggtcggccctgcacatactatatattaagaatattgttatttgatacctattaacactagtttgatatgttattttataattagttaacaattttttaattacttatattaaattaaaatatataaaattgaagaataaaatacaccaatataccacttgtgcttaacaccttagagcaagtgctataaatgaaactctaataatagtatataatataatttaaattaacataaaatataataccaaattttatcctacaatatatatttattttttgcttattaatattattaataaattttatattttatttataaatataataaaatatttatacattttcaatcaaaattgattgttcttgtggctttcaaagaattgattgcttgacttagtatttggcgacgactatattatgatttttattttttatttttttgatgacaatactttattaaatttaattttttttatataaacttaagacgtcaataaaatattaccattaaatactaaataaacgttgttatttatacgtaaaaatttaacttcgaatccaatacaataataattaagttaatgtttaaaggtggtatccaacatgcacctcaaatttatatatataaaaaataaatataaataaattttgccctaaagaaattaaatattaaaaatcaaaacataaaaaaattcactgcaaatatatttttaaaataaaattaattttaccactaatatattagaaccaaatataatatctcatcatccattacaacagttaatatttctcacacattaattattagagtttctaatgaaaataacttattataatattaatatctctaatataaattagcaatattaattaataataacaataataaaaaatatttacgacaaaactcttctaatatttacaattgttacacatataatacaaatcaaaaaagtaatagtaaaaataatttattttacgattttattacgatcatacttttttttttgccattaagtatcaactaaaaaaacatatgacgacatattattaaaccacatgttaaataagctaaaaaaattatgtaatcaagtgtttctgagctaagacttaacatgcttaatagacacttaataactaaaaaaaatactactgcaataaaattgtaaaataaaatatttttatcgtcatttattttagtataaatagcggcataagtacccaaagttttaagtttgtaagtggcataaacccaatgtttatttttagcgacataagtacccaatgtttgtaaaactgtaattttctcccagtttcgtc

SEQ ID NO: 319556 - DNA, 768 bp, Cannabis indica
tttgttgccaaaagatgtagtcccgaatgggcaaaaaagagaaagaaaatgcaagatatcaggagtcaaaatacatacaatcaccatgcgggccgaggtggtgttaagaaagttgaagaaaagttggagaaagagttgggccaccagcttactatatatgacagggcagacttgtggattagaatacacacgaacaaaaacggcgagctcgatggccctgctcaggaggtcgctgaccggattgtaagttccatttatcatatatgtgcttgatcaaatacttaaacacttttatgttgttcaaattcttacaaattttactttcttgaatgtaggctgagatacgaaagcaagttgaggaggggacaatattagtagaaggctcaaaagacatactcactctagccttgggaacagaagagcatggaggacgtgttagaggaatggggggtggtgtcacacagacacagtttttcaaaaccccgcgtcctaaaagaaagagagtcgatgacaatgatcgtatgagtgaggtggagaagcgacttgaagagtcagaggaacatcgtcgtagacaagacgaattattaaataaactcctccaaatagtccaaagccaaagtggtgttgcgggcacctcacatgcatctggttcaggtgttgggggagcatccaacgaaccagcttttgctgctgttacctcagttctaggagcaacacctactgccagggcctctgctccaccaactggcagggcctctactccaccaa

SEQ ID NO: 319557 - DNA, 879 bp, Cannabis indica
aactaaatcaatgtaataaaggagaacacaaccaaacattaatgctaataattaatttagttatttagacattcgtgcataatattttataaaacttctcatatatcaatataatcactttaaaaaatgtaaaatttttaagtccaaacaattaaacaatgatgttgctgtcaattctacttttggggtgtttggccttggtgctctgctcccaaactctaatggtgatgtcattgctgcaatggctaagcctataagaggctatattaaaaatgaagaaatagaagctttacctgtggcttggagtcttactgctggtctctcttcacctacatgttgatttaatagaaatacattcacttttggttgttaatggtttaaagccttcaactaaatgtctttctatttttcatactattcttaatgatgttatttttctattatccaatttcccatgagcacaggtctcttatgtctataaatttgctaataacaagattcatttattggctaaatttgctcttacggtagattcaaaatgtatttagtcgaggaacttccacttccacttatggttgttatataatttacttttagattaatataatagtcttttcaaaaaaaaaaaaattattgatacgattagaaaaaacttttttttagagagagaaatagaggattttaacataccataaatagcttaccattaattgaaccaaaagaataggtattggtgatattaaaagggaaatttgatctttcatgcttcaaaataacacatggtgttattttgaaccaaaaaattacacattgtgtaaatatgcctattttgtcattagtaaccccaaaatgccctcccctaccacacagcctcccctt

SEQ ID NO: 319558 - DNA, 674 bp, Cannabis indica
gcaaaaaactacgttcaaacagtaagttacacacgtgactattttattttatatgctgtaaaataaactatttgaacattgatttttatattgtaaattgttttgaatttctcaaaatatatcttaaatagttataacgtagataaaaaaaaaattagactaaaaaattattctagattataaaataagtagaggattcatcaatatatcattttaagagggtacattgtagaatcaacctaaaataaatatattttttaaaaattaaaaaataataataataaaaaagactttgaaaaactaataccgccgacacttgtgtttttttattcaaggcactaacttcactttataataaataaaatgtgtgtttcactttgtaaaataaataaataaaatgtgtacttggaatctttttatttcaattaaatgttttataatattaacaatacttccaatatagatgcgggaataacctcaaaaaatcataaaaatagaaatttaaaatacttacaagaaactcaaataaattataaggatatttaatttttcaaaataatattttgaaagtttaattttttgtcgcacaataattttatttcattattttaattgtaaaaataattcataagatatttttttttttgacaaagtgattaaaattactcatgaat

SEQ ID NO: 319559 - DNA, 934 bp, Cannabis indica
gaaaataggaatggaataaaataaatttaaaatatattaaaaaaattgataaaaaattattaaattttttctcatcatgtattggaatggtctttccttccatttcaaaatagaatagtcattctaccaaaatagtggaaaggtcattccattaaaatgacatttgaatattttaatatgcaaccaaataaatgaatggaatgaaaattgtttcatttctattccattctatttcattacctccatccaaacgccacctaaaagaattaattaagaaatatgtaggtgtatatggagacttttctagttattgggcttaagtccaaaactaaaacaaactagaaaactctagtaaatttaagttgggctatttatgatacaaaaaataaaaattttgatatatatcacatgcaaatttaattacactaaataagatttttttttaaaaaaaaaataacttaaaatatgagataaatcatcatggataagaaaaaaatcataaaaaactcatatataaattttacttttatataatcaaaagtagtttcttgatgaatgatctttggtgaattttgctctgactgagtatcaccagatgggtggatcgtcagtcgctgtttaccgaatgtagaacaagtgaacgaaggtggataagtggagttgttgaggggtgatggagttagggtttgacaaagaagaagtgaaatttttatttttttaaattgatttatctaaagattaaatatgggttgtgaaaattaaatttacagatacatggcatagcaaatacataaaatagttccaaaaaaaaattaccataaaaaatgaccaaacttaaagctgctatatttaagtaaaaaaaatgaattaaccactataaatacacctgttacgaaaattctgtttattacgcaagtgtacgtatcaagtagta

SEQ ID NO: 319560 - DNA, 645 bp, Cannabis indica
ctccctatcatctcatcttgcttaaactttaactgtgttttacgttttctgaattactttaattctcttaaatcataattgttttcgattcgccaaatagaattataagtatagtttagtggtatttaatccaattccctgtggttcgacatcacctgtgtgagttttactacttgattgcgtatacttgcgtagtaattaataaatttcagcaacaagttctatgttgttgtgaatatatcatcttgaacagttttaggaactagcagaaaacaaatttctttgttgtactgtcttggaaagttctattttgctgcagaaatgctggcaaaatttttactcccttgtctagaacccttattgttcttgattcccctacctggaacaaatgctcactgaggatcttttttgtggatagtgaatctgccagggacctctccaagtagtttatgggggagaattcccctgctccctttctatcttagttagtttgggtagctaactgcttggtatttttcagcatccataatgtttaagagagttcaactaggagttatggaagtggacaaaagaaaacatagtggtggagctagcccctgccccaaaattgttattgaattcctatccatgggatggatcattata

SEQ ID NO: 319561 - DNA, 1063 bp, Cannabis indica
ccaattttgagtttcctggtcggcatggcaggatcaatttgaacttcttcaagttctttgactagcctaacatttgtagttgggtccccaaggcgggaatccatgtcttcatccccacattgggcagatccctatttagcaatacttttagctttctctaaactcttgctggatgtctcttcttttttggccttagtcgaagcaaggttgtagcattctcgtgcagttctttgagtgccttccagataacctactccatttctggtcaaaatttttacatacatgtggtaaattgaggttactgccttcaaatcatataaggcttgtcaggccaacatgatgtttaatgcagaaggaacatcaattaccaaaaattgtgtcatgattgtattagcatttggagctttcccttttgtgagtagaaggtaagtgtgtcctagaggaacaatacattggccggattaaacatatacgagttgcgtgtaaggaacctagtctttgagttgaaactcaatcttttcatatgtagttttgaaaagaatatttaaagacgtcctattgttaattattgtcgaagtgactggcatatttgcaatttgtacttctacgactaaggggtcattatgatggtagatgacatggtcaaagtcttcttcactgtatgaaatgattggttcttgtctacatgactattttggatttctttcttgtatttcatttttctacacgtattgcagggtctgcatacttctctctacatttggagtccctagcaatatgagggcctctaataatcacttgtagatgttcgtccactagtggaggcatcaattgattctaagtattatcttgttgggcgaccctttgttcctggtcgaccttaatgtaccttcgtatgtgcggtttatttttcctgatgaggaattctatttcttgtttcaggttattacactcattgggatcatggttgtagtccgcataaaagcaaaaatatttggtggtatccctcttgcttatatctttcttggtggggcggggggggtgggggggtggggggttcggg

SEQ ID NO: 319562 - DNA, 2113 bp, Cannabis indica
aagtataataacgggacaaaattgtatccctatattatatatagaaagagtgtaaactaaagtggaccaatacacatgatgaggcaatggcttatatatatgaggctgttgtcaactttgaatgaccatccatctattgtttctaggtgggcggcggtccaccaccaccaccaacatcaacaacacaacattgttttttcttggtcaattttttctatttttcatttctataattctaattattattagggtttgatcatgttgtagactttagattcttgtagatgtagaccccattttgaagaatttatttatggattttgggaacaaggcaaggttggctaattggcaaatatgtatagcaaaatgggtttaaacactttaaacaaaatcatgcatttcgcacgtgcaacctagttgtccttgttcttcatccaactcactccatcttatttatttatttataataatgtatctataaatccataataattgaagcaaaattatttataatttttgtttggttaattatgatttttgtcctctaaactttagcatataccaaattatgtctcttaaacttttttagccgttaaaatttttccttgaactattgagattgttagatttaagtacttttgtctaatttcattcaattttactatttcagtataagttttacataacacaaggtccaaaataatatatacccttaacttattcatgaatcaaactatttttttcttcatctattttttttctctttaaaaaatcaactatatatttaactacatcaacattactaaacatatcatattcaaatattcaacctaaatgaataaatgtcaattatgtcattacatttccaattcaactattctatttattgcaacttttacattcttcttaattatcacttttgatttttccttatagttacattaatttatttattaattttttagtcacaaaaagttaattatatttaataaaaaataaataataattataaattaatccaagtgtttgagatttgacttgtggtattgttgaagagctaaacaacatttttcctttatcaaatgatcaaatgacagtttataatagctgacaacaaataataacaataagcatatatagttgtacagcaagactataattaaataatatatatatatataaatataaaaaaaaaggtttttgtctttttttcttttttaattaattgtatgaaattatttaaatccaaataaaataaatgtctgatgttgtgcttaataagcaactccttttaaaattaaaataatgaaaattagggtgtcacatgaatttatattatattagtttagctaaatttttcttgatatgattgattattgatactccatccacgtcatatatgtacagttggcaaactttccacgtcatatatcactcctacctataatggtgtatgattaataattaactttccatgcaaatttacataattatctcatttttctgaaatcttaatatatataacacctttcaaaataaataaataaataaatatataaacacacctttaacatagatatctaatttctaaacaaacccatttcagaaagaaaaaaaaattaaatgtattgttaaagaaaaaataaataaatagtggattattctttacttgaaatggtgggtaaatatgggaccttattataaatataaaataatgaaaatatgatgatgacgatttcatcaaacttggcccaaaacccaacaagcttagaattattctctttccccaaaagtaaactaaatacatataaatttattaaaaattcaattgtcacatttaaatgggtgtacaagtattttttgtttgaaagagcatagtagagatggaaattggtcggttaatgtacggggaatgcaatccccgcccccatccccgctacctatttatatccccatccccgccccatccccgtctaataaccaacggattcggggtaggggaatacccatcggttatgggaaacccatcgggtatccattaaggtaaaatgaaaaaaaaaattaatttaaaataattgaaaaaaataaattaaaccaatattctcacaaatat

SEQ ID NO: 319563 - DNA, 810 bp, Cannabis indica
ctgtaaaaagtagcaatctagaaagattattaatattgaccgcgaataataaattttaaattataatgattaatattattatttttaatccaaaagattataaactgtttaaattgaccaaaccatttacactgaattcatttagttcagtcttaaataatttaattcaaattagttgaagtttgaaacacatattagagattatataaataactctactaaaatattgttccatactctttgtatcaaaaataatatatcattacttttgataggtgggatctatcgcaaataaaaataattggttaaagttacttgttatataaatatggggatatgattttgtcccgtactttcacgaaatgtattttgtggtacattaaatgggtctcaaggtacatgaattatttgttaagtttgtatatgaattatttgtgcacatatcattacttgtgtttgtataatctaataaatattgtaccaaatattatttatgttttctcatatattttcaaacaaaattctacatattacttaacttatttatttttgctccaaagaataataaagttatggaatgaaaacttcacttgtatagtattttctaaacacttttaattcataaaaaatagaaataatatattttcttgatgtaatttattgagaccccatgttttcattttccttatttttgaacaaccttttctctttaaaacaaataataaccaccaattttaataattttattttaagaaactttaaaataaatcctacattttctttttggtaattgttgcccctgattttgcc

SEQ ID NO: 319564 - DNA, 1530 bp, Cannabis indica
gcctgaaccacgtaaaaaatctctcgtttgttaccttgttatttatcctatctttacttttcaaagcgctaaaaatatttagttgttgaaaaactctgtaatatattttggtgctgacaacctctgacattgtacccaagacagcctcgccactaggtttgtagtttgacactaaaggtgaggcttttgcgggctaaaggcatagcctggcttagtgtttctcggaatgctttggcccttctaagaagatccatactgttttcgagagccgatagctttagttcctagaatggagggagacttcagctcacggataccctccgtgtatctagatgtcgcgaactcctctttatagagactcttcccacaaagttggtgcctttattttcacggtcggggcatccatttgaggaagtggggcaactgataacttcttagcttttttttgattaaaactccatgtgtcatgatgaagaaaatacggataacggtgccaaatttaatataatattatattttgtgttatatttaatgaattttttatattttttaaattaggagtgctaattacaacctcctattacaatctcttagtcaacctccacgtccgaaatcacatgccgaaatatttttttttcaaattttttttcatgtagcggtatttgttataattacagtattgtccctgtaaatttttgaaaaaattcgaatagtttacaattctgaaaatagagttcttgatattctaattttccatacgtgttcaaaaaacttcaaacgtaggcactgtaaactactcgaaattttttaaaaatttatagagatggtattgtaagcataacaaacaccgccgtaaatttgaaaaaaaatattctaacttgacgtgtgttttcgggcgtgaaagttaactaagagattgtaacaagaggttgacggtaacactcctcttttgaaatttaaaataattttcttgcaaaaaacattggaaaaagtttattttttttcctcaaaagtctatacattactatttcttttatatatgctccatctcttaattagtttttagtttcttatatagatatagaattggaacatatatataagatgcccactctaaattgtcatttgtttaatttatatagttgtatttcatgtaatgtgcttgaacgattatttacattaaaatggcgtgacatggatttaattatataaaacatttaacaaagaggaatattatcgctaccacttcaaatggttttttttagtgtcgttctgttcgtgcccaaccgatatatatagattattatagctatagtaatgccattcatatccttcaattttaatattgaatgatagcgtatattacatacgtggatagcacatacttgtaatcctatcgtcgcctactcctgtgattaaaataagcatactcacctaatcccatcatgtgtaatataagaccatataaaataaaatatcatcccaatgaacgatattgattttatatatagcctgtgattgatgaaattt

SEQ ID NO: 319565 - DNA, 2115 bp, Cannabis indica
gagagagagagagcttctttctttcaattttttttcttattttggaaaatgaaataaaacttagcttttctaaaaacaatttcagctaaattcactaataaaaatcagatcattaacaataaatttaattcactaaagacaaaaagactagtggccaaaatgaccattttaccctttctccacaaaacaacataaaagagaacttaggggtattttgggaaactctaaaatcgcgactattcccgatattcccaatgtctaaaatatattcccgttaaactaaaaatactaagatgtgattctaatagccattcaccgcgttccaatgttgtcgggcacaaaaagatgcaaaattacgaaatttctatatgtgacctaaaaatgcattctgaattgaaataaatcatcataaataactcattcagtattaataaatgattttcataataagcggtcttcacattatatgtgtttatttcatattattttagaagttcatatttaggatgttaaataacatacttcttagtaaatctaagatccttgtaaaatatttccaacataaacatactttacataatctgggatcccgttattttataaagttactacctttttaaaaaatacttaaatacaaaggttgtcgcctatcaactatcaaaataaagtctgttgtcattaagattgaatactccaggtctaatcaccccgatatgtacaatcttcatccgtcatgctcactgctgttcgggcttagctttgcctttacctacacatataaataatatatgtgtgtcgacagactcagtaaaaaaagtataatcataacataaatataaattgaattataactaggcacgcatacacccaatcataaccatatcccaagtcccatgcataccgtgtctagaacgttcgtacaacagtactattgaccataatattaacctatactcgatactttagtagtactattgtgatagtatcaatttgtaccatgctaaacatatatctataggtatttagtgtaactctatgcacactaatacagtcattactgatatattatctaacagacattgataaacatgcatgctaaacatgtaatcacatatgatatgattatcctagtcttaccttgcttccaaattcaggtgtatcggtcaaccggagtaaaaactattgttcaatgatttatagtcccctgagtcacaatatacgtaaaactgataagtggtacactaaatcacgttgcagggacatatatttaaaactaggagtttcactatcgatagatagcgtggtaataacctaaatatcgataaaacatgaaaaactagggttccaaaattactagaactgggaaatcagattactaaaatagtaaactgttttctagggctgcctgggaaactagttaaccatttctctgtagtaaacccaaaaaaattcactacatgctcaatacttcctcaaatcgcaccgagctcttttaaatacataattcaacatccataaacataaaataaccagaaattgcaagaaaaacccctagaaaaagaatccaccattatagacaaaagtttaagcttaaaagctcaaacattgatctttctccacaataactactaaaatcaataagaatcaacacaaataattcaaatttaatacaagaaagaaattataaacattaccaaacaaaatagcaacccaaattctaaaacatagcataaaaataagattttctactagaaatccaaagggaaaaacgagagagcaaattactttgagctaaccctcactcaaattattaaaaccctaattgaattctcttgatttggtctaaaaataggaaggaaaaatacttattttttcttggggtttcgtactcaaacaaacacaagaggagagagagagagagagagagagaaagagctggtgtttaacttagttttatttttggataagattttatttaataaaataaatttacttcagtataaaacataactttaataatcaaataacaatattaataataatagtttctacataattaactaatgacaaatctagggcaaaattacaaatttccttctttcttcaccatgaaat

SEQ ID NO: 319566 - DNA, 2030 bp, Cannabis indica
aacttcccaaagtgtttaagatcatgcaataattttctgggcttgaaaaaattgagataaagccttatcttcatctgattgcattgttgctacacaagcttcgttcaggcggagtagaagggagcaatgtaacgggcttccccggttgcccatctcttttcctaaccatttgatgtggcccacaaagagaagagttacctgtagcaagcgtcgggctcccataattgccctcaagtaagagaggctccttaccaattaataaacgaggcccaatagctgaattgttaaaagcaaaccgagcggacccatcaaaatctttactcaacataccctgcccattcaaagatagagtcggcccaccatcacccggcccactaaccaattccttttcttgaacattaattatagccacgtcagcactattcttttccaaaagcccatcatttaaattcacattaggcccaaccgaactcggcccaggaaccaagttatttaccccaacgttacaataatttgaatcatttaaaccttcctttgaccggtcttcttcttcaatcctcaaagtagtatactgaacaggtaacttttctggactttgaagctctgtgtcacctccaatgcccgaaatagaacctcctcgcacagagcccacaggacgcttcttgggatgccacttcatgcgcatgggtttatcgagattgtcagcaacacgagtagtcaccatcgacgaccgcctcgatcgatgactatgatagacctgtttacccttcggatcaacggcaccctcagccgtggtcgccggcaacagagggagactccccgaattcttccccagggcctccgatttagcaccacggaatccgaacgagttaggcccagaaaacacgtccaggtacgttgaagagatggaaagccaaggaccatacatcggagactgaattcctttactgttgtcgaccataaccggagaagacaggttacatcccctccgttgatgtcccaaacaaccacagaagtaacaaaagatgcctattttttcaaactttacttgaacccatttctttacccctgttgccaaatcaaaaaaacaccctgcaaacagaggcttgttgaaatcaatatccacctgcactttcaagaaatttccccacaaagcaggtttgtcctcctccaagtcgacattcaccacctttccaactaaacctcccaacagtttgccattctcgacagaaaaatattcatgggggaggttatgaagttggatccatacacgcaaatgcttgaaaaccaccggcccatcagttgccggagtccagtcttggagcacaagagaataaccccgaatacaccaggggccattaaccaaagcccagttcctatcttcggccgatccaaagccaaacctaaacacattggatgctctcgatccatccaccatcgccacaacatcaacctttttattccaagctttgtccacaaattccaaaacagaagactcttccacaaccatgggagcaatgactttcccataaaggcagcaagtagatagagccttaagagaagaaacacagggagacagtttgaccgaagtttcaaggcaagaaaaacatttgcctttaagaggggatttggaagcattaaaagactccataaatacccgacagaaagcagacaaagcaatcaaatgaaactttaagagtcttcaccaaccacacgacacacagaataaacaaaaccagtaggagatacccaaaggaataaacacaaacgccaaaacacaacttttacctcccaccagataacagggaaaaaccaagtgacaaaatggggtctagagacaacagaacaaattggaacaaagacaaactgaagaccccaagagattacaacgccatacaatcatcacgccccatccctctagctcactttcactatcgcacactcttctctctctcactctcactcactcttagaagagtactaaaaaaaaagttttagataaattcattaatatcctatatctgtattaa

SEQ ID NO: 319567 - DNA, 1057 bp, Cannabis indica
aatagacaggactttgttttgttgcaacaaaattgcacataatgaatctcaagaagtttctgaaaattgcagtgtttaacgagtgcaacttgtacaaaaataaccacctcaataacaatgttttttatactgagaaaaaaaggtgggagaaagaatgtgataccttctctggccgtgtctccacattaaaacgaactagaccaacacaaagcacaagaacaattgctagcgaggaacaaaggacaagagagggatttctagcaacccaggctccataacccctgatgcatacaaaaattacttaacagatactttgaacacttcgtttttttcaaaatagagaaagaggccacttgtcttagactcccccgatatattattaagaacctcccttttcgcggaggaaaactgtggtaaacaaaaaatacgatgtgtcacaaaaaccataaaacacagtataatacagaacacaaaaaacgacagaaaacaaaaactaatacatcaatgaattccattctcgacataagtctaggaaagagagttcctcaaagtgtttagacctataaacccaagtcgctgtccaaaatctgattctttcccataaaatctctactgagctttccttgcctttgaaaattctcttgttcctttccagccaaactgcccacagtaatgccaatatggaagtcctccataatttagttattttcttcccaccagccagcttgtgtgttaggacttgcgctacatgagccagcttgtgcttaatgctttgataaatgtatagtttatacaccaaaagacccatgagcataggaatcactttcatttttggtaaatgtatgttttgataaatttgtgctcaatgtggtgttattgttatatgtatctgacgcttagaaaaattatatcccaatttcatttttatgacagtgtaggttgttagtaggcattccaccatattatataaattctgactaatatatgatgtcgaaaacagagttcaattatttctacccatataaaaaaaataagcacgtgtacaacaaactttttg

SEQ ID NO: 319568 - DNA, 999 bp, Cannabis indica
cacaaagtacaaattagggtcaatctcacaccggaacatcaagcaaagtcgatcgaatttatcattaggcatcatgacagccttgcttggtgtcatagagatatgacatgtatagactttaacaattttatgcataagttgcaggtggaccccaatttccctctagtcaagcggaaaagaagaaagtttgctcccgaatgcaacaaagggatcaatgaagaaattcaaaagctcatcgacattggatcagttagagaggtcaacaatccagaatggctggccaatgtagttgtcgtccaaaaaataatggaaagtggaggatttgtattgatttcacaaacctcaacaaggtgtgccccaaagattcattcccgctccctcacatcgacatgcttgttgatgctatggctgggcacgagctccttagcttcatggatgcattttttgggtacacccagatccttatgcacccagatgatcaagagaagacatcattcatcacagaataagggaccttctattacaaggtcatgccgtttggactaaaaaattccagtgcaacatatcaaagattggtaaattaaatgttcgcaaacatcctagggaagtcaatggaactatatatcgatgacatgctcatcaaattgctagcagtagcagaccaccttaatcatctcgaacaatcattctagtacatgaaaaatataatatgaaactcaaccctgccaagtgttcttttagtgtttcctcgggtaaatttctagggtacttggtgacaaatcaaggagttaaagcaaacccagatcaaatacgctccatacaaaacattcaatcaccaaaatcaatcaaggacgttcaatgccttaccgggaggatagcagcactcagttgtttgattttaaaatcttttgaacgttgtcacttcttcttgtgatagtcagtagtcccgtgatccgtaagggaaaatactgggtaagctgtgcaatcccacatcgcctg

SEQ ID NO: 319569 - DNA, 631 bp, Cannabis indica
aggatgttaataaaacatacttggtagtaaatcaaaaacctggtaaaatatttccaacaggatctacaccagcctacagattatgcagtgtcgctttattgtgataattagtctactattcgtctagctaaaaatctaatctttcatgcatgaacaaagcatgtggagatacattaattatcactttattagagagaaagtactccgagaagagctagtgatgcaccaaataaagagcaaagaccaagtagaagacatattcactaaaggactcaacactgtaagatttcagtttctcagagaacaactcagtatgatgagccgatgttgaggaggaatgttaaaagttcaacacctctcctctacaataagtatccagaattttctatcattttagtaatattataaaatcatctagaatcatagaagttataagaagttttaagaaagttttaggctataaaataatgacaatttgctagaatattctagcataaataatgcaccatcactactacaaaaggccaaattcgcgacggtcccaaaaacgctttttttggggatccgtcgctaaaaaaattatctgagtgtttaaaaccgtcgcctatattgtactataggcgacagtttt

SEQ ID NO: 319570 - DNA, 608 bp, Cannabis indica
aaaaaaaaaaaaaactaagtataaagctagctagtaatattgtgtcaatttctctaaacattaatggtgttgcaatatatcatgatatattggtgttgcaatgtatcatgttcattcttttttgtttttttaggaaaaaaaaccagccacagcactatatgtaatatatcatgttcattctttttatttttaacacaatactctccttctcttacacaatatatcttttatgctttaaaaaaggcctaattttgaaaatttgccctaagcccctaaaaggcttgagacgacctcctctacttataatgagatattacaaaaaaatttatttttagctacaataaaatatgtaagaaaaaaattattaagtttatgttttcactaaaaaaattgcataaaagtattaaccaaaatatatttttaattataataaatgtattgtgacaatactaaattagtaaaaatttatatataaatactacaattacgaaatccactacacttgtttggccgaagtaataatcataaaatgtgatgatacacttgttgggttttataccctaaataaaactctttacaatctgattagtaatcaatataagaaattt

SEQ ID NO: 319571 - DNA, 882 bp, Cannabis indica
atagaaatttcttaatagctaaggaatgataaataatatttgttattgtaattattaggttattattattattattattattattattattattattattatagttgctgatgttgtttatatatattaaaagaaaagtttatacatctatatgtatgttgataagaacaaaaaaagtaaagtaaaacctctcattctatcttctcttgagcaaacatgaactatcaccacaccattttttaaaaatattttagagcaaaaacataatgtgttggacttagatttcagctggaatccatagtagcaaatggaaaagaataaaggtaagctcatcctaagttttctttaagttttgaaaggatgaagtttggttctaagtgagagtttgttgaattggttgctgtaggattaaaacttgaatagggaaatgcttttgggttggaataggattcatttgacggttttaatgcctagttagtggctgtggtagggctgaaaagaagcttcagtttttaaaactcaagcttggagctccaatggtggatttgtgatcttgattccgttttgatttctgtaatgtagagaatattttacggatgttatataattgttctttgaagtttggaaagatttggttagatttggagctagtttggagggtttaaagttgagaaaatcatgttcctggctgttcagagctagaatcgtggatggttccagccagaatactatttcttcagtttttggaaaaactaaattttgtattttggccataacgttgcactcgagtatctattttggacattctttataccatttcgaagcttacaatgagctctatcatatggtgtatgttttagagccaaaatataaattttattt

SEQ ID NO: 319572 - DNA, 738 bp, Cannabis indica
tttttctttattattaacttcataaaagtagatcatgtgcgtgttgtattctcactttaaaggaaagtatataatgaccaactgactctacaatattttttaatttcttggctcaaataatcgagttttaagtttttggtctcctttttgtgaacaacaataatgcttcaatccaaattctaaatacgtaacattaaggcatgaaaacgagatgtagaaatcactttaggcataatcgatttggagttatgcctgtgagaagaaatatatgttgatcttactggtatcagttctattgtccaaaaagctcttcatgcataatgggaaaagtcatattgtttagtctcattgctataaaatattcaattcttgaacatttatttagtggcttactagacactacaaatgataaagagtttttcaatgatatagaaaaactatatgatccgattgggacacctctacgggtggatcaagaatcggttgcctcatctcaacccgggtcaggcggctggaactttgccgcagggaacaccagggggtgcaacaggagtattggctccagttgttcccctcggagatgcccatcatatccccggcctgccacccagacttaacgggagagtggccatgatctcgggaggaccccatatcggaggaactatccgcaaggggctaaagcgatacgcgggggccgtgaaacacgatgaggttagagaggttactcaactcccagct

SEQ ID NO: 319573 - DNA, 631 bp, Cannabis indica
gtcaaagtttaagggaaaaaattactaattaaccaaaagaataatttgtgaggtaaatacaaaagtatttaattattgtttacatcattttttaaattattgtttacatcattttttattaataaattaattttaaaacaaaaaataaaatttaataatttaaactaaataaaaattacctaatagcaatttacttatacttagagatatgtacttacaaaagcttcaataccgtaaaaattaaacttaaatatttattaacaacttcaattgtttgtgaactttgaaacgaaaacagccgcaaggaagaatttatttatcatttgatagattagggtgtagtggggggaataatgaaaatgattatgaaactaattctaattttaaatatataaaagagaaaagggcttggggtggtagtgaaaactgtacataatgaactttgatttgatgatacagaaataattacatgcttcttcttgtggctacatcttcttcaaagtaagctccccaacacttaaaaactattttggattgttgggttattgctcaaacctctttctataggcccccccaaattatgtgtcgagcataataacattgctgctcgctatatatatatatatatata

SEQ ID NO: 319574 - DNA, 874 bp, Cannabis indica
ttagacaaaaatccttaaatttaacaatcccaatatttcgaggggaatttttaacggccaaaaaaatttaggggcacgaattactacatgtcaaagttaaaggggaaaaattactaattagcctataattaaaaagcattagtctttctcttttgaccaaatcatataaatatatatgagcatttagaaaaatttaagtcaatttaattactacatgacactttttgaataatgatttattgttcacccataattagacgtggaaagtatgatggcccaaagttgaaggagaacaaatttttgaggaagatagaaagtcacctcctacaagaagtagatgcttaacatagtcaaaagctaaagaaaacaactccaaattactcagggtgaacatacccaaggtaagcgtactccttaactatacaacctagggcgaacatactcaaggctagcgtactcctagggtatgcgacccagggcagatatacccaagatgggcgtactcctagagtttacgacccaaggtggacatacctcgaggatgtcatctatggtcttgtcctcacctgcctttgataccatgtcccattcttaatcaagcatgggtgttagaccacatgcccaaattccaaaagacatcccatgtactcaaaaaccgtccatacccattcagaccccactcgactatgagtatcaaataaagacatcaccaaagttaatatgcaaccaaggctgttggtccccacatccaactacaaaatgggatcaacatggggaaactaaagtccctcgtcccaagggcataattaccaggacacatactgaggtagtacacacctcatgagtatgtcaagtatgttggatatattttacc

SEQ ID NO: 319575 - DNA, 957 bp, Cannabis indica
gtaagaaaagtataatgtaccacatggcatgatagattttgtgatcatagactgtttgattagacattaataatatgaatgtgacatacaacttcacctaattaggtgatatgatagatggattttaaattgtaagatgagcttacctgattaggcaatatgatgtataaatacacctaattaggtgatataaatatagtgccaagatatggcataggctgagattgcgtaatcaggcaatgcaacatatgtatatatatgatgaatgccagactatggcataaacttgtttgagtaagtaatgtgatatacagatactgacattcaagttaattgtacctatggggaaactattataaagtcatgattataaataaaaaatgctattaggttttcaactggaagcgtacctaattagatacgggcagcagtaatatgaaaatgcttagttatggcatatattgaaactcctgttaggtttctaacttgcggcgtaccttattagatacaggcgacaataatataaaaaatgcttggttatggcatagatcaaaaccactaatagatttccaactagcagcgtaccttattagatatgggtggcagtaataaatgcctagttatggcgtagatcgaaatcgctgttaggtttccaattggcggcataccttattagatacgggcagtagtaatatgaaaatgcctagttatggcatagatcgaaaccgcagttaggtttccaagtagcggcataccttattagatacgagcgacaataatataaaattgcctggttatggcatagatcgaaaccgctgttagatttctaactggcggcataccttattagatacgggcgattgtagtatgaaaattattaagttatggcacagaatgaaaccgttgtagggtttctgttgggttttatgccctaaataaaactaatttcaatataat

SEQ ID NO: 319576 - DNA, 1576 bp, Cannabis indica
taagtataaaaactcaaaattttctaattttaagtccacccatgtatatatatagagagagctaataatagatggcaaaagttagcttcctaaaatcgaaaagaatagtgataccttaaatatctatttttttttaaagaaaaattcataaaaataagtgtttgagaatatgctcaaacaatattctgagagtaaaacaaatatatatttttttgtatagctcaacttatacataaaaattgttgactagaattgacgatatattaaaaaataaattgtaacgatttttagcatataaattaatagaatgaatatttaattggtgatatagtattgcaaacagttattaggtaaggtaagagtcgtcttgttatataaagacctaacagtcgtctattttttaagtctctaatctttatatataatgatacaaagatttatatttctcttttgttcgaaaaaaaaaatatatttctcttaataataaaacatatatttaattatttcaaaatttgaatcaatttatatttagctcaaaatttataattgggctacaatacattaagagtaaattaactttatttttttatagaaaatataaaaagttaacaaatacattaagttttgattgaaattatataaaattcatttaaatatataaataaaatgtgaaaaattattaaagtattaatgaatgataaaagtgtaaatgaaaaaatacttattttttataacaaaaaaaaaatagtgtaggaaatttaattgtgtttttacaattctgccctacaccaacaaaacaaagctaatcaatttccaaggtcaatttcgaccttttactgttcaattgacttttcaaagtcagaacaccaaaacgactgcgttttgtgtttgaacaaaaccccaaggctcgagaactttctcagtcactttctctcttccttaggttttcttcgaaaccctagcagagagtttctctctgagaaactcgaaccctaacccaaagcaaacccagaaatctaagcacaaacacagcacaaagatcagatctacaatgatatgatctatacacgaccacacacacaaacagaaatagtttagggttagaaaacaccagatttttgccgaagttcaccaataaattggctacgtctccgtttgagctgctcctcaaagatgagagctcgatttccactatatcttgctgttcaacaatacatcaatggagaatccaagtcacaggtaatttttctgactggtaatctcttttattacaagtagtgtttaatccctctctctctcaatatctaactctttgttgtgtcttttgtgcatgtacgagcttcgaactctgtttcttcaagtattcaatacctggatcttgaagaacaccctcaactgtttagatctggttgttgatgcaggtatatatagatctagggttctggtttttatttctgcatgtgttagttaggtagttacagaaattagttaggtgtggatttaaccaaatccattctaactaatttctgttagggattttagaggccgaaggccaacttagggcttttacttgtaa

SEQ ID NO: 319577 - DNA, 1253 bp, Cannabis indica
tgtttgaacaccatgaataccatggttcttcaccaccaaaagtctccaactttggctctcaacactcttctcgcaattcactctctctctctctctctctcacatgaactctctcttccttacaaattacattacaattggtgtttaaataggttaaaaaatggctcacaaaatcgagccactaaccacttggacaaagccaacaaacttaacaactttaactaacttttctaaccaacttccaagaatgaaaagttaaaaccaaaactgattttctatgaattactaaccacaaactccaccttaattcatagaaaactagtaaaacaaaatgcttgggggagtgaacctgaacaactaaacaggtccaagtttgagcaagtccatgaaatacctgaacttgctcactggcagcacctttgttcctggatcagcagtgttctcatctgagggaactttctccaattcaatctctcctaattctatcttgtcctcgatccaaaacattctaatatgaatgtgcttggatctctcatggtaaacagggttcttgctcaagtgaattgctgattggctgtctgaaaacattgagactttttctttcaacatgctgatttcttgcaggatgcccttgatccatgttgcttccttgaaagcttctgtgattgtcatgaactcagattttttagtggacaaagcaactacatgttgcagctgtgatttccagtttatacaacatgaatttaattggaaacagtagctagtgattgattttctggtgtccttgtttgatgcataatcagcattaataaagccttctaacttcagtgtgttgctagtcttctcaaactttagaccatagtttgaggttgtctttcgataccttaaaagccatttcaaaccagtccaatggttcttcactaggattggacataaacctgctcaaagtgttgacagcatatgcaatgccaggccttgtgcttatcattgcatacatgacactcccaatggctttggcataagggatttcttccatctttttctttaatttttcatcttttagagattgcactgtcgtgaatacaaaatgaccagctaaaggaacttgagtctcttttccatcctccatattgaacttcttaatgacggccttttcaatgtatgactattgtgtcaacaatagcttttctctttcctgtctctcatgatttctatgcctaggatttttctagcaactcccatgtctttcatct

SEQ ID NO: 319578 - DNA, 1477 bp, Cannabis indica
taactaacttaactaactttcagttgtgttagttagttagttggtgctattattgcacctagttttaagctgtgagttgtgcctatttatagctcattcttttcacttctaaggtagagaatagagaaagagtttctgagtttgagtgcttagttttctaaattgtgagatcatgttcttgaaggggtcaagaactgagggtgtactcgggtagtagttgagaaactaagactgtttctctggtgtgattctcgagtgcagaagagcattgtttgctttggtattggtgcttgtataactctctcattctccaaattaatgaaagcaagatggtgttgttcagctagagtatggccagggatcaatcttgatctctaggaccggaaccaggataaaacttgttgtcttctttcttgttcatttctgtcatactgcattgtgttgtttatgtgtttgattgttatttttgttcaagttaacattttagtgcaagtttagagttcgaatcttggtgttattgttacaatatttacaataaaattagagcttaggtttaagatccataaggaggaagtaaaggatcaagatttgatcaagaactcatctacaactagtcatgacaggaacaacaagatttgaacttgagaagttcaatgggataggggattttggcctatggagagaaagtttgaagggggtactcgttcatcaaaaagttgccaaggctttgaaaccaaaagcagaactgactaacaaaatgaagaaggaaaagcttgaagatatggaagaattggcatactgtactatcattatgtatatgtgaaacatagtaaggagaaaggttcagagcatgaagacaactcgagaattgtggagcaaacttgaagagatttacatgaaaccctctcaaactaataagatcaatttgttaaaatctttatatggttttaaaatgttttctcatttgtctctagatgataatcttgatgcttttaatcaaattattataggattggctaacttgaattacacagttgatgaagagagtcaagctgtcattctccttagatcattgacagctgcataccaagaattgaaggttgtgatcaatatggaagggatactctcacccttgatgatgttcatggagcattgaaatccaaagaataagagatggccaaagaaaaagacaagatcaaggatgaagcttacctggccagaggaagagacaacaccaggggtagagatcattacaagaaggatcactttcaaaggccaatagagatctcagtcaacatcaaagtccaggggaaaatatcacaaggacaaaaagtgtaattttgtggaaaagtcacatcaagaggttctttattgagtttaagaataaactcaaagaagatacaggaaagaagcatgattctgcttcaaatgtagaagattcagatcattgctcatctgatggtgacttgtacatggt

SEQ ID NO: 319579 - DNA, 719 bp, Cannabis indica
tgtaaaatttacaccataataaatgcactatttttttatttgtatttatatcatttgtattattttattagtataattaactataatattaaattatgaaccatttatattattattttattatcttacatattaaaataataataaaattgataataaagttattaattttatttttttaataaaaatattaattagatattaaattttatattaaaattttataattgtacattggaacataatattaaaatttgatataaatttactgtgaaattactttttatctcaaatataacacaatttttacatagatgtccgatgaatttaccaagcagataaagctaactactactttgccacatatcatctccaactttatactgctaaataggaattacaagattcaaaattatatacttgatcgaaaaagaaagcagctttttatgcatatctactaccaaaaatgttgtggccccactttaagtagcatatagatatagatgtatatatgatgtcaaaaattatatcaaataatattttttttgaaaacaaaaaatgttacatcttgacttataactgattcgttttctaattgtatattataataacataaggtaaataccattttggaccatgtgttttgcaaaagttacagattagaccttgtgttttgtgaaatgacaaaatagaccctgtattttctaaaatagtaaaaa

SEQ ID NO: 319580 - DNA, 1418 bp, Cannabis indica
aaatgtaattttttaaaaaattttgaagagattaccgttctaaaaataaatatatttttatagttattttttaaaattaaatttttcttattttttaataattaatgttatgtgaactattaaaattcaccacatgtacacttgtgtactatattatgtctaccgtgacatttaaaatatatagttttttgaatggaagagataaatagctagattttagtagttttactactaaaaaaaatcaattaagtgattactttttaaaaaatataaagtataaataattttacctctaaaatttctaaattaaactaatactgcacacattaaggggaatgaattttttttttcaatgattaataagaggaagtaaattaaacattataataatgaaaaacgttgtaaataatttggtatataataatactaatgatgactttgttcaatgaatccaatcaatgtagccaggagcagacttataatggatcaagaaactagaaaaaatggaagtaaaacatctttttatttaattaaatttgttatttatatattattaatttgaccaatttgtaaatgggccacttcattcattaatatatagacttaagaaagtacattgttttcaatcaagacatgacagtgtccttagattttagtggaacaacattatctctatctctatctctggtggttattaggataagtgaaatgctaaaaggtatctgtgctgctaagcaccttcctacatatcaatatcgctattggtataatttagtattaggtcacatagtttaatatattaacttttagggagaatcgctagccaattgtaaaacgacacgtcttaagggtgttaggcaccactagtgcataatagcgatgttcttaagataaggcatctaaactacaaaattactcaccctttccattcttactagctatagctaccatatatcttgaggagaagtggcaactacaacattttataacaatctcatagttaatttttatgtttatatatatttttatagcagtgtaaattttttaaaaaattctaaatagtttatgtacagtattaaaaatagagtttctgatattctaatttattgtgtgtattcagaaaactttaagtatatttttagcacggtaaagtgttaacaaatgcctttataatatgggaaacttacaaaaatactgtaatttaagttaacttttacaaaaataccgtcacacggaaatcttttaaaaaatattgtgtttttataaaacactagtaaaacacaaagcagaacaactcaaaacaacagtagaacacctaaaaaataccagtgaaaacttaacatagtatactgtagtatgaaacttatagaaaaacacagtaaaaaagtttgtaagaaaataacaaaagttagtatacc

SEQ ID NO: 319581 - DNA, 1259 bp, Cannabis indica
ttttattttagttgaaactaaaaaaaaaccctcttaattcagtttgggcggattaacccgaccaaaccgcccaagccgtcggtcgggttaagattttttttaaaaaaaattgggcaggttgcatgcagaattttacaacccaatctttacgttgggttagaaaatatgtagtataagccgaatgaactgactgatgtacaaccctagtgttgggttagtcaagtctgaaattacaaaaacaattgggatcaaggaagccttgagctggataaaggagaaacattaggccaatgttataattgaagctgatgcattggtggtggttcaagctatcaatagcactattcttatgccatcttagtttggattattagttcgagattgtcgtgtgttgatcttttctcttattaacgtttctttaaattttgtcaaactatttgctaataagaccgctcattgtgttgctagagagtcttgttatttgtcagattgtgagtttagtgagcatgatacgcctctctcttaagaatattgtatcttctgagtgtttttaaatgaaatacatctttgattcaaaaagaaaaatatatacaccatatattattagggcttatttgtgtggcaggtcctcaaactatgtaagttttggcaaattgatccccaaactttttttcttggcaaattggtccctaaacttctattctactagcatccatgatcttttgccgttaacaaactttattcccgttagttttagctcctctattatattaaatgatatatttcatgttttcctctctttttaataagggtatgataggaattttcaaaacaataaattatgggcataattggtatgcttgaaacatgaatcttaagtgtatagaagaagaaaagacacatattaacacaagttaaaaaccccaaccagcttgaggaagaagaaaagacaaggtacaagagagaaaatgccattgtctagaggagcactgtgggtagctaaacattgatgaactccaatcaacaactgtaaaatcgctcctttacaaccaacgtgaggaaggaaaaaatttcttgaaatataaggtatctatatttatctatacatactaccatatcctttttctttttgataaatattaatacttgtgattataatcaaatatctatatttgacatacaaggttatttattcactcaattatggtggctatacaagaacaatatgaattgcagcctatatacagtgagtcattttt

SEQ ID NO: 319582 - DNA, 1302 bp, Cannabis indica
tttggcgacattacctttatggcaagaaatgtgagaaaaagtctaaaaattaggtgggaaatatcccacgtggaaattgggtttggggggaaaaactttttttcaacacatatttttgtttgcaaaaggttaatgaaatattgtgtctcgtttcagggtttctaaactaccttttaccttatgtatgctcatgtatgtactagaccatatatctattgttgagtgggagttttgagtaagcattaattaatccaaggaaaataacattagaagataatcaaacatatcctgaaatacaagaagaggacctatatgttagtttataaagggtatgtattaaaacccttaagctacaccaaatcagatttctagacttatgttaatactaaaaagtctatacatcggagatggtgattactctgcgagtggagcagttaatttgggagaattgtaaaaaacaatttgaaatcaatagctctacagtaaggctaaaaaataagatttctctaaaggcaattcgagaactattcagactcaggaaagtttgatatagacttttggcattatttccaaacatagaataattgctagtattactacatgataacatagatgaaattacaaaacaataaagaatcctgaaccctaagaagagtaaaacatataaataagaaattaaacaaaatcatggattttatgactaagaagaatgtaatggtgaagacataaaaaaggcgggtaaaacaggtaaattcatgactaccctgaagcagaacggtgatagcttttacaaagctacctggagctatatgaatttgcccaaacaccggtttgtgttgtggaaaattgtgaattctcatctgcttactcgtgataatctcgaaaaactccatgttgagcttgttactaggtgctgctcgatttgtgaagaccagttggaaaaccatgcttacctcttttttagttgtagtttttctcaaagagtgttagatcaaatctttaattggttgggatacaatgcttggccggtaacttttgagggctggaaaaagtggttgtctatgaagatttcaagtatgataaaaagaataaatactgccattcttgctgccatttgctattgtatttggctgaatagaaacaggtgtgtttttgaaggttgctccaaaacagttagctcaatttttgctgaagtgaagagtgtagttttatacaaattatactttgtaaataacaggaaaattactagacaagagaggaattacctgaatagattacctccccagaaatttcgagttgcat

SEQ ID NO: 319583 - DNA, 709 bp, Cannabis indica
ttttttttttttaaagataaaatctaaaagggtacaatgtatctagtaccattatgaataggttatcttattgctcaaaaataaaaataaaaatcttgttggcaaataaatgtgcctattttttattgcttgaatttattggtaagatataatttgaggaaataaaagtgtttaaatatgtgtgataagaactcttaaggtattgccgaagattgaatcatagtaaaatcagatatgagactcctataacttaaatgtaatctataagattgtcaatatgaccgaaaaggtagggaaatggaaaaagaatttacaccacatgatctcattttagttaataataaaaaaaaaattgtttaaataataaataaaaaaaaatagtaaagatatatgggtgcaccttcttctagtttttccacttgaatagttacaattttagtttattcatatgagggtatattttataattatttacaatatattgtatatttttttttgtttaaaataattttttgtgatgaaaataaaattttaaataattatgatttatactgttatataagaaaaagttaaaatatacttatttatgtttaataacaagaggggaatacactagtattgctattttaaagaaggctaattaagattttttttctccctgaactttgacatgtaccaaattatgctcattgaatttttttagccgtta

SEQ ID NO: 319584 - DNA, 728 bp, Cannabis indica
tataacataaatataataatatatatattaaaaaaaacaaaatccaaaataaatgaatgatctaacatctcttgtctcacttagtcactcttgtctctcacttcatttcagcctttcaccctctctcactcgtatctatctatgcctctctctctctcatatgtatctttgttagaaaaaaaaaatagttaagtttggccaagttaacccgatcaaattgaccaacctgtcggtcgggttaattttttttatttttaaattggacaggttgcacataaaattttacaacccgatctttacgttgggttagaaaatatgtagtataaaccgaccaaaccgatcgacgtacaaccctacaaaatacatattaacagagtaacaaacactctcttctctacaaaacaaaaatattattttcttaagatatgaatacaattcaaagtgtatgaaagaaatatatgacctagttgttataaggtgtatttataatcaatatacactttattgacaactcacacacagtctgaagaagactacaagttactagacaattccttattaaaaaagatcttcaatcaacactgaaatttttgtttctgtacttataaaatcgtgaacagttgatcaagaaactcatacaagatcagactaacacaattggataaatagaaaaaaaaaataaaaaaaaaataagtaaccaaatttattatttttactttatttttaat

SEQ ID NO: 319585 - DNA, 1031 bp, Cannabis indica
aaatagtgatcgtttagagttttataatgtcctccaatatttgttattattctaaaagagtaattttaattatcttttttactacaccaaaatttgactttcagtgacatttgaaaatgttacaatttctaaccttaagtgacatttattaaattagtaacatttgtcacaaatgtaacttatttcagtgtcactatatgccaagaaggaagaacatcaattagttaaaggaacaatttaattagaagcaaatatctagcttcccttgaattgtaagatcactaaagaaaatcaaatagcatatatgaacttcaaaaacttctatatctatagaagtatatgagataatgatatgttctacccaacaacttaatatccaagcttattcttcttattctcttctctcctcatcactagtatttcattattcatatcaacggaatagctaggaaaaacaaaattaagcatgtagactcaacttttccaataatatttcataataattacaagggaatcaataatagattaacacataaaaaaaaaaaactaatatcaaccccaatactaaaaaagaaaacaaaatcccacttgttggaaaagctgaaaggaattgctttgtctttgttaggatcttgagctaagtaagtctttcacactgtcacagagcttatcaggatgttcctccttcactgatttaacatgaaaaattcattctcccaagctgcaacttaaataaagaaaaagtcagagttaactaagtgttactttagagctacacaatgaaacatcatgtctataattcaagattaaaataattatgaaattgacataagaaccccaatattgaagaatactataacaagtctttttaatactaaagaagtcagaagtgacaacaaagcataaataaatgttaataatacaaaattagagacaaccaagagaaaattcaaacaccattaaaattttatcgttctaaaaaaaaagaaaagtcaaatgctatgtaatatcccgaaaacttaattataaac

SEQ ID NO: 319586 - DNA, 1070 bp, Cannabis indica
tagtaagaaaaacatagcataaacataataatatcctaggttataacctggcgcccatacacctgatcataaccctaattgagtcaggaacgttcttgacaaagtttgattaaccgcgaatctagcctatactcagtactctagtcgtactgatgtggtagcagataactcatactatctgatgccctggtatgctaatctgagggctataagtttgcctattccgacggcaactaatatgtacgctaaacatgtataaacatatgcataacattatagtaatcttacctcaattctgaattctagtgtgccggccaacctcagtggaataactgctcggcgaattacagactcctaaatcacatcgataacaacatgcataagtgacatgctaaaccacaaccgagacttaggttttaaaccaaaaccctatctactgcaacttaatatggcaataccctgaactagcagggagttaaccaaccgaggctctgaaactagaaggaatcgacaacataaatttgtcaggaatcccagctgttaaatcctagtaacctggtttacatgcattctaaaatcggttagccggttttacccagaaaacccataacaaaccaaaccctaaccaaatcgattccaaaccttccagacctacatattataccccaataaatattttccaagcaataaaacaactacccaagctcaaaatctaaaatcaccattaaagacaaaaatttgagttctaaaactcaactttgtcaaataaccaaaacaagctatcatttaacttcaaatcagctcaataaacataattctaacttcagaatatctcaatgaaaataaatcacaagaacagcaacctcaaccctaaaacaagcaaaacttacgaaaacaagaaggaaaagtttgaggggtttataccttgaattgaaatgctaggctcttactagaaatttgagttgaaactagaaaaacttcaattcttgttggttctagggtgcttcgagaaagagagagagctttggagagagagagggtttattttcttaatttctaatttttgtaaa

SEQ ID NO: 319587 - DNA, 1301 bp, Cannabis indica
taattagtttttatttttatgaattttaaattcagatttctttttaatgtcttatatggttttttttagaaaaaaacccatatttttagtttgattggttagataatgccatatttagtggcatttactttttatgccatatttatcataaccttaataatttttcccatatttttgaaaatagccctatttaataatcacattttaaatatccttagtaattttcaacctgaaattaaattgaaattaaattattaggaccatactatttttaactgagtccacaagtttgactcgtggtgatccaatggtatattaagccaatggtaattcgccacatgtaaagtaagagattggaccatatatccaattaattacattaataaatatattataacacgtggggtaagtaataacctcaatattcactttcacatcatcttttaatggaccagtcaaccacaaacttttgtgcccccctagccctagtctacatttaggtcaaactttttgacactgtaccaaagggtcagctgtggtactgtgtaattacaagcacgatatgattacaatcacgatatgatacgaaaaaaatatgaatttaaactcagtacaacacaaaatgtataaattttagcacgaaataaaaaatataaatttaagtacaatgtaatacgaaaaatataaatatataaacacaaaaacaaaacatggcataatgtcaaaatgcaatattaaatctgtcaaaatgcaatattaaatctataaatgtaattcttttaatcagtaatatatatatattacttttaaaaatataaatattctttcaaaaaatattaaattacaaaaatattattatttatgtttcaaaaactaaaaaaaaattaaaaatggtgttgcgtgatagaggaagcttacaaaaacaaattacaataattttattaaattactaatggttgttgggccccgctcatctactttgttggaccgctacctcaccttgactcccacattagtataatattatctgttttgggcctaagccctcacggttttatttttaggcaccttcccaaaaggcctcattctaatgggactagtgtctatccttatatacccatagttcttttcattccttgccaatgtaggactttggttgcattcccaacactactagaaaattggattttagtgacacacattgagtaactctaaaactatatagtgacacttcaacgcgcgtcactaatgagggtgactggaaagacagtttttagtgacacttcacacgtgtcactaaa

SEQ ID NO: 319588 - DNA, 794 bp, Cannabis indica
agaaaaaatgcatatgaagagatgtttgatcagtgggaatatataattaagcaaattagagatctaaatagtgccaaggacgagatagagtctgaaaagtcaagctagaggacactgttatgaatctcaacaaacttcttaatgggaaggacaatgagatctataagctttcagctaaactcgtaagagttaaataggctttagagttcatccctcttgcaacgactgctatcaatcaaactcttcaacttaaaaaaccttatggtgattgaacctctattgaatataagatgttgtataagcaaggagataacttaagggtagaagagttcactgcaccagtgatcaacctggataaaaaggctaacaggaaatcatcacttccctagacatctgagtccttggatcccactagaaaattccacattccatttggacctaccaaggtgaagtttgaaggaagaagaatttctccaaagaataatctttgatggagagattcatcctagagtgtaacttctgtaacaggaggggtcatatttgacccatatgctataagctacaggactacttgaaagctatgatcagtcgacctaatagctttcaacaacccaatagaactcaaggggaaggctctcaaagtaagtggagattgaggtctgattgtgaatcaaatgttgggttggtggctcaattttcactgtctgcatttctagaagggcagtcgtactttgatagtagttgctctacatgactagcaataagaaattgttagtcaattataaagaagcaaa

SEQ ID NO: 319589 - DNA, 2906 bp, Cannabis indica
ggatcctgaaacatgtaacttttgtttgtaaggttaaaattattacaagtttatttcaatccattttcgcttaaagtttaatttccacgcttattttattagtagtcccgtttaggggattagggtttcttaatcatcttgggttgcgtgcctaaatgttagggcattacagataaagtaaagaacacccaaaattttatagaggtttggcgccctttgttagcaggtaatgacctactctctttttagttgcattgataccaagggaaaatactattcagatcactacaagtgggatctgatatagctcccttaaggatacaaaacaggattcaagattacaaatctcaagtgttgagattgcttgtatgggtgtgtgagagagaatgagcaagagagttatcaaacttagagatttaggcttagagctttatcacttggaggctagaacaatacttagagatttctagattagagttgattccctttatatagtagagcttaaccctaatttacagctgaaacccttagatatttgtatattaaattagttaattacaaaagactaaaattcccttaaatatttcccaactatttcattggggtgttagggccaaatttatagcccaactcataatacacatgtagaattgtagaaaaaaatcttgttagaccctttcttggctaagcaagctattcagtcatgtgttgtccaaaggctggccagccatagggccagccaagggtggctggccagctcttgtgaggaggttggtctgtcaattgatgtattgtttgagtgtcgggatccctgttggctgagttctaacttggcattctgtttgtgagttgtattgccatatgcactgattttgtctcataagcaatgccacatcaggtgtgcaaaaaatttagataacatttgcccccccaagtccctttcataacgtctatatggatagggacttaccagttggattagtgcaattggaactgatttagcctttgatgaatagaagctactaaatttttggcctttggaaatactttgccttgactgtctgatctcattttctttagaaaactgattgctttatttgtctctttgttgtgtaggtgaggtaagtgaaggaggggtcccacatgtactatataagtgctttttgggggaaagcctcttcactttttagttttcactctctcactagaaattgaaatttgaagaagcttctccttctctctagagggccaaacccacaaagcatcaatctcttgggatttttgcaccgtttcaacgattcaagcttccaatcttcttcctcaatggtttcttatagtgggtaagctttctattcattttatttcacttaatttggtatatttttccatgaatgcatgaacattattctttgcttgaaatatcttttgtttcatactttagattgttgtcatttttgtattttgatctacaagatagacttaggatgcgtaatgtgtgaattctaggaaaaaaagatctgaatttgaccttcgttgtgattcttggctctttgagttacaaagaacatgaagaacatgtttgagttcttgaaaaaacacatgtttggatccgtacaggtcctggccggccaaggacgtcttgtttaagacctggctggccaaggatgtctattagggggtcaagctggccaaggcagtacaacccatagattggccgtcctatgcttgtaaattggattcttggccagccctaggctaggtcagtgggtctggccgacaactaaggcttgggaccctggtcgaaaaagcccaaggctccaagcagcagctagtttcttaccctcgtttgaccttgtctagggtctcgcaacggccttggaagcatatacaactgtagtcttatgcgtggttccccttgggaactctgtataagacctggtagtgagtccattatagtcaattacataacttaggacttaccatatctctaagtaagtatacataaaatggcacttggtcgacaattaaccttgtacattgtgatttacctaaaaggtaccattgcgtactgttgactagaatgtgtttgtagctttgtcaagttgctcaactccccttatctcttatgtgcatgtggttttgagtgtcaaataggggaaatgacaattgcgtaggtcccttggttatcctatgatcgtggccaaaacaaaacagacttgtcattgagcgcctccatgtgaccccaatgtagcaagggtggctacaagggatcgatttaggattgtagaggaggctacccagtctcatcttgatgttgagctagaggttgaccaggcagaggtgcctgaggtcgactaaggggctgagagccctaatattgagtctgatcttgaggaggccccactggtcagaagaagagaatacaggacttgcattttcctctccaactgccctttaggttgtcacgatgctaatggttatccactgaacaggcttggtgagcctttagtgttagtcttagatcatgtcttaattaagtcttttgagcctgagtttctggatgctcatagggagacagttgggtctctcacacttctaccctctctattgatgcttttagcaaggtacttgatagtgtttagtgaagggtgtccattgcgagacacatcatagagatcattgggcacaccagctttccctaggttggttggattggtcagagcatcatattgagcaggggaagtgttgttgcttcatccatacttccaagacatcgctgcttactttgggatgtgccaacatagatcactctaaaaagtatcaagtaccttttgtcgatgtatgttttatatagggacctaggctggcctcagcctactcctcatgagattggttattattttgat

SEQ ID NO: 319590 - DNA, 676 bp, Cannabis indica
cttgtgtatgaccaatggttttgcttttgggtatttctttttaaatgaatgtaattttgtagttatagtagtaattgaaaaatacatttttaattcagtgaaagttatttcttaggggaccaaagattagtgtttatataactattaaaccgtagcaatatgtaactatatatgattatgtagctataggtaaaccgattaaaaaggattgcacatctaaattaatttatcttacttgatgttacaaaaaagaaaaaaagaaattatgctatgaaaacagtctatgtggtaacaaaagaaaaaaaaaacaataatgttagcctcatatacgtgtattttgtattgtttggtttatttgatgattagaaattgagtattattagtaaaagaaatagatttcttttttgttttgatatttaaaagagttgctcacacaatttttcttattataatggtgtactttataactattcttatagttattcaagtttgtttgtaaattttcaaaaaatctgattaatttataatattaaaaataaagtttaaatattttattgtaggtgtatctaatttacaaataatcttatataattacagtatacagactattgtttttggggagttatatttgcaccccataaaattataaatacaccctattattaaaaaaaatata

SEQ ID NO: 319591 - DNA, 1112 bp, Cannabis indica
cagtgccggagaacaagacggcacaaaccatagccaaggtgaatgagtacaccagaaacagacaaaccctaattcccaaagccattttcaaataatattctttaaaaatatatcaaagaataattaagaagaaagaaaagcaaaactctgtatctctctagtggaacaacccagagagtttcattttatatttatgttttaattagttaaataacctggtcagattttatatatagttacatttatctatttcttttatggtatgaacatatatgcagaaaatttaatggcggtcagattttcatatcatgctttgatcgtgaccattggctaatttaacgttatggaagattcattacatgtggtacacgtggcctatcccccagttggacacgtgtacgtaatggccatatgttgcaaaagtagtttgatacagaagggacaagtaaatactgtatatgtatattgaaatggaaattaagaaagagtagattcaggtcataatgatctggacactctgtacaatgcagatttcatacttgaatttttttccattttgtgttttctttattattgtatgaatttaagttgttgctatagctatatattatacattgtggaatattcctggtatatttgtcatcaaatttatgaattaatgactcatatagtattatttcattaaaatcaaatcaaatattatcatttcattacaataatataattttatgataaggacactcttctcccccttttaatagaggatttggcttgttaattatttctattcatagagatgaattgttatggaaaatttaaatgtatatgcaattctaatttaaattcatatacaatcatatattcatataatatataaaggaaaatgttatgagtattaattttgactttatagtggaaggaatcaatttttttttttttttagaaaattcaataatattattaatcaacaacaattgttaataaagaaaaattacaaattaatttttataggataatttatattatagttataataaatattttatttaatttttttttttttgtaataatttacgttattttatatagtcagttgcatagacacgtacaga

SEQ ID NO: 319592 - DNA, 740 bp, Cannabis indica
gatcaaacctaatcattaaatttaacagaatatcctaaagtatattatgttaaaccaagaaatgtcgttagataggcacttttaatatataaagatatattgagagagagagagagttttgagaagagtggttagagagagataaagaggagaggatccgtgatcaaggagagaactcgatcaccattgattgatgaaaaagactatctaccaaactaacatggcatgaagtcttagaattgctataacattatcttccatttgatacagtgcagattgagcttgtcatttttgaggagagcttgaaaaagaggaagtactccactgcattgggaggaacctctaaaaattttgtgtttacttctcttttccctatctcttttcaagttttctgttttctagtttgaattgattctgttacgatttcttctttatgtttcacattgttaaaaatctaatatgttcatgtgctacttgaagatggttctagagttattgacattaagtagaagaaggtaaaactggtatagtattgtactaggaatggtgtttgtgaaactagctttaagtcttgataaagaaaaggttaattaaatttatttaactaattcttatttatgatgatttatctcatatatttaatatttttttttcaaaaaaaaaaacatattttgtgtaattaaatttgcatgtcatatctttatatattaaaagtgtctatctaacggcaattcttggtt

SEQ ID NO: 319593 - DNA, 1117 bp, Cannabis indica
tatatatatatataaatttatagtaataattaaattaaaaaataatgcctaaggttttatgaaatgattcagagaatttattgtagtcacatgtcacaatgttattaagtgatcacttcataattttaagaaaaaaattgtaaataattatttaaattcctgcaagagaaatcaaccttgaactattgaactttttttctttggttaatttgatcggaggaatggctgttgtggccattgaacaataaatttttgttataagaaaattaatctgtgtttggagtttgctttcaaaaaaaaaatctgtgtttggagagaggaataatatatatatatatatatatatttatttatatatgaatgacctcacctctgttaatgaaatatacatgttattgttattatattatttgatccaaacaaaaaagattaaagtacacgttatttaatttaattttattgagttaaatattttatatttgttgagaataagcctgatcatatataaacacctcaaatttgtaaacacacagagaaaggatgatcatgtagctgattccagaaaactagtgaacagatcttggctatgtcttctctgatcttcctggggacaaatccattggactgaaattcagcagaggaggagaaggagtgaggtcgattcaggagcttctggaacaattttatcggcaatgaagcgattatggagatcgattctattaagtttcattctcacaaaacctggatcttaatgtcgcccatccccacatgaccaaaggtatatcatcgtccatcgaaggggccacacaagatactatatggaaaacaagaagaatgtggctagaagataaaggaataaaaacattaaaccaaaattccatcatggattgagaatttgagaaagagattcgaggagtttgccattgaacaatctcgatcagttgtctaaaatgcaactcctaatatttattactacttttagatatataataatttttaattaagaatattctattaaataataatatattaggttaaagttaattaataggtaaaattataaatttgttataaatattaataattatgtggatgtctaaatcttttatttattacc

SEQ ID NO: 319594 - DNA, 3126 bp, Cannabis indica
agtagagagagagatcaaacgagagggaaagagagagaaggggaggctgttagatagggagggcattttggggttcccatgacaaaataggcatatttacacaatgtgtaattttttgggtcaaaataacaccatgtgttatttacataatgtatgcttgatataagattctcactatttttttttagctatttagctactatacctcaactaatggggatgctctaattagtgtggtcttttacgacgtgagctttcattcccatcagaacaagaaagaagttccatagagaattttttttaacctcaattgatgtgcacaaatcacacacaaatgtaacacatacttaaggcatctccaatgggagttgccatggagtagtctttgccacgtgtgtattttggtcaatattttaaactaattttatgagcataattactttatcaccaactaattttttgagaatatatacaattataaaatttgattaaaaaatggtatgtgggaccttggtgaacaacttttgaagttgactactattggagtaatttttgtggaaaaatgtgtcaattcttatgtggatgagaaagaaaatacaaacaaataatattttaagatgaagtgtgtattttagtaattatgggtgttaccccattgaagatgcttatatttgtcaaattacttcaactaattatttttatttaaagaatgggtcctgcttatcaaaaatgatttgtcacacatttgtgtgtaatttatgaatgcacatatatttactctctcaaatgtaatccttccattcaacaaacaacattacccgttataagaattttacacgtcaagttgtactgagtgttggcgctgaaaagtggccaacaccagctcactagattggctagatgaataataataaatagaaatgtgtaaattagagagacacataaaatttataatagtgtactccccatgctgcgatagtaatggagctacattaactttgagtttttatttctcacgagatagtaattatagaaaaaggctaagtgtttaagctttgatttctagagagagatgctctgatattgtgtgtagttttctgaatgtaaaaaatgaactaagttagctctccttttataggtgaatgaggcccataaaaatatggaaaaataatttaactatgaaaaatctaaattggctaattttgactgtagatgatgatccaacgatcaaaagtgcggtaaaattttaggtcaataactttagaattttgattgatgcgtgagacacaacttgatagaacattgaaatagcttctaaactcaagttgaattgcatcaatttgatcaatattgggtgagttatgactattttactgaaggtagttcacaacccagggcctagttgacatccagcacccacgttgacatatgacatcaacctggacgtggggtcagtgaaaaaacgtccatggggtgtactttatgatgtctaagtgatattttgacatcaattagtttatttttattttctggcgaagctagtcactagttcttggaaatgttgctattctacggaaataagagactcgaaactcttcatttccatgtaaatttcccatgttggaaatgagaaatgtaaagttttgaatttgacttctctgacttcatagatcttagtcattgtaaaaaactagacagacggtcgaaacataattagaatcgaataagcagaaccaagcgcaccagaccatttatcaacctgtgcgctaggtactcatttcgaagcttctaggatatcgttttgatacttccaagtttctagaacttgaggatgaggtatcctaccccatttttgaccattctagattctacaatcgaatcatatttggcatttgagtcatcaaaatcatcgtactaggctgattgtcaaccttggcgctgggtctgcttctagggcctcgagtttgtggttttctcccgagtttatttgaatcttcattttttttgaggatggaaaaatttccctaaatacttttttaagaacttaattagaaaaccaagttgacaatttgtcaacctcggcgctgggttccctttatggccctttaaaagttctattttgtccctaaaaatagttgaatcttaatctttcctgaaaagagagaagattcttggaacagttctcaaaaaacatcattgaaattggcccaatttaaaaaaatataaacctaggcactaggccagccccaggtgtcaacgtgggcgctgggtcttgcttctagcacccaagaaatattgtttcttcctcaaaagtacctattacctcattttttatgaagacgatgaagatggaaaattcagatcgtcgatatgatacttggaaggtgcccatattgacaaattattaacttgggcgttgggtgcccagggactgggtgctcaaaaatgaactttcttcgaatttgattatgatgcctctcaaatatgttcgtggcatgtctagttcatgtacaaataaaaattttgacccattttcactaagacggtcctaaaaatagaaacgttagttaaggatgtcaacttgagctttgggtaaagtccaggtggccaagttgacttttggggtgcaggttcatgcaatttcaactcttaaggtccggatttagttgctccatgtcttcatggtccagtgttatgccgatattttgagcgataaatatagacatgacacgtggaaagttagacatagaaattgtgaaaaactcagtaataaatgaaattatctcacacagataatttattatgagcaatatcagtcttgcattagacattgacagtaagactgttagataagaaacatatgtcgagatgtaatattatcccgattttcccccacatgatgtggcatgtacatgtgggcaagatcattgccacgtgaactataacttgttaacaagaaggccaagttatctacataatacatatattgtagggaagctagagtgcttgagtgggacgatgagacaacaaaccgatcaccttgatgttggaatatgttttaccagaatctagatttactaccacgtatgttgtttaacatcctaattatgaatttctaaaacaatg

SEQ ID NO: 319595 - DNA, 2360 bp, Cannabis indica
attggtatttttataatgtgtggtgtggtgtggtttgaagcgtatattaacaattcaaaatcgcaaaccgcaccgcaaggtttaggaaaaactcacaccgcaaataattttaaactgtaattttttgcggtgtgagcggtttgagcagtttgatgaacacccctacaaataagtgcaaacaagattaagaataaaataaagtacactatatgtggataggggcaccctcccaaaaaagcaaggaaggggaatcctcatctaaagagtcctcttgttcttgctcgaccacgatggcttttccctttctccccacctggacagaagattgagcaaccttatcagcaccgtctctgatcctaatggcccacttaatatgtactttttcaccttggggagccctcctcttctttttcttgctcggagcttcctgttcgggtataacctctccttcctgggctggtataggctctcttactacctgcttgaccacttgtccatgattagatgggtaaagcttgtactggataaaattagctttagtggccaagagagaaatgttctaatcatctgagggaagttggagaatttcttgagccctctctctgagtctcagagtgaacggaggtcagcaataagaaggaatgtactgaaaactggtgtgctctgtgtccatgccctaaacaaagtaataatcctccatatagccaccaatttcggtcaccacgatatttgtggtactaaccagccatctctccttgatctgagataaatagagatacctagacctgttttacttgggactcgacttcatgtcaaacagacagttagtatcatggggatggctgaccccatccttgagacgcgtacaacacaaactgggtagataagtacttaatgccctttggtgtgaattgggtcggtctgatgttgtagtaattggtcatctccttaaaatactgatgcaaaggcagcattgcatcctatttggcatgaggacctgaccatgcatagtaaccctctccagggtttgttaccaatttctcaagagagggaaggaagcatcagacctgccccaggagaccatcttcaaagagattagtaaattcttgaaagttaggatggatgatggagaaacccatcgacctccctttggacctattctgcttatgggacaggttcccccttctcattgaagccaccaaagggaagcacccgagctaccccctcttcctcttcgccctcagcctcagaaggagttgtaggatggacctcgccctggtcctccatttcctgaacttcaacatatccagtaatctccttttcctcgaccgtaggataggcctattctgccctgaccagggtagccagacgagcaatataagggttggcggatgaaggttttctgacaatctgcttggttcgtgccatcattttacgactcgatagaattttattggaggtgtgcttcgcagcggtcacaacaaactcatcaatagagtttcctttagctattgggattggacgacccttaggcagagtcttgaccatgctcagatggactctgcatgtccagtttgcaagactataacatctccaacctttctttagttcctagatgaaacgggtgtatccttcgccatgtatttggtcaggatacaaatggtgttgcaccttgggctctagggaaggtgtgtgttcgctgctcacctcccaatattcaaaactagaattcaaaagattgtcactagaagaggatgggtcagcacgaaggtgtgggtgatcttcgtacagaatttgaagtaagtcctgatcaatgtgatgcttacctccctagaaatcagcatggttcatctacaaaaggtgggaaacaagagaataagagttggtcagggtaacgaatgaaagtagattgtgtatgccggccaggcctgatcaagaatcaaaagaaaagatttcacccagaattggaatttccagtcccagaacattgtcagaacattgtcattgcctaattagacaatcaacaattacaaaacatgacatgtcatgtggtacattatacttttcttaccttaagtctcagtttaggtatgttggtcgacctgtatggagaatgatcaacgattgttacgaaaatcatagaacagtacgcaagtgcacgtaattaagtagtaatctcacacaggtgaggtcgaaccagagggaattggattgaataccactagactaaattttatgattctatttggcaaaccaatagtttttaagatgaaaaatagaataagaattcaagaaacttaatgtaatatcccaataagtctaattggtaaataattagggtttatatttatattatgagt

SEQ ID NO: 319596 - DNA, 1853 bp, Cannabis indica
atatctgcatgtgacacaaccaagtgccatctattcctctacagtttcgttatctactacatctccaatcacaacaacatctacagctatcaccacaacatcaactaatagtaatgctaattccaatttcaattttcatcttagaatggatgatccacaagaaaatagaatgtcctctttgttcactaaaagatagttagtttcttcaggtggtaatgttcgccatgtgttaaagcggtgtcgtactagagacattcctttgactgattcgaccaacactactacacaccaacacgttgaaaccatctctgaattgtctaaactttcactggtggaggaacgttgtggtgtttctttggcgcaggctgatgagcagtcttgccattctccatgattatcgtaagtttgaatgcttggggcttgggaagccccagagtatttcgttaactttgtttgctcatttcacaatatgatcctgatgttctttttattatggaaactaaacttagtatatgctctatttctaaatgtcactttgtttttaattttcctaatggacttgaagtcccacatgttggtttaggaggtggcttaatgttgatgtggaagcctactgtcaatgtaactattttacattatggaataaaatttgttgatggttacatctcgtatttagatggtctaaattggcatttttctgctttttatggtgcttaagctgtgtcacaaaggattctgatttgagaactcttgaaatgattaaagaatattactccacttctactttggcttgtcatgggtgattttaatgagattatttctcatgctgaaaaaatggagggccactgaggaatgaagcacaaattgacaattttcaaaattgtattgatttttatggtctccaagagttacatttcacatgggaacattttacttggcacaaaaataatatcattggaattaatattaaagaaaggttggattatggttttgttaactcttattgggaaggttccttttcgttacctactatctaccatttggaccttttttgttctgaccatcgagcattgaaagtagttgttgctctagttaatcaatcacctccggaaaagttcaaatcttacttttgattcgagaaactttgttgcaagaggaggattgttgtaatatcctatgattagtaaaatagattagcaacactaattaaaataaattaactataattgagtaattatatcattatacaattaattatatgaaattatttgggaactattgtatttatgacctcatatatgagttaggggcatttttgtaattttgatctgagaaaggtaaaatcatatttttaatatttattgtgctaaaagattatcttattatataatatgtttattttgtctttttgtaggtaatttttgataagttggcacggtttagtcacaaccgggtattttgggcccgaaccaagttcgggatccaaaattatttttgtgtgtgattatgttatagcacaatttaattaaaaatatctgaatgtgtatttagaattgaaatataaaaaatgcccttaattgccatttatgtggatttttgtgccttgagggcataatggtcatttgaccaaaatgtgataaatatgataatgattcatttttaaaaaaattagaaagaaaatattattttctttgttcttaaagccccaaccgaccccccattctctatctcttttaacttttgcaaattttgaatttaaagaagaaaagtgaatattgagtaggaatttttggtgttcttacttgaatctgactaagtggtgtcaacacatcacttaggcataaaaaaaaaat

SEQ ID NO: 319597 - DNA, 786 bp, Cannabis indica
ctctctctctctctctctcggtaactctccctctccttctttctctttgactctcaccaaccatctgaaagacccacagacccacaacctccaaccacacgaaacccacaccttctgacgagacccatgaccattgacctctactccaccacgaaacccagacccattcccaagtcacacaaccccatcgtgaaacccacaacccaatcgcaaaacccacaatataatttttgaacccacaatgtaatcggcaaaaaaggtatttttctaaactttttattgattttaaatgagttttttgattttaaatgcttgattgttaggaattaggttatttttttgtgttttgggttgattttcactattgcctgttaaagttctaggttttcactgattatcgacattttgtaacattttttgcgacatttctcgataactcttccaaataaaaataatatgcagtagttgtgtgtttttgttaatgtttcacgacatgttgagacatctctatgcgacatgtatttagggttgatgtgtttttgaaattttaattgtttatctatagtttcacgatattgctaaaatgtcgttaatagtatcgctagatatcgttaatagttgaacaatgttttaattatttaaaatttgaaattttatattgttagatgtcatcaatattatcgctataaatcgttaaatcatggactgtgtttatcgcgagacggggaatgagaaaaaaattatgaatctcacctttgaaaactctatttttgagagagagagaga

SEQ ID NO: 319598 - DNA, 1397 bp, Cannabis indica
atcataaaatagagcaacctcattacaagaaaaactttataaaactagtttcgaacttatgaactctgtgaaaccagattcgacactatgaaaaatcatcacgaaatataaatgttaaacaataaagttaactgaaacaagttatcaaaattggcatagtcgctagagttgctaccggcactgggaaagtcaccggaattgctacgggcgctaaaaaagtcattagaattggcattatcaccggaaaaatcaaaaaaaaaaaaaaattatcaagaaatttgtttcttgatgaagaaaagaaactagattcttggtgattttttcggtaatttttccggcgacaatgccaattccgacgaatttcccagagtttactatcggtactgaaaaattcaccggagtagctgctggtgtattagtcgtcagagttgctaccaacgccagtatagtcgtcagagttgccattgtccattgtcgtcagaaaaatcatcggaaaaatcactaagaaactggtttcttcatcaagtaactggtttcttcattaacaaactggtttcctcatcaagaaaccagtttcttggtaattttttctgacgactatgccaattctgatgacttttccgaagtttgtttcggtgctgaaaaagtcgtcaaaagagttgtcagaattggcattgtcaacggaaaaatcaccaagaaattgtggtttcttcatcaagaaacctatttcttgaaaaagaaaccagtttcttggtgatttttcaatgatttttctggcgacaatgccaattccgacgaattttccagtgccggcagcaactccgacgacttttccagcaccgaccgctacttcggcaacttttctggcaccgtcatcaaactccggtgatatttccggcatcaatgacaaataaaactttctaaacaaataaaaatattaaatatgggatttgaaaccctaattacatatatatggttatcaagaccaaaaatataaattgatcaaacttaaatgtgtcatatgataataagaatctttaaaatttaaaatttcaaagtaagtgtaattttctctttatatttttagtgtaaaaatttctttaaaaaaattccctttcaaaaaatttatttatatatatataattataatggtgggagtggggtttcctactccatctttgattgtaattcgtaaaaagtgggcaacggaaagtaaaataaagagaaaaagaaaagaaactttgccttaaatgaaacaacataatcattttacgaaatgacaccattactctgaaagcatctcacactaattagctacctttcgcaacatttataaatctagcttttctcatgacttgaaacatacaactattgttctatatttatatatatatata

SEQ ID NO: 319599 - DNA, 430 bp, Cannabis indica
ggcataaaacccaacaggattttctgtgggtgggacaatatgatcgtaaagatcatgaacccgagtaaggtttgtaaataaagcagcccatgagtgataaagagcatgctcgttatctaacgtgataggaacaagagattttacattggagctggtgagggtaggatggaagttggctgcacaatctgccattgttgagggtgagaagaagagaagggaaagaagaagaagaagaagaagaagaactgttatggtttaacagggaggatcgatattgtctctgatatcatgtaagaaaatcattccgtgtcccttttctcattatcaaatggagttatatgtacaatatacaagagtaatggtatgctataaattagctaactaattgctaaaaatatgtaacaaacattgaccaaatcaattaaagata

SEQ ID NO: 319600 - DNA, 1858 bp, Cannabis indica
ttttttcccaaaatattaaccgaaaatgattaatattaaaaatattaccatgatcaaatctgtctactactttcaaatgtttccaatttggaggccaaagtgttgggaaaaagctttaaccaaaacttgagcataaaaaaatatggaaatatcctttaattgattatgagcctcgacttctcccttcaaagccgaaactacttaaacataagttgagtttgtgacccaaaaattctctcaattgtttttgatccacacaccagataaaatggacacatccatgtttgattattgtgggattttatttgagatttttacaaaaatattaaattttagtcaaaaatttacaattttacagtcacacagaattttttacaaaagtaatgtttttttataaaacaacaatacataacaattaaaacaatagtggaacaactgaaaaacaattgtggaacaaccgtgaaaacttaatacagtacacagtattataaaacttacacaatatttttgacaaaaaaattctatcccacagtaaaaagcaaaaaaaaaaaattaaaaattttacgtatgtagtgtaaaaatctattttattttattggttggaacaattcttgtgagatgaagtaatgatttaatggttgtactagattatatctatgttaaataagttatgtatttaatattttgttccacaatttttttgaagtcatagttaaatttagtattaaattaacattaaaaaagtacaattttagcactaattattttattccaatcacgacattaaaatttatattatttattattatattattttattaaattattttcacattataataaatataaataaaaagtttaatcaaaaatatattattttggatatcaaaactaaaaaaataatataatttatagtgtcccactatttttaataaaacaccatacacttccacatatataagataggataatgtttaagtagagtcacaaaaaacgtctctatatagagatattttttttttttcattatgtgtcaaactattattttatataataattaattaattcctttatattatttttatttctttttttgaattaatttagtgaccccttaataaggaaagttgctaattaatgttatcgaaataaagtcatatgaactgtggtaaaaaaattagtattatttgattaattaattgtacaatcaaatatatttaaaaccttaattttatatgtccaatgtgttcataatatttaatcgctaagtttcactatatatcaaaacaaaaatattgcaaaagtgtttcaataaaaaaaaatattgcatgtaagacacattattatttgaagattttttttagtaaatgaggttttagggtcctcaatgttaaatattagctaacttttctcattaagggtcactaaattattaaaaaaaagaaataaaaataatataaaaaagaattaattaattattagtattaaataatagagtgacacataataaaagaaaatattttatgtagagacattttttgtgactttacctaaacagtttcgtataaaataatatttaaaattatattaaaacaattttatattcatactccactatattttgggattttaatgtcccattaaataactccttcaaaacaaatacattttttttttatagtttgttcggaaaaaaaatgtttataaatggataattatttatgaatgtcagtatttacatggctagtagtcagtcaaagtcaaagtcacataggtttattttgtcaaaaatcttattatcttgtttctttcaaccaatgtctatttgtgtatttttttttttttttgtagtaatgtg

SEQ ID NO: 319601 - DNA, 1004 bp, Cannabis indica
atatatggtcaaagaaagcatgtattgggttattgaaagtggagaagcaacaaccaatgcatgtgccctaaaagcacaaccacatatgttcttggtcggtgtctcatcttctctaaaactttattcatcacatatataaatatctatacatatatataattatataaattatgtatctccaaaaagatttcatatattaattagggaattcatcttcttatactcatctcttttaataaaagacttatacagttctataaactctttattcgtttaagagttttttttttttaatttacttttataaatatagaatattatttattgttctaaatatatagtttaaataattattttttataaaaatatgtatatatatatttaaaatatattaaaattttaaaaaaaatatttaataaagaaagtaaaattttagtaatatattttaagagatagagtagaaaaattgttaggaatactgttaaatactgtaaattttgtattttgatcaaattaagtttgatgtactataaatctgtactgcaaaaaattgctacttttagtgacaactctttaatcacaacataaattttttgtgattaaatgtaacttttagccacaacaaaaagttatttaattatgactaaaaacatagtatttagttacaagttgtcactaatttagttttagtcacaatatttattgtgactaaaaacagatttagtcacaacaaattgtaatttttgtgactaatacttttagccacagactttttaattacaacacaataatgataatttataattagccacaactttttttatctttagtcacaaattttgttgtgactaaaagtaagattgtttgtagtgctgatctagcagatgaaccgaatgtaataagattagccgactaattatgatttttgtcccttaaacttataaggtcgttacaaatctcttctgaactattgagaatattattggattttaattttttttttt

SEQ ID NO: 319602 - DNA, 662 bp, Cannabis indica
gaaagaaatcaatcacgtttgttgtttggaattcatgaattaactttgaaaaataaattgaagagatgtgtaaataaaatctgacgcaaaacatagtaattttttgcgtttgctgtatatacgccagttaacggaactgacgctaaaactatatatatcggttaggaactaatggtaaatgagaattttgtagtagtggatccttttagatggctttggaagatgcaatggtgtcaaagctttattttttagtggctctccatcttgaataacttcttcaagggaaaatttctttatcaatttcttgctatttggaaatggttactcctttaccagatgaggattcatgtctccaattgctaaacactcccctattgcatccgaagaacaaatggagtaaaaggcattgaacgttacttgctcatcttgagctctgatggtgaggtcttatttttcaacatcaatcaagattcttcccatcactagaaatggtctccccaagatgattggaacttctctatcttcctcataatccagaataaacataggcatcaagttaatgctcatttttaagtcaactagttacaaagttaaagtggttagttatcaaacatgtgaacattgactcacggtaaaaaatttcctttggcgtgcttctaatg

SEQ ID NO: 319603 - DNA, 1284 bp, Cannabis indica
ttttatctttaattttttataactaatacaaataagaaatttagaaaattacaattttactctaattttttataactaatatacagttaatattctaacatattcattaattttcccaaaactaagtcttgtattcccttcttgcagacgactagagtcagatttgtcttcgacaacgaggccctggtttgtttctcaatcttccagaaaagtttgttctttcttttagatactatcttacaacagtacgctacaatgaacgatatcatcctgtgttatgaattttgattttgtactaggatgaggttcactgcattggacggctaactcttttagaatttgatataacatctgttgtttttacatcaattttgactcatttctggaatatattctcttggcatttataatcaacatgactttaggaggtcaaagtagggaacgagcttcaggaatcaggtgaaaatgtctttgttggagggaaaaaccgttggaagtaagtcaactattgcccctgttggtttgactttcgaagtaaaacaatgtcaccaatttgatttgactgcagatattcaacatttgtgaattgggagctttggtggccaaatttcccaattcttgtttactttaaagaaacacaaactaagcctgaagggcaagttcacttctttccagttatatttgtgagtacctctttttggatagaatggttttatgctcaaatctttccaaacacaagtttctggataattttcttaagaaaaacattttgctgttgtaatcacttacagaatggaaagcaactttatgatgtgatggtggagagagctggctcttctaaaactagtggaccaaaagactcctgaagcctctgagcactgtagttacataaattctagttgtgccatccaatacagtgttcatattctgaagagtgcagtttattagcatggtaagatttttggaattctgtaaatttggatatgtttttcttaatcaatttgcaagaggcaattgagtttatacaagatgaatgttatgttgcaggtaattgttacagtggcatcatttagtacttgaactgaatatgtaaacttcccagttcaagctaaatctcattacattgtttctactttatacccctaaaccatatgttttaatgtagtttagatgcaaagtacttcaatcacttgcagttgttttctgctcaggatttggcttcaaaatgttttaatatacttctctatacgtatagaagtgatgtaatttgcttcatgaacaatg

SEQ ID NO: 319604 - DNA, 949 bp, Cannabis indica
ttttttttttttatgctgtagacacactaaatcaatatcaatgactccatcttcgttccccacgcacagaacctgaccgacaacaccgaacacccgaaaaacactcattaatttcggtgagattgagaaaaataggcaaatcaacgatagatgaaaacccaacatcttcatcaaagccagaaataaacaaaacaaaaagtttattagacactaaaacccatcagattcttttataaacgaaaataaaaacaaataacaaatttagatatgaaattcataaatcaaaaataggcactagcatctgaaattgtattaaaatacatctaaaattgtattagaatacatcccatattgagaaaaatacaaattaatgtacatcattgcacgagtattaaaaaaacagtcgattattaattcatgttgaagtattcaacgttgttctagagtctttcttgcttaataacctacattttattgtaaattaagaatatgtataataaataggcaaccagatcattataggaccagaaaaataaaagaacaaacgtcgagctattttctactgtttttttttttttggtgttgttgtatgtgaattaaaatgttcaattactgaatttctataaaaatattccaaacgagtgtacttgggagtccaatcttggagaaggaacataaaaactactaaaataaaactaaaacaacacgaaaacaaaccaaaaataaatgatacaaccattttaacaatgacatcgtcaataacatcatccgattaaacgttcttaattggggatttaccttcccttgcataaaaacaaagcaacaataaacaacacaaaaatacaactgttataaaacaatgaaatactgcattcaaacaaaacaaacacacaaacacaaaataaaaaaaaataaaaaagacatattaaatataaaagtaatacatccc

SEQ ID NO: 319605 - DNA, 776 bp, Cannabis indica
cactaatattttacttacgtaatcaactggttgttactgccttccttcttcttttacaaaggctacactgagtatatgccttcacacaccacgatagagaaataacttttctctttttttgattttgctaattgtggtggcttccccaagtgctctttgagtttcctgaagtcctcctcacagtcctcactctagagaaattctttgtttcctcttagcatgtcaaaaaattacagacattttttatcgattgagagataaacgtattaagggctaccaccctccccgtgagacactcaaccttcttctaattgtaaagtgggtcaaaatcacaatttaaaaaagaaatcagatcagtccttatgcagccccactctcggccaaaattttcactcaatccaagcagtccacgtcttcatccaatggcccagactggcgagtgagatgcatccccgaataaaggaagtggagcctggaatccctaccgcatgccagcaccgtgtgggacccccagatcagttgtcctccttcctccttccaccaagcgggcgcccagtcagctctattaaaaccaaccagcgcacgccacatggaataccatcagccttcctacaatcccagtctgccaagtgtcctgcagaagaaaaagaagaaaaaatggttgatttaaatgtgatacataacagccaaaaattacaataaaaaaagccaaaaatccacatttatctcgcacatattacacataaataccctattttatcttcctaatttatttc

SEQ ID NO: 319606 - DNA, 999 bp, Cannabis indica
ttacattacaatgctatgttaaaaaaaagaactaaatagaataatctactactccaataataaatttatttacaattttataattacactaatattatttttaatacattattaaataatatttcaaatataaatatttaattttttcaaacaaaaaatttgtaatctttaaaaataaaatacattcaaaatcttaaaaataccaaaatcttaaataaaactagcaatacgtggctcggcacgtacattcacctagtataaaatatatatactaaactttttacggtgtacagtttagttatttagaacatatattacacaagttttaaattttgaaacttctaaaattaaagttcaaacattataacgttaacctacataactatataaaattcttagaatataactattcatgtgttaacactaaataattatttttttaaaaaaaaaaacatgataagatacgtgcaaatggtgagcaacattcaatctaattcaattgaatcgaattaaactgatccaatccaatttaattacaaaaaattgaatatccaattacaattgaattggattggatgctaaaagttagattctaattggattagatcagttattggatgtcaatcttaaaattcacttaaaaactgattcaatctaattacatttatatgtacattaaaatattatttatattgatttctataacaaaaactaataaaaaaaatatattaattatatttttagtggctttttttttgtgaaatttgtaccacttggtttttctatgtatttattttcatgatattttgttatattttattacttgacatatattgttgttttagttatttcaaacgtttaattatattacgcttgtaacaatgatattttttgtagagtattaataaacttaaaaataaatggtaatatttaaatttacgtttttatctttatattttttaagttaatattaaaaattaagtgtgtaattggatatcc

SEQ ID NO: 319607 - DNA, 1046 bp, Cannabis indica
gacatgttgcgacatctcttgcgatatatctcgacatataatttttttccatttttattttgtggattcaactgtatttgaggttgtactatatgatgaggcttgggcagttggaggtttcaactggatattttgttgtacgcgtttctggcaagggacacgtggactccaggttagcatccaaagcccactagtaggcccaaaaaagataacttgagccaagcttaagtccaataaggccttcgggaaggtaacttccctcctcgattcacgtgagcttccgccaaggactgcccgtacctggaagcaattctactatgctcctggaagactagatagtgtgttccttgaagaccagaatagttttccttttgtcaaattgcacaaaataagagattaactttcattatttttcagccaaaaaatcatatcaaattaaaaaggaaacctaccaaaaatgaaagtcaagtaattaatttacaattgattacccacaattatagggcacgataatgacagcctgatcgtggttaatttgcttagtcagcatgtctatcctctcatggactaggcctcacggatacaactctaatttatgtattgatcatgtaaactccccattagagggaaaagggaaaccaagtataatttctgtaaatactataaatacccaacaaatccttcgacttaggagttgaattctcttgcaatgttttcccaggcaaaaggagagaacatatactcattgtattttccaaaggcctttcttgctaaaatatataataacatcgactcgtggactaagacttattatgtaacgccctgtccaatagagacgccacgtgtgtgtgtggttttacaaaattcttatttaaatactttataattataccaaaagtgtgggtaattaaatttttgataattaaagccaagcatataaaaacttctttatagtaaaagataagtaatgagaactatggaaaccccctgtttttaaaatattacaaactagtttattagtgctttttcaacataaactttgcaat

SEQ ID NO: 319608 - DNA, 510 bp, Cannabis indica
tattattgtgcttttaaatttttaagtccgttacaaatagtccataaactattcacagtattatattctgtcaaattttattgcacgtggcaaataaaataataacatgactgcttactcaattgtcataacgatgtaaaattaaattaaaaaattttaaactatttttttaaattaacaacatatatgacgctaatacgacactgatgtaataacaagctaaataatcatgtcatcattttattttttatgtgggattgataaaacttagaaagaccaatttttaacactgtctaaaaagttaagtagcataataatccaaaaattttgcttaaaaaacttactaaaactgatgatggataaaaaatagaataaaatttccaaatttcagtagaaaagaaacattgtctcgccctgaaggctaaagtcttcgcttcctcttcaatttcaaaaaaaaaaaaaaaaagtcttctcgtcttttcttctccccagccatccgagcctccgtcg

SEQ ID NO: 319609 - DNA, 657 bp, Cannabis indica
catgctatgtataatcatgagattttttgaaaaccatctttgccaattgcgcaatactatataataatttctctataattaattaatggatatattagatcatataaaaccaagctgcaccaaatttacagcttggaccaaatttacactaatctaattgttttatacagttcataatctcatttgcgagtacgtggatctaaagaataggcgcttgtttttgccaaagaaagtgaggaaagaagatatgagttggattgaaaatttgtaattagatagcaagcttattatgaaaagcgctcgggagtagaaaaaacagttttcggtaaagcccattaaagtatataggagaaagcccaatagagaaatatgacacatcatctttaaaacctctaaaagtcggccacaataggatgaatagaacaagataagacttaactcagaccaggccgagataagacattactcgtaaaaggctgagataagcaatactagaaaaattccattttaagtccatcagcattgaattagataaatttttagatgagtccatcaatattattggactagaaaatatttctactccaatattattgtacttaaaagaaagggctatttacaaaaatataggaaaataaagataagttttgatatata

SEQ ID NO: 319610 - DNA, 3088 bp, Cannabis indica
atgggtcggcccaaagtgttttttgtaattttttttcccttttttgtattttttttattttttttcccaataaaaaaaaaatatagaatggctcctctctaagtacagagctcagttctttttcttttcttctttttttttttttttgtttacaaaagaagtaacttcattatgaataaactgttttacattcaaaaactaaatggaacattaccattccactcaatttctttatcaagccttagtgctctcttgactaaattatgaggcaaaagctaactctctatacacataagtaagagagacacatgagagaaaagataaagatatagaaatagatcctaataaattagaaagaagtgagttatccttatataactagaatttactttgtcaattacaactatttttgaatcaacttcaacttcagtaatagctagggtaataacctcgttatcctacaccattccaaagaccaatgttatgccaaagccgccaaatcctccgcaataacagaatttgcgactcctgaaagttgtactaaacaacctgctacaactttgttagaactatttcgcccaaaaacacctacgccaactttcttccagtttttcccaattgttgcatccacattaagcttgaaactacctagtggaggcaacttccattggcctactctgattttctttgaatattgtacgtctatatcaattttgcacttccttgtatccaagaagataagatctaactcaagaaaccacattacaattttttaaatgaactttcccaaatgaaacatcatttctatatccccaaataccccaaagaacagcaagcagtaaagtaagatcatctttagataaattatcataagctcataaaataaagtcattattacaatacttattgtaattaaataacttactaaaatgtgaatgtttctaaataaatttaacctcgaaacaccctaagagagcatgagtcacaatctcacaacttgcagaacaacaagagcataaaggagaaaagatgatttttttcagagcaagtgttagaagatacagggagaatatgataaaaatatttccaaaaaaaaaaagtgttttatttttgaagacatgtaaattcaacatagtgttccaccaccttgttgtaaaaaataggtcagaaggaggaggaaggtgtaaagcaataaaagtgtagagcatagagttgaacaaagaaagaaaataaggcaaaaagacttgcatattattgatgtgaaccacagtttacatacatgattattacaagatcaaactgttaaaagaaaacatttatatcaagaaaaaaaaattaactaactagctaacacctaatcaactaagtaatagcagaggtgttaacatccaccctcaaacaaaaggagaggaagccatttaaagtttggctttaagatagttaaatcgatttgtaggcaacgattttttgagaatatcagcaacttgatcatgagtaggcacatatatgactgataattgcatggtaaggatttgatctctcataaagtgcaagtctatttcgatgtgttttgagcgtgcatgaaacactaggtttgcagcaagtgcagcagcactctgattatcaacccatattactggacagtggttcaatgtgatgtgtagctcagtgtaaaggaaagtgatccatctaagttctgcaattgtgtttgcaagtgagtaaatctcactttcaatacttgagcgagtaaccacctgctgcttttttgcaaaccatgagataagattgctgccacgaaagatgacatagctagccatccatggatcgtctgtcatccacacatgatgccaaatctgcatcaaagtaaatgtttaagatgaactcagcaccaatggtggctttgagagatcgaggaagtcatttgcaagcctcccaatgaagcatagtaggagtttataaaaattgacttaacttgtttataacaaagccaatctcaggtcgagtgagctttaaatactgcagagcaccaattgtgcttctatagagtgtaggatcctcaaacaactctcttttatgaagggaaagttttgtagaagcactaattggattggaacatgacttggccccttccatgtgtaattttaccaacagatccgtgatatttagtttgagttaaatatatacccgtggagtctctatgaacctctactcccaagaaataatgcacttctccaagatccttcaaacaatgataaagtagaattattaatatgtgattgacatatacaagtagaattattagtgtctgtccacttccatacacaaacaatgatgtattagatttagagacatgaaaatcccattgaagtaggcagtccttcagtgtgtcattccaagcacgagggtcttgtttgagtccatagataactatgcaagaggcaaacattgtttggcttggactgatctacaaagcctggggatgctgcatatagacagtctcagttagcatgccatttaagaagccattactatcatcaagttgcttaactcaccagtcaaaggagacaacaagacagagaacagttcgaactgttactggtttcacaacaggtgaaaatgtctctacatagtcaattttaggttgttgtgaaaatccttttgcaaccagtcttgacttgaacctgttgaggtagccatcagcatttaatttcaatttgtgaacccatttgttgctgattatgtgcattccaggttgatatgggactagactccaagttttgctcccttgagagctgtgatctcttcatccattgattgtagccatttgagatgctgcagttcctttttaagcgaagtaggttcagatggaagaagagacttgggtaaagggtgcttggtggcaagatatgcctttgttttgacaatcccactcttggatcgtgtttgcatatggtgtgtccttgctgaattttcctaagggatgctacttgagacaggagcatgtatggacatgaagagagtgttggtagttgtttgtgtgggaggtggagatgtagtgggtctgggaggttgatctcatatgggagac

SEQ ID NO: 319611 - DNA, 974 bp, Cannabis indica
tttctgggcaaatattattagtttgaatattttgaagattagagtttaagcttgattataaagaagttatgtggaacgtccaatttgtgtatcattagtgttgttttgagcttggtttgatgctcaaaattattaccaaatttagtttggtttgttttgatttaaaatttgagtttatcaatggttttgtttgagttttgggtatattttggttgaggttcaaaaatatagaaaagttggtatttttagactttaaaatctgctttttgggtttctttgatcccagtggccgcagccggatttttggtcgccgctgccaaaacctagcagagggccatcccattttcctgattttgttttggccataacttttgactcgggactccgttctggacgttctttatatcattagaaagctcgttttgagctctatatgttaatctataaatggaattctaattatgtgattattgaaagtgaattttgggattaaccttaattgtaaaattttggaaatgtgtgactaggactatcgacgcttgctcagaaacacccagggatttggaatctccatatacttgggataccaagtaagatagtagttagcacgtagagtgaagcgtggtggcactcatgtttgatattatgattgtgattaaatgagaaccatgattagggttattaccctaaaaataacggttatatggcctagggttattaccctagtgattaaatgattttgaatgttatgtcatgctatatatgttgaaataaagaattatgtgttcaaggcataattaagttagactcgattaaattagtacccttataagggcccgtttggtacgcatgactcgattggattagacaagataatttgtccaatccagtgtttgggcatagcagaagtttggataactaatccagctaatctcctctgtctgggtttatttatcccatccagcagggtggga

SEQ ID NO: 319612 - DNA, 2190 bp, Cannabis indica
tttactacaaaaaaaaaaaaaaagaaagaaaaaggaggacgtacattctttaattttcctttttaataattcatttactaaaaaaaaaaattacttcaataaatttggaacagaaaagagatcatatgatcattttccccccgagggatatgggttatagctatagtggacctttttatttttacgactttttatccccaaaaatgttatgaaaaggatagtaagaaaaaaaaaggattcgaaatattctttccggtataagtaaaaaaagaaatgttagcggcatcttaatgttgtttatacaatttaatatcaaattttatatattttaatttaaaaataatatagaatagcataaactgtttattaattacactctatatttatataggcttttttcagtttaactaaaaaaataataataatacaaaaaaaaattaattggtcaaataaataaatgtacggtccaaataaaaaaattacacaaatacctcttacacacaccttcaactcacaattcacactttttggaattgaaatcttcgttcgatcgaccaacccaacacaatcgaaacgaaacccaatcagaaagagaatcactattaattctggcgacttcacctaagaagatggttggaatcaatcaaaccagaggttgtttcaaattcataaaaaagtgctgaaaaactactacgaaataaaaatttaaccataaatctaatttaattcgcataaaattaatgtcctgacttcaattttcagatccatgaaaatggacatctcaaaaagttgaactggagttcccaaacaatccaactcaaatataattaaaaaaaaattacatcaataccatagtgaaatatttatcctggtgtatttttcgttattttctaaatttctaatggtgaattttttcatattaaatcacaaagtgacatgtagatagagttacgtacgtggaaacactgttctaatttttaatatttcataacagttgcgttacagttgcatacatattttgctaacagttatttttccacatattactattaaggtacaagtaattatcgatctgtgataaaaaaaaatactgacaaatagattcttacagatatacattcacatttaatattttttagttacaattaagttacacgttagttgaataatagttttgctactataatatcatagtattataaaaatagggctcgaaattgtcaaatacgcaacctgaaaagataaaacacaagtgctataatattcgtgtgtattaaatacgtggaattattatttgttttgtgattttatattagttggctagcaacaaatataattgcattatagtttcatcacagttgccttgaagttgacttcttctttccctcttggtcgttgaagttaattttttttttcaagcaaagacaccttcgactgcttcttcactggacgatgaccacctttagccatgggaggagcgaaatcagaatcatcatcgtcgatgactgggcgtttccctttagccttgttaacaactgatttatgaaccgtttttgaagcttctttttttttttttacaatggatcagatggagaagtagaagatgatatatataaaaaaataataaaagaggcagttggaagaagaagatggcaaaaggttatggctggaaggtagttttcgtggattttgaacgtgagtttcaaaaaggtaatggttggaaggtagtttgggctgaaataaatggatatgtgtaagtggtattttagtaaataaaagctcattaaagataaaattgttactcacaccttatagagatatttttgtgaataaactgtcaatttatatttttcatgtaataattcttttttatattgtgttggacatcttaaaatacttaataatattaatgatcactttgctaatccttaaaattcaagaattcttttttaagaacatctctaatggtagtatattttaaaggtgttaaaaatcttcatataatctaaaaatataatattttattttatctatttttttcacattatttttgacactctaattctaaaaacactctaatgatataacactttttaagtatattataaatatgatctcacacattattatatataaaaatatttttttattaaattttatattatacttttaatttttttattttaaaaa

SEQ ID NO: 319613 - DNA, 497 bp, Cannabis indica
aaatttcaaaactattttttgttctcatttctaaaattaattttttgaaaacaaaaaacagaaaacaataccaatcatgctttaagcctttgttattttgcctaatttttgcaatttaaaaaagaattggtcttgccatcatgtagtggtgttcttagactctcttcaagcggtgctctttttgttttttcttctcttgttggattattcttacaacaatgttgtatttttggactaaatgactaggattatattaccttctttaatgcataagaaaatttaatacaattatggcataaattgaaattttatacagttgagaaaaaaatacactagagaaagtaaagtagtaatgctattatcactcttaaaataataataataaaaataaatagtgatataagtatttaaagtgaattaataaagggaaatttgacaatatatgcttaaatatagcatatattgttttaatatactatgtaaaaaaaaattaaaaa

SEQ ID NO: 319614 - DNA, 1693 bp, Cannabis indica
taggtctcttctttgagtaagagtctatcaagttgggactgaagggtttatattctatggatagtgttctcatcccagcaacaacaactcttggcaaggtcaagttctttctccaagatgttaatccaatttttgaattggaaccctgacttgtggttccattcattgaggcaactgccacaggtggactgggtggcaacaaggtgggagatggtgcaaggtgtatcccattgagtaacgtaagaggactcaagggccttagactaatttggatcatttaaccaaacattttcaaagagaaaacatttagttttgttctgagagggtttagagggaacgccaatagtgtcgagcagtaaagctcgatggtcagatccaaagaaacctttgtgatgaaggcgggccttaagaaaaatattcatctagggcgcattaacaatacaccaatctaaatgctcctggatgtttttgttgtttgcattgtggttattctaggtaaagttggggcctacgagttcaaaatgggacatttaaaaaagatctaaaaaatgtttgaaattgttggaaggtcccctgtcaggattgccaccaattttatcatccatagtaaggatggcattaaaatcaataatgatgatcaacaggtcaacaagattattttcacctattctatgcaaaatctttaaagtgtggattctttgagcctcattgggagagtcataaaaacaagtaaggtgaaaaggaagaaaattattaatagttgacgagacataaaaatcaaagtaattcatagaagataacaaagttaaaataacatcattgttccaaaataaaaggagaccacctgtaacaccctactagtttaggcgtgttaacataatttttaacttaaatgtgcagctcattgctaatcaacgagtttattgaaaatcgtgaataattcaaaccttatttaactatttataattatcaaaataacatacttatatttaaccgggatctcattttataaatatttacaaaagttttataatgcataataaaaaagtttgttgcccagcgactatacaaaacaagctcaactgtccctaaaaccgtacgctccaagcctaaccgccccgacatgtacaatcttcatctgctcgctctcacagttgctcaaccttagctttgcccttacttacacatgcaaacaatatttgtgagtcgacagacccagtaagataagcataaataataacatagcaataacccagcatgtaataaggtgcccatacacccaaccataactgtatccccgtgtccaatacggtactgagtctagaacgttcgtacaaaaatattatcgaccataatatcaacctatacttagtaggctagtcatactatagtcgtactgatgtgatagcgtcgatcagtatctgagccaaatatacatctatcagtatccaatataattctacgtatactgataccgctatcgatgtaatctaacaggcttaataaacatgtatgctaaacacgtaaacatatatgcatatttttatactaatcttacctcgttaccgaattcatgtgcgtcggccaacctgagtgaaacagctgttcgatgaattacaggcccctaaatcacataattcataaaattggtaagtgacacactaaattactttttggggacttaaaattgaaa

SEQ ID NO: 319615 - DNA, 1294 bp, Cannabis indica
aaattaatattttaacactatattatgacatgaactcatcctgccccagattcgacctgaacctagaccccacctcgaactcagacccagacttggacactgaacccagactcgaatcctgaacccagacctcgaccccaaacctcaaaccttgtacactaaccacaaacctaaactcgaacccgaactcgaatccaaaacccggtgctaggtctgaggcccttagtcgggtctgggtttggagtctgagtttggattcggggtctaggatctaggttcaggtcaaggtccaggatttgggtcaaggtttggggtccaggtcgaggttggagtccgagtttggggtctggtccggtctcgagttctagtctgggtccaggtctaggtcttggatttgggtcctggtttggatctcgggttcaagtttgagcctgggttcgggtctagggtctgggtcctagtctgggtcttggattcaggttcgggtatgggtccaggcccgagtctcgggttcggtccgggttcgagtctaggtctagggttcgggtttgggtccgggtctgggtctaagtctaagtctggggtctgagatctcggtcgggatccgatttggggtctggcgtcaaggtccgagtttcgggtccaagttcgggtccagtgtttgagttcgggtttgagtctagtgtctgggtcggggtctacgtccgagccaaggttcggggttcagggttcgagttgggttcgggtctgggtccgggtccagtgtttgggttcaggtctaggcccagtgtccagatcggggtcggggtgtaggctggggttcgggttgaggtttgggtcagggttcgaggttcagggtccgggtttaggcttgggtctaggtccaggtcggggtcgaggtctgggtccgggtctgcattcgcgtctagtgtgtttggggtctagggtccgggttgggttcaggtctgggtccaggtccgagttcgggtcgggtcgggtcgggtcgggtctgggtctaggtccaggtccaggttaaaatccgggtcagggtcgaggtccggatccgagtctgggtttgtgtccggcagctgttcggtgtccgaggtctaggtcagggtccaggtccaagtttggtctacgttcagaatccgggattcgagtctaggtccgggttcaggtttggttttgggtctagggtccgagtgtgtgagaaaaatgtaaaatataatatgttagataaaaaaaattgtttttgaaaattaaaacaacattttgatgttttctgttttctagt

SEQ ID NO: 319616 - DNA, 594 bp, Cannabis indica
gaaccatgttcactctacacatcaacggtgagctccccgtctgtgcagtttcaagggcagcctcataaaagaaaatgtgcatcgtgtgatgcagaataatactcatagcttaatatggcagtatctccagcaataaacaagaaagtgacatatatatatatatatgtatgaatatgaatatgatcaatgaagctgtttgatatttgtttgttgtaaaatttatctttcacttgtaagtgatgatgtcgttcatttatttgctctgaagatttttcaatactagattgctgaggattagatgacttgttgaaaacaaatagggagagccaacacattagcaacgaaaagatgtcaatccactagagatgtcttgccatcaattcaataattcaattaataagacaatccgaagaaagttcctcaaattatttttgtcctccgaaaaggataaaagagtacaatcatgaagcatgtattaaaattatcttacatcccaaattggtgtagctggatttctcgcataggtttaggggcgtttggtaacacttttgtttttaattttaaaaacaaaaacaaaagtaaaatttgtgtttt

SEQ ID NO: 319617 - DNA, 976 bp, Cannabis indica
gatgttttctttaattacataaaaataaagatgaaagaatcaccttcttcgtgaaaacccattcctcccaaaaataaattctcagaaaacttgaagcaacctcattgcatttaaactccatagctattttcaccttctctggcaccatccgacatgccccctctttgccaacagagctcttgagagtctcgctaaacaaacacataaaccattcgggatcggtggccttttgctagagtagatcaaaaaaatgtttaggatctgaaatcttaaaaatatgaccagtgaccacgacttaagcaccattcttgttgtgaagccattttcatcaaaaccaacctagatcgactttgacatagctactgtgattcgcgatcgagaaggttgaacaaatccaaagttgtaggctccacagtggcaaccttccattaatcgcaatgttgagaaaccagcatgggttgcaccattcaaaatttgagaatttgtttcggggaaaattggttttaacaaagaagatgattccttcatcattatttgttattttatttttgtttttattttttatgtaattaaagaaagcatctctattgtttggttttttttatttttttaataaatggtaaattatgtttttaattttagagcgaattttgaaataatattttaaaaaaattatattaggatactaataaaaatgtatcatgtgtataaaagtatacacataagcaattcatattggtatttaattgagataaatgaatgatatcttaaatttactaatgttttagtagtttgaagggtttcaccattaaaatttgagttcggagggttatatgaaagtaaaatgatagttgagagggtttagctgctaaaaactcttataatattgctgttatatgctaatgtgtacttcttatgtgtacacatgataaatttttaatggtccacataattttaatatttaaaaaataaatta

SEQ ID NO: 319618 - DNA, 503 bp, Cannabis indica
tttgctagattgcatattattgcctaaaatttcttccaaaaatacgtggtagttcatcagtaagctatgtggcgatgggactcgcactacggaacgtgccatattaaaccacttatggagtctggtaattttcaagaattgcaaaagattagtgacctctggaagggtccactaggaggatatagatatgtctttccttctccgtgagtgaactcgacacggagaagagatatagggacatccagagcatggtgcactgctcgatgttaaattattgtacacacatttaatgcggtatggaaaagaacatcctacacattactttgaaaaaacatgctcaagggtttaaatccataatttcctaatttcaaaatacgccatacatcatttgatgacaatattatgagttatcgaatttgtaaatatcttgaaaatttttatggtatttaattgggcatgttttattaaatatgtaaattattctggtaatgaagtaagattat

SEQ ID NO: 319619 - DNA, 568 bp, Cannabis indica
agggttatacgccaaactctctatccattgaccatcagtacactcacagaatatatttatatatatatatatatattaaccatcttcttcttattgtgtaacttggtatttttggtttcatcgaccggtttatggcaattgcaggcacctcaagtagtactactacagctagtaataatatgagccaagagaacgagtcttccaacaacaacgttgtaagcaaggccaacgatgatgacgatgaccatgaacacgacgtcgttatgccaggctttcgcttccaccctaccgaagaagaacttgttgagttttaccttcgccgtaaggttgagggcaaaagattcaatgttgagctcattactttcttagatctttatcgctatgacccttgggagcttccaggtatagtatataatccaaaaagctaggttatctcaactaattcatagctacccttcatatccgaaattcgatctataaatataagaaacaatattaaccaacttatatgataatctaactgtaataataataataataataattaatatgcacatacatatatata

SEQ ID NO: 319620 - DNA, 3569 bp, Cannabis indica
accatgcctcagcacagtcacgtgaagcttggagcagtgtgtggaatagccaacacaggccgcgacataggaagtgcatgtcgcggctcgcctacctaattcaaggcaaaataggatgttcatcgtgtgctatcttttgtgtcccccattggctataaaagaagtgaacttcacataatttcatcaagcaattcagaagaaaatcagaagactgaagagactacgaattttggagatcaaattcaatacggaggcatttttaagagagttttatcattctttctttcgatttgcttctctattcttaaattaatatgtgtgaatttactacgatgaacatgagtaactaaacaatttattagggtctagaaggagattgtctgacattaattcatagttttaatctgatttaaatttcccttaatttctatgtattctatttcattcgtacttaattacttttaattatttgatcaccaattaactgtttacgattttgatgcgaaatctgaaaagggggtgtcgattatgctatagtgaaatagaatcgaatttcaatataggacgagagtacctgtatggtttggatagcttataggatttctgtgtttaatgcctgttacatgtttaatttatcacgagagtataaaatttacatgtaattgaggtttatatatctgagaagactataaattaccttagtaaacctgctcttgcatagatttggtaataggaacataatattaaaccataatcaatagatacagttaaaatcgaaagccttaacttttattcattgttaattcccttattaatttacatgcttcttactttcactgttttttattattttctgattttaattttcttttaaatttatatataggcaaatagacgtaaagatttaattttaaagtacttaactacaatctttgtggtatcgacctcactctttgtgagtatataacttgtcaacgatacgtatacttgcgtgttgagaataccacaacaagtttttagcactgttaccgagaattgttagttaatatcatgaaaaattaaatttttgttctaatttggtttttctattcaattttagtactaatttcaaattcttatctttttttcaggttcaactagtttatgagacgtcaatgtgcaactgccatattgtcgattgatcctaaaattgagaagacttgcagacataatagaagaaggaaaatattggaaaaaagctacaatagagatgaacacgaagtagatatggctaacaacgccaacgtcgacaataatggtaacaatggaggtgctgtagaagaccaggctagtggtcgcaaccacaatgaccgtagcctgagggactatttgctatcaaatttgacaagggtcagatcctgtataaggccacctgtcgttgatgctaacaactttgagatcaagccgaccatactacagatggtccaatctttagtccagtttagggactgccaatagaagacccaaacatgcatctcgaattctatcaacacttgggatgaattgaccctaacattcctttccaagttatttcccctgcgaagattgccaagttgagagctgaaatcaacaacttcatccaacaagacaatgaatactttgtacgaagcttgggagaggttcaaggacttattgaggaaataccctaactatgggattgaaaagtggctccaagtgcacaacttctacaatggattggttagcaacatccgtaaactcatagacactgcagttggtggggattttatgaggaaaagtgcgaataaagcctttgaattacttgaagagatgaccatcactaaccaacaatggtcaatagagagaggccaatctaaaaaagttgcgggtatgcataaagttgatgcaatgacaaagttgacagcccaggtggaggccttaacgaagttggtgactgctcaagcaaaacaagctcaagttgttataaactatgtggaggacctcatacgtatgatacctgccatgtagatgtagacagtttgccaatggagcaagcccaagccattgaaaactatcaaaacaacaattatggtttcaaccaaaggggtcgtcggcagaactttcaaaagtagtttccaaattagcagcaacaagagttctacccacagagaaattaatctcaacaaagccaacagaatcaacaacaaaaagacgctagtggagggtctaattctcagacagacatgttactacaattcatgatagagattaaatcttccatcaaagtcttggaaactcaaatgggacagttggcttctcaaaatgctaacatgactcaaggtaacttgtctagcactactgaagtctatccaaaagagaactgtaaggcaattaccttgagaagtggtaagaattatgccgagtcaagccaagacaagtcagaggatgaagataaaaatcaataagaactcacacctacacaagaaaagaagaagactactgacggtcttcaacaaaaagaaacttcccctcctattagtattgatcatcacatcaaaattctctatctttagaggctgcacaagaataatatggataagcagttacgtaaatttcttgaagtatttaaaaagctgcatattaacattcccattgcggaggccttggaataaatgccaagctacgtcaaattcatgaaggagattccttcaaagaagagaaagatggaagaatttgagatagtagctttaacagaggagtgtagtgcaatccttcagaagaaacaccgtcctaaattgaaagatactgggagttttaccataccttgcactattgggaggctcaaaaatattcatgcattgtgtgatctgggggctagtctcaaccttaaacccttgtcagtacttaagaggctgcaacttagagaggcaaagccaacaactgtaatactacaactagttgatcgttcattagctcatccaagaggagtaatcgaagatgtccttgttaaggtggaaaaatttatatttcttgctgattttatagtctttgacatggaagaaggaaacaatgttcctatcatattgggaagacccttcttggcaacagggaaagcactaattgacgttcaaaagagaaagttaatgtaacaccctaacaattagccacgctacgacaaccagtattataacctaatcccactaaatggattactagaaaataagagcggaaaattttaaactttgattacaatagaataaaataaacataacttgtaataatataaacattactatcaatccaaaaagacaacatgtttgagatcccataaaacttttttgcaaaatattacaagttattttacatgccgacctaagcgacaaaatttgagaatacaaaatgcatccacaggtagacccaacacgcttggtctagtatggccggaacatgtacaatccatcaccaagctcccgcaatcatggctaattactaatagatttaccctttcctacacagtagatgttgggttttatgccctaaataaaactccatttcaatgtaatctattttat

SEQ ID NO: 319621 - DNA, 2003 bp, Cannabis indica
acactattggagcacactttttggtaaatgagctatattttagtttttcacaacttatttacacctctattggagatgctctaagattaaaaaaaaccttagagctggttctacaggatatataatagttgtattatattaaataataaataatattatatttagataaaataatgtattgtattaattattattaatttactataaaaaattttaatacagtgtaagttgtattatttaatacataaaaaatagttcgtgttagcttgtattataatattcataaaggatccgagatcaaccaatcttcgacacaaatttgggaacccggacaaaacctgacccaagaccgaactcagacccggacccagccctaagactcgagatccaaacccagacacgagtcttagatcaagatccggacccagacccagccctgagacctgagacctgagacccaaacccattgccaagactcagattaggatccggacccaagactggatctggacctggaccccgattgtaacgccctactagattaggcacgttacaaattttctaattattgtgcactcctttactaatcaaagggtttattgaaacacatgaatgattaatttttttttaaattaacttaaccgaaaacaaatatataatacatatttcaggatctcgtttgaaaagttacaataatttttcaaaatacttgtatacaaaagatgtcgcctagcgactattaaaataaagcctaactgtcccaaagatctgaacattttaggtctaactgtatcaatatgaacaatcttcatctagtgcaagaacactgctgctcaacctttactttgtctttacctacacacataagaaaagcatacatataacataaacattaaataaatagattcaaataaatatttatatttagatttatctaaattagtaattttaattaaataaatatataaataaatagattgaaataaatatttaaaatgaaactttaatttcttctaaatattgagctttaattttaagaaattcaacgtccattgttagtcttacatggttattattttcaaagggatctcgagacgctagacttcgtccccctaatggatagttatccattgaacctttaacatcgtaagatctcgaaagataagtactttgtaattttttttctagtaaactcatcccgacgatgactacatagaattacatttataaatatgaaccaatagtagaagctcattatatcccatttttcgtcctcctgacgtggcatgcttacgtggataaaatcagcgccacatggtcgtacaactcaccaataagaaggccaaattagcacctaagaaaacggagaccccggcactcaaacgtgcatcaagtgacagaacagctccctcatagaagctagtcggccacctctggccggccctatggccagccaatcttgggactatactatggtcggccagcctgcctccacaggggcctgcccgaccaggaggtattctgtagggtttcctgtgcacttctacacgtggataacatcctatgggctgcaaattgggccctaaaagcccaacataatagctgaataatatctacattcaatgagattttggtctttttgtaattaacaaataaactatgcaaatatttagcgtttcaagttgtaatctagggttcaggcctcctatataaaggccttgactctaacctagaaacctaagtttagtctaagcctgaaacctgcctcaaatctctaagcctaagtctgacaagttctctcttcttcacttcctctctcacacgcccatacaagcatcattgatcagtagttgagttttgccattcttgattccatactttgtatttgttgaacccaaaagtgagtattttaatagttattctcgcaagtgcacgaatcgtttaagaatataatgttcatgtaagtgcagggtcgaacccatgggagttgactaacatcaaaa

SEQ ID NO: 319622 - DNA, 883 bp, Cannabis indica
actagttttgtaaataaatcactatgaagtcattaaacgtagtaaaacaaaataatagttgggctgtttacaaaatacaaagaattttttttttattatatatatatagcatataaattaattgtaccaaatattaaaatataggaataaaattatacaataagaaagaatactatacaaaatttaaaaaatttcaatatataataaattttacttctatataattaaaactaattttttcatcttgatgaaaaaactaattctttttatgaaaaaatcacttaaaattaattttgttaagacaataaattaataaccagttactttcatgtaatcaaaattaattttataatgaagaaatcagttatgaataccaaaaactcatataaatttcagatgctttgtattctagtttactgtatggaatattgaacaaatccaatacaatactaaaactaaaaccaaatacaaatttttcaaaagttccaagactcgatcatcaactcactactaaaacactcactatctactaagataaaaaataaattagaatgagaatatttgtcggagtatcatcgtcagaaaaattatcgaaaaaattgttagaattgtcattgttatcaaaaaatttccggagttagacattagagttgtcaccagtgttagatgttagagttatcaccggagttgggcattggaatttgagactgagaaaccagttatatttatcagttagttaaaaatataacactgagaaacaagttatataagttaaccaaattaaaaacggagtaagttgaaaaataccactttttttaatcaattaattaaatttatctctaatttcatatttaattaaaatatacctctttttatatgtatt

SEQ ID NO: 319623 - DNA, 901 bp, Cannabis indica
gagaagaggaagtgaaaaaaaaaacaagtgtagagaagaaattaatggcaaaaagagacaaatagaaaccatattggtcaaaagggtatttaattcagtatacactgagaaggtaaggtcgggtagatagaatcaagttatgtcaaaggacattgtctagtaacattgtttctgtgacagttcccttctctaaaacattttaaaaaataaataactctctcaaacatgtaaacatttttcttccccaaaaagctattagagacattttcttaacatgtactgactgtactactgatgcaacaatcacttacataggtgtgaaaatctaggcactctcataaataactatgtttcgataaaatattaagttgtattaattattatgactataattaatacaatatgagtcgcattatttaattcataataaactatccatattagtttgtattataatgtatacaaagggtctgagtcaaccagggctcccatcccaattccaacctcaaacctcggaccaggacccatatcctaactcaagactggcccaaacagtttggggccttggacgaaaaataaaattaggtcttttattaataaaaaaaatatcaataaatacttcacaatttagttttaaaaaaattcataaactctaacatagaaagaattttagaatcatgtgtattgggaccacaagattttcttagaatacatatttactcttatgaaattattatgtatacgatacattataaaaaaatatttattatattatatattatacaaagagatgataaaaaaaagggacattttaatgttgggagccttgtgtagggttttatgccctaaataaaactccatttcaatgtaatctattcaacatcaataaagaaacagaagt

SEQ ID NO: 319624 - DNA, 524 bp, Cannabis indica
cctatagtgtaaaatctcaaaatttggtaattagtaactaattattaattttttcagcatttagaaaataaatttacttcaaacagttcaaaatttctcacattgactttatatcatttatacactttataaatgataaaaataggcccccaacaactatatttctataactaccttttaattacattcaaatacaattagtaactcaatttactaattaattagaaggaataatatggaaaggagttacaaagtttgttattttcatctttttaaggatttgcaacttcttcttataatttatactcaaactatgtaacttcctacatatattaccatttgacaaaatcactatttaatttattacacttaactatttgtaacataattatttaatataaatataatgttatataatataacatataccacaaaaaaaaatatataacataaattaataatttatagtgatatatatttatggcacgtatactatacagtattcagaatcagaataaattaat

SEQ ID NO: 319625 - DNA, 752 bp, Cannabis indica
aataaaaaataaaaaaaaattgtagtgatatgagatatatactgtgtaatattagtaaagaaattaattttgtaattttgaatttctataattaaatcaggtaagcaataactattttgtccttataattttttctttttttttaaaaaaaaataaaatcccatatgaataaatattcctgatatataagaatgacaactcatagttacgaatattcttaaatattccttccgatgaaataagaaaaaaaaattgttcaaacaaggaaaattataatctaattttatttatatatgttttttttttttttatagatttaatcaaactaattttattctatatttgattaatttgattagtgggttaatcataaatattaaaaatattttttcttttaaaaaaaagaaatttatatctattctatataaagtgtgcctatataacagaattcttggtttatgagaaagtgtgcctatataacagaattcttagtttatgagaaatttatgggtgactttttatttatatttaaaaaataaaatggtttatgagaaattcatgggtcactttttatttatatataataaaataataaaataaatcctatttaatccaaaaaaatacgattgggttttgtctgttgtacatctacaattgggttttctttaattatttattttattcctttttcctatttacaatttagacattcccatgggatcacacataatattctaatccgcacttctctt

SEQ ID NO: 319626 - DNA, 1023 bp, Cannabis indica
tttttgagaagtgtagtaaaatgggtcagaaacaggcggtgaagtgtaagaaaaggcaaagaagtccccacggttttcagtttgggctaatgggctgggccccacttacagagaaaattgtagcccgttaagaaaggcccctctctctttgactgagaatgatatcaaattatcagtaccatatgcttctctctgttacttctaaagataaagctcttttttgtgctggcaataagttgtctttctgatggctcggctcggcttggaatgtttttcttcttttttatgtagaaaaagttgatgaaaattgtctttaaagacaaggcaagaatatctattttgagtcccaataaaccaaagaaaataaagaaaagaagaataaatgggtgtattatgaatttatttggagtaaaatatagtatttaagtggtatgaaagacacgctttaaatatgtaaaaatatattattattctaaactttctcattggtcaaaggttggaacttgaaagtagggctacaacttaaccaaaccaagtttttgggcaatgtattggtgatttgtttttcttttcagattactgttttaaatgcgaggaagtatattcctaaatggaaaaaaaaagaaggtaagtatttatttttatatatctatatatattttttcaaaatactcatttaacctcttacattttatacctaaaatattgtccaaaaaaaaacctaattaaatttaaaagaaaatcaaattcctgattcttattacatgtcaacaaatccaactagtgccattatgaatgttattgcataattagatctcatttatttaattcaatccaatgtttctccacataacacgtggaagcaacaaaagattttcacaatgaattcatttttttatattacattttttaaagaaatttttacaccaaaaatctgttttgcacattttattactgttttactcctacacgcccacatcaacatttttacttaccatctttattttattacaataataccac

SEQ ID NO: 319627 - DNA, 1060 bp, Cannabis indica
ttacaaataatcatataaaaaaattattaacaacattagaatttgaatatttacttataaatactcaaatttgtatatcacaccctttaaataaattaatatataatcttaatgtttcatgtattaatagttttaattatataattataatatttagtattatatttaaattttattattattttaatttatttataattaataaattcatatattattattatttttaatatgtcgtgtcgtatgttttgggcttgtcgttgtagaggtaaaaattttgtgaagtccttttatttaatatgtaattttttttgtgtaattgaacttttttgattacattaatttcgtgcatttattgctaattttcttctaagaaaatattcattttcagttggctactttcttatttaggaaacttcttctaagagaaataattctcttatggaaagttatttttatttggaatgtttgactttgctctttcactttaataatttcggttgagtcttgataagatcagatcacacacaatgtatttggtaggtttgaagtccatattcatgatcgtgctccattttgataagtttcctttctagtcctcatctcttgcttcagagtctgattctaatgctacaaatcaagaatttcttaggaaagtattgtacagttgtgaaatcgattttgtggttgtctatatggttgctataatctataaatagaacctagagagtagcaaatcgattcaccttttctggttttcatttttacatattttcttttgtgagcaaagtgttctttttgtgagaacctaattgttcagctaggttttagtgtttatgtttttgttcttatactgctcttatgattagtggaataacttaattgaacaagagaaaggtctttggtagaagactagttcaagctttacttcgagaggaagtaagcactcacacattaaagacgaaggaagttcgttgtttgatggtgtgttgaaattagattcgtgaagtgaattacaaaggattgcggcaaaaatttagagggagtctaaacttgttta

SEQ ID NO: 319628 - DNA, 1064 bp, Cannabis indica
attggatcgaatctgatagctaaaattggtgtggtctaataaatacccctaactttattgttcagaagatgtctcattacaagtttttattgacaatttaataaatttaagaacaccttttataattttttattattacctgttacaattttatagttatgaagaaactaaaatgtaaaaatgttagactataatatataaaataaaaataaagcatatatgaacgatatgtaatgcggaataactacagacatattgaaattgtatatgcgataaaaggactgaaatacctccaacaattaatgtttgagctccaatccctacgatagcttcgatatgagaatttaggctttctcgctctctcaactctttttagatggaattttactgtttgcacaatatgagtgaagagctcgaggacagagtccatatatttataggtgagatactctattagtatttgcgtcatattaattgtcagaatattttaatgattaattcaggaaatcaaattaggtaatgaatatcgaaatagaacatcacctaattaatattgtctagattcaatgaatataaaatagtcatttatctcgatattaatattggagatttggtgtgttagactttttaggggctggctgtgtcattgaagcacctggttccaacaaccagtgtttcaaccttttccctttagttttagttatctctcgatcaattcaggaactgctttttgtttaacattttctttcccaggtgatgctttttggctcgccactcagaaggttacttgttcagaattaaccaggagatggcctctttatgtgaaaaaagatattttgaaatttcccgcatcctctttaggctttggttttctcataaggctgagttctaggagtgatgtctgcaaatgccttagacttagacatttttctctctttggtccttgccaccctaacgttttagcatgttatgcaactcaatgggctaagcttgcgtgaagtccgtagagatgtgaaagaagaaattcgggcgtattttttctttttcaagaattttggtcgaat

SEQ ID NO: 319629 - DNA, 989 bp, Cannabis indica
ttttaaaaacaaaaaactaattaaaaaagtgtttctaaacgcaccccatattaattattgtattaattagaatatttcagaaaaggaatatgatgtttgagtcattactgtagtatatatataatgatgtatataaatggtctgctctagttcaaactagtaagaatattgtcgagaccataaccagacgacataagacgaacagggtctaaataaccggatcaccaaccacggattcatttggttcgatcttaagcagattggtctaaactggtttgtgttttcaaccatagtttacgaatttcatgaacaaccctaagatctaatattgcatttgcagttaataaactcagttatcttttttagtctccacccacttttcactggagtgcagtgaaaagagccctaaggtacctacctgaaaggaacaatgcatcatgatctattggctaccatgaacaactaaatctagtggggtattcaaatgtcaaatgttgattgggtatcactacaagaaaaagcctttttgtcgacataaagcaaaacctgaaatctaaacatattaatgtcggggcaataatgaatatgactcggtaaaagtaagaaaatgaagcgccaaaaaacgcgagaagtttgctgcctttcatttcatttttgtcggcgcatgtaaacttttaccgacccatatatgcgccggcaaaagtctgaaaaaaaagggagggaaaattcacgcgtaaattttttttggaggtggggatacttttgctggcgcacaattgcgacggcaaaagtattaaactaaatgtgcattttgaactaggtcaaaatacttttttaaaagacttttaccgacgcaattggatgcgtcggtaaaagtatatatatgtatcagcgagaacgaagccccctttcttcccattttcatttttttctaaaaaaaattctcaccctctctcgttctctctaattccctctcaatctctctttat

SEQ ID NO: 319630 - DNA, 1157 bp, Cannabis indica
atcagattgtaatgggttttatttagggcacaaaacccaacacttggagcctcgagcacatcaaggctggagaagttctccccttgagagagtactacaaagagttctgtaactatcttggaattgccacttttcagttgattccaacttcttacagatgtcttgcaagtcttaatgttttgtatcacattttaggatgggaatgtcccactcctctcgaaattgtttacttttattccattaaagtagtccccgcgaggaagcaatgttcagggggcttctactatctcagtacccacacaaatgatcgtaggatcattgtgaggttaccaaacaagaccgagtttaaggaggatttcttctaaataactggtctttctccgattaatacgactgcatttcacatcatacataagtaactatttatctcaaaaacttagttttgagttgttttctgatttatatctttgaggtcgcttactttttatgcttgttgtgttgacagcagtttccaaaagaataatctccacccctgagatggtcgagcgacgtaaaatcattttgggccttccattcggattgcgatcaacagattttctcttgaatgaagccaatttgaggactgttggccttcttggctcagacgagtacacttgtgactacaagtttccaaaatactcttcatgggagaaggtcccaattccagctgaagaagagagccaggattatgtggctctcgtacactatctgcagagagtaacccttggggaagctgaagaagaagcatccttaggtaatcaatgaggatggtcacctactgtgcttagggcaaagcgtacttcgttagtaacattccaggatagtcgatataatttgtaaacttggaacagtttcctcataaaccgtataacacataggtttgatagttggtatcttaggttccatgtctagcttagttgcactagctcatactatgggattgtcgagcagtacgggacaaacttggatagggcgtgccaccgagattcaaattgagatctagatccaataaaccccctatgatatattcatgatcacagggtctaaggagtttaataactattacagttcttcctcgtcatcttctgatgattatggtaacttccttttaagtggga

SEQ ID NO: 319631 - DNA, 1067 bp, Cannabis indica
ggtataacaacaataatgtgttgttggttatttttgagttgacacttaatagtcaaaaggatacgggtgcaataaaattataaaaagtacttttgctactattttttttattaagattatatatatataacaattgtaaatattaataagatttgactataaatattcttactttttttattattgaaaatatccctatttataataagcattgtgcctattttgaaattattgaagtaatttacaaaactaacatggttcatgtagtggcagaaaaatagtaatacacacccacgatccaaaaagcatactctcagcctaggcattttataaatcaatgtaggctaataagcttaagtcatagatacctacattcattaacaaagttacatctacttaaaaaatgaagtcaaacatatgacttgaaatctatctcaaacaattcactctcaattgagaatcagtctataatcttttaaatcgtaaagagaatatcgagtgccacatcactccacgacctagtgttgcgaaaaataacgattttattttctaaagaacgaattttatttaaaggatcgatccttctcaaggaatgatcatcagatatctgttatcttctacattctatatcctaggctctacacaatgcatttattctaaaccttctcttattattggagcttcactttaatcttcggtattttgacgacaattatagctaagtctttctattttatttttagtctacttgttataaattacgtaactgacttacttgaccgtcagaatcctttaaccaacaccaccacaatgtctcaaaggctttacacgcgattttgttttcttgtattgtgtgtagattatcggtgtccacctacaattaacgtctacaattcaaaataattaatcatacacataaaaaataaacatgcaattaaatatttgaatttatttttcggaacaacttattatttcaatttttcaaaagtagcttaaatatatgtaaggctaattagaatttttgcccctgaattttgacatgtaccaaatcatgccccctgaacttt

SEQ ID NO: 319632 - DNA, 605 bp, Cannabis indica
tttaaactcttatgcggatcggattggatccaaaatatgaaatcccgcacttagtgcggattggatgttgtttgaccaaaaaagtgcggattggattggatgaacacccctatgtagaagtagttgcggtagttagggagtttagttgttgagttgtatttccttctccttcttgtaatccatttatgttagtttgttgtaactgaaaaacaatttgagagtttgtattggttttggccttcaggcaagcttgtaattttatgtcctaatgtaactatacttaggcctataaaggaatttataaaacatcaatattgcctagcaactatataataaaggtggcttttacgtgaattatcaccatcatatataattagaatttttgtcctcgaactttgacatgtctctgaattttttaggccactaaaaactcttaaattattaaaattgatagatatatttaagaacttttgttgtggtattttcaacacgcaagtatacgtatcgttaacaagtaatagactcacaaagagtgaggtcgatcccacgaggattgtagttaagtactttaaaattaaattcttacttctatttggctaaataaa

SEQ ID NO: 319633 - DNA, 524 bp, Cannabis indica
acttggtaatagtaccacaaggttctggcttttgacaattgagatggctttgattgcttcaaactaatcctacatattaaaccatatattacttaaaaaagtgggtcgttatcaaataacacagttaagtacatatccgtaagagtcttggagctttatgtagacacctatctaaatagggcaaaaacaaattgaagtggcccccttggcccctttaaattagtggctgaaatcacatttcacctttgttgttaaaagccaaccacaattttgatatctctaacattttcattctcttttgtttgtttcatcttttttttttaattggaggctgaaatcaagtttcaaaatttacttatttcttgtatcaatttcttcctatctagagttagaaaaaagtgcacaaaaaacaaaagcaattgtcacctttcactctaactagacacatgagtttttgctctgtttttagtgcataaaatatttcttttcttcttttgtataatgtgtgataatgctttgctgca

SEQ ID NO: 319634 - DNA, 874 bp, Cannabis indica
gacaatttcagatacagattctgccaatgcaccaatatttgtggaaatactatcgataaccttagattttttattcttaccagacttttgattattgatagtactctcagtagatctacgtcgacacatattagttggttgttgagtatttgagataccatcaaactcatctatttcttcatcatctccaccatcatttatgttatcatcaactccaaattccacaccagttgcatcatcatggcatatttcttcttcatcatcatctgcattaccagcatttgccccagtagcacgatctcgtccatatatttctgctagcttgtggtagtaagggaatgattttccatataaaccacttgcatcttttcgtttctgtacattcacaaattaaagcatattaagactatgttctcataaataagcaatattcacatatttacatatatatatttataatcatagtatatatttatcttcagattctcatcaattacacttttctcgcacacttcatcccaattgaaaccacttaataataataattctgccagacaagaatactttcccttcaaagtcttaatacgtgattcaatatgaggtgatgccttcaagttagaacttggtaattttgcctctagcatactctccatttgttacaaataaccatttttaaatccacaatcagctcgccatgtatgatttcgactcaactctagaaggcagtcgatcaatgcattatcttgtcctagggtctaataatgtttatttttacatcgttctctttgatcaacattagagttcgaactcatcttgtacattcatttaaaatttctcattataaaaataaaatcataaatttatctatgcataa

SEQ ID NO: 319635 - DNA, 921 bp, Cannabis indica
aaatggtataatgcaattttatacttacggtttttatcaaaaaaccgcctctaaatgtcaatttcgaacatagcgggtattttcacaccctttagcttccctttttataaatggggttgaaaaaactgcctctaaaggctaacattgtagtagtgtggaatccttacacactatgtaaaacttgatcttgatagtggatttaatctaagcttctcttaggcagctcaccaaagacgtagctccaactttcgctagtgaacctcgtaaaaagctctgtactattcttttgtttctctcatttctttgtttcgatttgtttttgtgtgtttctttattgattcagctcaagttcttgagcttatttgattgtgtttagccctaatccatttttgtgctttgttgtgtcttcgaagctttttcatcacaacaagaattttgtaacgtgaaatttagaaacatataaaaacaattagaaagataaaagaaagaaaatgttattaaggccctaaaaagcacgtaatgatatttctatctataaataagaattgaatatttaacattgcataatttatatttaaatatcaaaaaattacttattcatacatgatattgtgacttgtattatactgagaattaagatcacttgaccatgaataagacagtcagcaacatattaaagttatggaatctgtaatcaacggttattagtgcagttcactgatgtctattattaggtgcaagtaatctcgattcgaactgctgatgtagtatgacatctaagtgaaggtgttgtttaataagattatatatgacatagaccgatatgaaattttagttgtatttatcaaacatattgttagaaattgttttaccaggatctagatttactaacaagtatgttgattaacatcctaatatgaa

SEQ ID NO: 319636 - DNA, 762 bp, Cannabis indica
atgatatattgaaattagcttgaagatgcttttcaccaaaaaccaaaagaatttccaacaacaaaccaaagtttgatcatgttggtgcattcataactaacatatggcactcatcacttcacttcacttatgtattattttgtgtccacaactttaaattaatgtattttgggttgattgtcaatcaatctaagtgtaagtacataaatactaaaaacaaaatatatcatacttttactttcaaaaaaaaaaaatatatatcatattttatattattaatcggcaactaaaaagaacatgactatatgatatacctatatatataaatataaatgagtaatgtgaatatattgcttcacatacatataacttagtttctaatgagttatattaagtgagtgactggtctgaaaaaaaaaaaatggcgaggaattgaatccatggtccaaattaactagtatattatatgactttaacaatggcaacctgtaaatattgaaaattatataatgttatgacaagttaggcatacataaagatattcaaattccaatccaagttagattttaagaatacattttctctttttggaaaacaaataaatataaacactacaaaaatttttacttttagtcacaataaaatttgtagctaattacaaattaccattcctatgttgtgactaaaaaatttataactaaagatattagtcacaaaaactacaaattgttgtggctaaatgtatttttagtcacaatactt

SEQ ID NO: 319637 - DNA, 1063 bp, Cannabis indica
gaaataaaactaaaaaagactataagaaaaaccaaacaccaccatcacagattttgggacaccgtcgcaatcatcaagaacagaccacccaccaacaccaaccccacaccaaaggcgaacgacgttgatcctctctcagaatccttcttcaaacatcctaacaacaattccccaatcatggtcacaaccaaacctatagaggatccaacgagtcatagttggagaggaagaaaaacaccattggtgacaacaaactcaaacactaaagataaaactctcaaaaccctagagagagaaaaatgttagagattttattacaatggaagataaatcaagatatataaaactcaattgtaaaaataatacaaggataataaaagagattaattaaatagatgctacaacacacttatatacactatatattatatatataaaggaaaggtagaataagaagattgcaatacatgtaacataatacatatattgggtgtagattagtgaggatcaccatgacttgaacaaagtattacacctatgtccataagcttatttctcctatctctaagcactaaaggaactctcataggaataactttgggaattattaagctttagaattttctagcaatgtgcttttttgatggaaacttggttcatctcaatatgagcaccttagacctctttatatagtatttaggatattatcattcgaaactcatactcataaccccctatggatgttatggactcaaatgtaactcatgcatataccataactcatatagcattaagaatttcaaatttgtattgtccccacttcaagcctccattaggccttctaccatggactaatgactcttatacacgggtacatcactttggctacttcctggactgacgactggccctacaaaccaacacgagtatttccagcatgctttatcctcactcgcacacttcctaagaaaattttctaggaggtcacccatcctgaaattaccccaggtcaagcatgcttaactgtggagtttttttcgtgatgggctaccagaaaacaaga

SEQ ID NO: 319638 - DNA, 641 bp, Cannabis indica
gggaaggggtggaggccttagagacagaagaggtgagaagaagagtcatcatacgacaagagttttggttcaaatcttttatttctttagaaccaagaaacttcaagaactgctttaatgtcttaccttcagcaccagtagccaacatattgaccaccaagtttattgaccgaggagacattaaaacgtttttagcactactctccttcttctctatctcgtcaagaattaattgtgctacaatttgggtgcaagactccatgactttaacttcactttgcactgttcaatggaataggagtagaaagcaagaacaaaattactgaaatgtaatactggtaggatcgagtagtttatataatagcagtttaaggatttagatttattttttaaaattaactaaaaaacattaaatggtgggatccactcatccaagaattgtactgactgttttgaaaaatattagggagtttttcaattatatacttaaaatataaattatttacaaaaataccataataaatttcaattacaataataccttgccacatcattaaaatataccttaattctaaaataatatacctgaaataaaattaattccaaatttcgtttttttattattttcctgagtttttaaa

SEQ ID NO: 319639 - DNA, 986 bp, Cannabis indica
taaggaggtgcattgtagaatcactcaaatctatattagtcatctcagtccctgaagaaagaaattacgacagttagagataaggttattattattattattattaataattataaaagttatatttttttttaatgagatgcagttaatttatttttgagtagttattattattattaattaaagctccttcaaagcttattaagtatttacttatatgtttaacaaaaataagtatttacattaattagtctataggagaaacaaatgttttattttttttatggttttaatttattggaaaatttgtaatttatttgttattaaagttgtaaagttattcaagttattaaattatttgaagtatattgttctaggatctattgctggcattaattgtatttgacaagataagttttcttattttttaattaggactgttgttacaatttatcaatatagttattaatttgtagtgaaaatattatgttaattttttatataattatttattatgattattattttttattttttatttctatatttttcttactaattaatgtatatttttattttgcagttaaaatattttctctttttttgagggagtcttcttcacaagcatacgattctctctatcacgcaactaagacgatctcctcccacccaaagttgttctttgctgggtctttatattttttttgtagagagtgatcctgaagttgccatcattttagcccttctttttttgaggtagtgtccaggtgaagctattttttagttctattaggtccttgttatctgtctttccgtgtgtatgtcttcaacatataatgcgaaatggtaatatcgcaaaacatggtgagattatgcactacagatagaaaacgaggttttcgggttgaaagaaattccctccttgtttaataaccaatgtattgtttgattttcagcaataaaattggttattatattaaaaaaaa

SEQ ID NO: 319640 - DNA, 866 bp, Cannabis indica
acatcaaaattaagcaaataaaacaaaaaaaacaagtgcggggaacagggacaaaaattaaaaaataccaacctcacctcatacccccccatactggtgcaaaatccaaatacattttaatatataaccaaaaaaaacttcgaagttgacgaaatatttgaaaagggtcagcgcagaaagcggagaagaaaacccaaaccctaaaacagtgtccttggtgattgaagtgagtagtagtaggaggttgttgggaaaggtaagaagaagaagaggaagaggaagaagatgggttgaaagagaagggagaagtggcaaagtagtaaatgtcataaatgcgaagggcatagtaacacgccatggcctgtgaacggagccgacgtgtacagaaaattcagaaaggcttgttttttgtgtcagaaattcttttgtcttcttctctttctctctctctgtctctttaattactactctataatctctctctctagtacccaggtatatctctgtaaagagagagaccggttatagtctcggccagtgagcttccaagggtattttcggtatttcgtacagaggggttttcagaatttcagttagttcagttggaagggaaacatgcagacatgcttcccacgctctttgctggagcgtgataaacacttgattcccgttattctttttcaaatttcactgtgagtcatcacgtgacagtctcctatttttgtttatctctacaaaaacagtcaattattttgtaaaaataattctattagttcatctccaatcaaactataaaacactcaggtagtgtttgataatacttttttaatcagttttttatttttaaaagtagaaaagtgaaaata

SEQ ID NO: 319641 - DNA, 801 bp, Cannabis indica
atttttcgcatttctgagagtgatccgccgaatcttcttggaccgtcggccaatagtacccctgccgttgtaccctcttggcagtcactcgtcccccggaatggcttctgcagtctccttcgtggacctctgttaagaccaactttccttcctgctttgttatgcactttaagtacggcttgtggtaggatcttctatatagctgattttggaatatagcataccttgaggccctcattacgacttttcttgcctgtttgggatccggcggtaatttatcgttccttaagtattcaaggattggctgcctccagtcttcggatgttcccgtcggaatttcggtgcacttaacttcttcttctgttggaatgttaggttcggggataaagttaaatggtattgttcttgtgacatggagggggaagaggatcccaggccagctagggcgtcggcgtgcatatttgcttctcggggaatctgacaaatctagaaatagtcgagagtcgaaatcaactttttacctcggccagataactagccatctttagttctttggcctcgaaatcccctttaacctgctgaactattagctgagagtctgactggactaacaccctttcggcccccatttctttgaccagttttatcccatggatcaaggcctcgtattcggcgtcgttgttggtggctcagaaacccaattttatggattgttccatcacttctccatccagtgatagcaacactattcccaccccgtgtaaagcccgcttagttaatttggaaattagcagttgttta

SEQ ID NO: 319642 - DNA, 813 bp, Cannabis indica
tgaagcggggacgttacaatcaatacccttaatatatatataatgtaaaaaatgagtgcttgggggttcgagtttatgggagtatgaatgtgaaactaaacctatgtttggtacaattttagcaaaaaaacttataatttcgatactataaattatttaattttttttaaaaaaatacataatatattaaataattaaaatgcattccatcataaacaaaataaaattattttaagtgcgaaaaatatgatagggatatatattatgcaaccaattcttttggtgtatttaaagtttctagggataattttaatcttacaaatgattaataattttttataataattattaaataaaattatatgagattcaataattatataaatagtagtataaaatattataataatattaaatattactaagtcttttgatatttcttatattaatatagtcataaatattttacctatgattttcactagtctggtaaaagaaaaagaaattgactagtaataatattaaactcacaacgacatagaaatctacaactatcacacacttttataataatattaacaagatttatatattaaaatagtgttcttgaaagtttagggccttttgtagattattttttttatccttagactgggtggcctttaggcagcaggcctatcctattttaatttacactattaaaaagttattttttgtgataatcttttagtcacaatataattatttttggctaaatataatttttgttcacaacaaaatgttacttgattaaaacataatatttagatacaa

SEQ ID NO: 319643 - DNA, 1247 bp, Cannabis indica
ttagttgtttttttttttttacttatttttttaattatcggtaaacaatttggagcattaattcaaagaatgctttaaactcctacctcctattataatatcatatagttctcaagaaaatgtaaactcataccttgaaaaagctcataataactatttttcatagaataaaaaagatttgatgataacaaaaagggtcgtaaaaaattctcactttcttaggagaggtgatattagaagaaactagaaaggtctagagctttatatttcataaccatatgttgtaataataataataataataataagctatacacagttgtaaatggaattcatatatattatatataaatatcacaaacacaaaagtagtgattaacaataacaataacaggtacagagtattgaagcataagattttccaggctgaaagccactcagtactactcactctatatatagatatacttagtacttttttttagcttcttcttatacgtatccaactaaaccttttctttttaagctaatagaaatctcccaaaatctctttttattattattttaaagcttatatatagttctggataaggaaatcattgaagctggatatgtttttggtttttagctttttccatgattgtgatattatccataacaagcttctatatatattatattaaataatatcagtttagtctttagatataatctaatcaaatgcgatttccaccaacaaaataatatataataaattagatgattattttcgttgatatcatgataattattaatcaaggacattaatataattaatattataacacttgtatcaaaatcatgttaaagttgggtattaatagagagaatagaactttcttaatttatattttattattatactatactatatataatcaaggttaggtatgccaaactcaagttcccttatatacgtataatactaattattaattagtgatcaaagaaaaaaataaaaatttatagataccttaaaggtagacagctaattgcttgtaagttctattttatttatttatttattaatttctttcaaattttctcttttactgctccaataataggtaccacagcaattataaaaaaattgaaaatttgaactactttacatgtgaattctcttcctttttggtatacatgaaccaaatatattaaagaaatttgctatatctttatatattaaaagtgtctatctaacggcattt

SEQ ID NO: 319644 - DNA, 798 bp, Cannabis indica
cgctacactcaaaaaaaaaaagatgtgatcaatgcttgatcaagaacctcccacacaaaacgaaacaagagattgatcaagaacaatgcaaacagtttgaaaagcaatttgaattgaattaaaaccagagaatagcaaatgaataaaccactaaactagcaactgatataccagaaaatgaacaaagattaatgagcaattatagacaagaaagggagaaagaatcaaacacaaccagaattacgaggttcgaacaagtgatgatgaatcacttgcctactccttggccagaacagccccaaaggcttgaatctttattgagttagaagagagaattacaaagttgatattcaatgtgttcttgacacaatcactcatgaagctcaacttcaattacaaaacaactctactcacaaactctctctctctctctgtgcacctgaactagctctcaaaaactcccttcagattgctactaaaatgctgcagcaaatggctacttatagccttgttgtttggacccgatcctagctgtcataactgacagttaggtaaaaccgttggggcagttagaatggatgagcaaatagtgtgtattcctctattagtgaccaatcacaacattgtataaaaagaaaatcattagagaattgttatgaattatataatctataattaagtgagtttgtataattagctgtacatatcacatatattacaatttagctaaaatttattctagaacttgagcttgtgtcctcttgtgcagctcatgaaagaagtggcttgtacagataa

SEQ ID NO: 319645 - DNA, 2282 bp, Cannabis indica
ttgatgcaggaaaaataggaaacaaagacactacaagtgtgaaaatggagtatggaacgaagctcccggaaaacagttcacaggtggaagatagtgtggaaccggaagacaatgcgcagatggaagctgttgtggacccggaagaataagataacaaagaccaaatagctgacaggcaggtctagaagtttggctcgtgatagaacccagagagagatccatcctccagaaaggttcgcagaagcagacataatagcatttgcactggcgacagttcaacaaactaaaattgaagtgcccagaagctatgaagaggcaatttcaggtgaaaataagtctaaatggcttcaggtcatggatgagaagatggattcactctaaaagaataagacttgggtagttgtgccaaagctgtagaacaagaagattgtagagtgcaaatggattctcaatgtgaaagaggaaatcaatgagaatgaacccgtgaggtttaaagccaggttagtggctaagggttttactcagatgtaaggtatagactataatgaaatcttctcacctgtggtaaaatataagataataaggttgatgttgtctttagctgctcaaatggagctcaaggttgaacaacttgaatgttaagacttcctttctaaatggattcttggatgaagtgatctacatgaagcaaccacctaagtttcaggtggaagggaaaggggttgaattagtgtggaagcttaacagattcctttaagatttgaaatagtccccaaggcaatggaataaaagatacgatacgtatatgcgtcaaatcgggttcaaacgatcctcatacgatcactgcttatattttaagaaatggagcaatctataaccgtgttcctattgccctatgtggatgatatgctcatcatgaacaaagataattcggtgatcaaaagtatcaaagctaagctcaaacgagaatttgagatgaaaaagcttggaccagttcaaaagatacttggtatcgaagtctcacggagccggaagaaagggactattagcttaaagtagtccgggtacatcaagaaaattattcagaagttcaacattgaataagcaaagagtacatccattctgttaggaggtcagtttgttttgtcaaaagaatagtgttccaatagtaagaaagagaaagaagaaatgaaagatgtaccttatgcagtggttttaggatgtttaatgtacgtgatggtgagcacgagaccagatataactcacgctctaagcatcctaagccggttcatgtccaatccaagtattaaacattggaaggcccttaagtggttattgagatatttgaagggaacctgggattatggtctgacccatgaaaatctaaacgagaagtagaatttaaaggattcgtggacgcggactactcgaatatagataccagaaaatcaaccacttcctacgttttcttaacaaatcagaactgcataagctagaaagcctagttacagtttgtggttgctctttccaccacggaagcagaattcatggcaactacgaaagattttaaggaagcattatggcttcccggaatactttatgagctaaaaaaaatcaaagggagagtgactgcgtattcggatagccagtcttcaatccacatttgtagaaacccaatttatcatgaaaagaataaacatatagatataagactctactggattacaaagaagatagaagaagagctggttgatttagagaaggtctacactaaagataattttactgatgttgggactaaggtcttaatcttaaacaaattcaagcattgcttgaacttgatccatctcagaagttagtatattaagattcctggaacaccaaacatgatggctacattctttcttcatcatcgtcatacttttaattttaagtaactaggtgaaatttgtggtatagttcctttaaatgaaaaggtctccactatcatccctagaaagttaggtgtctcccggatgttatttctgaactcaactatcattccaccagactcctccaaatgaaccctatttgattaaatccaaatagggttatatattaaattatttttgattaatgggattaatcaatatatgaacaataatttgaattaatcttataatcttaacttttatcaaatagggtttacaaaagaggcataaataatcaaatagggttagaaatacggtaattaaagaaaatctagaaccctatttttttttattttttagatttaatgggat

SEQ ID NO: 319646 - DNA, 1610 bp, Cannabis indica
tttttttactaattttattcggttaaattcacatgtgattgttgttgttgatgtatgtatattattaattttgcgtgactttgtaatgtgccacctcaacaagaactaggacaaactaacttcacaattagtatgttatctgtttgttgttatgtttcccctatgggttattaatctacaaatacctctattattgtaactagcaacttaatctcttcaattttgattcagattagattcacagaaaataaaaggtctattcatttcaattaagttctttgtgtgtgttcaatcggcattggagtttgtttgagctttgaggattgttcttggatgttccttgaaccatcctgatgtgtgagatagtgattgtcatcttcaacaagtagtatcagagcatttggtgtccaagaattgtgatcagaaaatttcaagattcaggtgagcgatccaagaagatggggaatgaaaagtttgatctagaaattttttacagggtaacaacaacttcagattgtggcgagtcaagatgcgagctctcctggttcaacatggtttgcaagatgctctttggggagagataatcttcctaaaggttatcagagaaggagaagactgagcatcttgactaggcacatagtgccataattctaagcctcgacgataaagttcttagagaagtgttaaaagaagaatctgtagttgaggtttggaagaaaattagagagcttgtacatgaacaaaatcaatggtaaataaattgttaagaagaatctatattcttttaaaatgatgtcaaggaaaagaaatcgaagatcatctcaatgatttcaattacgtgatcccagatcagataatattgggatcaaggtagaagatgaagaccaagctataatggttgcttcatgaatatctcttcctctaaatctccatgtaagaatgcagtcttcacatctaattgttcaagttccaagtcatcacttgctaccaaactcagcaacagcctaatagatgtatgtttcacaacaggggaaaatatctcattataatctataccttccctttgactgtatccctttgcaacaagcctggccttgaaccttacttttgtaactccttgaatcccttccttgtacttgagtacccatttgcatcctacaaccttcataccagcaagctttctgattaggattaacgtctgatttcttttgagtgaggccatttcatcttccatggcttgattccactcatgcctatatggtgacttcatagcctctctgtaactcagaggctcatccactacagcaacagataacgcatagtgtaccatgtctgcaaaaccaaacctatttggtggtttgacagctcttctctttctgtctctcaccagttggtaatcctgctcctcttctacatcttattcatcattacttgcaccatcttcattttaagtcataccttcttcaacttctgttgttccctgatcttgaatctctccctgattctgtgtttgatcactactaggctccacctcaaactgataatccttttcttgttcaagttcagatggcactagtgttgggttttgtgccctaaataaaacccattac

SEQ ID NO: 319647 - DNA, 586 bp, Cannabis indica
ttatttttattgttgttttgatattgtttggatgttattttcttgttacttttatatagttttattcaacacatataatatttttcaattatattaacggatgtttaaggttttgattgtctatgtaccaaattgtgtcctccaaactttgacatgtatcgaattatgctccaaaaatttgacatatacaaaattgtatctcccgaacttctgtccacgtcaggctcctgtttgtaaaattgaacggaattagacggaagttcttaaatctaacaatattaacagttgatagggtatttgtatccatctaaaaagttccgggtgcacagtttagtatatatcaaaatttgagaaataaaaaatcctaattagcttaaaaaataaaatggatatttgcaatataagagcatctccaatgggggttgcccatggagttattttgccacatatacaatgtgattatcattttttaatacaattttatcaacactattgtctatatttagcaacagtcatgtaacattactttatcttttttttttttttaaaaaaaatactttatagtattattttatagtatttaata

SEQ ID NO: 319648 - DNA, 1374 bp, Cannabis indica
aaataactcaaatatatggatggattttagtttttttttttttttttttttaatatttgttaggaaagttcaaattttgtatggtcatagccaaataatttcacacctcacctcataaaagaaacctcaagttgaaatccctcacctcaaatatatatgtttaaccattttaaatattctcaacttttaaattaatttactaattttcataaaacttgctcgtaaatatccaatttaaacttgagttggttataatttattttttagtaaaaagttatgtaaagagtaggtgtaggtaataaatggttggactaaaaaataataagtgatataattatgagttaattagttataagttgggtacacccctatattattgtaccaattagggttgtgttgtacaatatttttttaatatttttgagcttctctaaagtgcaattattgaattggcccactaaaatatctctaatcgagctgcactcctactagaggttgatgtctaagagcactctcaataatttttcactttatcatttaaaatatatcactaaatttaattttttattttatctatttttttctaataataatatattttttaatatatataatacacataacaaactaagaataaaatactatttatatattattatatgtaaaaaagcactattacatttttatatagttttttaaaacacatcagctcttaaagtaggagtgagtagtagtagtagtggtagaagtagtaattttgttgagttgggttagtaattatctgtagaagtagtaattagtaaaactgtaaaaatgatgtttttgtatgaaatattttggtgcggagagaatagcggaaaaaagaaagcttaatgaattagaaagttacaggtggagtaaagagcagagaaagttgatagaagaggtgataagtaaagggaaggtaattatatacattttcttttattctttttcccatctaactaagttttaggctttccgattattcttcgcaccttttttgatgctaatagtattattagtatagtatttcaacttaaccttaattttcgcaagtgatcttggtcttcggaaatgccccacgtgccttttctctttgggcctctacaattcattcttatccacgtgctctatctgttttgggccttaggcctcttttacttttggaataattacataagacactattttttataaaatatttacatttttacgttcaaagaatatttttttttacatttttactatttcaaaataactacaaaacaacataaatacaacaagaaacaacataaagtaaacatagaaataacaatcaaataacaacaaaaacaacaaaaataacaatacata

SEQ ID NO: 319649 - DNA, 1782 bp, Cannabis indica
agttttcttatttttcattcttttctattcttttatttaaccaaatagaagtaaaagtttaattttaacgtacttaactacactccctgtgggatccacctcactcctggtgagtctactacttgaaacggtacgtacacttgcgtgtgtaaaatatcgcaatagaagcgatgtaacaccctgtcccacaaggacgccacgtatgtgcttttacaaatttattatagtctagtttattagtttaagaaaaaatacagtttaactaaaatcatttgattaaattaaaaaaaaaactttcattaaagaaaaaccactgttaagtacgggaattccctgtataaaacttatagattttgttccaaaattagtactacaacataggtttacaattcaaaatacaatcaaaagggtggatcctatctactggaagtcgaggcactgcggttgatatgtacatcgctgaaagacctctgactcatggccgaagcacagttttttttcacccttacctgcaccacgaagcactcgtgagtcataaagactcagcaagaaaatcaagtaaatacaaacacatatattatgcattatgagaaaatcatagcaattcatagccaataacttcatcatcataataaatagatattcacctatacataatcacacattacacactcaattaattgtcttataagacaatctgactttgatgcttcatatagcattctcacactcgttatccatgaagtttgtatgtcattatcgttgcccaataaagcacccgataagtaagaaacctatctatgattttaagggagtaattactcattttattaacggtaatgaccgtatctttatccattctcactaatggtaatgaccgtatctttctttcaatcataattgagtcataaacaatcttaatcatttctcatcattacctcgatcataatcgagtcacaaatgataataatcgttatcttgatcacaattgagtcacaaacgataataatcgatacctcaatcataatcgagtccaataatcaggtgtgcatgttgacctaaatggaaacaaagctcaacaatcccgtgtcctatgtcacaacaacaaaatccagtaaataacttaaccaaattctgacaccaaccctaataccaaaactggacaaaccgtaactttcattagctccaaaataggctatacaactcccaaataccctaaattaggtcctaaaaatcaccccgagccaaaaaccaaactcgaagaaaaccgagattttcccctgcagaccaaccgatagatcgattctgccataccataagcaaccagtcgaccggttctggcaggtaagaaaatctttagttttcttccacaaaaccgatccaaaactccaccaaacctactcaattgcttcagaatagttttacagtgtgaaatcaatattctcaaacactcaaaacttagaatcacctcaaattaaacaaatcaccgtgcttgaatcaaaactaggttcaaaattcaattttccaaaattataatctcaacaaccaacaaatcactcaattcacatttaaaacacctaatttaagcccaaaatataacttgaactcaatttatgcaacaaacccaaaatcataggactatccaataaaactaaaccctaaacctaaaaaattaaagggaaggaaaaagagacttacctccaagcttggacaacacctagaattaacttaattcaatctagaagtggtagattgaagaagaaaaacttagttttcagctgg

SEQ ID NO: 319650 - DNA, 562 bp, Cannabis indica
ttttataaattatttttgttgtatttaaaattaaaattacgtggaccactaacattttatcatgtgtactcttgtgtatatgtagggagtctactgtggcattaactaagaattttggataaaagtgtaaagagcaaaacataatgtgaattttagtaatattagtatgctttgtaattttgttgctcataatgtgggctaattgtaattgagcttttactagcaagaggtttggggttattcccgttaatatcattcctcttgaaatgttatgtaatgaccgtgaggtttaacggtttgttctaagtaatacaagtgcacttttctttaagaaaaaatatatataatgtgaatttggtagcttttgtcactggaaaattaatttttatagttaagtgttaaaacatataggtgccgtttggtaacacttttgttttttaattttttaatcacaaaatgaaagtaaaatttttgtttttaaaaaatttatttttaaaaaacaaaacgttctgtaactacttttgtttttcaattttaaaaacagaaaacaaaagtgtgtttt

SEQ ID NO: 319651 - DNA, 420 bp, Cannabis indica
attgatatatgttaattttctcaaattatattgatttcattattattttgtgtttttcaattttaacattttaagaattttattttccattgaattctctttttaatggtgtattatatgaataaaattgttaaataaattgagaatatttgaagtttaaagatttagggtttatcttgaaaataattttctaaattttcaattcagttgttaataattttttattgataatgtatatattttctccattactttaccatatcatacaatgtataatttcgaatcaggtctatttaaactaataaaatcatttttttttcgttcttaatttttttgtgattaatttgcacagaaattatagacaataaaagaagaaaataaatcacgaagctttttacgtggttttgcagttaaaattct

SEQ ID NO: 319652 - DNA, 1375 bp, Cannabis indica
attacgcttgttttctttgatttcaggtttcacacttggaatatatcaattgatcaaatttcggaaaataacaagctatagaatagagaaaattctgcaagaaaataaagctgaaacttcaagcttaaatttgactatgttctaatcagattttggaaaaagtcaaaacataaaagttttagatttctttttcttctttccaacgcatcttgaatcaactcatttggagttcgtatgtgaaagttatgcatattttactgaaagatgctgaagctgtcaaatttttgctccagtagtcgcgaccaccactttccatggtcgcgaccctttttcatggtcgcgactaggagccaaacagttcgtagttttttttttttttttgcctatagctcatttcaattcagggccggtcctggatgtctaacacctttttacgtgtcaatatcgttatttatccaactacgtatcaggtttcatatagtttaatgtaatatctcttagggagcatcactagccaattgagctacgtagaagatactaggcaccactaatgctcaagcaattctcttttttccatactctactattgtttctaagtgtagtatcagatctattggctcactttcaaatgaatataatgttaaaaaatttatatgtaaaatgaaatatatgaatgtgtatataaaatgcgaaataaacgaacatatacactatatgactataggatcgaaatacctccagctattgattatttgagcttcaatcccacacaagttttgatctgcaaatgatactgattcatatgggtaatcgggcttccaagctctctctactctctttagatagatttactgtgtttcacagaatgagcagtgagctcagggaccgagaccctatatttatataggtgagactttccatcaaggtctctgccacaattaatgtcagaatattttaataattaattctagaaaataaatcaggtaactgaaatatttggtaattaaatgtgactataattaaaatattttaattaattaataaataaataattatattttataaatcaaatcaaatatttgatttattaccatataataatattctaacattctcccacttggtcagtatttaaattaatttaccacttaaaaccaacgattatccttgctatataacaaacatatgaatcatgacaatatgtccttattatatggcgagtattatctctatgtattacgatatatttattacataataatgtacttaatgtggcaatgtacttaagcaaataaactctaaattttatgcttattctggtcctcttacaataattttctcagaaaaaattaaggtgcacataaatatgagaaaa

SEQ ID NO: 319653 - DNA, 1526 bp, Cannabis indica
tgggtgactttttatttttatttaataaaataataaaatattatttacatataataaaataactgatattaaatattccacaatcacaacccatttaaaaaaaaaacaatcggagttttgataccgagaggagatttgagggagcttaaaaattttatgctttcaattgccgcacgatgattgagctctggtattaaagcttctacaatgaaaattttggtttggaaataaccacaactcattctttaacgattttagttaattgatacccaaaccaaatccccattagatctaactcaatacctaaatctaatactcaatttccattcccaaaccaaatcgccattagatcgatgcggtttacactgcgatcaaagtattgggtcactacggagtcaaagtgagaatctccgaaaccgattggccttcgataggtgatgaaatcgaagccgaagctacactagagaatgctgaagtgtataatggaaatcttctcaggagaatcgaacagaatcaaggtactccgtcgaatccgacggtgtcagtggatatttacattttacctttttaatgagaatatgaatcaaggtagtccagagtggctcttgtcaactacggaaaggattatggccagcttgtggttaatgttatcattgacatcattgatcagaaccaggtatgtttttcctaatcttttttttttctggtattttctgttttttattttagttttgtatagttatcttaggccttcattgcccataaagagaaatgatcttttaggatttaatttgatgaagtgtttgctttgatttaatagtatggttatgtattttctggcttttaatttaaaagattgattaacgttagatagactcactatggtataatactaattattcgttgtgatttactgccaaaggataaagatattatttttgttggtattctgattattttttttcgtaataaatttgaattagccaatgattgaacatattatctgtacattctgagatgttttagtggcttttgtagtattctgttattagtattaagggtcaatctccactaaattaatttagctttgatagcttatgttttgtgttaaacattgaaaattattaaaccaattttattttggttgacaattactattcttttagcctacattgattttcttatctctcatttttttgtgaggtgtgtgtgaggaggttaatccttcttgactattttttgtgtctgtacaggctattatggattctccccacatggtgaggtcacagatgaactttaaggggctttgcctcactgatatcaagattgacatcaaagagggtccctaagaagaaggaacatcttgcggccatggaagttgctggtaggtgattgtttatttgaaaagtaatttgtaatgtgggttgatatcttaggtcttttggtttaacactttcttatctgaattctgcagatgtaacagctcctggggaagaaaattgattatccagaagagaagggcagcc

SEQ ID NO: 319654 - DNA, 568 bp, Cannabis indica
taattggaagcatctcaaaattattactgatgataagccaaaaaaagagtcagacctgaaagatgctttgatgtggatctcaccctccttagaaacattatctattaatgaaaatgtcatactttagttgtaactgatgactatgagcatgaataattcatcttttatttgttttgtctgctaatgttgctacttttgtccttttgagattatatttaaccaacttggtatgaatgagtttgttcacttagcaaaagaatgtgatattttaccttttcttgcattattaaaattatggttatatctttctatcttctctcaatttttacaaatttacaaattttactgaattcatgattttgtgttttgtttactagttgttttatttttatttaataaattatatgtttctattctatctatattcattttgatttaagaagaatatggacagatggaaccatgttcgaattttactgtgactgaaaagtgaagtaagttgcaagactgtaatttagtaggaacatcattttcactgaaaactcgatctggaaaagaatatgacgct

SEQ ID NO: 319655 - DNA, 981 bp, Cannabis indica
gatacttattatcttctatttacataaaaaaagtttatgcccttctaagaattaattattattataaagaaaaaaataattattatttggatttattgatcattgtttttgtgtaataaatttagttctttttttaaaaaaaaattactttaatctttgtcaataacactattagtagctaataacaaatgctcgatgaataataaaatatggcagatttcaaattttagaacattaggcaaagctttgtaaactccaataattaaatgccctaataagtaaactaagtaattatatttacttacacactcgtggcactttataaatcaaagtgatcccaattaaacttacaaaattaattactatttattataaataattgttatatcttctcattgttcaaatatcagctttactatattattttcattcttcttaaaatacatacatatataatttttttttatgtaatgctacttttttttcatctccacatttacatgttattttctaaatattttttcttataattattaaatgatgtatgatattgtacacattattaatgtataatactcattggtaatacccattaaaaaattattcatataggtatatacatatatatctattctatataaaatgtatttatataagtttaacaatattttttaattttatatgttaacttaataagatatgctattacttaatgtaatatttttttactaaatttataatataattatatatttaaaaatagaaatcatgtagatattttatataaaaaaaaaatttaatttaaattcaaaatacttattattcaattaataatattattatacatatttaaaaataaaaattacttagattttttatataaggaaattttaattttaatttaaaatacttaaaatattataaatatttttaattatatttttaattttgttggtttaactttgaataaaaaataagaga

SEQ ID NO: 319656 - DNA, 1109 bp, Cannabis indica
aacaatgctcttctgcactcgagaacgagaaacagtcacagtttctcaaccactacccgaatacaccctcagttcttgaccctttcaagaacatgactcacagcttagaaacctaagcacttaatctcaaaatctctctatgtaatctctaccttaaaggtgaaaagaatgagctataaatagacacaattcacagtttgaaactaggtgcaataacagcaccaactaacttacaacataactgaaagttagttaagttgttataagtgtaggtgagttagtattaatttgatttagaggatcaactatcacacaatatcatatatatatatatatatatatcaattgtaattcttttcatgctattgtaacgtcaaaaatattcattaaaaattatattatttttaattaactaaaatattctatttattatattagaacacaattaataatatgtatttatattatatatatactaaatgatacctaagcatccgatacaatttaatattttaattgtaatatgatccaatccaattaataattgaatttaaaaaatcatcacctaattcaaattaattacaattcaaaatctaattcaatttaatctcatctaattaataattattttagatcaattttttaattaaatttaaattcgacacttgatttataaaattaaataaagaaaatagagtcattgagaaagtaataaatgataattaaaatttaattattttttgttatatataaataaaaataatattttttcatatatattatatgtaattaaaatgtatcgatttttaattaaattttaaaagtggtattcaatatataatcgatgtagttcaattaaaattttactattctcatctatttttttttgtaatttgattatattagattacttcaatgtaagtggatttttttgttttgaaaaaaaagattgaacttattgcattttctcttcaaataataataataaataacaaaattacaacaatttacatatcaaatgcattctgcaatgttgaattttgcttaagttcatatactaaacaataaacatatatatatatatattatttttttaatttatttagtgt

SEQ ID NO: 319657 - DNA, 686 bp, Cannabis indica
caatataaaatgaaaaaaggaaaagcattagcctagtacttggttgatttgatgtagttaaagaccaaattcccatcattgtaactgatatgagaagctggaagaaaatgaggatcagcaatgagatcatttccactaatgagatcattaacaagaatcattccaactgcaccggcaagagcggcctcttgacccttttcgattcgagcaatgtcgcctctaacgcaaactaagatcttctccttcaccttcttgggatcaagagtgttaggtttacataacaatctgaaattaaattatgttaattagcattagtgtacaaaaaaagtgaatattatagacaacattatataatgttaataaaacatttaattagattttttatacttacgcttctgaagcattggctttggtcaacctagcattatctccacttatcaatggatacatctttggagatggtaatggtatggaagaaagactttgaccctatcatatacattggtagaatatgttaaaagagaattcaaaacatttattgaaagtacaacaatttttgtttaacattgtttgaagggaattcaacactacaaaaaactgctacatttagtgataattttttagtcaacataaaatttttgtgactaaatgtgacttttaatcacaacaaaaaattatttgtgact

SEQ ID NO: 319658 - DNA, 780 bp, Cannabis indica
aaagtggatatacaatgcaacttcctctatatttcatgtatggcacttaggaaaatgcatactacaaaatcacaaccaattcaaatggcaacaatatgcaacacccatatttacaacaactccctttgtctccacaatgattaattaggccaacacaacttctaatctacaaccaaattcacaatttaaactctattttgatcatttctaatataatacttgatattttaattttagatttttttttaaaaaaaaaaattgctttaagattttggaaaatatactaaaaatacaaaatttggaaaataattataaaaatacgtagagtgttgtggctctggctgaggataacttaagaactgttttgtgggttgtttccgacaggctcgttttctctaatgttcttagtggtgaagttgtagcttgccatctgatgagacaacagtgaagaggaaacacaattttgtaattattgaaagcgactccaagataattattaaggctttgcaaatgaaagttttcgtctggaccattgataattatgttttgaattgtaatagactctctagacatgtgttgagttgtaattttgccttctagacttagtaattttgaggctcaaaatgtaactaagtgagtttttgcctaaaacttaactgatatggttgatgtgccaactttcccaacagatattatttataataaccatgaggtctaactttttatttttgtaatgaatgctctttctcaaaaaaaaaaaaaaaaaaaaaactacttaat

SEQ ID NO: 319659 - DNA, 594 bp, Cannabis indica
tagctaattaacactgatccaatctgcaattacccagtactgcaaaagtaaaatatcttaatagcttgatcacaacagaatgttaacaaaacccataatgattcctgttcagaatgagattttaatttttatttcttttggaagagaaaaaaatccatgtcctacctcataagccaagttagtaacactgataaaattcaagaccaccaaccagaaacaagaaaccaagacaaagatggtgagaacgaaattgagacaacagatgtccaagacaaagagaacaacccaagctaagaaccatggaaaacacagtttatataaaattcaagaccaccaaccagaaacaagaaaccaaaaagcagatccacttcgtatccaagttctagagaaagctttaaacctcgttggaaaaacaaagaacataacaataatgcaatcagaatcaacgaaagaaacaactaaataaaaacattagagcaaactgaaacaaaagcctacgattgtaactgaagcagtacatattcaaaatcgaacacattgagaacccaaagtttacagccaaaagatttttatcatgtaaaagtttcaaacccc

SEQ ID NO: 319660 - DNA, 1879 bp, Cannabis indica
taaggtaccaagcaccacaaaaggtatacaataccgttattagtgcattataatatcagctcccaacaattttaatttaataaatgatttggaaaaatactaaccaattattaggtaccacatcggtatagtattgagcaccttacagggtcacataacaataatagtactaaaaattatttatcaaaaaaaaatatttcaacgatcattcataacaaaaaaacaaaataattaaaaaacaaaaaaataaaattttgcatcaaattttgtaattgtgcgttggagcataatgctataaattgatgcaatatatcacaaagtcttttttatgtctaaatatagtacaatttttacatcttcaattggagctgttcttgcaaatcaacttatatataattaagaaagatcaaaattctaaccgtagttagtaaagatatgtattaataatagaaatattaagagacacattaaggttgtcgataagaataatagccaagtgacttggagtctaataaatactaattaatcattggtaatgaggttagaataataaataaataaataaatggtaaggaggttagaataataaataaataataagaacacattatttatagaggttcgaccaccttgtatatgggtaatgacctactctcctttggttgtattacttgtgagataatactgggcaaataaccaaggaagataaagtgatttctagctacgactctcaaagtgtttacaaaggatatctttcaacaaagtgctcttagatatgtaaatacaagtatcactcttagtttttcgggcccctccccttatgaatgccttcactatttatagggggagaggtgttacatttggctatgtaaaaaggagtaaatgattataaatatccctatattttagcttgtagttacaatttgttgaaccttttttatacttggatagatttactggatccaagtttgtaggatttagttatagatatttaaagaagcttgttgaagataagataaaggatcacattatctctgtcaagtatccctagaagtgcaagatctggctgacatgttggtcattcggtcaggtctcttgacacttgtctccttttgagattggcttgtagaatcatctttgcagggtgtttctcccatcttatctgtccgacaggtggatgactcagccagatgcttcatgggatatctgcaacctatggttgctactctttatacagacctggcaggcatatttttgcccagaggttctctgctaggtcaaagagatagctggatcatgccacgtggaaggaccccttccgctgtgcaaactttgggaaaatattttccccttaaattcctcgtacaaacatctatacgaatggggacttttgatacctgtaggggtgctggcaggcatgtgggcttcacgtgcttagtaccttgaccattaattgtcagctctcatagtggtagttacaagcatattttgtgggaaaatgtgttgacggttgcacttcccattattatctcttttttggtctttccttttctccatagtgattttattgggaattaatttcccatttaagtagtttttttgggaggaaataaattgaagcctatataaaggccttttctcctcttggacccttttactttcatttttatttcatgaaaagattcttagagagaaacagaaagatttaagaaatctcagagcttccaccgttgtgcaaaggaaaaatcatcatcctcattgtctccgtccagaccttgcttcaagatgcttcagtgagtaagtgttggaaattattttaccaggatcttagatctactcacaagtatgttgtttaaacatcctaaataagaactttcta

SEQ ID NO: 319661 - DNA, 1049 bp, Cannabis indica
cgaaaccgaccgccgtgtcaaaaaaaccgaaaccgaaaccgaccgccaaattcggtgatgacgtggaaccgaaaattcggttacggtctggtcggtttcggtttttcggtttttatgaacacccctaccttctaagcattcgatcgaagatctgactcttgcatcgaatttttcttcatcaaaaatggggaaatatgtccttccagaggaaaaaaaataattcctagtcacaaataacaaggccaagcgcccaagttgacacctggggctggccctgcgcccaatttgacatgttgtcaacctgggccatttaaaataaagtttttcatgaattcttcgagcatcttctttgtcttcaaatatattaatatttaactatttctgggaaccaaacggaatttctgaaggggcgaaattgattctcagcgctaaggttgacaccaagttgatattttgtcaacctaagctatttccgatcaagtttagtaaaagtattctgggcatttttctatcataaaaaataacaaaaattcaaataatcggtataacctaaaaacgaacttatatgttttaaaaggtaagtaatcggtatcaaatgagttattataaaaaccaatgtagtggtaaccggttgaatttataaagtaaaaagatatatagtggtattctgttaccatatataccaaatcatttttaaaataacaaatgcgttgtaactggttactagtacaactatcaaatttttgaaaatagaatataagaaaaaaaaatcccattataaatgtaaaattattgaaagttttatctttgatgtaattatatttaccaaatttatagaaaaataaattatatttgatgtaatgtcacctttaagagtcattcactctttgttctaaaaaaaattacagaagcaactatttttgaatttttttttacacatttaccttaaaatatatatatatttttattatagttataaaaataatacaaaaataacaagaaaaactacattaaaataacagaaaaacaacataaaaaaataatataca

SEQ ID NO: 319662 - DNA, 1081 bp, Cannabis indica
taatagaaaatagtaataatatgatatagattttaaacttcaatttcaatttccaaatacaataaatataatctatgtaatataatatatacacttttattaaaaaaaatatataaatcggttttattcggtttattcgagttaattgagcgatttagaataatttgtaaaccacccaatatatttattgggcatttttggattttcattatattatttcggttgtattttttgttagtttattcggtttggtttgggtggtttattcgagttaggcgatttataaattttgttgaacacccctaataaatacaccttgtagcagctaggccaagcatctctttcatacactttgaattgtattcatatctttaaaaaaacgagtctttgttttgtagagaagtggttgttcgtctctttcttttcgtgtttatgtattttgtattatcttgagtatgtaataaagtttacaaaagaagaaaaactacattgctaccttcgagagaaggttctacaagtttgcggcataaaataagagggagtttgagcacttaaaatttcaataagattcgattagaatgtagaacacattaagtttgcggcataaaataagagggagtttatttatacataagtccattactttatatttttgagatctatccaatgaatcttatctctgagtgtgatcctgtggactagtaataatatacaaggattattgaattcacgtacaaaacctttatgtgtttttatgtttctgtattgtttgtgttttggtttatttggaacttacatagttattttttgtagttacagaattattttttctgcaccaattttattattcttcattaaattaaaaaagtaattaaataataaataattttaattttagtatgttatacattttctctaaatatatattcttatatacaaactcaatagaaatacacaattacactattttcttttatcatggtaagtgtaaatctgcacatagattttggtcaaatgagatttttttttgctagagaacgtttggtcaaatgagattgatatctcaaaataaaatggtgaa

SEQ ID NO: 319663 - DNA, 1098 bp, Cannabis indica
cattcatgtgatttttctaggacaacaatggcatgaatgcagcctgtttgaatgtagaaagagatttttctaaggataaataactatagtagtgatattacttagctacatagattacagaaggcctttcattttttttttttttataaaattcgagataataaataatgtcgaaataagaattcaaacagtattttatgcacacaaataatactattgaaaaaaatatgcgtgcaataaattatttgaattataattttaaaatcataaattattaaaatttgcttaaaaaaatttgattaatctctcccgatccaaaagaattccttaatttttaaaaaaaaaatcacaaaattgtttggtaattttcaaaaaataacatataacaagggtcaactaaattttttttctaagaaccaaaaactctcaaagtcaactatgtacaaccttcatgtaaacaaaaaaaaataaaaaaattaatggattactttacaaatacaaaaaaaacaataaaaaattataaaatacggttgtacggaattttaatatttttacaattttataattttatttataaaaatatggtcttttaatatatttttatgttatactcttattttaatttatttttatatttttattatttgtatgctatattttattgttgattaaatattatttttctgttacttttatataattttcttgttgtttttatagaacatcgtaaaaatgtaaaacaaaatctatgaacataaaaatataaaattttcaaaaaaaaattatattttctgtaattacccaaaaattaaattataacttattatttgtataccaaatatactaaaagtatctacaaataacgaatcgaaacaatcactaacaactttttgatggagaaaacaagatttcgtactatgcatgatggatagtgtggtagaatgaagagagtgagtcggagctagggaagatttgggtggccaaaatgaagaaaaagaaaaccctaggtaccgaaacagtaatttcaaatgatcgaaaaaactaatattttaaaaataaactataaaaatcaatctaaagttattttgtttccaaaaa

SEQ ID NO: 319664 - DNA, 1029 bp, Cannabis indica
ctaaatattggggtccacaattaaattaatttacatataataataaaataataaaaattagtgctaattgcccttactaatctaaattactagagcggtcattacaccaatcctctagttcttcttggtgtcctggatgacacaacaatcattaagaaaaatgaatgaacatttgtggagaggacattaaagttgtgacagaaaataagctatacttgaaattaggcacataaagaatatttgttaataaaatatgagtgaaatagaaatggatccaacaagatatttttttggtagtcccatcatgtagaataacatcagataatgatgaattagacttagtgttatgaaataactcaagatggggacacacatgatgtgtagtccagtatcaatgatccactgattgttagggatgagattattcttaccataaaaattagacactacctggttgggtttgtggggtagaggagttatcattgtggaatttttgagctaagaaggctatgagctgctggcactggtttggtgacagattaggaaaaggatcttgagttcctccagagttatcctcaacaacatcatcattagttccagaaagattcgcaacagccttcccctgtgagttcttggtctgattcgaaccatttcctttatttgaaaatctgttatggagtttatggccaggtggatatccattaagcctgtaacatttggccatggtgtgtccactaataccacaatgagtgcagatgagttcttgtctttgtgattgaatacctcctacaaactcaccacttggaggagggataggtttctcaacatcaacatgaacaacagtgataccacattgtctttcctcttgaatgatagaagcaaaagctttgttgatgctaggaagaggatcctgcatcaacacttgagattgagctaaactataagattcattcaatccaacaagaaattcaaggacatggtctgttggaaattattttaccaggatcttaaatctactcacaagtatgt

SEQ ID NO: 319665 - DNA, 1506 bp, Cannabis indica
gatgttttttgtttgtagccttaaaataattgatgtggagctgtcgttgttctcatgcttgtatatatgaatataaccagtaaatattcaagcacaagaaatcttgagtgttgaaaatctcatcaatatatgaattctctcaagaaatcaagcacaagtacattgttgaacaactatttagtgacatttgagcatttctcacaacttaagaagccatttttgttgatgtctctcacactttcagattagttacttctgttttaatatacttttggtatgtggaatatattatagcaattaacaagttgtaagtagtatttttgtagagagggagatatagttatctcaattttcttcaatctctctgtttacatcagttgtttctctttgttatgtgcttcgggaatgtatatatgttatagcggagagagaaatactttcatagtttttggaatgaatgtagtatagcaacaaacaaattattactattagcgcaaacatggaactatagttactaatttttattatgagctttcttattttaaaatggattggtaattgtttacttcacacaatattttaaagtgaaatagcagatgcatgtgctaacccactagtatatatatatatatatatacttgtgttaatgtaatgctagacacaaagaagggcatttgccttttgggattttgttagtgtaaggaggaagaggatagagaaatgttttgtttgcattttgaaacttgtattttgttcgtctctttctaccaggatactaaatgattctaatgtattataccatatagatgatatgatataagatatacttatgcttgtaattctcttttaacttaatgagacaattattctactatatttatacagaaagaaaactcttcactgtatattctgaacattgttttggaaagttaaaacagttttttaatgcaactgtttaaaatgtattttgttagtaattaacggtttctgtttaagttatgaattttttaaggcattcatttaatagttaagctatatatttttcatttatgcacagcggatatttaggtggatggtgttcaaagtttatctaaaagagggttatgccaataactggttataatttttcgttctgatataatttaagtagcatcgtgctgttgctaaatcttgtggctacaatcacatttgaaagccttgattttatctatttgtgttgagaactatttatatatatattctctgtttgttgttctagagattgaatatgtatttgattgtgtctgggtgttgtgttatttaactgttagaaaaaattgcaatgtataaagatcttgaatatgctagcaagttaaagcaactttaaatattttattattgttgcagctcactgcctcccagattttgtaaatggttgtacaacataaaggattggcctttctaaaggcagatgatgagaacgaagttgattttgatgatgatgtttctgaatctggttctgagttt

SEQ ID NO: 319666 - DNA, 2188 bp, Cannabis indica
ttttttaatatttataattattacacatatgatgttaattaaaaaagtagtaacaaaagtatcttattttacgattttgttgcagtcgtatttttttagttatcaagtgtcaactcaaaaacacgtgatgacattattagactacgtattaaataaactaaagaaatatattgctacgtgtttttgagttgacacttaataggtttaattgacacttaacatccaaaaaaatagtacgattgtagcaaaatcgtaaaataaaatatttttgctactatattttttaattaaaatcatatgtgtaataattataaatattagtaattttgtttcgctacaaatatccccaacttaaaataataattaatatatatagataagaatatagacaaatacaactatactttaattattgtttacactttttaagttaatttttcttaaataactttagtcggtggtgtgttatttaggtgaactgattacttgactaaagtcttgttagtattaagagaggactcacattagttttttactctattttttaaaatatattattattgaaaaaatttttttatttttttattttacctcacatttttacagttacaccatatattaatttctctattttttttttatttacatcatttaaatattattttttaaaaattaaataaattaatataattatatcacatacatatattaaaaaaatattaataaaactaatacaatatttatagcttaataaataatgtttttcaacatgtagagaagcaattcattaagctacacaaaatacattataactcaactttagcttatttaatagaagagtttttttacttataatagctcaaatttaatgagggctcgttttcaattttggaagcggttggtgagaggtgactggaacactaattagtaattagtctattgattttgatgttgttgtggataagttgccaatttattactatgtttatctttttctttttctttttttttttaatttcaaaagaaaaaaaaaaatcaattgaattatggtaaccacaaaagtcacctttcataatgaaatattaatgtaggctacaccttatattaggcatgcagaacatatgcctattttgccaagtatgagctgaagaaatattgagcaacaataacactaaacctatgtttggtagggtaaaaaaaatgaaagaagagaaaacttaaaagagaaaattgaggagagaaggagaaaataaaaaatgagggtgattggtgtgaaagaaaaatgggtagaagagaaataggaatgagacccacccaccaaaattaatatctaaaagtggagaaaatataaaagtgaacaaaagtatctatctaaattactcaattatcttcactaataattattaaaattaatattatataaacaaatagtaaatttctttttttttttttgaacaaaagtgatagaaattattaactccatttttagccaacgacaataagtcaattaaagctattaaaaataattaaataataataataataaagataaagcaaagagaacaccaaggttgttatagaggttcgaccccgtgataatggtaatagtctactctttttttttacttgtattgacttgtgagaagagattcaagaagttcttaatctctctggaaagctcttacaatgaattctgagtatttctctctttctaattttgtgtctctaaatagtgaaatggttcaactatttatagggaagaattacatcgaattaattttccaaaaataataagaattaaaataagaaacttgtgtactttccttaaataaataaaattaaatgggaaaccagacaatgtttactcttatttcttgtcaatgtgaatctattccccaaaattagggatataatcgtggcttgcaagtttgaggattcatgaaacatatctgtgaagatatttaactcgcattctctggtcaaatgtatgcgagctgactgcacaatggatgctggtcggatggtgtagcatactctgcctaggcattcttagctccttctgtagattgattacttactagtgataaatcaccttggacgacacatcataagaggaattgcccgtctaggccattgaatctcaccttatgaaatttgaaaatcaacaaccaaaggatcattgtgtgga

SEQ ID NO: 319667 - DNA, 948 bp, Cannabis indica
agcaaggatctgttcttccgatttctgatgatttgaatactaagaacataaacagctgtttgggtgtattttatagtacttatttaacttatttttttttctttcaatacacatataaaagaaaacatgtaaaagagagaaatagaatatttttaaccatcatttttaataaataaataaataaaaattgctagacgtgacagccccacttctaatcgatatttattaattttttttatcacgaaagaagctttcattaatcacttgaacaaatacaacaaacaccaagccagcaaggcaaactgcccctgcctcaagttctcaacaggctaaattttttgagtaaatacacttgatcattagtacttgttttcctcttagcatagctatgtaatctaaacaacaacagattctttatttcagcaactaaacttgctgcttaatgggaatagtactcttagatacacctatttctgttcctccaaatcccatagattgcagcaaccaaaacgaagttagcaactgctgcaacaaggcctttccctttgttgttcaaccactctgtccaaccattgtaactgctaggccaagggacagctcagagccaacaaaccagttggttaaaaacctgagaagacatattgcaatcaaaaaataaatggcagtggctttcatgttcaagctcacacactgggcaattcaagttttcaacaaagatattaaatttgggaagatggtctcgggttagcaagtgatcattcaatgcttgccaaagaataaatctatgctttgggacacttaaacgacaccacacattcttttggtactcaactttttattgctgcactgagctataatagtagttttgcagctctaaatttcccaaacacaccagcaacaacaatatccccttacaaaaggtttgttgaagtctacaaagcttcctcc

SEQ ID NO: 319668 - DNA, 1005 bp, Cannabis indica
tttttcaattattttatcaattttacccatatcacttcacgatagtctccattcttatttaatcaaaatttgctctaactttttcacaaatctacacatccatctcaaaaaaacacaatctattatatttgaaagtgtgtcttgattatgtaagagtgtaagaataatttaggtaatgggtacaatacttataaaaaagagtatatttgaattaaattttatttgaaggtaaatttagttaatgtaaaaaaaaaaatattcttcaaccttttccaatttcacacctgtacctgacccaaaatcaaaaattcgaacaccaaatacaatacacacattttgtgaaattcgacacaaaagaaatccaataccaaaattcgataaggatagggaaatttcataatccttagtttaaaaaatacccaattactaaaacaaaaccccttaattatactataccattttatcttaataatttctactattacccaaactatccttcccatttaatatttttaaaaatcttaaccagtcccttgattttcaaaagtggttgaggtccaatttttgcgatatcctactattttcgtgggtatatagccacctttgggcttcatgcgaggttggatgatgctgggagagtgttggatgtgtaagactgtgggagtacctcctaggcagggccgtctcaaggtgatgagaggcctagggcgaaatttgaaacaatgtcttttcttttaataaaaattaaaataaattttaaataaatttggacacaatatcaattttaattcttttatctctatgtaataaataattttttgcattaaaaatgtacgtgaatagatttttttatatagtgtaatacaaatatttaagttataatattattatttatttatttttgaaatgctaagtaaaactttttacaaataactaaaagtataaaaggtgtattttcaaaaaaagtattaaagatgactagcgtagggattgaaccttgaacct

SEQ ID NO: 319669 - DNA, 815 bp, Cannabis indica
attggatgaagctaatgttttttggaagggtctttggaagttaagatgcctgcctaaaataaagaatttattatggagggctggtatgaatggtctccctactatgattcaactgttgtctaagagagtggaggtgagttctttttgtcccaggcactgaagctattgcgcacagtttaataacttgccccgagataaaactgtgttgggatcagctgtttttagattggtgctcggctgtttttactggtttggaagctgaaaacaaatgtataatttctgctgtttcttgggctatttggggtgctaaaaaatgattagtttggtctaagaaagtggtgactgctggaaatattgttgctaacgtaaaggagtgtgatcaatggagaaatgctcaaaatcctcaagaaggatcatcatggcctggtttacaaatagatgatggtgtggagcattgaaatttaccatcaattaatagtatcaaggtcagtgtggacgcaactatgtttgagagtggtcgaagctatgattttggcataatggctagagattgtaatggtcttttaattgaaggctgcactttttcctcacaagcagtagtgaatcctgaggttgttgaaacgatgggagtttgtgagactctaaattagataaaaagaatctggcggcagtgattatagaaacaaattgagtatgtttgttcaagctataagtagtttacaaataatttctttgttggtcatgtaattcaagattataaactgttgagtaaactgctagcaaaataaagaggaacgatattaccgaatgaagaa

SEQ ID NO: 319670 - DNA, 1089 bp, Cannabis indica
  modified_base (549)..(549): a, c, t, g, unknown or other
acattccaccccttagtcactaatacgcacaacctttttatgaggaactatgggccaattgggtctagatgtctaatgcgggagaattaattattttagctctaagggttgaccaaagacattttagagtgtgtctatgagccccgagcatgttattatgttatgtccatcccctattcacattgaatcatcattttgcttcaattttttgcgttctattcgcctcttacttgtaatttaagataaatttatttttaactaaatgcgcaaaaaaaaattagttaatagaaatttaattttacaatttcaagttgtacttgctgtttcgggtctttccagtaggcgatgacctctactcacaccttttgtgtcacctcctctagggtcttctattcgcctttgcctctcccaggttgacaatattcttcttccatgtcttttttcgagttcaatctttaattgtatattccttttgacatcgctaacaaatcgtagttcacgaatttagaattgtcaagtgggaactcaaatttggtttgtaaaaaaatntaatcattaaagtcatatatatatatatatgtattttttacaattagttttttttttttttttaaagtattacaattaacagttgaatgttgtcgctggtctatacccagatagtttgaatttatactttgtaaatgctctctcaagtgaactttattcatgagtaatggtgctgcgaataaagagtttgaccatgttgttaaatttgttcctatagtcgtccatgggggccccactctagatgttatcgaaatttaaacttctacctcgtcgggctacttgactagttcatcttttactatttttttccctttatacgctcctttaactccattttttttattgtttgtccacacctgcaccagacattctacacgtgcaagctatatttattaatgataaaaataagtaattgcaatcataatcaatttattaactaaaggaacatgtatttaatagggctgaacatttagaacccgcaaacccgaaaaacccggccacccgcccccgaccagctgcaaaaaaaatcgaaaaacatta

SEQ ID NO: 319671 - DNA, 853 bp, Cannabis indica
aagaggaaaccataacaagagaactgaggcaattaaaccattactcttgattcaactaagcacttctttcactccagttgcttcagcttcaagtgtacgaaaacccaagtcgcaacatttacattagccttgagttgattctcttggggtttaagccaatgttcttggttattaatacttgaagtatcagtaaccaaacaaaatcatctggttcttgagaatttttttcattgttcaaggcttcgtttagcaaataccgccacttccgagactgattgaatggctctgcttctaatatcgttcattcaacactttccacactacaacagcaagctccacaatctccctactgctttgttccaacagtttttggaaccatgcatcatgattgttagagctgaatgttcctctcttcagctccaacgagcatgattcaccgagaagctaattggaatactcgatattaaagcacgatctctttcattaaacaaatcagcatggatctcagtatctcaactttgttggtcactttgcaaatctgcagaacatggcctcacactagtagaactgtgaagaagctattttttctcttttcttttcgcaatgtgtttaatgaaaactttaaacttcataacaactttttgaaaatttatcttaaattaatggtattttgagtgaaatttcatagctttgttttgagcgtagagatagtaaccttctcgttcatagtttagctaagtatggtttgaacatttaaatatcagccatttgctgttcgccatcgtattctattgtagttgtttctctggtttagtgaaattcctttacaaaaaaaaaaaaaataaataagctt

SEQ ID NO: 319672 - DNA, 1556 bp, Cannabis indica
tttaaatggcgatcttgatgaaaccacatatatggaacaaccagcttggtatgtattaccaggggaagatagaaaggtgtgcaacttaaatctatttatggattgaagcaagcctctaaatcatggaatatcacctttaataagactattaaagagtatggcttcgaacaaaatgaagaagaagcctgtgtatacaaataaagtaagggtaatgtagtggtattcctaattctttatgttgatgacattctacttattgggaataacgtagaaaggttatcagatgtaaagaagtggttagtcggcagattccaaatgaaggatttgagagaagcaagctatgctctcaagatcaaaatctatagagatagaaagaggagaacattagtactttctcaagcaacttatatagataaggcgctagaaagattctcgacggagaattcccaaaacggacaatcactgtctagacatgggattactctatgaatcaatgtccaaaaactcctcaagaagaagaggacatgaaaaagtacccttatgaataaacaattgggagcttaatgtatgcaatattgtgtacaaggcttaacatatgctacgatgtaaggattactagtcaataccaatcttatccaagtttggaccactggattgcagtaaagcatattctcaagtatcttcggagaacgagagatctcatggttgtatattctagtggagagttaaatcctaccgaatataatgattctgattttttatcaaacaaagatatatagtcaaaagtcgacatcagggtcagtatttactcttggtgaaggagctgtagtctagagaagcattaagcccaccagtattgcaaattcaaccatggaagcaaaatatatagcagcttgtgaagcagctaaggaaccagttattggttgaagaaattctacacaattatggaagtagttatagaagtagaaaaaccacttgtgctctactgtgacaatagtagagcgatggctaactctaaagaaccaatgagccacaaagagagacaagcatattgagaggaagtaccatctactaaggagtatagtagagagaggtgatgtcacggtcttgaagatcttttcaaaatataactttgcaattctatttacaaaaacgctaccaacgaaatcttttatgggtcatattactaatatgagactaagggaattttcttttagggcaagtgggagaatattagggtttatgccctaaaaagcttgtaaagatatttttgattattaaataaagagttaagcatttgatatatgtgtgaatgttaaattgttaatatttattattgaataatttacattacaaatattagaatttttcttattcatatatgaagttatgccttgtagctgtacagaactaagaccacttggctatgaataaaatagtcagtaacatattaaagttatggaatcattaatcaatagtcgctagtacgtttcactgatatacctgttctttggtgcaagtaatcttggttcaaattacggatgtagtgagacatc

SEQ ID NO: 319673 - DNA, 947 bp, Cannabis indica
gaaaatgttgaaaaatatgaaaatattaggtaaaggtaattaggtactcttatggtaaccaaatgagtaaccagttgccataaggggataaccatgtaccttacggtattttttcataatgtttaatttttttctaaaattttcctataaaataatttttttgtaaacttatactttaaaaatcataaaaataaaaatttcccacaatttaatatgatgtcaatttaaaaaaaaaaaaaaatggtaagtcacatgagaggctcggagtgacggatctagatttttatttgtggagacttatttattattaaaaaatatttatacctatattataccgccaaaattttatatgttggattagtaaataattagggttaatttatgagatttaattattaattatgaattgcatgtttgtagaaaattatttaattttaatatgtattaattatgctatatatgtgaatttctcattttctgtgattgtgctcagtagcagtggaaagtgacgttaggccattagagagtcacgttttgtatgtgatatagaattttattaatagcagggcatcattattattctttagagtgtcagaaattagtaggaattattaatgaccaaactacccttggatgatttaaatatttgagttattggtaagagcaaaagggtcattagatagaaaaaaaaccctctttttgtcttgtatgtactttatagcctgagtattagtttgaatataataaaaaataaaatgagttatttcttaaatagtgttagatattagatatatattagctgtaaaagaattaaatatttagtagatatttagtctcctagctttgtatataaatatgtattattctatgaaatcgaaacatataattcgaatcactattttctacatggtatcagagccattgtgattcaaaattcgaaattcgaa

SEQ ID NO: 319674 - DNA, 1462 bp, Cannabis indica
aaagacttggagatgaggaatgaaaaattgggaaatcacaatggggaattgaatctaagtaggggcagacctaatcaaagaaaaccatggcataatagagagaggagcaacaaccagggacacaacaaaggacatcacagcaacaaaaaagggaaaaaaaaagctctaaaggaaactctgacccaaatggttgttaacactgtggaaaaccaggacgttatagaagagattgctatttttggaagaagagcagtaaacacagggatggatcaagagaaagaccagaccacaacactagtaaacagaaacaagattttcacaatgccaacctaagtgatggatatgatagtggagaagtctacatgacaacaacatcacttaatggtgattggattctagacttaggttgcactttccacatgactaacaataaatatttactgtctaattacagggaaaccaaaggtggcaaagttatcctaggcaacaaccaaacatgtgaaatggaaggagcaggaactataagcttcaagatgtttgatggggtcattagatcacttactggtgtgaggtatgtccctaaattagcaagaaatttgatttctctaagtgtgcttgatgacatgaacatagaaagcaagatcaaagttggacaaatcaagctatgcaaaggctccatgatcattatgaaaagtgtaaaaaatgatggcctatactacctatgtggtgaaccagtggctagttgcaacaatgtagtagcacaggctccagaagataaaaatgcaacattgtggcataggaggctggggcatattagtgagaaggggctgcaaatagtaagtgagcagaatctacttggaaaagataaggtaacaaaggttgatttttgtgaatattgtattcttggaaagcaccataggctaaaatttaagactggaacacacaagtctaggcacatactagaatatgtacactctgatctttggggtcctgaaaaggttagcacacatgggggttgttcttatttttttatccatagtggatgattattctaggaaagtttgggtatatttactcaaacagaaaaatgatgcttttcagacgtttgttcactggaaactattgacggaaaatcaaacaggtagaaaacttaaggtcctaaggacagataacgggttagagttttgcaatgacttatttgatgcctactgtagagagaatggtttactaagacattgaactgtcaggctaacaccccaacagaatggggttgctgaaagaatgaataggactttattggataagtctagatgcatgatgtttaatgcaggtttgtctaaagggttttggggataagctgttgtcatagcagcttactgttgggttttgtgccctaaataaaacccatttcaatataaccagatttacttattaataaagatcagaaataacattttatgtt

SEQ ID NO: 319675 - DNA, 872 bp, Cannabis indica
atccaacccaagctttacttaactaatgcctggaaagaacatatcacttatccaaggtgcaagtaaactatgttgtagattatcatataagttaaaccctctgtgtactgataaatctagaaatatttattcaatcacacaatcttgattactttccactgtgctgacgacacaataaacaagaacataaatgtgataagggtttggatgaatttataaataaaataaacacataaatgataacatgaaccaaatgacacaataagtgatgaaaatgcttctgtttctttattgatatttaaaagataaagattacattgaaatggagttttatttagggcataaaacccaacagttagttgtcgggaaatatgtaactattaaaagatgacataaagagaagaagtgaaatgaatgaataatgctctctattgccttttctttatgagttacaaataatgaacttccgacccccactcacatctcaaatggaggtatttataggcactagtggacaagggtacaacatggtcaaaggttatcaacacatcgcattcgaactgtgggttgcaggtgcctggagtggccttgcacctcgtattcttgtctagtgtcaggtggtccccgattgtaggcctgcagtcctgggtggcatatgcgtggtccccaactattggagggtgatcccgagctgcaggtgtgtggtcgtgaattgcagacgcgtggttttgagctgcaggagcgtggtccacagttttaggtttgggagtctccacatgcaagccttaggtgagtcgtcatggtgtaccttgttggaaattattttaccaggatcttagatctactcacaagtatgttcattaacaccctaa

SEQ ID NO: 319676 - DNA, 719 bp, Cannabis indica
tattatattatatattatatataaaattaggaaaataattaaaattggggtgatgagaaagatgtaaaaatcatgaaacgtagtaaagccagtaaaggaaaacaactgagaaagattgaaccaactgggtcctgcgtctgaatgtggaatttatcatacactcaaagagaaggttttcactgagaattgcagacatgaatctcaaacatcaagaaaactatattgagcattaagattagattttttgtttttctgttatgttgttgtatgggaaggtttttttgaagtgggtttttgaaaaaagctgggaaagttaagaacagagcgaaatcccagatgagagagaaaattttcccgggaaacaaacaggggaagtttctgggtttgagggaaaataagagattttagaggaaaattttgaaaacccagatggatctgagaggaaagtttggatcttgattgaagaaaaaaactcaaaaaatgatcaaagaagagaagaagagaagagaagaggggactttgcgtgttgagggaatggaatttatagaaggaagagagttaaaaagaccgacaagttgatgcaatttttattattattattattttaaaaaaaatagggaatattttaattttgagtaagtctatattatacctcttaacaagtattttggtagaattttgttttagctttttagttatttttcttttacttttttttt

SEQ ID NO: 319677 - DNA, 661 bp, Cannabis indica
tggggggggtccgatggggtccgacgggtccgatggggggtccgatgcatatgcgggttgaaaaaaaatggggctgagttatgagaggaggtatttttgggttttagataaaagtgtcatatatttttagtttgaaatgtattggtttaagaataaaatatgaaggttttttaagtataaaaaatcaaatttccccacttaaataggacactgtagataaactcaaaattaatgttgtaaatgccgtggggttggacttacttttagtgtaatatcaccctattattgagtttttataggcccattggagatggcctaaataaataagcttaattataaaagctttgtttaatgacactttctaaaggaaatgtggtaattggtgacatgttgctcagtttttttaatttttaaaaaaggaggtgtcagaattttagagacttaaatttaacagatatacaaaacaccgtattaaataatatatacccttaaaagtcatataaatcaacagtttaaaaaatatttatataacataggaacaaaactaatattactactatatatgtgtttaaataaatcaggaccccacaaataaacaataggtaaatatatttgagattttttctattatagactaaaaatagatgaaatttacatttat

SEQ ID NO: 319678 - DNA, 1246 bp, Cannabis indica
tgtgcttaaattccattgttttaaaaaattcatatttaggatgttaaacaacatacatggtagtaaatcttaatcctggtaaaataatccccaacaccttgtagctttgccaggttgctcacctccccttgtctcttctatgcaagtgattttgagtattggtctagggaggtgacaatcgtattgtcttaggttcagtcaatcttgcctttgtggactagcatccagtctattcattagcaattttctgagtgatctcggggttgatactgattcattatgtccagaaccaagcaatcttactgtagagcaccaccttctgaccctcacatggctaggctgcaacaatgggtagggttggtatagtggaggaggccacacagcctctagacagtagagagcaagaggttggccatgcaaaggcgcatgtggccgatcataatgtgtagagctcaaacagtgaaattgaagttgaggaggttgtccctgttagggggagacagtatagaacctattttgttttctccaagagccctctgggctcatatgatggtgacagggagcctttgaataggccttgtcagcctttagtgatcgatgtagaccatattctgatacaggcttctaagccttaggttctcgattctgggtgcagggagactgttgggtctctcctccatctgttatcaatgccaagactcttgataagataagaatgagtggactggtgagaggcgtcaaaattgaggtgtcgtcgagggaccaacgagcgcaccggttggctttcaactagatggcatggtcagagcgccacattgagcaggggcagtactacctttacacccctactttggagacaacaaaacatactttggaatgtgaccaacacaaatcaccccagaaagtatcaagtacatttcagtgatgtttgttctttatgtagagctatgctggcctcagcctactccttataagattggatactattttgacttgaagtctgctctgaagcagaatcagacaagctacttctactttagctaggttggctatcagtggttggctgacaataatagtacgcctttgtcgatggtggggggatatgcccataactatttcattgcctgggatatccaagaagtttgacactgccattttcaaagagtgcccacatacaaacgctcaatccctacccttcaaatgagagatagggaaaaccactgtaacaccctaactatcttaggcg

SEQ ID NO: 319679 - DNA, 753 bp, Cannabis indica
gtaaccgactggtcagttataaaattgtaaaaaccgacaataaccgactgattttcacccataagtcagatttgtgatcaagggtgtattatcaatttgacaatgattattgttttgttcttaacagtgatcaacaatgcattttataaggttttagatctgttgataattataccctcacttgtcattttgtttgtgataatactagtgctataaatatttttaaaaatcttgttcaacacccttgtataaaacacattgatataaggcatcattttattagaaacttattgacaatcaaacatttcagttaaatatgttggtactgaaaaacaattgactgatattttcactaaggccctagattcaagtcggtttgactctcgtagaaaatctttggggtttgcattgtctaattcttttcacttggttctctattttttataaaagtttgagtatttcttatcttgcatttatttttctttcatgtaatcgtattgctacaaattaggaattaatttagaaaacttttgtacaactgtgaaaatgtatttgtggctgtctctagggtttctatgatctataaataggacctagagagcagccaaacattctcacttcttctactttcatttttcatattttcatcttcgtaaggacagagtttcttttgtgaaaacttagagtgttcagctaggttttagtgttttttttgttcttatattgttcatagaattggttgaaaaacttgtt

SEQ ID NO: 319680 - DNA, 995 bp, Cannabis indica
tacaagaaaccaagtacctttcttcacagcagaaatgaattagcaaagattatgtataccacatagagctagattgacattaacaaaaagaaaaaaaaaaaaaaaaaaaaaaaaccaaaaggaattttaacaagtttatcttccacttcatatttggcagataattaaccatttttaattattgttaaaccaggagtttctttgactttattctgtctagtatatgagttatttcaatccagatatgtataagagacataataatatgaatttgttacttttttatgaccaacagtacaagaggacataatataaagattaaacaaggaggtattacaaataataaaagtattttcatggtttggcatgtgacttatgaattagatactgaacctttgaaggtccagcagcatgaagaatgttgcaagcttcacgaccatcactttcagattctatcctgtaacaggtaacacttgtcaatttctgttttgcaatatacttccttcatactttgataacacattattaaaccataatatatatgggcaaatgtgtatacaaggtatcttgtggagatcacaaagaagtaaaagatcagattaatggaagcattcacatccacctattttctcaataacaattttgctccccaaatgaatcatttgctctactaaggaactactcaaaacatatatttatggttaagtgagctcaatgcagataatgttgaaactgcatactaacagatgtctcgtagactataaaatttaaaacatggtattaacatctaaagatgaattctgaattttttttgtgaaatagaaaaatttaaaacatggtttttgtgttgtttgttttgtttgttatgtattttattgtgctttatgctataacttttgttaccacagtttcctccgccacaagtgagggttttcaatatatttgagtccttttttttataaaacgcctttgtcaaaaaaaatatatttgagtga

SEQ ID NO: 319681 - DNA, 1061 bp, Cannabis indica
aactagatttgatgaattgagaatatcaaaaactgaaactttacatgatttttatgaaagattattcgatattactaataattttcttactttggaagaaaaattagatgaatctgtgttggtttggaaaattatgtgtgtgtgcttcctgacaaatttaacacgaaattactagcagtgaaggaggccaaagatattggcaaaatgaaggttgaagaactcatgggttctttaagaacttttgagttcaatcaataaatcaagaaaaagagcacacaaagcgtcttgagtgagaaaaacaaaggtattacttttaaagtttctaaaaatgatgtttttgataatgaaatgaccttattaacaaaaaaaattcaaaagtgcatgaaagttgttgaaaataaaacaatttcttaaaaactccaagaggtaacaattcaagtaacagtccttctaaaccttttattccaaataataaaaaatgtattcaatgtagggaatgcgaatggtatggtcacattcaatctgaatacgccaataccttgaagaaaagtaaaacaaaaataatgttactttgagtgatgattctaaaagtagtgaggatgaaaataaaaaaattacattaacaagtgttttgtcaagtgattttgagagaaaaaaaaaaagaagaatcgtatgtttaaacaatacctttaactgataagaaagaagttagatcagatcaaaatgagtcagaacttgatgagaactctatggcagaatcttataaggtaatatttggtaagtggttagaaatctgtgctaaaaatcgttctttggttaaaatcaataaagatttgtctcacaacattagtgaacttgaagaaaaaaaatagatattgtgcgagaatataaacaggaaactcgcgctcaacaaattgcatacgttgttgtacttagtacaagaacagattaaactgttctttgtttatactttaaatgtttattctgatttaatacaattatttattgtgaaacagttataaaattgatcagttatgtaaattttaaaggacatttgcttt

SEQ ID NO: 319682 - DNA, 1334 bp, Cannabis indica
atatataaatggcaaaagtaggaaagctaggagggaagttgaagtcagccataaaaagatggccatccttgaccaaattcagccgcactgagcagcaatggaagcatctcatcaccatatcaccctcatcataataatgatcatgaccacaaccagatctcaaacgacgtcgttaataatgatcagcttcatgccgtttacgtgggcaagtctaggcggcgttacttggtgagctcagaagtggttgaacatcctctgtttcaggagctcgtagacaagtctgctgctgcctctgtctactgtgaagacgctactggaatctccgtcgcttgcgaggttgtgttgtttgaacacttgctttggatgttggacaacgccgaggctcagctgggttccatggatgagcttgttgagttctatacattgctgatttatatttatatatatatatatatcactgaccaagcatatgaagcagttaattaattattagtttgtaattgtatagagatattatatatggtaatggtcttttgtgtgcctgtgctttggacagtgaccaataacaatatatattattgttataattaaccatttctttttcgagaaaagttgtattaattgctaatgcaaaagagtttgttattcaaaatctctctcaggttaattagtgttaggaacttgatgatgatgattttcatttcatatattttcattatatttatgaataattacttgtattttatggttacattaatttaaataaaatttatgttgtaattcatttgaagtaatattattaccattatagtcgatatatataagcatgaataaccttacatatatatgtccaaacgagaatgtacatgtacatgtaccagtatttctgtaaaatacttaaaaataaataaagaaataaaaaaaacacaaaagaaaagataatacaaacaaccaaaaacaactgtatctgggtaatgtttaatgggattattaatactgggaaattttgcccatactatatattaggtacaatgcattggcccctactccatttatattttggatgtttctattctactattacaacttgtttgactatataatatgttctccaatgtgccagttaaaatcacacttttacacatactatatatgaagtgatttatttagaggaaaaaaaagtggacgaggacgaggatgactaaagagtaatgagaattataaattgaatattagctggcaggaaatgtaaaacaatatctctaattaataaagattattgtggacaatgtcccacatggaataaatagtagagaattgagccatatataaga

SEQ ID NO: 319683 - DNA, 1165 bp, Cannabis indica
tatagcttctataattatttagaagtgaaacgatgataaattttttaaaaaatatgtagtacactttttagatgggtgcttcgttagacacttctatttattttggtatttaagagtatttttttattttttttataaattgtgtacgttgtaattatttaaaactacttgtaaattttaaaaagaaaatcaataatttacaatccataaaataggagtattcgtcaaactgccacatcatacaaaccgcctgtgccacaccacactgcataaaaaatacaatttgaaacttatcgcggtatagttgtagtttatatttttaccaaactatatagtgcaatgtgatttacggtttcaaatttaataattgcaatttaaaacaaaacatattgcattattataaaaatacaaagttttttaattctaagtccatacatgtgtaattgtgcacatctagcaaaattaatcattttttttcttcttaatattattacactacaaactactattcattatattatttgattatataatagattgattaaattgtgacaaatatattattataaaaataaaatatattaaagtatttgaaggttattttatatgaaaaataatgtaacaaacgcataaatattgtaataggaagagttaaaaatctaaaaataagatttgtaacctaaattacattgacaatttttgtaattaaagtgaaaatattacatgtcagagttatagaactaaatagagatgtttctagttgttagaaactgttataatattcatttatagtgtttaaataagtactggctatttgagaatgagtttgcttgaagaggagaattgaaactcaaaaattgtgtgttgaaattgtctcaggcgacatgtcgcctgttactggacaacatgtcacctaaactagtgttagaggattttcgatgttttagcgatattttatcaatatatgtgtttaccgagatttttgaaaatcaaatatttagagcttaagaaataaaaatggaataaataaaaaatgcaagatttttacgtggttcaggtgttaattatccttagtctatgagtccattttattaggctcattggccggtgaagatgagtactgttatcccaatttttgcactctgacatggcatcacacgatggt

SEQ ID NO: 319684 - DNA, 1278 bp, Cannabis indica
actaaaatggtatcagagccaaccgattgttgagctcgtgcttctgctccttctctttcgttttgatcctctgttcttctatggctcgaggaacaggaactcatacttgaaatagtagcaacaatagctgctgatcaatctaatcgatttgtagctctcgatgaaaataataggtttcctaccattgatccacgaagtccttattatctgtctagtggtgacagtgcttcttcatcactagttccaaagattcttactggagcagacaattacagttcatggaagcgatcgatgatggtagctttattggcgaggaacaagatcaagttcattaatggaaagcttccagaacctgatgaagatgatgaggatcatgattcgtggatcagatgcaatagcttggtcatatcctggatcttgaactctgtttcacccaccatagctgacaacatcatgtacatggaagatgcttcgcgaatctggtttgagttataggaaaggtttcattagaaaaatacccctagaatttttgaagttaaaagatctatacaaactctaacttagggatcaaatgatgtgacatcctactatactcgactcaaagggttatgggatcatttacaagagtacaaaccccaattagtgtgtacttgtggaggaatgaaggtcattcaagagtatcaggttgaggataaggttcttgagttcttaatgggacccaatgaatcctatcttaatgctagatctcaaatattgctccaagatccccttcctaatgtcaataaagtttttgcttgtataatccaggaagaaaaacaaagaggaattatcattcctcaagttgaaagtaatcaaccttcgaatgacaaccccaacaattttgctggaagtacacatgccaatcatggcaataacagatctgacaatcaatttgataacaaacctgtttgttctcattgtggtgttcctggtcacactcattgtggtatatggcagattctctagggaaaatcctaatcaacctgttaatcaacaaggtcgatccaatgccaacttcacagcaggagctgaaactaaggaaggatccaatgaggaacatgaccttgctgcacaatgtcaaaggttaatggctatgctagcatagaaaatacaagaaacatcttcacaaaaccagcaatctgatcaacctgttgtttcaaatgtgtctggtaaggcctttcttattcctcaatctagttggattatcgatattggtgccacacatcatgtgtgctccaa

SEQ ID NO: 319685 - DNA, 556 bp, Cannabis indica
aatgacgatacccattataaaattaaccatatgagagatccttgggctagtgaaataattcatcattaacttttctagtacatcgcaactctatcacttaatttatattatgagaaataattagtacttgtacatgataaaacctaagtttataaacaaattatgatatataaggcatactctattctcaaaccattctggaaactttttattgaatgtttcttctacatttctctctcatatttttctctaaattccttgcttaaaaatacaggttgacaaatattacttactttataattataaatatctcataagaaatcaagaatatatatacttacttgatgaaagattgaacttctttataatttttcaatacataaagacgaagttggagccaatcatttgatggaagaaaattcatatctgttccacttctaataggatgaccaatatttttaaagagtgataattgtcttttattagcttttaaatcaacatcctcatagtttctttgtaacgccataccccatagggacgccacatgtgtgatttt

SEQ ID NO: 319686 - DNA, 871 bp, Cannabis indica
ttacaggctcctaaatcacaacattcataaaatttataagtgatacgctaaatcactttgggggattttaaactcaaaattaaaagtgatctgtagcaagacaaggtcttaagtatcaagaaaacataagaaaaaccctaaaatggggaaccttcccaaaaaacggtaggccattttctaaacacgacagtccatttttcagggttctaaaccaggaaaaaatggtaggccatttctacacaaactaacccaaacttcaccaaaagctccagaacatcggaaaacaacataatagacataatccatgcaataaaataacccaacataaccagaatcaaaatccaccattagagagcaaagcttgagttcataaactcaaaccttgctcaatcaccacaacaactaaaaagaacaccttagaacagctcaaataacctcaatataacatcagaacacaaaaacaaacaactcttaaaaccacaaaaccctaactcacaaatcaagcaataacttaacttaaagcttaagaaatcaaagggaaaggtactaaagggtttaccttcaattggaaacaccaataacttgttagattatccagaaatgaagctgaaaaatccctaaccttgctgcttctagggagctcgagaaagagagagagtttggagagaaaaagagtgaatttcttgatttttttctatttgagataaattcattaaatctaggtattatctaactattataatgagataatatcaaattattaaacccaaataaatctcactaaaagacacggagtcaaatggccaaaaagaccattttacccccactaggaccaaaaacatctaagtcacttaagggtaacttggtcatt

SEQ ID NO: 319687 - DNA, 2332 bp, Cannabis indica
cccttagacttaaaactagggtatttctaaaagtaaatatgagtgccctttttaatttagtgcaatgtactaaaggtaaatttgccattgttaggaacaccttcctgcatagcgaaactttagttagaaaaatatcttggatatttaatttttacagattgtaaagtagagacttcacttgaatgtatcggcttacgagtgctgggggtattgtctaatagactctgtagtggactgacgagcttctcaaaatacactcgcttgtgtccatctctaagactttgttaccctcaacacggatgtacttttttgctctctcatagccaaagttatggatccccaaactaaaagcatgtaaaattttaaatataaaaatacgattgtaccatcgaagacatttaaaaagtctttttctttaaaaaaaaaaaacactttctagcggcaattattatacccaaatttcgactaccaataagaagctgacacgtgtaccagggcaagaatacaaatcaaccaaagtcgtgcattattaaatgcacattaaataacttgcctcaggaattacaattaatagaaatattcacactcgctaccatataggtaataacgagatgtgaataataactattaataggtgagattgacgagacaacaagtccatctcgggataaatagaatacactgaaagtttttcaaaacgagtaaacaatgagcttacagctcattgatccacatacttgtgaataagagcttgcaactaattaatccacatactcgtgagtatgttcaaagaatgacaacaacatttgttcacctcgcttttgacgcattcaagtaatcgcctcgctaatatctttcaaacaacaaaagagaactgcgagaagcattgtatcttattacttaatatttttcctacaaagattgttaagaaagataatgtgcaaccgatgagaacaatctaacactatcagcatagccatctgtggataaggaaaaagaatggttcaacggatatttaatactatctcatatgcacaaagataaaatgtggggaatgtccacatttcatgagcgattacgaatgagtaaatcttaaggaaataactgtcattccatacatctataaatagggacagaacctagggtaaaagggaacgacaaatctagcacaaaagagatattattgctacttatatcattgtattctgtattcaaatattattatccttaataagatggactcgtggactatgaagatttaagttcaaaactacgttaaaacattcatgttgtttatttatttaataaataaatttttatataatcaattttgtagttaatttactacaattaaggttaatatttatagttaacaaaaatctatgtacgaattattccatattaaatactaataatttaacattcaagcatatatgaaaatttttaactcttatttataaatagaaatgtctttacatactttttagggcataaatactaacacttgtttatgccctaaaatgtaaaattcttattttagtgaaatgagtgttgataaacgaatagtgtataatctaataagtgttgataatttagtaaacctattacaattagggtaaataagtttctcggcatcctctactaaacattgaaatttcaaaggatcaaaatttaattcaaattgtgcatttcctatcatttttggaatgtgatcatcctcatagtctaagttaacacccttaaccttattagacttagacgttcccttgcccggtactctattattttccctgtggtaaactcaaaccttataactcttgtttattatattcctaaataaatgctcatatatcctaataatgtccatacgttccatgttaccacatttaagacaaggacaaagaaccaatttaggatttttgacataattctaacaaaggtccaagaaatggtcaacgccttcagtatacttcgctgataattcatactcatctaatttctatccatttcaaaacttctaaaaaaacaaaactttaatcaattatttgtttgaataagtgtataaataattagttaaattaattaacacacatatatatatatatattagtgaagtttatgcagtttattgaaatttatcctaattctagcgaaattttgatagcataacgactgtaatcgaagtccaaaaatttaaaacatgaaaaaaaaataattaataaacacatataacaatacattaataacaaaatatcattaacaattcaaaattatccacccatccgaccgcagtacatgtattcacagaacctacttcactacagatgaatat

SEQ ID NO: 319688 - DNA, 1091 bp, Cannabis indica
atataccatcccactaaattgttgtagaattttcacatcattctgctttaaggttacaacaaattttacattaaattggtatgcatcaaaattcacactattaatggtattggatttggaatctacactgttgacaaagattttcggtaactattaattagagctgcttcaagcaatgaatgagtagtaacgaaattttttaagggaaattacttaatattactattttttaactttttgttttaatttatagtttgggtttctaaagtaatttttccggtagtttcaatgtgggttgctcaaatttacatcacttggaacttaatatcgtgggctttgcattttaattttcctttttatcactttatccaaatttgaaaaataacacaacaattaaaaaaaatattaatatctcccactaaaataaatttattattaaaactataaaatattcaacttgtattaatcatatgtgcataattaaaggcatgaaatgtataaatttgagccttaatcagttgctatacgattttttagttgcgatttaagttgctctgctagttgcaatagaggttttttatgtagaattccgtaaaaatagcaaaaaaaaaaaaaaaaaaaaaaaggttttagtaagtgtaaaatagaaaaaggacccattttttatttgtagttaggacattaatgagtcttagtccacgagtcactatatcaataagtgttcttgtttagagagtatttttcaattccatttttctctatacattattggggtatttataggttcataatggttgtaaaaggccatcattgttatgattgtacgaactatgctctgcacaattttcccaaatttgatcgtaaggcatgattgcctattctttatgatgtggtttggctgactataagtgtttggtgagatctcacttatcgcttgcttatgatttaataactcattatgaagccgtcaattgatgtatgtggcatcgcaaaattagggaattatgtgcaaagactgcttaatcttaactcggaaattagcagataattagcgttaattattgatatttttatattatgcatgaatatat

SEQ ID NO: 319689 - DNA, 1353 bp, Cannabis indica
cgtggttctttcctaggggcagaattggggagcaactcaagttttatttggcaaagcattttgaaagctcaattcttcatgcaaaaaaggtgtcaaatggttgttggctcaagctctaatattaatattcttcggaacccttggcttctgaataaggatgatccttttgtcatatcttctcatcctagtttgagtgaccaaacctatctctagtcttatggttgttggagaaaaagcttgggattctgaagttattgatgattcttttgttggacatgatgctaaactcatactcaatattcatttgttaccagctgtgattgaagatggttggttctggtttagggagggatgagatgaataatatgttaagagtgcttatggtcttatccaagatgcaaggagtttaaaatctgaggataaaaactctatttttttgggatgttttatggaagttaaaactccctcctaaaatcaaagattttatctaaagggttgttgtgaatttccttccttctcgtgttcttttacaagttaaacatgttcccttactttctgtcttgtgcccaagatgcttgaatcgattttcactgtttagtgggatgctcttttttcgttggcttgtttgaggtactctgagattcctatgatagatataagtgacaattcttttggtggtttgctggctgaaagactcaagatttggtatccaaaacattaaattttagcttgtatgttgtgttgggcgatctaaggtgtttggaacgataaggtgtggaaagaaaaaaaaatagttctattaaagaagtagttgcatgactaaaagtaattgtgatcaatggaagagtgctcaggcaagaacttttgttttgtctctagttttgttacaagatggggatggtcatgagtattggattatactagctggaaatagaattaaaataaatgtcgatgttgcaattttttaagatacgaacaaattcgttttagggtaggtggcacaaagtttttctagtggtatatatcattagggtatagtaaacctggctctagcagaggctattggtgtgaaggaggtattgagctggataaaacttacgagttttaatgacgtattggttgagatgcataatttgttcacagtccaagctctttggagatgcattcagcctttgggtgttttatcttggagtgcaagcgttttatttttgattagcacaatgtctatatttattttgttaaatgattcgcaaatcgtgtagctcatcatttggctcgaactttgtgattttatgttggttgtagtttctcgactgctacaatgcctttatctttgttggatgtaatttgaaa

SEQ ID NO: 319690 - DNA, 2014 bp, Cannabis indica
tatcactatttgttgactctatttactttgacagtttgttgaatagactcaataatctatggaatttttttttgaagaaaatagttttattaaaacctgttaaaagtaaattagtggaaaatcaaaaaaaaaaagaaaaattacagtgaaactttttcagttttacacttcaaaatatttttttttttttacatttttacgaaactttacataaaaactcctattataactagctttgcaacttaaattggaacaaaaaaatcgtataaaaaatcccctattgcagctagcactgcaaaatactttaaaaactcaaaccgtaaattaaaaaaaaaattaaaataatagtatataaaataattccatatgatctattaaatttattatcttttacatcattcaataaataatatctatatcttttaattactcattgcataataataatttagtcaatattattgaaaaaattgtagtatacatttttacggttagagtaattttagattaaattattctaatgattaaattaaaatatgttattcttttatgtgtgtatgtattgtaatttcagtcatgaaataaacttagtctatatttttttttctttctaacattgcataaaaatattataattatgtcaatattaaaaacaaaaaacaattcacacacacactacaaaaatttgtgccaaaccatatatatatggttgctaaatatatatagattaattatgtaatttttaacaattatgtaagtatagttttctgttttttatttatatatttattttacatattaaactatatccttaaaagatagtagcattaaagaatgataaaacttccaaattcaccaagcctaggattccttctaataaaatggcctaaaatttgagaaagaaaaaacaaaaatattaaagaagtaaataaatccaaagatattcattatataataaagtccaaagaaacttaaaaactatttcagagagcaagtaaattgtcttcttcaatatttttttttaattttcttaaaaatatcatgagacatcactttatataatttttgggtattaatatgcgattatccctcatcttatggaacaactatataataattaatttcatattattattattactcttataatataatgtgaagaaattttgtgttcttatgataatgttgaatttggttatgcatgatggtgtgtcggttgtttgggtagacaatgaagatgtattttttgatgggatcgatggtccaactatatatggcccactgggctactggcccaacgtatgcccatctaaagcccacctcagtctaacctactaattataggggtaattccataaatacaggaaaaataaaactagtttaaataaatatggtaaaaaaaattaatataaaaaaatatggtatttaaaataaaaacttaacatatatgagattgaattaccataaaagatattaaaattccgttcatatattttttttaaaaaaataaaacaaataaaactacagtgatcgccgatgccgaaaaaggcaccggagtttgttgtcggcgacggaaaaatcatcagagttgctgccggcatcgagaaggtcgccaaaattgttgccagcaacagaaaaatcatcggaattagcattatagccagaaaaattacggaaaaaatcaccgaaaaactagtttgttcatctagaaattggtttctcgataatttttccggcgacaatgccaattccgacgaattttctggagtttgttgtcagtatcggaaaattcgtcggagtagctgccggtgtcgaaaaagttgtcggagttgctgtcgacactataaaagtcgtcagaattggcattcttggtaatttttccggtgactatgccaattccgatgatttttccgaagtttgttatcggtcctagaaaaatcgccggagtagctgccaatgttagaatagtcgtcagaattggcattgtcactggaaaaattactaagaaagtggt

SEQ ID NO: 319691 - DNA, 1914 bp, Cannabis indica
ataattttttttttcgaaaatttgctgccttaaacgacatgttgttttttgttataggcaaaaatgacacgtcaattttttaacaaaaagggttgtataaatttggaaaacaacaacaattttccgggtaacaaataggaagaaatgacgctccattcgcgtctccttcttcagtgaaccgagtcaattttgacccattttttatgtgtggctcaagcggatctgacccaaatttagtcgaaaaatacaattctgacgaccgaatcagtccacattaattccaaatgaatctaaaagaaaataaaaatcagacacttatatagatttcatacatcaaaaatacgttaaaatgaaactttaattttataaaagaatttcaggtcttaatgtatattaccagaaaaaattcgtcaagtttcacagttttcaaattgatttcatgcataaaaaaagcttatagtattatatgaatgtactaataatgcaaagagattcgaaagccacacagaaaatgaaaagtaagatttttcgaacaaaatccaccgtaaccaaaaatttcacgtgtatatatatacttatatataatcattataccgcttaaaatatggtatatataaaatagattataataatcaattatatgcaataaaattatgaaatcagtgtaaaatatatataaccatatatgtctgaaatgtatataaatataaatatgtatatataagaaaataattaattttgatgcatagaaaatattaatatagaaagaaattaacatgaattaaaaagattgaaatgaaaattttacgagtatctgccattaatgaacactcgatcgtgtatatatatacatatataaaaaaactcaaaatttaaatcatggtagaaataatactgttttgatactaactgcttgacatttatatatatgatatgaagcagatataatcatgtataaaatgcagaattaatcaaacatatatgtactatgaataaatgatcaaaatatctcaaggcattgattctttgagcttcaatctcgcactaactttagatactgtaaaagaaaaggaaacttatcggtatgggtaatcgggcttctaagctcttactctttttagatggatttactgtgttttacaaaatgagtagtgagttcggggatcgatatcctatatttatataggtgggaccttccatcaagtatctttgccacaattaattgtcagaatatttaaacaattaattttaaaaattaaatcgggtaactgaaatattttataattaaatctgaccatcactacaaacaaatctttcttttagtcacaataaagcctaaagataaaaaaagttgtgactaattataaattatcattattatgttatgactaaaagtattagtcacaaaaatcacaatttgttgtgactaaatctggttttagtcacaatacttattgtgactaaaactaaattagtgacaactcgtatctaaatattaagttttaattacaagtaattttttattgtgattaaaagtcacatttaattacaaaaatttatgttgtgactgaaaaattatcactaaaggtaataattttttgtaatgcataattaaaatattttaattaattaataagtaaataattatattttataaattaatcaaataaaatatttaatttattactatatcaattagactattggagagtgaagaatgaccatgagtgaaacaagcatgtttaaacatagtttccatgtacgtcttattattataagagtttgtagagtatatttatatataaggatttcaaagtataaaaaaaaaaattatatttataaaagtaatttgtgccatatataaatatttgaatttaacttttagttgtaaataaatgtttaagtttaattttt

SEQ ID NO: 319692 - DNA, 670 bp, Cannabis indica
gcagcatttaatttagaaaaaaaaataaaaaatctagtttcaagtccaacttagctggactagaaaaaggttccctgagtgggattatttttcaagtcaatcattgttggactagaaatgtttttctagtccaacaattaagtttcatgttgtgggacagctttttaagtccaataatattggactagaaatgtttttctattcctagaaaaatatcttttttatgtcccatgctattatgtccaacacaaaagggactagaaaaatttatctaatctatgttggtggactaaaaagggggttttcaacgtagagactagttggcagcaagggaatgcaacaacatggcaatgaaaagtcaaccccatccttggactcaacttttccaagccactactttttaacacgcctgctaaggcaataaagtggctaggagacgccacgtggggcaaccatttttagctttgatttacttttcccatgattgaacaatgttattagtttttagttgtcaagtgtcattttaagagcacaacatttaatttctttttagacattaagtcatttatttttcaataaatgtttacactttttgcaaaaatatttcttttgtaatgttacgtcctcacccaaacaagttacaaaagtaacccaatacttttataacttg

SEQ ID NO: 319693 - DNA, 655 bp, Cannabis indica
tcaaagaaaaatgtaaccatatggttataataaaaatataaccattaaatagtcacccatatatatactgcaataattattttggtcatttcatattggtaaaactctcgctgtggcctccttactaatatatacttgcttctttttgtttttagtagaagaatatctatttattcaattgtttggtgagtctctaaccttaattaacttattgtacctgatcatttaaaatattttaatctaatggtgtaaaattgatctaaaataatctagaaaaaaaatgttttttgaatgagtcctggtatatattatctctgatgctagtttaatgtagacagaaattgttttctcttacctatttatttggtttacatgacaattttttaattcttatatagggtgacattctgtaattgagtatgagaaaggatgcaactcgtgcagaagaaattgctctctttaatctaaagtaagttgctctatattagggatgcacacggggcggggaattagcggggagtgctctcaccatctccatccctgttaaggattttaatccccatccccgcttatttcccatcggggaatcccctaatggggcggggacggggcggggaatcccctattgtaaaataaaatttattttaaaaattta

SEQ ID NO: 319694 - DNA, 901 bp, Cannabis indica
aattttaccatgagattgacataaaagggttatcgatggcagcccgtggacatttgatcgcgctccgctaatcttcgaaaggctgaaacagggagagaatccaaggatggtgccgctgaatcgactcgacttctgggttcagctacataatctggagtcgggtttcatgactgagtctactgtgagaaatgtggcgaatcatgtaggtacgttcgttaaatccgatcctaataactttgttggtgtttggagggattttttgcgggttcgggtgaagttgaatattgataaacctctgaaaaagaaaatgaaacttgagaagaagagtggtcaatcttgttccctgatctttaaatatgaggacctcccaaccttttgcttcatttgtggtgttcttggccactccgaacgcttctgcgagaagctctttgatacgcctccggaattgatagtcaaggaatacgatttatcattgaaggcagccccacgacgtcgacaacacaccatgggtgcacaatggttacgatcgggggcggctatgaaacaatcgggtcttggaactccggccagctctcaggcgactttgaatggtgcaattaatggcgttaatgtgcagaggaatcaaatctccactgatttagggagacaggtatcgacccagtgtaatgagccgagaatggagagagagactatggtatcggctgagattggggataagtctaatggaaagtcaaaggcttacgtggatgaggatttgattggagaaaatagtgggattgattccttgctggttttggattctaaaaggagaaggacttttgatgggctgggtaattatgttgatagtgggttggaccttaataaattggatgaaccttgtttagacaatttacaaaaacaa

SEQ ID NO: 319695 - DNA, 1035 bp, Cannabis indica
ttggaaaagttctagaagctggccgagattacgtagaggaagaatacactgaggctcaccccataaacaggaggggtctgaggagagctcaatgggtctctccaccatccgtcttgacatttaagagattgaccaatctcttcgaggaaggcctttttgggtaggtcgagtgtttccttccttctcccaggaaacttgcaactgatcttggagagggttacttcatgccaagcagggtgcaatgttgccattccatccatacttcaaagagattgcaaattactaccacatcagtctgacccatcttactcccaagggcattaaatacctttttgccctatacgtgttgtacgcttctcaaggatgggatcagccatccacccacgacaccaactgattgtttgacctgaagtccagccccaagcaaaatgggtctgggtacttctacttttcacatatcgaagataagtggttaagtggcaccatagatactgacttgtccaagattggtggttttatggaggactactattttgtcaaatgcatggacactaatcacacaagtttttaacacattccctcgtactgccagtctcctttcatgctgggacttaggaagagggcccaagaaatacttaaacttcccttggatgcttggaatatttctcttttggctattgaggctaattttatcaagtataaactctatctaattgatgatggacaaggggccaagcatgtagtaggagagtctgtgtttggccaataagaggacgttatgcctaaactggaagctctaaagaagaagaaacataagaaagctccccaaggtgaccaagtacctattgaacagcctatcaggattagggatggttccaagggagctactcatctttccgtccaatcggaaggaaaggaaaaaaccattgtggtcaagtaggaagaagaagacttttctgatgaggatgcccattccttacttgtttgggagggtgcccctgtacacatgcagggtagattaatttccctaacttt

SEQ ID NO: 319696 - DNA, 1500 bp, Cannabis indica
atatctattggcatctcggtgcaactctatgtacacctcaccgatgccctgatatactactcgatggctatagatttgcctattctaacggcaactaacatgtatgctaaacatgtatacatataggcaaccattacactaatcttatcttattttcgaattcaggtgggtcggccaacctgaggggaatagcttctcgacgaattataggcccctaaatcgcattatttgcaaaactaatgagtgacgtgctaaatcacttttcggcgacttaaacttgaaactaaaagttttctgatcgatgaataacatggaaataccataaatatcacaaaaggggaaaaacttgggttcccaaaattgccccgtaaaccggttccccaatcaaaattctggttctgtggggttttctagggaccaatcagaattctggttcccacaggccccctgaaccagttgaccgatttaatgcaggaaaacttcaaaaattcactatactctcaaatcaaacccaaaccttaccaaaccttcctacatgttatttagaccacaatgatcatattctaagcaataaaacaactctaccaactcagaatcaaaatctaccattaaagagaaaatcttgagttcttaaacttaaagcttgctcaaacatcacaacatccttcaaatccacttcaattcaacatattaaaccttaattcaacttcaaaaaacacacacaaataccaacccacaacacagaacgctaatactcaatttcatgcaaagaaacgtaacttagaatacttaagaaatcataaaatgagaggcctaagagctttaccttggattggatcactaaaaccttgtctaaatcactaatttgtagcaaggaaagtccccaaaagctgctggtccttgagggttcgaaatagagagaaagaaaaatatgatttttctcaaattttccttttctttctatttcctttaattttctaaaaatcaatactaatcttaggttaacaaatagtggccagctgccattctaaaaatcaaccaccacaccttagggtaaaataacaaaaatacccctccccacaagcataactaacaaaatggtctaggggtaaaatggtcatttcaaaccctcgagtaaaacccaatattcccaatgtctaactatacttcctcactatactaaaaatactaaaatataattctaatggccaaacgccgcgttccaatattgtggggtacaaaatatgcaaaaacataaaatttcatatatgacatatataatgcaatctgaattcaactaaatctccataaaatgataaattatgaatattaattaaaccctaattatctcctaatttccaaattaaagctgtcttttcaatgatcccccgctaaaagtatttcgtcctcgaaatctaaccagaacaactctagatactgagccctcatgtcggactctaactcccaggtgccttcctccaccttactatttctccagag

SEQ ID NO: 319697 - DNA, 802 bp, Cannabis indica
atagtaattagcattaataattaggtaagtgatacaacaggattcacatcctaatttctcatccttgttaaacaactttaattgctttatttttatttttattttcttgtcgttcattaacttcgtttaagaattattttttaaccaaatagaagaacaaatctaatttcgtgttacttaattttcaatttcctgtgattcgacctcacttgtgtgagcatatactagcaattgatgcatatatttgcgtagagaagaaaataaataacaaaatcaaactttttttattttacctcatacttttacattgctttcagcatgcattaacttctctattttctatttttatattatttaaataatatactttttaatatatatactatcatattattcaaatatgaataaattattaattatatattattaaagtatttttaaaaaataaaatattatatatatatattattaaaatatatttagaaatgaatagtatttctctacacattacattctttaattgcttttttaataaagctactgatgtagcacctctttgtccatgttttttatttgagtaatttgcggtataaatacctaagttttatgccgagtagcagataaatacctaagtcgtatttttggcggtaaaaataccttccgtcactagtgtggaacttccgtaggtacctgaccgttatgtgccaggttagtgtccacgtgtcattctttgattagtccatgtcatttaatttatatattttatttaaaaaattaatttaaacatttaaaagtattttaa

SEQ ID NO: 319698 - DNA, 577 bp, Cannabis indica
tgatttaggataatagtggtggtggaggtgggaatggtgggatggtattggtaacagtggggtgcctggtaaaagtggtggtggtggtgacaattggatagtagtagtggtggtggtggtggtggtggtggtggtggacacaaaataaggaaaagaaagaagaagaaaaagaaatattacattattaatataattatggtaccaatgaaatttttaattattaatataattagattgccaccaatgaaattttaccatgtgtattatattatggcagtttatttagacacttaactaatggagagaagaagtacccaaaaaaacaattgtggagattagagaatttaatcttatttttttttttataaatataagagttgatcgtgctaaactttaaaatttaagaagtttgaccgcaaattatactctaattttaaaatttagggtgattctacatatactcatttaaaaagaatgtactaatgtaccttctacttgtttcggcattcaaaaaaaaatttagtctaattttttttcatatttatgtatattacaactatttaagatatcttacaaa

SEQ ID NO: 319699 - DNA, 1008 bp, Cannabis indica
ggcataaaacccaacagaatactactcccagggtggtgacccctgaaagcattctcattccacaatcaatatctcctattgatcctgcagtcgggactagtctggccaatccatgtcatgccattgtcccttaccaatcggagtttggtgcttcttcttgccttccaagtcctgagtcgaccatgtctctgccatcgcctccagtcattcaaaagcctcgcacatttcaaggtaaggcccctaccatttcaaaaaaggcttcttcttcgtcgtcacacactcagaccgtgtcaaaaagagtgactcattcctcttcgagtttaaagtctccttcgtcccctgtccagccttcgcttgttcctaaatcgaaccccataggacctcctcgtcctccatctaaggtttctattccttcccaaagcagagaaagggttcaaccaaaaagaaaatcattgcgtgataccacgtatcaacgacctgtcaaaaaatccaagacaaagcctattcctgtcccatctacagactcgtctcccaaacagctacctaaaggctctaaaaagataaaacttccaaaagcccctatatcaactgtcaacccatcttctgttcaattctttgtagatgcctccaaagcatctgtgtaccaacgatggtttggtagttgtgagctatggttcaaaaaagtggtgatgttagatgattttccagacatgtatgattttttaaaaattaggaaatgggttcacactatctctaaattgtctgcccctcatcccattttagttcgtgaattctatgccaatctagataggactgttattgatgagggtcatccaggatgtgtgagtgcatttgttaggggtaatcgtattccttttggtccatctactattgcatgcatattgaagttgagtttgtcagaaatccaacatatgggaaacagttcaatccatatcaaactatgatgggtagagtgctaactggtagggatgactatctttgggacaa

SEQ ID NO: 319700 - DNA, 560 bp, Cannabis indica
ttttttttttttgtgaaaaatcataagttcattaacaacaaaagatgcgagtcacaggggagacttcctccccgatacacaaaccagcatccaggctagagattctagctcttgtagctaaaccatccgtaaaggaattcaagttccaacaaacaaaggaaaacttattaaacttcttaattaaatctaaaactactaaaaaaacatggaggacacactaacttagaaaaactagtaaccaaaattagggaatcagagaaaatatgaatgttgttccaagagttttctaaggcccaagagagtgccaaacgcactgccgcaactgctgcctccaaagcaaaataagttgtagtattagaagacatatgagcccaagagctatcttcaaaattagtcttgactgcagccaaaccagcaacttcatttaaccagaaagcatcagtgcagaagacaatcgccatgccatccctactaagcaaagtactgttaggttatttttagtattaattttagattaattttagtatatttttaatttagttttaatcgtgtttggagca

SEQ ID NO: 319701 - DNA, 1063 bp, Cannabis indica
attcactaatatcatcaaccatgatcggaatatttataccttccgactagctagctaaacagtcaatcatcatgccatccatcatcaaaagtttaagaggaccgtaaagcaatccacgagaggatgcgacaacgtgtaaactacaccgtctacagtttaaatccatataaatatttgtgataattgcattcaatttatctgtggtaattttcttttttcttactttcaaattagtacttcaaattttgaatgctcatatacaggtcattttttactatttatttgatcaaacagagaacacatttttttttttaaagattatgggtacatggtaattccttcacctttttatataagattcttcggtgaagttcttttgcatacatactgacacctctatttcgacggatagacttgtgctttagttgcatgcgaattagagtcaagatatagttttcttgttgacatcttcaactttaataaaattatttgcatcgtactcttttgaattcgttattttagttattgttattcgtttgcgatgtaaattaaaataattcattgaagtcaaacaattatgtgccattatctcaatggcactcatctttttcatctttatcttctgacccataatttaatacaataaatgttgaaaaatataatcggaaaaaattatgagaaaaattttcaacaaggacagatagtgtatatgttcctacaacggaaaaaaatgccattaagaaattaaaaaatatatatgtatatatataaattagtcgtctttatttatgttttctttcaataaatccagtttttgagttagtagtttagcatttgtgtagtagtgtggttattttgatcattacattttcatttatttatattttaatagtagtataacaccaaaaaaatacagataactatccttgaggagaactatttaataatgatgaattcagattctcctgttagtaaagtgtttaaggaaatttattactcaatttcaacaacatatcatcatattcatatataacactaataatatgcacttttcttattttta

SEQ ID NO: 319702 - DNA, 687 bp, Cannabis indica
agagtttaattaattttgagtttaaaaagtctctcttagatataaatcaactcctttgggttcgatctcgtacttacatgaacactatattccatattcgattcgtgtacttgcgagtataaatatttaaaacatatatcactattgggtgtacaacaaatttttggcaatgttgtcgggagttgtaagaagagaaatatatttatctcaaggttagtaaaattcttttactggttatttttttttactttatcatctaaaaacaaggagaaaaaaataataaataattttgggttggtcctaccgcctaatatttatttatatataatatatcattaaaaaaataattggatcggtttcctgcctaaagatatatactaatttatttttatatttatatattatattattgtcatttttgtagttgatggcatatagtgcctccttgattctttttttttttctttcttgcttttattattatcgcttatttcatatttttattttccttttgctttgttaaaatatatatatcactctaagtatgctctgtggtcgcagttccaatgaacttccacgttagaaattgactcttgtaattttcttttaagtattgtgtgaaatttgcatgcatcattggcaacgagattcaaagaatcgtttggttaaaagaagactacattagtt

SEQ ID NO: 319703 - DNA, 904 bp, Cannabis indica
atcctggtaaaatattcctagcagtattatcgttagcgagctatttatccttgatccaactgagagcctcttggatgctgataattttagcaacacagattccacatccccaccacaacaaatagtacgggcttcaacaataccgcccaaatgatcacaaacgaccataccaattctaaactgatgagtcgcaacaaacaatacaacgccaacatttatcttgattttcttattttgagattttacctaaatcttgacatcatattgtgccacattactaagcagcgatgtatagtcatccttcattttgacattcttctattgtttaagatacaattttactgaagtagccacatcattaacactaaaaatttgctccatacaattttaattatgttcaatcagaagatgatttttcatattcaattattaatattattcgattatattggatgtccaacttaactagagatgacaatttgcgtcatacacgataatacgactcgaaattcgcacgaattaaataagtaggtgaatcattttcaggttaacacaactaactttgtttacataatcactcattttttgattaacacgcttaatttaaatttgacattaacttataataactaagtctcaacacaacctaattgcaaccctatcttaagggtaggaatatttattagattacattcaatggatttggatataagccaactgatccaatttaattatttattggatattgaattttgtcatctgatcaaatccaatcaaatcgagtcatccgatccgatccaataaatgtattagattggaacggttccaaccatttgatgcattgactagttttctattggcttggatcggatcagtcaaatttattttagctaccatttaagtt

SEQ ID NO: 319704 - DNA, 715 bp, Cannabis indica
aaaaagttagttttatgacatttttacatcaacgtttactagtgtgctctaatgtataattataaatcttgatgcaaaatttaatatatcatttaatgttcatttaataaattattaaaaatataaaataataatattagtgtaaagataaatataattatgcaagttatttaattcaaaagagcatgttaactaagatttaataataaaatattaaaaataacataattgtcaatataaaagcataatatttattgtgatgtaaattttgcattgtgttgtattttcatctccattggagatgctcttaaactccttggataggtgccttttcaatctcgatgagcattgaccaccgagataaatcattctaaatacttcttaatcattatcatgttttgaaagacacatttaataaattatatatatatatatataccttgcgagagcctatgtcatccatgaatcttgagaggagagtagaagctgaaacaatcttagggtctttggagagccaatttagagtttcatgtgttacaatatcatgcattcctacataacttgtggctatcaacaaaacgtaaccagaagaaatataagagactctcaaatgctcatcgaagcttggcaaatatccttcatttaaccatcgagcttcttcaaaataagctccaataattcttttcatctgtaaaattaaaatataattatattt

SEQ ID NO: 319705 - DNA, 1196 bp, Cannabis indica
agtagcttacaaatcgtagaagaagaccagggacacaaattcaaagaagtaccacaaagaatattataccagcattgcaatagtttatttgatttcctaagacaataaatatttgggatgtattatttatttatttaattatttacttaaccaaactcacgattcgctttgctgttcttgaattttgtacggatatgatttctaaatttgtgaaaatgtgagaggacttcacaaaagtagaattttttttttattaataattattatttttaaaaaaagtgttccaagtataattgagctctcaaattaggaaaaatttggtcaacaaattaatattgtacaccttttgtcttatctcagcatgactactaagccatatcaataatcaagccaaagaatagttcaaattcaaagacctaaaaacacgtgagaaataatgaattagatatagggatggttcaaaaaatatcactctattaatatttaaaatcaatttccatcttcgtttaggatattataaatagttattttaattattaaaataataaaaaatagttaccgaaattttcgacaattatttaattttattttataaatattaattataagtagagaaaaatatttttacattgtttggatgttaattaactttaattcactagccacttatattaatgtgtgtagtattgttattacagtagaaaataccctctcttatggtttctgagttgtttttatttctgaacttcgacccctcttttcctcttacattatttttctatttatagacaaaaaaaaatggagatttttaaagtgattgatatgtcctccctttatctctaggctgcatgaggtcttttttctagttgtaggaaataatatttattatatatgcattgagtaggctccgaagtaggaatttagtgagacaagacctgacctcttcgcggctaatgggacagtgcaaagagtagccgtcaattagcgtttatgggaaatcgtaatataagaaagacatgggctaaatcctaaaaacagtgcaaagagtagccgccatcttttttggacttacaaagattttgctaacttacaaaataaagcaatgtacattattaaaattagtagaaattagatttataccttaatagacgttaagatataatgttttttccactaaaaacggtggccagaggtat

SEQ ID NO: 319706 - DNA, 857 bp, Cannabis indica
tttttacagaaatccacataacagcccatatagcaattaacaaaataatttaaatcgcagcttaaatttacatagcaatgagcatagcaattaccgaagtaataactgaagcaacctaaatcataaaaataaaaaaaataatatgtgtagtaattctcctaaaacaagtcctaaatagaaaacctaaaatccctacaaatattttaaaatctgtacaaaagaaactccaaaataaaaaagagtttttacaccccatactaaaatttctaacttttttacttttttattacgggacgatttttttttttcaaaaatactgtgtatttttttcaaacatattatgtaaattttatactgtgtactgtaaaaaaaagtatttttgtaaaaatttcatatgacagcaaaattataaatgtttttgtccaaaatctagttttttttttttgagaaaattacattgtatacccactttacttaacttattttaatttttacctcaattttcatattttttagatatacccacttttatggatgatgtccccatgctagacttaagtaaagagtgaggatatattaggcaatttactcaaaaaaagtgggtatattttaataaaaaaacaatataagggtatttttgattaatgaatacaaaaaaagaggtatttttcaacttaccctttttgttttggtaaaaatcccaaataaaaacccaataaggataacaaataaagttcggaaagcccatgtaattgggcccagtctaaatccaaaaactagggttcgcttatatatgctgctatacatccacgaaccccaggtagaccgccattctcatctgcttcgccaagacgcag

SEQ ID NO: 319707 - DNA, 836 bp, Cannabis indica
tcactttgtcaaaaaaaaaatagcattggtaaaattcctcttagaagtgactagtttagtaataggggcaatattagtatccttgttaataatgacctattaaggttaaattaaagccgggacaagtcactcccagtaggcttttagaaacgattcaaaatgactaaaatttacaaaaatattaaaatttaggtaattttttacaaaaatattgccacatgaattttttttctttcgaaaatactgtgtttttataaaacaacagtgaaacagctaaaaaataaccgtagaacaacagtgaaaacttaacacagtatatagtataaaacttacacggtatttttgaaaaaaaacacaatattttaaaaaaaattcagccccacagtaaaaaaagtaaaagatttagaaatttcagtatgtggtgtaaataattcatttaaaattaattgtttcttgtacatcttcaattaacttaattctacatataccctatattaacttaattatttatcaagttattataacttcatcatataatttaaaagtaattaaataaatattttagtgtgatttaaatttaacagaaaaatttaattatgtgaaataaatttaaaaatttaaatattttcaccgctaataaaatatagtgagcaggcccagaactaaaattaagagggtatatttttttaatgtgaggcgggagcaaaaaataaagggattttttctataataggtatttaagacttaaattttacatttttagcttagttagggaaattaaacaaaagaagaaattcaaaagttttttttttcaaaaatacctattgaatcttctt

SEQ ID NO: 319708 - DNA, 980 bp, Cannabis indica
tagaaattctaactgacttgcacaagagaagaatagagcgctcatacacagtgcagtcccttaggctttttcatccactttcacaatattactacctcgtggactagactcgttaaagccccaagcatgtaaaaactctgagtgctttatttcttaatcgtattttctttagctctaatattaaataattagtttttcgaaaattttggtaaacaccacgcaatataagatagaaaataaagataaaatactgcatcttcagggaatatatggcaaggggtgatgtaaatataataaaaatatagcaccaaaagaatttttgatagattttttggttaggattttataccctaaataattcttatttcaatataatcaaatttactaattaataaaagatcagaaatcattttatgttgcatggttcacatgattaatttcatgattatatgtttaacatataaattctattaaatcttaaacatatagttattcgtgagtataatgttatctacacagtgaaaaataatcatgattatatgcttcaaagtttttagtcccatgatttatcagtgtactgaatttacacttacgtgataatcaacaataaattttacttacataaagatatgtggaatgtcctttccaggacatttgcaaattatactagtatcggatgtaattggtagacatcagattggacttatattgatactggaaaagatatcataaacttaccgttatgtcttttctaggtcaatatcacttagttgatcttagatcaatagatcttaatcataagatggttaggttctagcttaactatattatttgtgttctttaacttgttcgttaaagctgaccaaatggatcgaccaaatacttacatcttgggaacatggtagtgcaattgaatggaagcactaattataaatacggaatttgtagcttttataactattagaagtgaaacgataatt

SEQ ID NO: 319709 - DNA, 1087 bp, Cannabis indica
ctaacataaatatgtttcagtctgttggtcctatcatttctactaaattgattctgccaaacaatgataatttaatggtcaaatatagtgagacaatgtctatctctgatcagctcattctcacatatgtactttatgtgccctcattcaaatatgacataatctcagtgagttgtttaactaaaaataaggatctttctgttctttttcataacaatattttttccatacagagtacaaccagcaagaggatgattggcagaggtgaatcacaaatagcctttacattttggatcctacaccaacatcttcttaatgcttttattgtctcagctaaaatttggcattcaaaacttgatcatttgtctcataaatgtttagatttacttagtgattcattgcaatgtaacagtaaaaccatcaataaaaaagaactttactatgtttgtcctatggcaaaataaaagaaaattaccatttttcaatcatcaaacttttgctgaaaatatttttgatcttattcactgtgacatatggggtctatatatcacattacttctcattctaatcatagatattatcttggatatacttctttgaataaaaatctgatgctactctcatcatatctcaatttttgtcaaatgtccaaactcaatttcaatgtgtttaaatgttttagatcagataatgtacttgaacttgtgtttaaagattatttctaaagtgtagtatattgcataatttttcttgcatagaaactcctgaacaaaatgaacatgaaaagtcttggtgcagcctttaataagcaatccacgcgtatcacgagccactaaaccaattccaaattgttgggtctcaccaaatactattgcgtcaacattaaccttaacactatttttttgtggagccaccaaaccaattctaaattgtcgggtctcaccaaataaggtattgattaatttagaaacgtacttcttttttattccattaatacaaatatatgtttacgtaattgatgaatataatgttgggtaaataccattttggaccctgtgttttgcaaaagttacagattggaccctgt

SEQ ID NO: 319710 - DNA, 511 bp, Cannabis indica
aaaaaaaaaaataaataaatgaagtactaataatgttggagtcatgcatgacggttcttggtgattagtaaggttctaggaattaattataccattatatattcaatttaattaattcttagcttcaatttacattaatcactcaactctcacacacatatatatatatagatattatatgtgtaaattatagttatatttaactgtacattttcattcactcttacatatctatatatatatctacaggttgttgctgagaatttttcaggtaaatatctacacataaaaaaaaaaagtgttgttttcacattatttttttgtaaaagcaatgtcaaaataatgttgttttataaataaggaaaaaataacactttatatttttatagtaaaatgtttagggtgattctacaatataccttttaaaaggaatgattgaaacatcttttacttattttggcattcagaagaaaaatttagtttattttttttttcatattcatatacgtta

SEQ ID NO: 319711 - DNA, 1639 bp, Cannabis indica
gggtggcaatgctctctccgtatcgggaccagaggccaggcttttgagagacctacacaccccgtgcctatatctagaggaaagggtaaggtggtagtagtgtactctaatagctcctcttctgatgaagatggtatttgatagttgttaacaccatgcaattttgatatattgaaaatttatgattgttttctgactcaactactttctttttgcagatatgtcttccaagttgagaggtcttactgggggaccttcaagatgagtcccacgagatgagtgagggccaaggtggccaggacttcccggggtggaagatgttaccgggtcgtcactgacctcacccttctccagggactgcaccacctgagtagcctgtgatacggcctgtaggccagggtactcggaggcctaacaaaagagcgaggtcagtctctgggcagagggctattgaggtagccaataggtgcattgagagagctatccccttcatggatgaggatctgaaggagcttaacgatagcgagccagacaagctctactctattggtcttcgatatctttctttggtaatttgtaattttagctctgttcatcttttaggcactccataggctggccggccatgaggcttgttgcatggggctagttgaccttggatgctattttgaggggctggccggccatagcaattccatgggaggactggtagaccagtgttatggtattgacactgatgttattttattttattttcatgagctcaacccgtgatggctctcgggggtcctcggatgctcttcaagagtgggtgaggaccttggaggagctgaaggatttcctaaaggagagatagagaatggtttctggcctggagaccatgcttggcgctagaaacacaaagaacatcgcataagccgccttcatcactgggctgcagtctgaccttaatgatcacaagcaaaagctacatgaggctcatgatggccatcatgccattagggaggagtacgccgacctatcttttgaacttacttatgagttccaatcgtgcaacccttgagctaatttattgtacatgggcagtgaggcttttgtggggaaaatgttggcccatgtaaaggcactttttgagatctagatggaggcaaaccaggtcgctgcctatcgagaggggtcatcagggactcatgaggaggagctggccgatccacctgtggagaaggtggccggccatggctcttaccactaggttggctagcatgttgatgatggggctgacctagactctgtcgatctcgatcatctcacgactttggatttagctccttctgcccctacacacatttagacagttttttcattagtagtatttgatattatgtttgtataatataaagagtaatttcatgttctgcacagcctgtggccttttatggtcagtggccttttagctttagaacactacttacttttatgtcctatgtggcctgtggcctttttagagcatttttttattttcatgttcattgtagcctaaggccttttaagaacagtacttcattttgagccccagggccttcatgttcgtatctttggccgtaagctctctgttttttaacactactattgtttggcc

SEQ ID NO: 319712 - DNA, 1289 bp, Cannabis indica
atatatacatatatacatttatatttatattcacaccgtattgttgtatatacataaatttttagctatatatatttatatataatactcaatattttataatttattacatatatttaattaaaatgttcaactctatacatttatgatatttttaaactatataaacattctatatgtgtgtataacatatgtgaaattttggttcacaattgattttgttcaaaaagctttcattttcatttttcgatgtgtttttcaaatctttttacattaatacattcacataatacgatacatttattttgttcatgaaaaagataagaaaatttatgaaaacctaaaaaaatgtggaaaaacttgttcagacccgagaatactctttgaaataaaagtccaatttttatttgttttttatgcataaaataattatggatctcttgtttattggattgagattgtttcaagattattttgggttcttctagacgttagaatacattttttctgatcgggtatcaaatcatgtcctgtcaacctgcgtgtagggataaaggtcaaatcgacccggctagctgaagaagaagacccaaaacaacaagtcgtttttgcagtaaagggaaaaatgacccacggcaaattcaaagaaaaaatataaaatttttataaaattttatttatttagaataataattaatttccttatttgtattaatttagtcaataaattgtatttaaaattttttcatttttctttaatatatattatttagtatcaattaaaagtagaaaaaattgctttggtaatttattatatgatttatttagacatgtaataattgtgctaattgttataattgtgcaattaaatatttattatcaaatttaagtaatttattgtctaaattaattaaatttggagaaaccgggcattagttacactttaacaacgattttgcatttgatttactatcatataataattatattattttgtatttattttacaaatttattataagtgtagttgattaagatttgtatgatttaaatgctatatacataaattccttaataatgctagatatttaaaaaatattcaaacattaagataggttgaatattttatttagtacaaagttttatgaaacttcataaaaaattcctaaattgaatgaaatatgaataaactgtaagtaattttgtagtttgacataagaaaacatgaaactggaataaatgttcatatctgaaacgatttttaatgatctcggacgaccacactagga

SEQ ID NO: 319713 - DNA, 1880 bp, Cannabis indica
aataaaacatacttggtagtaaatctagatcctcgtaaaaaatttccaacagattcttcgaacaatgagacttcgtccttacttgtttgggagaatgattctgctcacgtgcaaggtagtttaacttatatttatttgtaccatggcatgctttacattatatttgcctttaattttcttgtcttgtttagattcagccatgtctgaaaaggtgctccaagctctgaagaaaaggaccagtgacagttcgcgcctgactcccccgaccaaacaatctagaggtgatgtggttccgtccaaggagaagggcctagttgaaatagtgatcgacctctccaaggaggtgatgcctgctggtctgaccaaggcctcctctaccgttgtggtgctgagctctgaagccaagaaaggcaaggaaatgctccaatactaccttgatcagtcactcccaaaagtgagcaatgagttgtccgaggcagacaatgagttgtccttggagctgatgatgggcgggtcttgaaggaagcagctcgcgtaagtattttcttatttatttttatcctgtctttttaccaatgcaagctttaactttttttttttttttttccgtccgtgcaggtcaatctaaagatggcctacgcctactcctgagccaaatccacggtcgcaaagaatcttaccatcaccaacaatctgtagagggaggtggatgccgccaacaagagggtcatggacgtgaaaaataagctgggagaggtgaacaagaaacttcttgctgccaacagtcgggtcgaggagctgaacaaagagatccaagagataccatcaaccgcccacctcgaggcagataatgacgccttaactaaggaggtcaacgagctcaaggacgagagggatggcctccatactcttcttgcaaatttaaccaaggataagatgaacttggaagaggacgtaaaatccaggcaaacgagggaagaagagctcgtgaaggaggtgaaaaactctgaaatttttgccctggaggtcttttatgaattttgtaaggcaaacccatcaaagaattttgagtacctcggagatactaaagaggcatatcttaattgttgtgtaggtcaggtggccatataaagcgttgaggcagccaagtccacagttttgacttaccagagcaatgagaccccaacccctaccgtccagagtgtcaagcctctggccctttctgaccaggttgatccataaaggtgcctgggacccctgctgtatgaaataatttttttttatctattcggcccatgggcctttattagagacaaaaatgaccggtcaagctattttctttttatcttgggtaatatttcattttattttgagacaactagctgaccgagtagtttttaatcctgggtttagacagtgctttatgatctttttcaatgaatattttccgttattttggtaatcatttgtccaaattgttatgtttttttttttgagcttgttactttcttttgtccaatggtttgtacgggtgtagttgcccctaagtgactgagcagacttttgactcttggtcacttgcatttcacaagttggttttcgtctgttcggtgctttgggtcgagcggaccttttgtatgcattaatggtaaattcataacttgctaatacaattgacacaataagaatggaaataaacatctttattcatttattggtcgagacagtcttgttactgtagtaacttacatttatgaaagctattacatgatctaatatgatctttagctaaatttaaacataaaaaattgcacttaaagaaaaaaaaacgttagtacttttaaatgtggtcatcccacctgagtacttaattatttcat

SEQ ID NO: 319714 - DNA, 1482 bp, Cannabis indica
tcactttcgagtattggttgtgtgtgctacgtattcatgccaagctacctatgtagaaattttaacgaaaaggtgatatgtatctttgtgggatacgacagccaacgaaaaaggtggagatattgcgaccctacaactggaaagtgttatgcacaaggaatgtggtctttgatgaggcatcatcatggtggtcatcgcaaaatgaagttttaccagattctaaggaaatggaagacaatttgtagaagaaaatgggggaagcaaattgttaagttacctctaactgaagatatagatgaagaagaaaacaccgaggatgaggaaccttagaatccatggcaaagaggtgtgcatcaaagagtagaaaataatgtaatgatggccaaccagaatttcggagatcaacatgagcgcgaaagccaaacctcaaatacgccaatgctactgtatccaaagaatagaagttcagagagccaaagtcatgaagaagcatactagaactctaagtggctagaagctatgaaagaagagataagcatgctggaaaagaatcagacttgggagctagtgccaaagtcgaaggaagtgaaacccatttcgtgcaaatgtgattaaactagtaagcttttaataaaattcggtttagtactataggggtggatccacgtagaagtgaagagaataattgcccaccgtaaaaaaattagaaaaaaataacatttatagacataatattaattttagtgtaataattaaattaaattacgatcatgtttaccatacttagcacatcaaagttgatttgaacttttactttgagttgtgcaatagcaattagatgagaatatgtttaaagtgttattgtcacgattcgagttttaaaatgtgataaatttataatatttataatggtcccactttgacccatatagaaaaataatacttacaaatgaccccttaattatattacaaaatatttattcaaaaataatgaagaaactcttaaatctataatgaaaatattaataacaaaattataaccgctcaacatatataagagaacaataatatctccgtagttatatagtcatcgaataaataaatttaattggtcaatataaaatactaaaataatatctaacatctatcattcctcatttctaactagtacgtagctaactccagaccatccattcaagcttaatacaaaattagttttcaataagaagtttggtaaacagaaaaagattaaactaataacgactttcttcctcaatggtactatcctcatccattagcatcaaattgagtttttagaatgggagaaaatagaggcgagcttataaagcccagtagaaaaataattaatatcaaatgacctttggtttaataaaaattcatgtataattagcttttaaaaataaaacatctcatcaccattatcaaaatatatataaaaaaaatagacagaccacaaataat

SEQ ID NO: 319715 - DNA, 1863 bp, Cannabis indica
aggttcaaaatagtggcgatacgtagtatcatagaaaccattcattttgcaagtgcaaaagatacaaaccgtattttaggtaccatgacgtattatggggttattgaaaaatatgggagctcaattattttgcattctaagttccactttttaaatgtttttgggttgacaacaatgttggagtaaaaactaacgtgcttggttttactttggttgatttaagtaagagaggaagcaaaaatgatccatttatcatggctagccaagcaatacaagttttttagatttcttatccggctaatgataaatggtccattgttttatcgacaccagagaggaggttcttagagaacgaagaggatgaggagagtgctgatttatgtcataatgacttcattgttgggcaaccaattatgaacaagttgtgaaaattgatcgtaaccctgaggaagataatgctgaatacattattaacgatatcaatgagggaacatgggtcaatttttattcaggaaaacataaacaaaaaaagaaaaaaaaatgtgcctaattggtaacttacttgtgataatgtttgtctatgtagttaatatttgttatagattacttgtgatacttttttttatgtacgtagttactctgctatagctaactttatattttgtttgttaatggtgtagatatggctaactcaagttcaggctcagattcagaccaatgctgaaaggccttaaaaactaccttaaaatcccaaatttgtagtagtgcaattaaaattagggttgagttgcgaattagggtcgctctctttataagaccttcgtaacacttgctaaaactgtgcaagtagactatcaacctcgtcatccccaggataaaacaaccctgtcgaaaacactgtattagagctttattgaacgataaagaaccttcaaaataccacactcaataatcatactactgctcagaatacatatataatataaaattgtatattattttctttgagaaaagaatgggatgtctttctcgtgttggttctgatgcactatacaggaacacacataataaagtaacgtgtaatatcctaagctttaatagctggattagcaactctaactagattaattatttattaattaggaattatattattatataatttaatatgtgaaattattctagtttgttgcatacctcgttgctgtgttaggggtatttttgtaattttgactcgagaagggtaaaatcataattttttgatataatgtgtttatggattacataattatatagtatgtttcttttgtcattctgtaggtatattttgacaagtcggcgcggtatagtcacaaccaggtatgttggggtcgaactgggttcggggcccaaaatatatttttaggatttatttatagaatttatatgataaatgagaaaatttgatttattgtgatataggtgtgtgtgttgaaatgacatgtttgcccttgattagatgtgtatggttatatttggccctaggggcattttgataatttcaccacttaaattattatccaataaaaatatttttagaaaaattagaaaaccattttttttttgggtttgaacccctcttagctatgagttttggaaaattaacgttttcgagaaaatgggatggaaaaatgacaaaatggcaaaattgcaaagtggggcccaatccaatacacatggccggccacttgtaatgcaatttaccatttaattttttcattattttaatgccaattaaatctaacttaaacctaggtggttacctgctggaaatattttaccaggatctagatttactaccatgtatgtttcattaacatccta

SEQ ID NO: 319716 - DNA, 1464 bp, Cannabis indica
ccaaaagtcagtttattttaaaattctttcaagaaaataatacttttttttttgaaaataagaggtaacacccatgtgtaattgtttccaggagttggatgttgttgaagtttagcacgcatggtaccaatatgagaaactgcatttataagaaacaaaacctcatccatatgtcagaaacaaaaataaaaaataaaaaattacatgattcaaattaaaataaataatagaattaaaaagaggttagaatttaggtaattatcaacttcaactaccaaataatttaataaaaaaaattgccattggagcaactttagcagaatcactaacaatgtcaatgtttgcatcaacaattttattcttatttaagttgctaaaaccatcttaagtctttttatattctatatatttcaacgcatatatatatatatatatctttatttatatgttgataaccttaatagtagtgaaagatctatgttcatttgaagccttgtaaaaatatttttctaaaaaaaaaaaaatagtaaataaagagaaggtaagaacaattgaaagatttatatatgttgaaaaataccttcaatctaacctctggaataatgaaaatgaatcttgaccataccaaaatgagtgaataagatttaggattaggtttagacatggattagagatgaaaattgaagatgatgaaaagagaaaagagaaggtgagcaaaaataaataaataagagttgggtttaaggtttagatatgggttagatattataaatggaaaattgaagaaaatgaagaggaaaaatgagaaaatgataaaatattaagggaagatatgcatatgtgcagttagatttaaattaaataaaatttttttaataaaggaaagattaaatgggagaggagaagagacacatacagactttaattaagtggaaatatctatatatctaaataaaggaaagcacaaacacggtgatgtggcagtctttatgaacatcttcactatttttaagcattctaatttctctctttaaatattattttttatgtattatatttatcatcatttattgctaatttattattattttctttgaataattgttagtttattatttcaaaatgaaattcctaacattttttttcttttcatctttccgcctgtcggtctttccctctcataacaacatggtatttattcaattattagaatgtcttcaataagacccccatttttcattattctctacaactatctctctcaattttatatagataaatatatcaataaggaaatatgcaaccaaaaattgaagaactattgagaagaatttccattgtcgtctatgtccctcaaaattgagtcaacaggtgtcattcatttttaaggtgatttctttctattttctctattttaagtcatttattcctttttcaattttgtaattttgacagaaggttttt

SEQ ID NO: 319717 - DNA, 1855 bp, Cannabis indica
ggtctcttggatttcatctctaaaatgggattttaatcacacccaattgaagaagtggattaggtgttatgattgattaatttctactatgatagtttgattttctttaaattggtgatgtagtttgtgttctgatgctattattataacaagagggggatgataacacttgctgtttcacaacattttattatgttcttcaaattttttttttcaaatgtacatactaaaatgatttattttaaagaaaattaaagaaagggaaaagaaaacagtgttatacagttggacagtgaaattggttaggatttagttagttaaattctattatgttagttgcttcgaatacacctatactactcgtctatatataaaaatcactttgctattcattatctgagttgagttgagagcgtgtgttgttgtaaagggttttgagttttatataattcatgtccttctcgagtgagccatttcactaggagtaggactccatttctgttcatgaattttgtccctataatgtaccaactctaagcttcatcttcaatcaataaaggcgaagcctcaaggtagttccatccaaggagtagatccaagcttcctgcttgtgatcgaaccttgtaattcatgtgtgtgcatactctgttttaccattcttttctgtccattgtcagtttaatttctctttgttattcttcatttctaagtgtttgttaagttcttggatggtgattgattcaccacaaatagtgtcagagcagatattgctattatgaaaccaagaaccttgataattatagttaaagaacaaagatggcaactacaagatttgaagtggataaatttataagagttaatgacttttgtctttggcaaatcaagatgcaggcactgctagtgcatcagggtattgcaagtgccacaatgaaagttatctctaaggaaggaagaagctaagaaagtttctcaagaaatcgagatgaaagctcacaattccattttgttgagcttaggggatgatgtgcttagagaagttatagataaagaatctgtattgggtttatgaacaaacttggatcaatatacatgaagaaatctctggcaaacaaactctatttgaagaaaaagctttacaccatgaaaatggatgaaaccaaagaactcaagaagcatcttgatgacttcaaccaattaatcttggccttaaacaacattggggttcaaattggggaacaagagaaagctattctactattaagctccttgcctaaaatctatgaacactttatggatacaaaagcttttggcaaagataccttaactatatctaaagtaaaggtagcactcaattcaaaagaaatttagaagaaggttgatgacaaatcatacattagtggtgatgggctatgttctcgaggaagaattgaaaagagagacttgaagaaatccaagattggacacaagtcaaattcaaagaacataattacaaatgggaagaaatgcttttactgtaagaatgggcattttagggatgaatgttacctactgaagaacaagcttaagagagacaagagtaaagaaagagctgaaaaacaagcttaagagagacaagagtaaagaaagaggtgaagcagattctgcaccaagtggctatgtgtaaagcccgcttagttaatttggaaattatcagttaatcatgattaattatgaaaattatttatagctatttaaataatttattatgctgttatttatggaattcagaaatgcatggttatgttattcagtagttttcatattttgcatttccggtgcccgctattttggaaactcgacgtttggctcagtagaa

SEQ ID NO: 319718 - DNA, 2462 bp, Cannabis indica
tggtctgaaatcaatttttttttcatgaatcgaaacattcagctgcgtcgacagacaaactatcattcccctctacttgaaagcaaatgcagtgtaggttttcataattatactcaagttaattcatgaaatatgcattatatttgttactgtgattcagttttgagcaatctcatttatcaatgagtcatatcataaatatctcaatgttaatttgcttgagctgaataagaattggagaaatttttgtcaaattttcaggtttgtttggaaggagataaacttttttcatataataaagtgcattagtaattaaatgttaataaacatatggattgctaatggtgctcccatcatctcgcatatgttatttgccgacgatagttacttatattgcagagctaatgagcgagaggccactaatgtgatccgtttgctaaagatttttgaagaagcttctgggcaggttgtgaactttaataaatcttcaattttttacagcagcaacacaacacagaatactagagatcacatatgtcacttgatgcaaatacaagcagctgatggaactagcatgtatctggggcttccttcgttagtgggcagaaacaagaaggcaatcttgggtttcataaaggacaagctgcaaaaaagagtacaacattgggaaggccggttcctttctaaagcagggaaagaaattctactaaaaacagtggctcaagcttttccaagctatgcgatgtcagtctttctactacctttggaaacatgtaaaagtcttgaaggtataatgagctctttttggtggaaattgtcaaaggataaataaggtgtaagttggcatagttggaagaaattatgcaagcataaaactgtgggaggcttgggttttagagattttagagaatataatctagctttattggggaagcaagcttggagattgttaactgaggtagattccttagtttgcaaagtttataaagcaaggtatttctctaatggctcattcctaaatgcatcacttgggcataatccttctttcatctggaagagcatctatgaatcaaaagacctgatcgttgctggtacaagagttcggattggaaatggtttaaacacctatatcagtaacagcccttggttgcctgatatgaaccagccgtatataacttcttcacattctgctataggtgataataaggttgcaagcctaatgcaagtaaatcatttaaggtgggatgaagatgtagttcatgatttattcaatgaccgggatcgtgtactcatattgggaattctccttcctgatacaaacttgaatgatcgatggagttggaacttcgaaagctcgggttactactctgtgaagagtgcctatagacacttaacacaagctgatcaggacacgtctcaggctggagatttttggaaaaattactggaagataaaagccccaccaaaagtcttacacttcggttggagagctatttcagggagtcttcccacgcgtacacaactccaaaccaagcatgtttatgtcagcaactcgtgtccggtttgcaacaatgcagaagagttccattatccacattcttgtcctctgctcttttgccaactcgtgctggaacaggtctgcaattgacatcacaccaacaactactgcaacattctgagactggtattattctgttacccgtagcagtaccagtagcctttctgctgatgttctcatgattgcttggcaaatatggagtgcaaggaatgatgtgctatggaatgggaaggtcaaaactgctgctaatattgttcttgaagcaaaatcttatcttaatcaatggttgtatgctcaaaaaaatcgtttggaaccgatccttgttcaaagtaatctaggtttggatgttgagcattggactaaacccggagttaattcgattaaggttaatgtggatggagctatatttgcaacaatcaattcgtttgggatcggtttcattgcaagggactgtaatggacggatcatagaagctggctccaaatgcaatattggcaatgttgctcctgaacttcctgaaatttgtggtatcaaggaggtcctaagttggataaagaacaaggcttgggatgatgtgattcttgaaactgattcattgctggctgtacaaggcattaatagcagttcacaaatgccatctgcctttgggatggttgcttgggattgtaagaatctattatctgatttgggtagcatttccttaaagtttgttaagcgttctactaacaaggctgcgcatttccttgcgcgtagtgcttatttctcgccagttcgtatttttcataacaataactctcctgatgagttgttaagtattgtaatggctgattcaatttaaataaagttgccatatttccattcaaaaaaaaataaataaatagatttagggtgtgtttagaaagtt

SEQ ID NO: 319719 - DNA, 1073 bp, Cannabis indica
taaaaacctattcataatccggggcaaaacccctaactcccctagtggctcaaaaaataggctatgcatcacttaataccctaaactaggttacaggaaaacaccttgacccaaaaaccaggttcaagaaaaacctaaatttcccctgctggccaatcgattgaccgattcactagtggcctgtagactcggtcgactagttctggaagcatgggaaaattttggttttttgcctcgaaaccaaaccaaagcttcaccgaagctgctcaaacttcccagaacaatcttacaacataaaaatcaacatacttaaaacattaaaaaacccataagcacatcaaaataaccaaatcaccattaaagagtgaaaattgagttcttaaactcagttctcccaattcaagcctaaacagccaagtagtcattcaaaacatacacaaacttaattcaaacttagaaaccatactcagaacatatctaaacctataaccccgaaatacatataaaatctaacaaaacctaacctagaatccttagaaattaaaaaaaaaaatagtgaagagttacctcaaagcttgaacaatccctaaccttggttgattctactagagattcttgaattgtgatgaaatttctccttaattctgctggttcttaggactgtcgagagaagagaaagagaaacagggttttgtgtgtaattatctcttttctaagttaatcttcttatttctttaattatataaaataatgtaaactttagcttaaatcaataccataagagataaaattccaattcaatgaaaagactaatttacccctctttaatcacttaagcctaaatagaacttaagggtattttggtcactttctagctaccctgaaaaatgacatcttaacattttagactagtccagtataattctaatataactcaacttttatcgtcgtgacatttctgaccactccatcgagttttcacggccgccgaacccgaaagtattttattttaaaaatggtatttacaatacccccataaccagataaaatatccgtaattaataaattacgct

SEQ ID NO: 319720 - DNA, 1240 bp, Cannabis indica
ttctaaaattattacattaaagattaattactaattctttttctgaattttgacatgtattaaatcatgttcctcaactcttttgaccattaaaaattccctgaactataagatacgtaaatttaaggacttttatctaatttcattcaattttactgtttcaggtactaaatcatgctcccagactttgatatctactaaatcatgtccctcaaacttttatatgtattaaatcatgcccttttagaatttttctactaaaattagaaaaattgactaattagcctacattaaattatatcgaactggatacataattaaagttattgtgatattaatatataagagggtattatgtactactagtattttttagtatttttccttcctaaaatgagtctagtgatgtattatttgtttatgtatttgagtgagttttgtaattcatatttttttacttagagttgtttatgttgtagtcatttaaaaaattgtgaaatttttttttaaaaaaaataagaggataaaaatagagtttaaaaaattagttacatttataattttttttattttatatacgtataaaataaactatatttaaactttattttaaaggtattaaattttaaattttacatatcttaataaaagactcgttcttatgttttttaagatacaattttgagctatacagttcatgtgtgatttgatctcgttacactcggttataagactcgttctttcttattatattttatttttggaaaaagaggaaatataataatattaaattaaaaagagtacgaaggtacgcggatatgtacgtacggacaccactcccaattcgttaattaaagtctaagcaccacaatacttaatgcggtgagtgactactcttctcttctctacttatcaactttgaaaaggtctttcttctactttcaatagtactcatctttttatttattattcaccaaatttattgtcatgtctgtcaactctcatataatttattttttttttcagctaaattttataaaatagttaaaaagttacccagtgcttctactccaaaaaaaagagaattgttttggtattcacaaaaaaatgtaacttattttttttaggaatattggcggctaaactactgaattttacagtttataacacttaaccacaaaaaccgaatttttagcggctaaactacctaaaccctggttctgttttgctctgcacacct

SEQ ID NO: 319721 - DNA, 924 bp, Cannabis indica
aatccactaagccatggccggccacttatgtaggctttatcatttaatattttcattattttaatgccaaataattcaaacctaaccctatgtggcatgctataaatagatagtgatggcttcaggaaaaagtaacttttgcatcttattcctttcagagaaaaacctgagccatcacactaaacctagccgccactctctttccttcttcttccttgattgtttcgaatcctcttagtgatagagtagtgcccacacacagcaagtagtacctcaatcatagtgtggaagatcatgaagaaagcaattcaacaagaaggacattcgggctcagatcttgataatactctgcgacagaaaggatacaagggttagagatctgagtggaaggagacatattattccgctgcacccaatgtaaggtttctcatactttatatgtgtttatttataatcattttagaagttcatatttagggtgttaatcaacatacttgtgagtagatttaagatcttcgtaaaataatttccaacagagaagtcatggaaagttcaaggtatagattttttatcattctcttatcaaaacagacaaagtggattatgataacaaggtgtggcataagatgaatacccctaaacaagctataaatgatcaaattatgtcaattccttctgatttgtatccagtgtatgaagctagtagagaatctcattgccatttatttgtggattgttgttatgccaaaatagtatttactgaagtcatcatatggctcggtttgcatcagtggtctcatgattttgaagattggaagaggtggttctctaaatctcttctcagctcgcaggataaagttgttataggcataaatctaccctccccgcgagaaagacttgtctatagagaactcgctgtattga

SEQ ID NO: 319722 - DNA, 2579 bp, Cannabis indica
aaaaaacttttttggggcgggtttgggtctctaggctcaccaagagccatgagtaccttgagttagaactgttgggggcttgagaaccctcaggccgtacaatttttaaaggatttagtcatccaaaagaagcccaagtttgtctttttatgtgaaacattatgtggtagaagtgctcttgagagaattaaattgtctttgggttatgaggaattatttgtggtggaggcctgtggtcatagtggtgggcttgctatgttgtggaaaaatattgaggagggtgaaattattgatttttctgaaaaacacattaatatccttacaaaagtgccgagtatgccacaatggagactggtggggatttatggtgaggctaatcgaggtcatgcggtaatacttggagtacaattcgatctcttgttgataatagaagctggccggttgtttttattggtgatttaaataatatcactaatcaaaatgacaaaaggggtggttgtccttatcctgaatgcttgatacaaggttttacccaagtgttgactgactgcaacttggttgatatggagcttcatgggcatcaatttacatgggaacgtggaggaggtactgaacatttgactgaggttagacttgatagagctttggcttctatttcatgggttaatgtttttctttctactaagctttttaatcttcatgtttcgtccttcgatcattgtcccatatttttagaccccattgttcgaaatgtttttactagtgctacgcattttcgttttgagaatgcatggttgagggagcctctttgttaccaaggagacaattaataccagccggcgttgggaacttgatagataaatggtatactgaggagatggctcaaaggtcgtagagagcaggcatgtcgagcatcacattgtacaccactattaatggggccatgatggtggtttgctttggggcagtcccgacagtaagtggtagtttaatcttgcatggttccaggtcttctaaggtcaaacccattttgagtagggcttgcttaaacaggatgtttgatgatgattcgttatcaatcattaccctggccactgtcatattagctatttgtacctcaacaactaaaggatcattgtgagaataaatgacatgataggagtttaattctccaaaggtgataggttcacattcgtagcattgagacttcgaacgacgttttgctacctccaggactttggctcttggttcatgtcaaagtaatcttgcatacatttctaaggtcttcctcgaattttcagctatgtaagggcatccaatcacgatctctagcctgtctacaactagcacaggctggagaggtgcattgcccccaactagagctttaggtcgtacataatgctaaagagcagcatgcatctgtctgatgagaaaatttatctcatctcgcaactgattacactcattagtgtcatgactgtaattgttgtggtagctacagaacttgttcatgtctatcttccttgactctttgaagggaagaggtttgcgatatgacactattgagtgtgtggcagtatgaatctcctctgttgaagccaagagaatggagtaggtggtgaagcaaggctcatactctcataagggattgcccccagtcataggcttttttcttctgggggagttgccttgcttgccactattgttggctctcttctctccattcaaacctcctttcttcccattgccctgcgccttagtagcaggggcttcaaagtctgatgccttcttcttggcaccctttgagcccttggctcaggtgacaacttcttcaagtttaataaatccatcaactctatcagggaagtcattcatagtgtataccaccttgagacgaaggtcagaccacaaatactcatctccttgagctttgttgcgagtacataaaccttgcgtcctcgctaagacttttggtcttagcagctgcctccaagaatcgttagatgtagtccttgaggggttcgtcttcctgttgcttgacatccaccaaatcattgggctcaatttggcattgtcgggaaggaacaaattggttgccaaaagcatccgctagatcttttcatgagtcgattgatctaggagagagcataaggaacattcggtaaatctgaccaccacactcttgtcatttccaaagacaagaaaaatttatcatagagctaaagagttcgtagaacgattacaaaagagaaacttagaaacattaatacgattacaaatagtataaatgtttttaaagtcaggtcaaactcagccaagaataagtcattcttctacatgatatggataacacgttgacaatccgattggacctccacattgttgaagccaaggcacgaacagagaagtaagccattacaattttttgtcaattccactatttttaatgtttgtcacaatatcaccatctttctatatattttaaaaataacaaattatgtttcttattttaatactattactttatttataatacacacacatcaaaatgttatatttaagattatatcactcaataa

SEQ ID NO: 319723 - DNA, 497 bp, Cannabis indica
tttttcccaactccagattcgaggaacagcacagcagtgactcactctcatcaaaactcaactatctggacccaccgtcagcaatgagatggagaaggtggttttgggtttctgggctcggctccaatggagatggtgggatgatatctggttttaaggttggggaaaggtggctgataggttttaccagttttcgggttcgcaggtttgggctcaaaaaatagtacccttacccgcccgtgaaatggacgggttggttgggttcgaaggccacgggttgacccgatcattttttttttttggttaaggattgtcttgtttctaatttagtatcaattagattgaaagattgtaaagattgtaaaggttgagaatcgtaataaatgggtgggaagatgaatcatttcctgacgaagggcttcttcctatcactcttcatacagtgtagaagctacttggttggtacactacacactggcaattctttcttttgtttg

SEQ ID NO: 319724 - DNA, 911 bp, Cannabis indica
ccctgatcagcgtcggtagcgaatttcgcgaaaaccgtcgctgaaagggcttaaaaaccgcctctaaagggagtttttgtagtagtggcactcggaatatctctctgattggagaaacgacaaggataagaattaaaaaaatgtgaaataatcagctgcttaatttttaaattatttgaccaaaaaaaactaattaaaataaaatgagatgaaatagattgcaccatcatatttaaccttaaaaatacttttagtttcatatattgctcagaagacacaatagtagaaactattgtaacatgttcaatcaacctcgtaactttagcacttaactattgtgcaaggtacgtaactgcactactaacaacccttttagtcccagagaacttgttattcccaatcactaacaacaatttgataacgagtcatcgaagaataaagaacaaccaacaacaaaacaaaacaaaacaaaacaaaatcatgtcacataattaagactaaaatactcaaaactgtcacagagacaaaactaaaatattgaaaactatgtcacagagacaatactaattacaataataaaaattaaattgtaatattaaaacacaatcccaactaagccgtatacttatgctaggaaaagctggcgggcctggccgaaaaaaaaaaagataacttcctgtatttataaatttaagaacaagaaacactaattttttttaattttgttaatattaaatagtgtttatactgtcatatgcacattgttattttaagtacgtagattaatcatagtttttattaatttatttttttatttttatgatggtgtattatttatttggggaattacctcatttactatttttttactttttcttttcaaatttacggtttgggtttctaaagtagtt

SEQ ID NO: 319725 - DNA, 996 bp, Cannabis indica
ttaaattttacttaaataaaagtctaataaaattttttattttttttattttggacccccgaaaagtgtgggccctaggcacgggcctagcccgcctatgcctagggccggccctgctcactactattattgattcaattattacaaggtgtcatgtcatgtcatgttacttatcttatattattacaatgttatcacatgattcaatttctatgtgtcttcaaattcaccacttaattaatactaaattggataataataattatatatatgcttacgtaatggaaactaaaactgcttacgtctaactcactcacctatatcttatttttgtgtaaatatgatattattattattggtagaaaatattatatttaatataataattattataaaatatcgataactaattacaaaacgtcactatttttaagtggtacttagtaagttagtatcacttgtactttatagcaatactcatacatatttttttttttcagacatttaaaaataacatttaatccgatccaatcataattaaatatccaatatttagtaatcggttataattgaatcagtcggttgtcattaaattaaatcactttattgacacccctagtcataccaaaaaataaagtataaataattatttattgtgcagatgaaaaaaaaaaataagttatccataataaaatattaaaactttatttacgatactataaattatttaattttttttttgtaaaatttataaattactctaaataattataacatacacaattatgaaaaaaaaaattactacataattatctctaattagtatatatttttttttctaaacagcaaagaaatatatatatatactagatgagagttacgtggcgagccacgtaactattagttttatataagttctactggtttttgtttaagaattcggtaactaagcaacgacaacaacaatggtagatagatctatttaagtttttcata

SEQ ID NO: 319726 - DNA, 1402 bp, Cannabis indica
tatgatcaatgtatgttaaggaaaaaaaattggagaggcgtagaaaatgttattaatgtattaggaaaattggaagttttccaatgtaaggatctgtttggtttcagagaaaattgtggaaggcacgggtggttcaaggtctactttcactttgggcatctctgcattatttaccttttgtccggagctggtaatttcctaggaaaatgcagttaacacatatagaaagaataaaaattaagcacgtggtatactatatttcattgttaataataataataataataatattaaaaaaaaaaaaaaaggaatgaagagatgaacatagggcgttaccctgaaagctgtctcctgaatggaagctgtcttagccaatgttataattgcgctctcaaaataaaatcactgattctttcaaaataaaataaaataacataaaataaaatcactaagattgtcccaaaactcctctctttttctttcgtattatcatatggatattgtgtgtggctattgtttcaattcagctaattgttttgacagtaccatctgctaccaaaaagagagtatacatcagcagccagctggatccaagaaggttttttttttccttgtttctattttaggagggttaaccctcagaagcaatgaagaatttatttcgcaataaattgtcacaaatagctatcaacattacccgttcacttgttttattatcatgatcatgattaaaagaacatttaataattaattcgacaattttttttttaatttttttagggaataattaattagttcgttttttttttcacaatttagactttagataatttgaataaacaaacttaatttctttattattaaaaaataatttgtgatataaatagttaaatttgattttttattttaaataaatacctaaatttattgtaattatctaagtgttattttttattgataagtttaaattaattttttttaatcagcaccaattagggattgccccttgaccagctagttacttacataaattctaaaattataatttaaatattattgcggctaaaaattaaacgtaagaatttattaacaaccgatttttttttattgaaatgtataactaataactgaaaaataaacttaaatatttttttggtaaattaatcttattaaaatttaaaatgatactagtttccattatatatcattcgcgtttatttatatttattatcacggccacctcatatgttgtaactcagtataattttgaatgtacattttcaagtcacttttataatgataaaaagattaatgatatatcctagtatatatattatcctaaaaatgtattataattcattttttttttccgactcatgagttttctattattattattatt

SEQ ID NO: 319727 - DNA, 1184 bp, Cannabis indica
ttaaaaaaaattaaaaaaaatagctaaagcaacaacactattgtattctcgccatttagctaattgtgaagacaagcagtgatggacccaagatttttactttgtgggggcttatttatcgtaaaaaaatatttatagttacattataatcactcttactaaatttatctaatttagtgggggcttttctactattttggcctataattattaaattaaaaaatttacatttaattttttaaaaggtaatatttttgttcgtgggggctatagcccccacatcactcttaatgggtccgtctctgaagacaagtaaacatgaatattaagaatattatttttcggtacagtaaattattttaaaaaaaatcaaaacttattttaactacgaaaaatgctaaaagacactaataatatttaaaacttgtatcagtaattttcttttaatatatatccaaaaatgttattttataaaaatattttcggacaatgaaaaaaaaattaaatatttaaaaaaaaaaaaaagcaaaacaaaaagactattattatatttatattctctctctacaaataggccaccttcctcttctcaacaattttccctttcctttctctctcttacattttctctctcttcaaccaacgaaccccgtcccttccaaccatccacacctctctttctctcttcattctttcactttctctctctttctcttcaatgagagattagctcgcagtgcagaagatgggcaagtacatgaggaaagccaaggcagcaagcgaggtggcagtcatggaggtttcacaagcttctctcggggttcgtactcgagcaaagactctagctttacagagacttcagaagtctccgcccgtctccaagtccccaaggtcaccctcttcggctactactagttcaacctcttacatacagctcaggagtcgccgtttagtcaagccgccgccgccgccgcctcagccgattgtcacgacgagtagtaaattgggtttcgtgcgaaaccctaacagagcgagttcgagtctcgttccgctttcttctgggtctcctgggtctggtgatggtggtggtgatgacgtggcggagaagaagaagaagaagcagaagaaggaggaagaggagattaaggaaattgtgggtaacgattatgatgatgatgatgatg

SEQ ID NO: 319728 - DNA, 1888 bp, Cannabis indica
tacggtaagtttatcatatctaatccaagttcaatattggtcccttccaatgcatactccatacatccaacccaagcttactttaaccaatgccctgaaaaagatataatacttatccaaggtgcaagtaaactatgttgtagattatcgtatcagttaaaccttgtgtattgataaatcataggaatacatttaatcacacaatcttgattactttccactgtgttgacaacaataaacaagaatattagtgtgataaggatttgcacaatgtccacaaggaattgagcccatttgaagattagctctctgttcattaattccactaatgtcttcttccataacttcattagtaagtctagcattattcactccatttggctcattttgggctgaatcaatagtcttagaattcctctctaatcttgtgcgtctcctcttagagtccacaatcagattttcctctaattcctcatcaagactatctaattgataagctcctgagttaatggaaatatttccatttaaaggcctcataactacttcagattccataattccttttgacctgtggtgattgacgctaagctggattaatgctcactagtctcctgcgatttgttccttgatcataggagattgattgggctttgctgcctgttcacgcccgtgatggttccagcagagtactctgattcatcatcatctccgttttgcaaccattggcttctgatgagatgatgtcgtcgacgtggctgggctctcacccatgctccataaggttgaataatttgatctgctagagtatcgaaacgcttcagacagaatttctcggagtggccaagtattctgcaaataaagtagaatgtaggaaggaattcatacttgaacattgcccagaaaccttcctctccagttgtacgcctcaacttcattcttctcttcaatggaacattaacatccaaggtgaccttaacacgcatatagtctctccaaatacctcataaattttttgggtcaaattcaacaaatgtccctatgaaattacctgccctttgaagaacagcttcaaacttaaacccatattgaaggccatgaacttatacccatatatcaagagagttaatagatactatacgtggatcgtttgctggtttcaatcttgtaaaaataaattgtatacggttaaaggtccacgaactcccttcaatgactcgattcaaatcaatttcttggtaaaattgaaataggaatcgatttggttccagttgcttcacatacataccctttcccggttgccaaagagaggccatcatatggcgcatgacatcgtaatcaattgctctggctgtgaggaaccttccaacaatacataactcaacattagcaatcttagtttcagattcttcaaaatcaacgtagtgatagcatcatcttctccttcaatctcgatactagcatgaagatcctccaactccttcactgagtaactactagatgtcatgatcaaagacaaagaaatgacagaaatttatagagaaacattctcatcatgttaatagacaagatttttatagcatatcttattatatatttattgtttgactatgaagattatttagtcaactaattttagttttaattgctttacatattttttttaaagcatattttacatataatatatataccttaactactaactagtatttaatccaaattggatactaattattttatgtgtatatagataccaattaataagttacctaagcgtttaggtactagttaaaagttattgttttaatttttttactacaaattattatcttaatttagatactattaagtatagattaatgatttttatataaaaatcacatggtat

SEQ ID NO: 319729 - DNA, 1796 bp, Cannabis indica
gatgatggactccattttggaattagcttcagctagagctcggacacatttgctctaccaccatcaggttaatttgtaaaaggaattgtgaatgaaccagacaaataaaatgggcacattttttgccttagaaatttaataaaagttaacttacagtgttggcttgaggcctcatagtatctaccatgtagatggggtccccacttgccatcattgcaaacctatcaaccctaagcttacaattggtggtagctctttggtccaacaaatcagataggaatggagccaaatctatcccaactctaggatgaagtctctctgtcatctctgctctattaataatgtttggaacaggttcaccccacttgtcgtaattagcaaactcagcattacatctggtagaaatgttggtggccaattctctcgtctcatcatactcactatcatgcctcttcaagtaaaactgatcgatggcctccatatgtgctcttacctcctccagcattgacgtgggcctaactagaaaattaaaaaaaggaggaggaggcaaagtcgtcttctctctagagagctgagtggaggtggctggaatgtttttggatgttgggggtggtagaagtagatcttgattatccttggttgttagagtgctccccctgacttgcatttcaccctcgcagacatcaaatcccttccgggattgagactcattagcttgcctcctcgcagcggccaactgttccactttttccttggtctccaccctcacctctttgtgggcccctccatctgcagtttcagactgcttcctgggaacaaggactgttccatcacaatcagaactatcctccttaacatgctccatcactactagaaaaacgagctttagtgacccacatgggagactctaaacctattcagtgacccttcactacgtgtcactattgtgggtgattggaaagacattatttagtgacccttcagtgtgggtcactaaatccttttagaatctctcaccgcacgtcattgtaagcttttaaagtaaggcattgtccgactataaaagtagcaacaacatgctagaggcatcactatatcttttttttctttttgtttttaatttattttgtagatatagtgacccacaaaaaaggccactatatcagggttttttctttaaaaaaaaaacatatattcaattaattaaccaaataattaattttcattaatcataaataataatttttcttttccattaaaagaatttttatagcctacaattttattttttaacaatgagtagaaattttttttgaatacaagaaacaaaatagaaaaatattcacttaacattttcaactagcactgaagaaatcgaaaaaaagaaatccacctcctaaacacctaaacatcaccgacattctttgagccacgacgactccatccatggcctttgtgaaccccctaagccacccactacctctgtcaacctacaaagaaaaaaaaaagatatacgtttacttataaatcacaaccactattcatagttctaaccaaaaattaaaactaagttcatataaaagcatgaaatttctgaacaatcatcaattaaaatatatacatatacatatataattttttaaacaaacaaaataaacctaaaaaaaaataaaatcccttctacctctctccagggctggcccaagcattgggcagctagggtcattgcacaaggccccccatttttttttaaggccccaatttttttttttttttttttgaaaaaaaagacatat

SEQ ID NO: 319730 - DNA, 1218 bp, Cannabis indica
ataataaataatattaaatttaaataacatattattttatattaattattatgactataaatttaaatatattataaatcatattatttaatatataataaattatctgtgttagcttatattaaaatatttacaaaagatctggaattagggacttcgaccccaaacctctatcatgaactagcaaaccgaattaggatgttatgaatacattattatgtatagcttgaacacatattagactattagttccaagaagaacccgtgattataaatgtctatcaattcacctcaatgactctttgattctaatgatttctacaacttcaggctgaactcgacctaattttttaaatgtataagcctcaatcaaacaaccaacactatcttgagtcatacaacctaaacaaaaacaacccttttgctcaaaaaccgttccatcaatattagtttgggtcttttttatttttatattttaaaacaggttttttttttttgtatttttacggaattctacatagaaattcctattgcaattagcgaataacctaaattgtaataaaaaatcatatagcatcctacataataaaaacctccagagaaaccactttagaaatccaaatcgtaaatttaaaaaaatagtatatagagtaatttcactattaatttttatttgattattcgtaggtgaagttcgatggatatattgaaaagaaatcaactttaattttaaaatttacactaacattttaaatattttttttgtttttacttttttatgttaatatttaaaatatgttttattatatatttttagaatataaggaggaaaaaataagaaaaagagtataatttactatatttaatctatgcaaaataaatataataaaataaagtgtatttatattattttgggttccaattcggtggtaatgcttacgtgagcaaattaaggctgcgcctgccgccactttctaattttcatcacttgccaaaattacattctatattctttttatattgtcttcttttatttttacccacttctttaaagtctatcatttttactttttttttttcaaatattgtactaatttgggtaaatacaattttagactttctgttttacaaaagttactaattggaccttgtattttgttaaatgacaaaatggaccctgtatttttaaatactacaaataggaccctgaattgattt

SEQ ID NO: 319731 - DNA, 670 bp, Cannabis indica
tgtggaaagataataaaatatataagatgaataaactacgtcttctttcattgtcaattgattttagaatgaaattataggcatcttatcaaattttaacagcaaacgatgtgttattatcaataactgcatgaatacgtatgatagattacatgcttgatttggttatcacatctgtgattattatgaacgttatgatcagaattaaaaattttgatgacgtcgtagtattagactcaagtaaactgtctatgctgtaacactagcctatagttgagttgtcaacaccgatcattgaccctatcttatcaatatatgattaagttgttatttataattttgttgttgattagtcatttagttcatgggtagtgctctaaaaatatagtacaagtacaattgtacaaatataaaacaaaggttgagggaggagcataggagagctttggaggaagatgtacacatttgactgcttaacctatgggtaatatataaatatttggctaattaaaatttttgctctctgaactttgacatgtaccaaatcatgctgcctgataacttttaattaaggtcgttaaaaatactttctgaactattaaaattgttggatttaaggatttttttccaattttagtaaaaaagtctaatatagatgaacgttcaggaa

SEQ ID NO: 319732 - DNA, 680 bp, Cannabis indica
cgtgtaacacagtacctagtcactgtgtattacatgcgtaaaacataattcataaaaagtgaattttgattcaacaattttaattattaaatatcaagttaaataataaattattttaatatataattaaaatattattatttaataaataaaattaaaaattagaataattcagttagttgataaaagaatttgatcagctaattaattagttaatttttaatcagttcaaactaataatatttaattattagttaattaaataatattcaattataaattaattagattctcttattaattaaaatatttaattaattaactattttacatatacaaatatatagagaaataaagagattagagaaaaaaaaatataatacattttttcacacctgagtctcacgcatagagctctcccggaaacaaaacctatggttccaaatttatcagatttatcagatcttatgtgttgagaatatccaattaataaaaattctcattatgttgtattgcgagcccacactcgtctttgagttgtgagattgttgaggatgatcttgttgtgagatctcaatgaatcattatatgaaatgatagcaacattgaaggacttcaggtttaatttctttctttctttctctctttttgttcaatgtatatatatctgtaaacgtaaa

SEQ ID NO: 319733 - DNA, 638 bp, Cannabis indica
gcagcttggaattttctttaacaactttctctatgaagacaagtttaaagttacagtacttcttgttttctccatgtaccgtgatattatctttctcattcggttttcaaatatgacatacccaaatgaaactaagctgtctccttcgatgttgggatccatcacatgcaaactacacttttttgtcttcatttgcaaagcatacaatacacaaacttgtattacaatatgaaaattaagcaattgaaatgtgactagtcactaaatagaatcataattatttcaaaaaaatacaagtgaaaaataccttatctaaagtatctaatgacgttgctggtggagaaaattctctgaggactattggtggtcgtagaggagaatagtccttggtagcagatgctggaacagaggtagtatcaacacaagatagttcaacacctagtgtggagcccctggtagcagaatagtccttggttcattggatgctcctccaacacttgaaccagatgcgtgtgaggtgccagcaacaccgctttattggccttggactagttggtggagttgttttaaaaattcgtcagtccacctacccctttcctctgactcgtgaagtcacttctccatctcacccatgcgat

SEQ ID NO: 319734 - DNA, 976 bp, Cannabis indica
gattagaacatggtactttaaaatgtttaagacggccttagatgtgacaactgactaaacagttatattataatttatttaattgaaaaaccaatttataacactgaatagtttagatactatttttaatggactgaaaaaaaaataatacataaattatagtggggaagaaaacaatcttaaataaaaaaaataaaaaaaaaaaaaaaaaaaaaaaaaccgaagtaacatgagtcacgacatttttatatcccacaaagtaacaaaactccaaaatagataagcattccttctatccccaatgaggagaaagatatgcacctcattttaattaattaattaaaatttagtgtgtaatttgtaataaagatggtagatagatactatttatgttatgaatatcaccacacattattcatatacgacaatacatacgtgtccaaaatggagccaagatctacttaatttggggtattttggtactttcactaactatacttggaagtaggtaggtatgcatgtgaacagggtaggtgcaagcaacgttcaaatatttttgttacaagtcaaaaagaaaaaagaaaaaaaaacataagaagtcttttaaaacctaagaattttgtaaaagaaatagataaaaattttaaacacatttattttaacagttttaattttatataaaatttatattttttaattttattaaattttttatttttttttctaatttatattttaaaaactatacctattaaataaaataaattatattttaatatcgtgacaaaaataaattatacctattaaataaaaataaattatatttttaatatcatgacaaaaaattaaaataaaaaattaacaatgaaaattttctttaaaaaaaagtaaaaaaaaataaataaagtaattgaaattaacataaaataatgtgagaaaaaaaattttaaaaataattaagagtaatttttaaaaa

SEQ ID NO: 319735 - DNA, 805 bp, Cannabis indica
ccaccatttttaatatttttcacgaaattgtcatctttctctatattttaaaaataacaaattatgtttctaatttcaatactactactttgttataatatacacatcaaaatattatatttaagattatgtcacttaataagtacaatatatatacatatatatgtgtatgaaaagattataaaatttagacaacaccgcgcaaagcgcagcttagttccctaatttaccatataaaacaaaccctaaagcatagattattatgaaaagtaatgactgtaagtgtgtcgtcatcttctcttcatggtttaaacttttataaatatacaatgcaatcttgcatataatatacacatttatttaggtgttagaaataataatatataactgttatactcaaaattcgactattaatcaaaagctgacacgtatcctacaaaatgaatattaatcaactcaaagaatataataattaaatcgcattattaaatacatttcaaaataactcgttacaattaatttaagttgatagaaatattcaaactccctgactacgtgagcatatacgagaaaagaataaataattattaacagatttaattgatgagacaatacgtccgccttgggatgaacagagtacataataagagcgtgcaagacgagacatcaaggatcttacaactcattgactcgcaattgtacatgaagaagagtacatttatccctctcgctctcaacgccacctcgcaaataactttataatatgaagaacattgtaagaagaagaatatctatacttagcatt

SEQ ID NO: 319736 - DNA, 1806 bp, Cannabis indica
aacaaaataaacgatctcttattgttaatctattttttaaagccaaccatggaatgagcttagtacttaggcacgcctaagcaatcctagataaaagagttgtgtgagcgatcaacattctccttcatcttaatataaatacctgcaattatataattgttcttttggagctcaacaatacaaataccattctttaactcatctttgtttcaaacattttgagtccaatatcaactactagtggttggagtagagtagctccaccaatcatcatcctttaagtaaacattatgaatctatttcacccaaaaattatccttagcaacaatggtctagataaacttatcaattgcacacttattattccacaatgcaacatctttgaagtgaaggtgtaatgacggttatacatagacatgggattagtgggacacttagcactaaataatctgactatgtgattatttatgtattttatgctttatagatcctattttcatgaaaatgtgtgttatgattattatttctcaatttcaaagattttattgaattataggtgtgatatgcaagctatatgtaaattttcatatttttacatttttatgcccgataacagtggaaatgggtcgaatgaaaattttagtcacatggatacaaatttgtatcaattattttacggagaaatattattggatatcttagaatatcgaggtttaaagaaataacaaaattggacaattttacccctagggttacgagataactttgcggggaagtaagagcattttagtctttttaccctaagagattagccactctttttggaagagataagtggctgtggctcatccttttgaggatgaccagcttcttgggaagcaaacaaaaatgtataacaaagtaaaaaaggaaccaaaaacaaaaagaaaagtcaaaagcaaaaagaaaagtaaaaaaacattaaataaccttctccttctccctctacttcatggcttctgaaccagggccaaaactcagcattttccaccattttcaagccttttcttagctgaaattcatgaaggagttcaacccctagctcctccaaacttctaaggtaaaacctaacttgaaatttattagtttttaagggtttttgttacttttcagtagttgtttgtagtagaacatgttgaataagtttataaaggttatgaagtaattattaaggttatttaggactgtttataagtggtttgaattgttttgggtggttgtagcaaaagttatgcaagtttgagttcaaagaactaaaacttaacttggttgtgataacttgaattatgttacgaactgggttaaggtttcttcgtaaaatatgttcactatgatttttttaggtgatctacaaaatttggtcatgtttggatcagtattggaggagttatgggatttccaaactcggacagggaggtttcaagccatcgatttaggcaatttcaggacggggccatttagttttatttctgttgataatttgattaagattaatttcttcatgaaaaatgtttattgtgaagtttttaaataccctgcaaagttttgtaaggttggcttttaatttcaagagttatgtaagttttaaaattggatagtgaagtttttggccatcagatttaggcaaaatttggggttccatcttaaacttttcccaggaacccaattgagtgttttctcagtatatagggtattgccatgatatctatcaatagaaaaacttttagttgtcaatttaagtcccaaaagtattagggcaacacttat

SEQ ID NO: 319737 - DNA, 952 bp, Cannabis indica
atatatatctaaataataataataataataataataataataataataataatatatgtataattaatatttcagtagcttatattattttctgtctttcaatattttttatttaaatttaatcacaatataacttactataaaggtgagaatttttttttattaattataaaacgtcattcttatattatcactacaaaaatattaatcataaaaattataatttatatagtgataaaatatatttttaaaattaaattaataataatttttatttaaatactatattttaatcataaataattttttttatgactaaaaattacaaataatgaaatttatttataaaaatgtgacaaaattttttgtagtggtttctagtttcatgtaggttagattcatttcatttatctaatattaaatagtaatgacaatattaaaaaagaatataatatcaacttaattggtctagattccactttaataccattcaaagtctgatcatgcatatataaaaagcgtttataatatatagttcaactttaatattatccaataaaaaatatatagatacataagctcaactttatactctaaaatattttattcttaatatatatagaaaagtgatatttattattgttcaagaatcggtgctgtcattattagaagataagagtaattttgtagggattatggaaattgtggccatgaaaagaaaaacattatatgagctgggatggggagacagtcaacctcaaattaagtcaaataaaatatatcatactattataaaagtgtcttaatgaagtgatagttttattgacatatataccctttgattgatgatgtaccattacataatgacatgtatatcctatttatagattgatgatgtactatttacataggggtgttcattggatcacatccaatgtttttaggcctatcc

SEQ ID NO: 319738 - DNA, 1407 bp, Cannabis indica
cattataacttccagaataaactcaataagagaaatcttaagaggaaaaagagtattaggagataacattaattaaagaaatattggcgctaaaccaccttaatttttaggtttgtaacagttaacgacaaaaattgaaattttggcagcataactctctgaacctggtttcgttttgctctgtaccccttcgtctaaaaaacacagttaagtaccacgctggactgcctacgtgtatacaagagtacacgtggcaaaattttagtggtccgtaattttaattttaaatatactaaaaataatttgaaaattaaaaaaaaaatcttttttttttctctttttctttttctttttctttctctttctctttcttctcgacagaactccctttaacccttttcttcttcttcttcttcttctcgacagaacaccccacccccccaaatagccttcaccttccccagcccccagccccgccccagccccagccccagccccttgctcctccacgatacttgtcttcacctgcacaaccctctgctcaacccgtttaggccgccttcgaccaccaacggtccaaacggatcacagaattacatcccttggtcttgaaactcaaaaccctgagccgccatctctccccaatatctctctcactctcagtttttctcaacccaaaagtctcttcaacgtcgtcatcgaggaaccctgcagaggttgcaaaccacgtccatcatctccaatcaccatctcggagctccagtcgccatctaaccttccccatttttttcgttcaatcgcccctcctttgtcacaactctgttcgattctgttttcaccccagcccaagtccatcatctttgaaagcttccatagccatcaacgctaccattaaaggttcgtagctctcaaatctcagatccacactatcactaataatgagatcaaacatctcaaatatgttttttatttcatctttatttttatttttttcgcttattgatattctcattttggtattttgtttggttttattttggatctgagatttgcttttgcattttattgttgttttatattttttaggttgattaggatctgataaatgtaatggtggtgtttgcgtggtggtgatggtattgcagtgatgattcgatgctggcggtggtgttgatagaatgaatgaaaaagaagaagaagaagaataattgggaaaaaaaaaagaagaaaaatcttaatttttttattctataaaattttaattttaaattaatttataatattattatttaattttgtatattttcaagttattttttataatattttaaaattaatattacgtggaccactaaaaatttgtcacgtgtacaaatgtgtaatggtggacagtccaccgtggtactt

SEQ ID NO: 319739 - DNA, 1365 bp, Cannabis indica
gcaaacacttggccaacgtgtatttcaacaacatgaagatttaaaattatttaatttggttcggagctttcttccattaatttttgagtttgtttaatgacatattttgctatctttgttgcatattctgctcttgttggtagcatttgccttgtttgtaactagatttcccaatataggtatagttgattctagcattgtgttcattgcctgttggtgatgttcatatgttaaccaaaataggatatttggtttcatcatcatttttctttcgtatttgttcataaaacttgcatccaccatcatttttgattcttattggaggtatgccttctctaacttgaaattggagatcaatctcatacttggttttgtccaaatgcaaagcatcatatattatgtgagaaagtttatagtatgaaaaaatttgatgaaattagtataccttcaacttcatagtcaacgtatgttgttctcacaactcaagttctattgtaaaaaagaatcactattctaacatccatattcctgcgttgattttttttttgtgaaatttttcgtttactcatgttatgtttagtatacagtaaaaaaatgttcatggtatacaatctaagaaaaataaaataataaacatgtgacatgaataggtgtagcgtgaataaactaagacttacgatatactataaagtcgatattcaattgtacaaatgagcagcatgcattttgagctataataggggagcgattacaattataaagggttatagtttattgttaacgtaaaagtacttagtacttaacaaagtttacatgattgcacatagtgatttcattttaatatgatgcattttaactctttttagtaatcgaattgtataatgtgttatagtataatgtgatttcattttaatatgatgtattcatgattatttgtatattttacctttttcagtaattttgagatctagtttttgatgtcgaacttgcaatcgtagttctcttcgtcgaagctacgggcttttgtgattagcagataggtttattgatcgattgaagtattgatcaatttagagagatgatgatttgtttgttgtatacaacaacgaacctgtgttgtatcttcttctctaattttcaaatctaccgagttcttcgttaatggaattttctcattcaatcttgtttagtttgtgttttttgaattcatttttatgatatatataactttctattttaatcttgaaaaccatgcccagggaaggctaagaaaagtgcagttatggacgcgtcacttttatcgctggaagttctaaaattatgtcggcatccacaatattaagggtgttcgcggtgcgggtggtg

SEQ ID NO: 319740 - DNA, 1698 bp, Cannabis indica
agcacccagcgctcaggttgacatacggtctggtgcgttggtttttgcttatctaattctgattccgtctcgaccattcatctagtttttcatagggaccaagagctatgaagtcaaaagagtcaaattcactactttatatttttaattttctagaaaaatcacttacttagaaatagggtagtttcactagaacacaaaaactagctaagtgatgtcaaaaaaaacaacttaggcctcagaaaatacacccctaacacgtttttccacttacccagtatccaggttgacgtcatatgtcaacttaggcgctggatgtcaactcgagtgtagggaacagaacaaccttcagtaaaacggtcataactcactcaatattgatctgattgatgcgattcaacttgcgtttcgaaactattttaatgctctatcaagtcatgtctcatactccaatcccatttctgaagctatcaactctaaattttatcctcaagagagttttgaatttaagctacaacttactcgaaatggatccttcagacgggactcaatctccagaaattgatgaccgaccttcagagtcaatttaccgttagatcatcatcaatggtcaaacatatcctaaacgtattttttttcatattttttagaatattttattattattttaatatgacctcttataggagagctcctctagctcattttgcacattcataaaagtacccataatgtcgaagcatttctctctctagaaattagagcatccacacttaactattttcctgtaattcttgtgagaaataaaaactcgaagtagacgtagctccattaccattgcaacatggagagtgagctactataaattttatgtgtctttctaaattatttacttaaattcattattcatcacgccaatttaaaaaaatggtattgactatttttcagcgtctataattataattacttcaattttaaatatataattttgctcaaataataacttgtaggtcatataactatacattaaaattgaaattatgtaaggagtttattattaagaaagttttattttaagtctaacataagggtattacaatttactaattaacttagaggtgttcgattcaaactcatgccttttctcattttccaatttctcttttaccactgaagtagccacagtcggttttattattaacaaagttggaaaaggattatttatcattgaatagataaatatcatattaatgaacaaatcataataacaaagtaccaaccaactacccattaccaacttggtaactaaccagtgatacattattagtgtattattatatataactagtggagtctcacgtgcttcgcacgtgtggcatcgaaaaatatctaagcacaactattttaaaaaaataattaatattttatttacgaaatttataacattattaaattgtatcctctaaaatatacatcatggtgacaaaattttgtaaactcttctatttacagaaatatagtacttttgttaacttttgttcttttttatcgtttcacagtttatgtatcgttgtaaattaattacttttctcataaacattgaccactactaaattatatctcttcttaaaaattaattaatttttttttctaataattaaaaaaagccaacctaaaatatattattgttgatttaga

SEQ ID NO: 319741 - DNA, 1804 bp, Cannabis indica
tgttaggcaatacgtttcatttacatgagcagtaaagcataaaaaagaatttaattccaagttggacccaactctcatggtctagcttggccagaacatgtacaagtcatccttgaagccatcaaactcatggttgacccgacactgctttaaacttgcctgcaccatagagaacctatgagccaaggcctaacaagacataaaataatacaatattgaacaattgtaataatataattcatacattacgcctctgcgtatataactgtgccaccacactaaatattacattatttcatatataataatattagtataactaatgtctatatagcatagacctacgtgttacgctcacacgtctcttttccatttaaggccttactagggtttatctttgttctagttatcgattctaacctagttatgtcttactcgcataactttactcaattattcacataagatactattgcttattcatgacaacatatacttagggtaataaccctcggtttcataaaataatcacaccttatataattgcgccaccgtgctatactctatgtgcttatttcaatgtcttacctaatttttaatgtatatggagaaatcccaattcataggtgattctgaccaagcatcagtatttctagtcacaatgcttgggtttttacacaataaagttaatctcaaaatcacattcataaatatctacatataagactctaacactggaccaaataatagagcttgaaatgatagctttccaacaatataaagaacatccaaaacaaagtttggagtcaaaaattatgcataaaataaaataataaagattacattgtcgtcgccatctagtcgctaccaattattatcacgaccaaattaaagctcgtcgcaaccagagcctaggtagaggctatccatgttctaggtttgagcctagtcgcaacgacccaaaatttggtcgcgacgactgggcttaaaacaaaaacaaaaaaaaaaataagtttttacccaaagccgaacttaaccaaaccaattccaaacttttggtttagtaattgctttctaagccaaattaaaatattttctaaaaatctcatacaacaattaacatgcttaacactttaaataatacaagccatcacacaaactaaatcactccaaatatgaaatcataacaaccaatcatacttaaacatactcaaagcttcacaaatcatacaatcctagctttgaaattacaaataaatgaaaactcaaagttccaagaaaatcaactaaagctcatgctcgaaattcacataatttacagagtaaaaagaccaatacttagcttaacaacctgattttaaatcaagaggtacaaaactcaattaaagcctagttttccattttatatatcccatccaaccattaacaaagaaaacatgaaacttcctaaagaaatccaattttcagttaaaaaaaaacaaaagaaaaaccagaaattacaacaagtttaaaggtgagaactacctcaactacctttcctcaagcttcacaccataaataccaagaacctgctttgatttctcttagaaatttaatttcaaacttgagatgaagaaggagaaaaagggggttcggttggggcttcaagacgtttctttctaatttttaaaaatgaaaagtcataaatcaatgggaaattttatttacacccaaaattttctaaaggcaccctattttaataatttttattttatataaaatttatatctttaattgtactaaatttttttaactttttttttcc

SEQ ID NO: 319742 - DNA, 1066 bp, Cannabis indica
gtactatacacatactgtacgtctgttttaaatgtgaaaaatccaagcacatattacattaaaattacattaaaattaaatattactcttcatttaaatttaagactattaatatatcattcttacaaatttaatgtaactatatattaaaaattaaaaaaaactgtatatatatttacatattttattatatataaatattataaatattgttttggatccattttcgattgcaatttgaaattgataacatcaataactaatccaatctaattacactataattttaacatcggccaatccaatatttttttaatacccctattttaaaatatcaattatgtaggtctatatatgtgatctggtaataaataaactataaattttcgcactcctttgaatttcaaaagattaataaagattaaaaactataaattcaatgttattaatataaatatgatacttatatatataagtagtgctcaaataagcatcaaaatctctagaaaatgttatattccttcaacggaatgcgtacgtgtcagccattataaatatgcattgtgatgcatgtatacttgttttttggattagcagttcatgacaacacaagttgataatgcttatatatatctagtcaaaaaaagatagcgcgctactactatttacgaaacaataaattataactaattaataatattgattagtagtacatatgcatgtatatataaagggtaaaagaggaaaaatattgaattataattggtaagaagttatacatatatatgaattaagaagaaaggaatcatgagctcgtgatgggagtgtgaagtgaaataagccatcgaaaagagcgaagggaagaaacaaaatgatgtttagttgtgatttgggaatgcctccaaacactcctcacgggggcttttttaggccatatacatatctcatatctctctcttctctccttcatcatcaactcatctcccccaccccagcttcttcttcacactctctctctctccacccgtcactctcttgtactctctctctctctctctccacacgt

SEQ ID NO: 319743 - DNA, 1200 bp, Cannabis indica
gagttttcttcaaaaaaaaaaaaaaaaaaagaaaaagatacacatccattaattgatataactgctctaaaggactagagaaaaagaagaagccctaaattttgaaagctttggcaacatatgctttaaaatagaaattttctaaaatattttaaaaaattaacaaaaaaaaacacgctatattaaatattttcaactacttctctattttaaaattttttaaaatttaatattcatgttatacgtttataaaatattattcattgctctaatgacatttttactaataagtaatgggaattaatggtaagagaacttaattaaataagggagaacttcccccaccaattttgtaaggaatgccattaagggtaatgaattttaattatttttattttattttttaatattaaatatataatgacaattttgtcctttaaaatatatcttacaaaataactaccatataatatagtttaactcaaaaggacaatttagtcaatttaagcattccgattacgtttcctaataaagtaaacaagataaatcacaactattccattttcaaaaaaatttagtaaacaacatattacaaatattgattccgattatttttcatttattccgttacatttctccattaatttattctgattctgaatactgtatagtaaacgtgccataaatatattgctgacggtgagaacttgtcaacgaattaatgatcggaaaactaacttatacttcaagctcagaaataagataaagaggaagatataatatgaactcaaattgctctcttgaaatagggagaataatggataaatttctattactcttagtatggctttacaagtatgattttccgacccttttcacatctgaaatgagggtatttatagactctaatagcctggtgtacaaagtgatcccatgtggataagatgtcgctttcgcattgcatgttgcaggtgctggaggtagtctgacacttcatacccttatctggtgtcaggtggtccccagttgtagaagggtggtctccgggtacatgcgtgtggtctccagctacatgtggggtggtcctcgggaggttgtaggagagtggttgcagcgtatccttagtcgggtcatcaggtgatataccccaaaatgtgacttcccatatgcttgtttagctattttgtacccttgattcac

SEQ ID NO: 319744 - DNA, 4429 bp, Cannabis indica
aaacctaacagcctaaacctcgacctggagcaaaatcaggacacgaacctagactcggccacaaacttgacccgaacctgtaccccatgacttgaagctagaactgaaataagaagcggatcgggactcaagaacaggaccaagaccaggacctggacctagacccaaaactgtaattggacaaggacccagactcggacataaacccaccatgggattgggtcccaaacctgaatccaaattcgaaccgggactcgggaccccaacccagacctgaactcagacccgaacatggaataggactcgtgaccaagaattgggattgagaccgagaactgcaccaaagtctcactcccggagctaaaccgagacccagatcgggacctggtacatgaaccaaaacaagagtaggacgtgtgattgggatctagatcttgtcccaggatcttgaaactggggcttggacaagacccatagtcggtgtcttgaactgagactcggagaaggagcaaaagttggaccaggacctggacccagacacagacttgggacctgaaaccaaaacatgaccaggaccctggaacaggatcgggatcgtgacgaggacctgaacctggaccagaacccggaactagaccaaaacccagctttggaactagggctcagacccgatcctagacccagtgcagaaccaagactaggaatgagactctaacctgaaccgaaacccaaactcgggactcgatctctgacccatacaaagcctctgacctaaactgggattcagacgtggacatggacacgaaccaagacctggacctgaaaattgacccagaccccaactgggatcgaaacacgggacctggacccggactagaccccaacctatgacccaaaccgaggacccgaaccttgccccagactcagacttagacccagacccggatccaaaaactccgtacccaaacttagatgaagactcagaccccgaccccaacatggacccatacccagacccgaagccaaacctggacccagaataggaactggaactgtgattaggattggacttgagaccagaaccgaacccaaaccctaacccatacttggaccaaaacctggaccgataccttgactaggactaggacttgagacttgggacctgaacctagaccgagacctgaagtgggacctggtgctaaactctcgccgggacctaagacccgcgagcaagacaaggatccagaccctgacaaggacctgaacctgaactcagaccaagactgggatggagacctggacccgaacctagaccgagacctggactactaccaaggcttaggacccgaacctgaatctggacccagaccaggacttaggaactagacttggattgagcaccaagaccagggacctaggccatggaacctagacccagatctaaattcgggactcaaacccaaaccaggacctgtcttggacctaggaatcagtagtaagacccagacaaagacccaaaacctaccccaaacccaaaccatgacaagaacctgaacacgaacccataccaggaccaaacccgaacccaaactcgaactcaaaattggacctaggccatggaacctagacctagatctaaattcgggactcaaacccgaaccaggacctgtcttggacctagaaattagtagtaagacccagacccagacccaaaacctaccccaaacccaaaattggacccgaatttgggacccaaactcagacccatacccagaatcagaactaaacctacgcctgcactcaaacccgaactcgaacccaaactgggatcgaaacgtacgacttagactcaaaactaaacttggacacaaattgagaacgagaccttggactcggccaagaacatggacccaaacccggaccctaacccacacccagagcccgatccggacctagattgagatcctgacccaaacccaaactcagaccaggactcgaacctcgacccaaactcgaacccaaactcaaagtcgaaattacaattggaacttgaaccggactaggactaagaccaggactaggaccaggacctagactcgaacctaaacccaaataaaaacccaaaccgagacccaaacccaaaccgcgactaggacccaaactcgaacctagatcgggacccaaacccagaccagatttgggacctggacctagaatctggatagggacctgggcaacggaactaggaccgcgacccaagacccgaccctagacacgaacatgaaactaggacctagctcgtgacctgacacccaaaatggaatcagaccaggacccgagaaagagatccatatctagaccctaggcttggaccgaacccatagtcggtgtttggatctaggacttagccctggacccaaacccaaataaggacccgaacctaaaccgagactcgaacccagtcccagatccaaacctggaccagaacccgtaccctgtgacctaaaattggaactgaaactagaagtagactgggacccgggaaagagactggaaccaggacttagacctggacctggaaccgtaatcagacctggacatagacctagaattgtaaccagactaggaccaagactacaacccagacctagacccaaaccgggatccacacccaaatctgaaccgagacctggactaaggacccaaacctagacctgacctctgacccaaacaaggaacagactcgggacagttttatggttgggacctagaaccgcaccccagtcacggtcctgaaccccaacttagacctgggactcgagacctgaaccaaaaccagatcgggacacgtgaaagggatccagatttgggactcaggccaggacccaaacccagactaggacccaaccccggaccctgaccctgacccgccagactaggaccctcgaacaagactaggacattgactaggacttagaacaagacctaaaatcgaactcgacctagtcccagacccaaactaagaccgaaactcgggcccaaacacggtcctttacctataccgggaccaagacccacactcgaacccggacaaggacctagacttgggacccaatccctgacccaaactcagacctagataggaatctcgatatgaacctgcactcaaagccaaacctggaccaagactgggatcgaaattgaagacccagatcaagaccgagaccctgacctagactcaaacctggactcgcacctaggactcgaactcagacctgacccaaacttagacccagacctggatttggacctagacccaaacctggacctagactcggacaaggactcaaaattgactaaaacccgaacccaaactttgaatcaaaatctaaattgggacaaggacccaaacacgaacatggacccagactgggacctaggacccgaacctgaattggggacctagacttaggcctcaagtccagacccagatcgaaactcgagactcggacccaaactttgaccaagactcgaacctagatctggacccaaatcgagaccggaacccaaacccaaactcgaactaggacttgaaccccgaccaagtcttggactcgaatcgggacttaagacttagacaaggatgtcggggacctggactagggacacgagcatcagaactgggatcgagacccaagaccagaccccagacccaaatcctaacctaggttccagactaggacctgggacccgaagtggaactagactgggactcgagatcgtgatctagatcaggaccaagggcttggagctgaaccgtagttagtgtttgatctgggacccatacccggactcaaacccaaacccggactcggaccctgacctagacccagacctgtaccccagacctgggtccgagttctaaacagggtttgagttcgggaactagactctgactaggacccaaacccaagacccggacaaggatgcagacccaaatcaaaacttagatcggtactcaggtactcctggtcggcatatttgcttgtttatcgttcgatattccgacaaaacactcatcttgtgtgttgtcgggaaaacgaacatcggatcgacaaggacctacttcaacttctgcacgaggatcatcctcgtctttgttctagtcaaccttcctctagcgaaggacattcttcaaaccctgtacccatccatagaatgatggctcgtacaaagaaaactacgcatctggctgacgcgtctgaccctcaagtggctcagcatgccgctctgcccagcaccgaacaggatcatgatggggacgctgaggtctaagagatcgaggggtaggacgatgtacgtcctgacagttcctccgaggaggaggaagacgcagaagttgcacccccaaactacggggagtacaacg

SEQ ID NO: 319745 - DNA, 616 bp, Cannabis indica
gtttcatgtaattacaatatgtgataaaatgcataaccgtctagtaactttcattaaattttattcaataaatgattatttcaccgagaagtcttcctacactgtgttactcgcaaataactttagcagttctttatgtggattttttaaattcgtctcgcattataaatgttttatatggtgactcatcttatctttgaatatcctgtattttcttttgtaatttgtatattttgtactcggttatttccaaagtgatagcgatatatgccattttgaatttgttaattttctatttataacagttaatacttttaactcacttttaattattttttaaggtaaaacttaaatataaaactattaatggtaattttggagacactttaaatgccatatttgtttcccttagatataaaaatttttgtacagtaaatttataaatttttgctcaaaatttaatatttttgtaaatacttcttctcttttttcttcactaaggcccaaaatcacaagctataacattaattttagagtaaattagactctataccctttttgtactgtcttcttttattcttaccctctttttaaaacttatcatttttacctcttt

SEQ ID NO: 319746 - DNA, 744 bp, Cannabis indica
accttgtaaaaattaagagtttagaatttctatcccgaaacacttttcatttcaagtttgttatttatttgtacttgtatttatctatgtgattgccttgaatttgaaaatttgtataaactatttttggggtttttaaattttcaaaattagtttaaatttctaattcacccatctcttgaaaacatatcttgggctaaaagttttcttgtcgttgtatatgtattctatagttgttttctagtttcactgaaacaaaatatttctataattttgaaactttaatctagcatatttaaaaaaaaataaatttctaaaaatattaacaaagagtatgacagtaaaaatgtaaaaacataaaagaaattaattattttttgtaaaaactccaaaaaattatggtataaaaaagtaaatccttcaattttttctgcatcatttctacttaacaacaaaaaggaaaatttacacaaagtgttatattcggtaaaaattttatacttttatgttctaatatatatttatatttttgttttataaaaataacatgaaagtaaacaagaaaataacatgaaaataatatacaaataaataaaaaataaccacaaaataacaagagtacaatataaaaataacatgaaaatatcaaaagactatgaggctgtttggcttcatcagttaaaattgaaaacattttttaaaaactaataggggttgtttggcaaaattttttaaaaattgagt

SEQ ID NO: 319747 - DNA, 2023 bp, Cannabis indica
tgattgacacgattcaacttgtattttgaaactattttaatgctctatcaagtcatgtctcacatttcaattgcaattctaaatatcggctccaaattttaccttaagagagctacaaatttaagctacaacttacctagagcgggtccgccgtcgtaacccggactctgaaagttgacaatcaatctcagaagttaattttcactgttagttcatcatctacagtcaaaaatagccaacttgaatttttttcatttttttattcttactttcaaggacctccttcacttataaaaggagagctccactagctcatttttcacattcagaaaagtacccataaagtcagagcatctctctctagaaattagaaatttcacactaagctaattttcttgtaattctcttaataaataaaaactcgaagtagacgtagctccattaccatcactacatggggagtgaactactataaattttgtgtctctctaaattatatacttacattcaattttcatgttgtcaatctagcgagttggtgttggccacttttcaacgttaagatattggtactttcattgagagccatagctcgagttccccaactacattttgatttctttgctcaaagctttgttttgaaaggaatacataagtttaagcaagtgatcatccatgaacacacaaagtaacactaccacttttggtagtcaggctactactcagcaagcagcatgcactaagattctccataaggaagcaaactgcaactgagcatttgaaaggacttgaactcgggtatgtggatctatgggatctctgctcgatatggaacagtcgcttgttagggaaatgagcaatgagctagcgtccaaaagtattcagactcaagatcgcagtcctacaagtccaccacacgcagttgataggaccaaccacaattttctcaaagcaattcgaacaatgtggggaactaatatcttccatgggattctcttcacaagtataatgagcttataccaccccgtgatcctgcaaagggaaaggggcctgcagtcacacataggggaaaaactcaaaagctctaccacgaaagtgaagagtatgagtttcatagggtgaagatcaatgaactactccacaatcagaattacttccatgatgaacggggttcttggtgtaggtactttgcccaaggtcctgacgaccaacagtacgaatacttcccatgggtgcttggagacgtgttgaacttgagcaatcagttcaactccctccatacatgtaaatctaaagaagactattttgaaaaaaaaaaatagtcagtatagtactgcgagcaactgctcatgaagcaaacactcgagagatgaatctatcatcatacgggataaatctccataattgctagcaaggccacacgaccaagaaacaattacaagacatatgtcaatcaatgcctttgatcgacttggaatacaaaagagcctgcataacaacatcaataggaagtggcgagttgatacacgcatccccacacatggtgtgtgtagggccgaattcgacagcgttgctgctttggttaaggatatcacccttgctgctttggttaaggatatcacacatgatgtagttgtcattctcgtgttgctgttgtggttctatccgtgggtgtggaaaatgaagactataaaatacatttcttcttccttctctatggttgtttttggttttttttattctggttcttttataaatacatttgacgagctgactagaaaaaagattttaaagtgtgtggttcttttatgtttttctaagtggttattgttgcccctgattttgcccaatatacgtggaccaaccagacgaggacacgtggatcaagcaagttacaaaatctgctaagtctttgtgccgtaaggcagcgtccaggacgtacctcccggaggaggcgtatggaaccccatatgctcccggaagctcgagtaatgctaaggcatctccgcgaggtgtcaggttt

SEQ ID NO: 319748 - DNA, 1446 bp, Cannabis indica
ggtaaaagttacttttactagcgcagtagcgaactgtgctgataaaagtgacatttcttgtaatgaataaataagaatacttaatgtactaataagaaaatctaattaataacaaaattgaagatttcaataatgaaaacaaagttgaagaaaatctaattaataacatatgagtatcaatttaaattatatatggcaacacttattttgtaaggtttacttggatttttttttgtactatcaatgaaaacactcttttaaaagtgttagtattggttattattatttggtctaaaaatattaaatttttaaatatgtgaattctttagcaacacttcttttttaagtgtgtccaattacaaaagtagataaataagttacactttttaattaagtgttgtttaataaatgttgctaaatatgttttttagtaggtggatacaaggaataaatatttaatggttattataataaagtagtgaagtattggtattatatattgagttttgagtggttattgatttagtatacgaaaataatttggtttaataattatactcttataaataatatattatttattttataaatatatttgtaccactcggacacgtatcaaccaaaggttcaacctttaaaagtagggctgcttgtcgctcaaagcttgttcgtttatgagtaggagtttgtaatatttgtctggcaagaaacgggttggtatgcgccactactatgctcggatgtaggagacaagatctaatctttgttaaaaaaaaaacataaatgtcactttggttacttggcatgtataaaaggtcgacatctgcgacatctcaagatggtagacgtccgtgttaaacctttcaagtacccatccgggtaaggtcttagtgagcttcccttctccaacccctccgggtccgagaaaggtagttcgccttccacgtccgggagtgtaaagaccgcatatgattaataccttagattattaaataattagggtttatgtaagagattttgttattatttataaaaaaatacatattatgagaatttattcgagttcatatatgtttattatgctattttgtgtaaattacttaatttctgtgtttgtgttcggaagctgtggaaagcgacgttgggccttagagagtcgcacttatatgtttagaatatttatcggggtgttattgttgggtattagaggtattgtaaattggtcaggactcgtataatgtttaaactacccttgggtgactttgaatatttgaaatatgttgagggcaaaaaggtctttgggtaaaactttatttgtcttatttggagttgtgtctattgctgaatatgaggttatagattttagaaagaaaagaaaagaaattcatttgttttgcttaagttagaagaaatctagaaaaatcttaagagaaagcattcaactct

SEQ ID NO: 319749 - DNA, 1132 bp, Cannabis indica
aaaccagtttcttggtgattttttcggcgactatgccaattccgacgacttttctaaagtttgttgtcggtgtcggaaaagttgccggagtagctgccggtgtcggaaaattcatcggaattagcattgtcgccagaaaaatcaccaagaaactggtttattcatcaagaaaccggtttcttcattaagaaaccggtttcttcatcaagaaatcgggttcttcatcaagaaaccgagttcttcatcaagaaactagctttatggtgatttttccagtaattttttcgactacaatgtcaattttgatgaattttttaacgtcggcagcaactccgacgattttttcggcaccgacagctactctagtaatttttctgacccagacagcaaattctggtgacttttacagtatcagtgacaaataaaactgtctaaacaaataaaaatattaaatatgagatttgaaaacataatttacatatatatgacatattaaatactataaaaatacctaaaaataaaaaaaataccatataaattagttaaacttaaaaatgtcatattcaaataaataatttttaaaatcccataataaaattcacacaaaatattattttaaatatcaaaatgtatagatgatggtgcatattattttttcaaaattttaaagtttgtatttaattatttgattttatacatgtaaaatatattatttaaattactctttctatataatatattattttatatttttataaaatttattaaatgttttaactaattataatatacattatatatcatcataataaaaatgcatgatagaataaataggattcgtactcttgaattatagcccttgtagcatttttgttctttatttttttttaaaaaataaattcctctaaactataaagtattgtaaacacatccttagtaacattctacttattttgtataaataatttaatgatatagcaatattttttttaaaaaaaattataagtatcatagttgagaggaaaaaagtcctattaatagttatcaaatatattatgatatctatataaatttatatatctattctatataaagtatgcctatataactgaattcttacgtttatgagaaa

SEQ ID NO: 319750 - DNA, 977 bp, Cannabis indica
aattaatagtgtgatttaacttaaagtttaattaaattaaatacgttctttattattttttacttgtatatatacgtgtgtatgagataattaaaagtttgcacgagtctttgtcgagataaatgaaccgcccctagcctcctataggtagtgccctgaaagaaaaataaatcaatggatgcaaacaaatgtaggctatatatatatatatatataatactgtttttttttttgctatgatgttaaataatgttaatattaatgcaaatatatatataaataaagttagtatgggtaggatctgaaattgttgacttgtagtccttcaaatttgtaaagagatatgtaaagagatatgttatctatattaatctatatctacttttataaggttagtagaagtagaataacttgagctttaactcatgtggtcaagactagctatcaacgctattaatgggaaggtgatttattgggctcttcacaactatgtcttctattgtactaagtcttctccttatttcatattttataacttttcgaacattagtaggaacagtaactttgcggcccataatgtgaccaaatgggcttttaaccgccaaatgtatggatctattccgatccactccttaccggagaatattttatgtaacgaccatgaggtctagtttattttaatatatgaaaacgcttattttcaaaaaaaaaaaaaaaactcatgtggtcataggagggtgtgtgttggaagtcttgagtttgagtttcaaattatgcaatgtaatatataaatactacaataaaaaaaaaattagtagaagtagtacggatccatatttaatccaatcatatagatatatatatactagtatattgttacgtgcgatgcacgtatgttatgttttatattaagtattatattatgagttcggaaggaaataaatgaataaaaaataaataatatttaatttagagag

SEQ ID NO: 319751 - DNA, 1133 bp, Cannabis indica
tacaccttataaatgaataaattaagtctctaacagctatatttttaatagctatcattcattcacattcataagcaattagtaacatcttttttactaatttaagagtgacaaagatatgagggttacatattcaagtgatcctcaaactaaaaaatttgcaattcttatttttttgatcattctatagatattttgtaactccataatgtatattttttttttgctgaaaccaaaacttcattaaaccaaagaaagaaaaccagacaaaaacaagatcagtcaagagtagcaacaaggggtgctacttccccagcacaaagaaatcgagcaatgttatgggacgtagcccaagcaaccacattgtgagttacgaagttatccttacgagggatccaaaacacacaactcttagcatcaaaattcagagaagaaaataaatgcataaaaagattagtaagcttccaagagggggtaaaagactctctcacagcacgaactatagattgaggcaatccaagaagaaattggcatccttgcaattcattctcgtacacagggagaaagcatgacacagagcctaacactcaacctcaaacgcagaaccacaactgtaatatctcgaaaagtataataatatttaattaagcatattttaataaatttgtggttatacgaatattggagtaaaattataatcttacttaagctaattataagttaattagtgtaaatctagtaaatgaataattaagcgtagtttatttatcacagaaattttattggattatgggggtattgtaaataccatttttgaaataaaatattttcgagttcggcgaccgtgaaaatggacggagtgattagaaatgtcacgacattagaaattgtgttatattggaattgtaccggactattttagaattttaagtagtcggtttagtcggaatagttaaaaataaccatagtgcccttaaattatgttttttttagcttagtagtcttgaaagggtaaaatagtctttcggaggggtttaaattttggtcttattttgacttttttaggctgaaatggaggttatatcattagatttatttcttttgttttattagttaggttatataaaatttaa

SEQ ID NO: 319752 - DNA, 879 bp, Cannabis indica
ttcagggggcaaaaattataattagcctaaaaacaatgacaaaatcaacaaaactacaactaagaatcagagataaaataaggtagaatagaataattaaaatcagaaacgattaaagcaagaaaatagtaaaaataacaccaagatatatactaattgaagtcctatagattgatgtgatctatgtctctactccagttttagaacaccactaaaatatatttattgattgagcaagaataagggtacattacagttgagatcgattcactgttaggattctctcaaagtatttatctctcacactcttacccaagaagcttcttcatacaaatccaaaaactcaatctctctcttttctctgtacctatctctctctctaactctcaatctcactcttgacctttgctctcaaaatcatctcctatgttgtatttctaaagacgaggattgtggtatttatagatttaagaaatgaatcccaaagtcggtggttgcaacaactaagttgttaagtcagctacgacttaacagacttaacaaactccttgtaacaagatatccatccagctttggtgtgagctctctggatgtaaagcatgcttcctagacggatgtcccaaacagatgaagtgtgttcatgggaggattttctggatagattcaaagccaactgaagcagacttatccggaaccctcttccttgagggaacaactagccttatggaaatcctttccgaaagatgatagcttccctaaagactaattccggagtagacacgctagacttctgaaactactttatggtcgacttcttacttaccacgactccttccaaaaatatttttatttggaggaactatatgttggaatttattt

SEQ ID NO: 319753 - DNA, 2792 bp, Cannabis indica
gttaaatagttaaaattgacactattaactcaatcaattaattatttttttttaaaaaataattttaaatatttaaatttaatttaaaaatatcaacaaaattaaataattattttatataaaacttaattgaaattttaattagatattgttaattcaaataattaatcatactttataattaatttattaattatattatttaaaatatttaaacttatttactattatttaatataattagttggatatattttttataaataaatttaaaattaaaataaattttatatatttaaaaatataattgaatggtgttaaatttaattttattattattattatttaatttaataatttagtaataacaaactctaaacaaacaaacatgtatatattaataattgcaatctatatgtttaaaattaaaagaattattatgtataagtgtgtaatattaaattaatcatttatgtaatctatagaagaataaataggactataattcttgcggagtttttcccctcgaacgttttttagttgtaaaaagtctctctcaacaacaaaatgtctacatataactccctccgttacattttgcttattttttgtaaataatttattaatgtaccactaatataacgtcaatatagtccagtttaagagtctccacaaaaaataaatacataaataggagtttaataataaattatgatgatatgtaaatgcaatcttaaaattaatatttatatatataatttcaaaaaaagtaattttcagttagctcaaagttactaaataaataactattattataacgcatggccacataaacaaaatattttaaaaaattcgcagaatgtaattggagaaaatatttacagcaatttatataaggaggaaaatattttgcaataatttatataatttatgtggtaaaatcaacttattctttataaaaaaacactatattttattctatttgacattcataaaatatattgatggtttgaatgtttattgctatcaaaaaaaactggtctacatttaggtctgactttgttaatgttgcccttgattttttgaataatgatgttgatttctcctacatcaattctactttgatttttctcattcctaaaatacaacatgtgataagcttcgttcgattattcttcagttttggtggggtacgaagaatgataagcggaagattgcttgggtgaaatgggagagtgtgtgccagccgaaatctaaggggggtttaggcttcaaggatcttgtcctatttaatcaggctatggttgctaaacaggtatggcgcttgctacaatcgcctaattcattgcctggtcgggttttgaagcataagtactttcccaactcgtctattttggaggcgaaagatcgccagggttcgtctcatctgtggtcaagtttgatgtggggattggagttgttgcaaaagggaatgaggaaagttgtgggggatggccggagtattaatgcttttcgggatccttggctacccagggctaaaacgtttcggcctatttcaccttcttcgcctagtaatgtgatggttaatgaattgattgggggggatggggcttgggatgtccattctttgtctcaatactttctgggattggatatcgatgttattcttagtatcccgttgcggcatggtctctgtcaggatagatggtgttggcattatactcctaatgggtgttatactgtcaagagtgggtatgcagttgctcttgagctggtgggtgagagatctggtagctcttctgggaatcaagcacattggtggaatgggatgtggaatttgagggtgccacagaaagtaaagattttcctttggagaatgtatcatcgcgctctttcgactaattcccagcttatcaagcgtaagattcctcttcagccgatttgtcaaaggtgtggtgaggaagtggagactccggagcatgctttagtattttgcccttcattgcgacctctgtggtctaaactgcggatttggaataggctcaatcgtggtaatactggatctttggcggagttgttggtgtttctttttgaggtacttgatctaaatgcttttactttgttggctatggtgtggtggtggttatggtttgataggaattcggtgttgtttgggaagaagcaatctcggtgatgtgattgatgatttagctcggggtgctttggaggaatttcagggggtgggttcgggggatggcggccggttgttgggagctgcggcctcgggggttgtgagggggggcgggtgtggggtggagaggcggcctcagtggtgtccgcccgggagaggggagtttgtattatctgtggatgcggctgttgtcccggggaggggtttgtggggtttgggggtgttgttcatggtgctgggggggaggtgtgggcggcttcggctatgggagccgttggggatttcaaggtggtggtggctgagcttctggctatccgagcgggtcttatgtgggctaataggctggggtacaagttggtgcgtgtggagacggattcttcgattgctcattcttggattacttgtccggataatattcttatgtttaagcctattgttgaggagattatttctcttttagcggctgttggtggtggttcttgttgtgccatttcgcgtgatgcgaatggtgtagcccatgcactagctaagtctgttactagtcctttaggggttcatttgtggacagatgcttgtcctagatttattggtcctcttgtaa

SEQ ID NO: 319754 - DNA, 854 bp, Cannabis indica
tttcatgttatttttatattatatacatagatgctattgaatgcttatatggtatcggtgatattaatattgttgaagtttgttataaaaaaaaaagtcatcaaaattataacaaattagttagtattgcaattttttttttttataaaaatattttagtttattgttttttttttttcacttattattaagttttgttattttttatatatagttcggtcacattacaactaaatataaggagctgacataacgctttgcaataatttcattctactttattatttttacttttttttttaagtaatattataaatcttaataaaaaatcataacaattttaaataataataactttttcaggttcatttttttttttaagtaatattataattcttaaataaaaaatcattacaattttctatttattatcttgacctcttatgttcaattttttttttcaagtttttgagaagtttattaaaaagaattttctaattacatgatattatcttaaaatttaaattaattttagttacattgtcatttattgataaacaattacatgtgagatacggtgatgtgaacaactttaaatatagtgacgagtgaaaatacggtgatgacaacgacttaaaatattgtgatgagtgagatacgttgataacaactattttaaaattgatgacttttctataaatttatcagttgttatatttttttatataaatttaatctcaccaaaataatatttatccaattactagaattcatgattctaatttaatttatgatatatatatatatattgaaaattgactttataaaaataatatatctataataaattaatt

SEQ ID NO: 319755 - DNA, 2699 bp, Cannabis indica
ctttattgatgttgaataaaatagattacattgaaatggagttttatttagggcataaaacctaacatctatttggctaaaatgacttatgactgaactaaagctacttaaaagagtacctattgtatatttagatagccaaagttgcatatttctatgcaaaattctttgtctacccatatactttcacatttaactatccagataatatttttgtatcttgatttaaaatatagctttttgtctttatatccttttcaataaccttcttgaaattattttcactcagttaaaatttctcaatgcacatagccaaattgaattagaaatttaattcaaaataacacaatttaatcaacaatttctcaaaaaaaaaaattattaaactcaaatctcaactccacatttctaccataaggtaaaattttatcactttataattaaatcactttattttattttattctcaacatagataataatgtactcataatctcaatatgtcaatataaaaaactattttatttttacttttctctttatttgcttaaaaattaacacaaaaacttgaaaaataactctcttgaaatatttccaaaactcataatttgaatgtctcaattaaaataaaaagtgaaatttatataagaattactttttcaccattagttatttaaataatctcaatattatatagacaacttaatatattttctaaaatgtctctttgagattagaaaattccatttgacattcatagttttctcaacaaaaataaaatattaaactcacatcactagtcacaaaatagtgagaatattttcacttgttattttaaaattatctcctcattgagagtaacccaaaattatatcaaagtcaacaaaattaattttgttcactatgatattttgaagacaacttaatatactttttaaaatatcattttgagatcattaaaaaattgtatttgacattcttagtttctcaacaacacaaaatatcaaactcacatcattattcacaaaataattattgagtaaattccacttataactgattcttatacaagcatcgacatcagcatacaacattaaaaataacagaacaagaattaaacctagtggctttgcctctacaagactagaaccagaaattagttaactcaattgtaactaacttccagctcgatcagctcttactactactctataaataagatacaaagaagaagaaatttattgtataatcaaagacagaaaaagaaaaccttgtgttgaaacttcagctccaagatccaaagagaaagggtccaggcagagagtaaaactctcatggtgaggaggttgaaggaagagagtacacgcaccaagaaaatggagttagatctagaagtttaagagaagaaaagctgcaaaagatgaagtaatcaagtcttacctgatcgattcttgtgataggaagctccaatagtggaaactcaagccaaatctctgagacgagcttcccagagatgtagtgaactctaagataatttatggtgttttctctccctttctttatttactcctttaattcttaatctttgttgtgtgctcaagaacttgctctgctagggttttgaaggctgagtaaagtgatttgtaagtgttgtgttttgtgtgtttggacttcgagactcttcttgaaaagtctcttagtcagtgtgttaaacaacacagttgtatgtggtcgttttgttcttattgtttccatttgtgtctaagtaaaacttagacaagagaaaggtcaaaattgaccttagatactgataattggtttttgttggtgtagggttaaaaaaaattaaaattcttacaataatgatattatttttacctgtacttatcagttgacaaatgcctttttatgctcttaaaggcctcttctcactcttctgtccactcaaattttttgttgcctcgcaatacattgaaaaatagtaggcacttatcatttggcttcaaaatgaacctgttaagtgcagccattcttcctgttaaggcctgaacttcctttggtttggttggtgatggcatatttatcaaagccttgatcttctcagggtttgcttcaagtcccctcgcgttaactatgaatcccagaaactttcctaagaaaactccaaagaaacactttttcggattaagcttcatattgtacttttttaatatctcaaagcactccgcgaggtctgtagtatgatctccactctttatcgaattcaccaacatatcatcgacgtagacttccatgtttcttccaatttgtctcgcaaacatttcattcacaagtcgttgatatgtttacccaatatttttcaaaccaaacggcatgactttatagcaataaagtcccatgttggttacgaagtttgtatgttcctgatcagggacatgcatttttatctggttatatgcagagtatgcatccatgaacgacataagcttgtgccagcagatgcatcaactaattggtcaatccttggcagtaggaagcaatcctttggacaaaccttattcaaatctgaaaagtcaatagaagttctccaagttccatttggttttgggaggagaataggattggatatccataagggataaaagtcctcgcgtataaattcgttaaccaacaacctatccacttcctgcttgagtgcc

SEQ ID NO: 319756 - DNA, 967 bp, Cannabis indica
taaattaggacttgatttttttataacaaattagaggttattttttaatagagtattcttagatagaggttctattatatataaaataataatgtgtgagatcataattataaccattttaaagagtgctatacattggagtgtttttaaaaaagtgctaaaaatgatgtgtaagagagataaaataaaatattatatttttagatgatgtgtaaatttttaacatccttaaaggatgctaccattggagatgctctaaggtgctaaataatgataattaataagtacaaaattttcggacgttgagagctgagatgtctatcttgggattgacggatgtagagaatgttagaatttatttaggctaattaggatttttgctccctaaactttgacatgtaccaaatcatactccctgaaattttttgacctttaaaaattccccatgaactattgagattatcgaatttaaggacttttgtccaatttcattcaattttactaattaagtaattgtttatgtactaaatcatgctactcggattttaatatcaaccaaatcatgccccttgtactttgacatatgctaaatcatgcctcctgaactttcatccagtttaaactttccttattaaaattggacaaaagtccttaaatccaacaatctcaatagttcaggaagaatttttaacaacaacaaaaatttagggagcataatttggtacatgtcaaagttcggagggcaaaaattctaattcgctatttttatttattgaggatcataattctatgtattaaatgtgtattgaatgttagaaaattaataatataccaagatccatttgtatataacatagaacacaatagtaatgtataataattaggtatgtgtacttgattaatccatagcaattatctctgtttgatccacagcagttattccaatttgatagtgcaatactatcaa

SEQ ID NO: 319757 - DNA, 695 bp, Cannabis indica
ttgggctttgtgtttcttatgttcttagggaacttaataagattgctctaggtctaagattagatgatgagttagtataaaataattctttactttctttttaatccttgtttgctttgtatttatttgtttatctaatggaaaactaaccttaaaataatagaccgtggtgctatgattatttatacaattaattattaaattttagatatttgatttaaaatttgaatgtaataatatattaaaaagtcaacagagacatcatataatgatggacacgtggtgttatatgaatggggcaaagtatttatgaagtgatactaaatgcattggattgaattataagccaatcctttttaaataataataaatataattggtcggttaaattaaatgtactcggaggtcgtaccaccgtaccacgttgcattcacgtggtcccacctcatctttaatttcaactcataattacaaaattattaattagacttgatcaaaaaaaaattattaattagaaaaaaagatgaaatttgacctaaatcaaaattgttacattttccttcatttcaaaaaggaaaaaaaaattgttaacatggaattccaatgtttacgccctttgtgtttagttgtactttgggttaaaatcactaattaattacactcactatttttattttaatattttacactcactt

SEQ ID NO: 319758 - DNA, 423 bp, Cannabis indica
ctattaataatcaatccaccctaaaacaaataatgccgctataataataataataataataataataataataataataataataataataataggaggcaccatcttatatatatactagtcctatatgatccaaaataataatggaataataattttcattacaaattaatgaagaaagaaataaataaatataatagctgccaaaaggtttgagtttcagaagagaataagaatatggggaatagatgaatgcagaaagggtgttcatgatcaaaattaccaacaagagagggacacatattcgagtgatgagattcttgtgaaagatgataaattaaataaataaattttaaaacatatatgtgtcattataggtgtccaagatttttggagattatacatagtaccaaaatatttttt

SEQ ID NO: 319759 - DNA, 1126 bp, Cannabis indica
taaaacgtaccatttcggtatacaacaccggttcaaaaataaaacaaacttagaacattagaaaaaaaatgataaacacaataaaaaaaaatgatacatactcaaatcaaaatagagaaaaaaactaaaatgaccggttccattaaagcaacatgagccaatataataaaatagaaccaattccattaataaacaacaacaacaaaaagaaatcaattcggggatttcaggtagttggatgggagctgtgggacctgagattgccaaggttatcggggtgaaagaagcgttgagttggatcaaatgcaaagggtggattggggtggaaattgagacggataagctagtggtggtgcaggcggttcttggctcagtttcaatgccatctcaatttggtttcttggttcaagattgtcggtctttaatttcgtctcttaattgtgtgtttatattttgttaaacggtctgctaaaatttaataaaaaataaataatacaaaaaatagaacaacaattaaatgtatgaactaaataaccaaaaaattaaaaaaaaaaatggaactacaacttactacaatgaacttaaacaaagcagggatgaaatgatgatcaatacttcaaaaccgcaacaatctcaaacactttcaaccgattacaagaaaaaagaagagaaaataaataatgcacaagaaaaaaccacgaaaaatacagaacaaaaaaaatttaaagaaaaaaagtttaaaaaataatcgaaccactttaatggagcaacgataaagaagaagatgaagataaaacaaaatgaaaagaaaagaaaatgaaaaggaaaaaagtcttccagccctaaacatgcactaaagatgaaaatgatgatgaataggaaaagaaacaagaagaagagattgatgatggcagcagtgacgaagccagaaatttagttgagtgatggcttaaataaatattaagtcaaaactaataaaaataactgataaatgtatctttcaaattttcatcttgaacaaaataaaataatactattgacaaaaataaaataaaatattgtcaatagtattattttattttttaataaagttattattttttttattatttgtattggactactt

SEQ ID NO: 319760 - DNA, 913 bp, Cannabis indica
aaaaaattgtcactaaaagtagaaatttttttgtagtggaacttaatacttaattagtctttatagtgatattaatacaaaatgctaaaatactactaatactttttataatttctatgtttatatgtttcttcatcttggttattaagtacacttgatttaatttgtcatagcagtatctagatatcacgattctctaggtgaagttctgaaacatttatgagatggtggttccttgtttattaaatgaaagtgcatgcttttaacaaaaagactgtcaaatttggaggagaatctaaccaaggattgcttatgtgtgcaagtctttaaagtcaaacaaattgttactgagaactgcttctaagtcgaagtgtttactttatccattaaattgttacaacaatatttggtaatatatctacacaaaaaaagtattcagttgagatatctacactaatttcaggtctctttaacctatttattaaaacaaacaatggcaaaaagatattcagctgagataaaattggagtttatgaaaacaagttcacactaactagaaatagtactgcgttttgtacagttatttacaattaattatttcaaaaaattatctaacataaataaaaaaaaacaaatctaataattttttataaatttaaaaataataataatgttataaaaaattatttatattaatgtccaagtcactttaattttttctattaattacgataattactagttttttaattggttaatttataactcacatatattatactaggtgattgttacgtgccaagccacgtagtgttagttttatttagtattttagttttttattttaattaataattaaaatagtataattatttgaacgatttgttttataaaaataaaatatgtgtcagta

SEQ ID NO: 319761 - DNA, 1434 bp, Cannabis indica
acctaataaccgacgccatagggttatataaaaaaaccctgattttcccaacccccaaccgacggcatagatatatatacattctatacctacggtttttaccaaaaaactgcctctaaatgtcaatgcagatattttcaccccctttagcttccctttttataaattgggttgaaaaaagggaagctaaaggcttacattgtagtagtgattctgtcaaactttgcacaaactcttgtggaactatcttgtttgttgttccacgtatatagaaacatccattataaggtatatcttgcaattgatattgtcttctatgcagtgatcaattcatactttaaattctttagagcacctccttttcgaatcctctcttctagagccattatagcattaaaatctccaactacgtacttctccttacatttacctttttcctcaaatcttcataactcttctcttccactagcttcattaaatgcacacactaatgttgtttcaaaacttaattgcaacataataagggatgactttacaacggataaattgacttgtacattcatgaatgctaacatatacaaattattgcaacctaatgatttattgttttaatatgagcattgctattaggcactagtggtgtctatatagtaccttctcgacatgtcgcgttgagattagctaacgatacttcctaaaagctattatattaaactatatgggacccgatacttagttggaccaatagcgatactaacacataggagggtgctacgcactactggtgccctttggcattaaaaatatacgtcttattgagatcatgaatactacaccataaatacctattaacactacaaaaaataattacttagtgacaaccttttagtcataattaaaaaaaagttacttgcaactaaaacatagtatttagatataagttgttactaaattagttttagtcacaacaagtataacaaattgtgatttttgtgacttatacttttagctagccacggactaggaataataatttataattagttacaactttttcacttttaatcacaaatttattgtgactaaaagtaaaaaaaattgtagtataaaatcataaatacttactagatgaaccttataattttttttaaagtttaattaaaaacttattaatggtccctctcaaattatctttttgtactttggcccccttacattgtcaaatatatatagtcttttgcttttacttttagcttcttaggaagttttttttttttaacttaaaatccaaaagtaactctaaaaagtccaacaaatcaagaccattttcattagtaacaaagtcaagaatgtaggtagcgtttggttggaagtaatgaaatggaatggaatggaaaggaaacaattttcattttattactttgtttggttgca

SEQ ID NO: 319762 - DNA, 1875 bp, Cannabis indica
atatagatatataggtagactattaaaactaacatattgccatcagtatttattttagattgcaacaccattatttgaattatttgaacatacataaaaattactacactcaataataaaataagtttttcttgaatagatcactttattaaaaaaattcaatttgactataataataaattaaattatatgattatttattaaatcattgtcatttatagtataaaacacctatcataaaactaagtatacgtgtcttgcacgtagctttctcctagtatatacatatatatataaatgcgtgcattattaattgatattatctattagtactattagaaaaatttaagttcttatgttttcttttattatataatcacaccatttatccaattatcaaatatttgaatttctatactattttactatctaatataaaaaaatttattattttatatgaccggaaagtattgtattaatatcatattaagcatgctattaataatacctaatcaacaacaaatcctgctcctattaacaaagatcaaattaacaattaattttagaacattaacataataatagacatacctttaattttaattttgatctccaatcgttttgtggattacacttctttgatatctacacatatggagaaaagagagtttgggtgtgatgaatactactcttccattctttctacaacatagtcacactcattctaccttaatcaccaatcacgagcacaaagatctttataataaggaattatgagtcaattgagcttaaatgtttaatgtgagagaattaattgtcttgactcaatgggctgaccaaaaatattttagagcgtgtccattgaccctgagcatgttattatgttatgtccacttcgattataatacaatacattaccgattatacagttatcattatatgctaatacaaatagtacttagtgagtaagatttaattatgttattagtccacataaaatattataatatgagagattaataaaggttaagaggtttaagtatattatttttttgtataaatataattatgatatacagtgtaaaaaatatattttgtttgataattcttttagctaaataacttcattaatcatatataattatgatatacagtgtaaaaaatatattttgtttgataattcttttagctaaataacttcattaatcatataaattcgaattttttatttactatattggttcttgggaaaaaaataataatttaattaattttttaaaattaatatttatagtttttttttaattaatatatatatttatacttttaaaagatgagttagctgctagtttgaaataattattgaccttttacttttagagtatggcagctgatcgtggggatatagagttgttggaggcttggaggtatatatgtggactgaaagacatatattgcattatggcatcatcatatattgtttaactatatatgaacactcactctttcatgcatattatgtattcaaagttactctatgagtattaattttaaaagtagattttaattagcgaataataaaaaaaaaattttaatttttatatttaatttaactacttaacttaaaaaaaaataaaataaatatctatttttatattataatcaaaaaaaaattatatacaaaatatttaactcaaactcaattttcttaaatttatttttttttcttattttttcagtctatagaacaaccttaacccatataatgtaaaaataagatatttttactaggggtgttcactaagtatccgatccaatccaatccgcacggtccaatccaatccaattcaatccgcaaaatgcggatatccgcac

SEQ ID NO: 319763 - DNA, 1307 bp, Cannabis indica
ggtcacataccaaatccaagaaggaacaaacaaaggatggtgacatgtatccattttgtttgagcaatgtaaatgtatggggaatgagaatgtggtgaatggtgagactgagagaggacatttatttgttgtagaaaacaagtttagagaatggtatgtaaaaatttgacttgtatttctttcaaattgatgagtgataagttcaactgtagcatggggtttactaaggtttctttgaatatgttaattactaatatgttaatatgttaaactaactttttcaggcagtacaacataaagattactagctagagtctgaattagacttaataaatgtaatattagaagatataagtttactacactgatggtaggctgcttattggattgggagtcttttagcaaattatattgtgtgctatttcattatccatttcaatatttcttggaaagatgctaattaattttgtaattgctttgcttctctatttaagaaaataataaaataatgaaaagtctacaaaacaaaaataaaatgattctttcagcctacaaaaaagaaaagtatttgcttaaatacaaaaaaggaaaagttaaaaccatgagacatgttttgctaataattgagagaaactttagcaaaaataaataaataattgaccgaatgagatcatatgacattaaaataaaacttatgaatcacttgaaattagctcaagtgattatagaaaatattaaaggtgcctgtgtggaggattatgggattaattaaagtatatatataagaagcttctataaatataaaaaaatgttaaacttagtacttaggcactatagttaatggatttattagtctttgatttttcattatttttttgccttttatttttaatcagtcataattcagaaagtgtaatttttaacttagtttcaagtttggttgttatagtttcagataaaaatatatcttaaattaactcatacatatcgataagtattatataaataattatatatttattcagatatattattagtgaaattattgtcaatcaatgagtagaaaaagaaaaagttgaatggacctgataaaggaaaagtgactaataattgagacactcacaaacaaaatacatattcatcatttatattcttaattatatgctctttcactctcactctcactctctaacacctcaacaagactactactcaccactcttctctaataccaaacaagtttgaaaagccatggcagagttgattctgtctccgattgctgagaaaatcattggtggtttgggatc

SEQ ID NO: 319764 - DNA, 526 bp, Cannabis indica
actaattatattttaatttttttttttcgaaatgggcgccctgagcgacgggggcctaaggcagccgcttcctgtatctcacctcaggaccggccctccaccgatacactctctatttgtttcgacatttaggaaaaaaaattagtttaatttttttcatggtcgtctacattgttatttaagacatcttataaattttaaaaaatttagaaaattttattacgttgaaaataggatttaaatagtctattttacacgtgtataataaattgtttgaatcttattttcggcatattaatttttttaaaaatctcttcaaattttatacaatgtcttaaataactacacgactataaaaaaaaacttaaatttaaaaatttatccatcataaaatatccaacaatatatttataatttatgtatagagcattatatatgcatgtgcaatatgaccagggccggccctgaaaatttatgggcccaagacgaattaaattttgggactctcaaaaatatatcaaaaaaa

SEQ ID NO: 319765 - DNA, 997 bp, Cannabis indica
attgaaatgggttttatttaggttcattcaaagagggtttagaagtcgaaccattcaagaacacgagtttgttcttaacagaaatggccagttgcatcgccctactccacgacatataattgtcttgtctggttagccattgagagaccaagatgtttcctggattatcagcatgaaggagatagtaagggttggaaggagcttctagaggattcctatgctgaatcgtaggattgatggcttccctaatagtagtctggttcgagtggtctccaatcgcaataggattcgtatgatcaccattagaaatttttaagaggaaagaagatcaaacaaagatttcgatcagagaaaaataggcgaagaaaaagagagagtagttgaagaaaccatctctgggaacaagcacatcggagaagaagaagactcagcggtcagaatcaggattgagggaaagcttctctttcccgctctgatactgtattgtagaattgaattgaaaccagtgaaagaatattatttgataatcaatctaaaattacaaagagaaccaatgtagctaaatatagtgtagtagagtcaattaagtgactaaccaacttaactaaaggaaaggaaagtcctaacagaattaactaacttgtcctaaccaaccgaaaaatgattaaagataattactgctcttgacagtcaatcaagagaagagcttggagaagagcaatatactataacttgttagtgttatataaaattaagtgatgaattatgttatgggtattaaaggtgtaacgccctaaataattaggcacgctacccaagtcacttattaagccctaatcccctaaacggaattactaataaaaatggcgcggaatttaaactttaataacaataggaatgaaaataaacatgtaatactttaaactttataaactaaaagttacagatgttggaataccaaaaacatttacaaaatattattacaagtcctttcttt

SEQ ID NO: 319766 - DNA, 916 bp, Cannabis indica
gctctaaagttgattatggggcctctagcatgcttgtggtaggtctttcatgcgtctaagtgcaaaggttgaaaagtttgaaaaatgactggaactgaaactgaaaacctatggcacagatgtcaatttgggcactgggtgaaaccctaggcaccaagttggcatcgggaatgtcatattgacatcctcaacttccagctccgtgactcaaaatctttttgacttgttaactcagattattgaagaatggggacttagaaacaacttggcgggatttgaatacctagtcaagagttccccatgtcaacctgggcactggactagggacccatcgcgaggttgactgactaggaatacataactccgtgaatatttttcttcttgccacgtgttaaaaatgatgtccatgtcagtggggccaattttttgataaatatgtatatctattaataaaaaattccccttctataaatacaatttgcagttttttaatcaaagaaaaacatcattaatcaacacacaactatacaaccaaaacagagcctgattaaaaccggctccaacacactcaaagctgactcatatacaatctagccagtctatctctctttgtattctccccttattcacaagtactaatcgcaccttgatacttccttcaatcattttttctatcaatctattaataaacacttttgttaaaaaatacaaagattcttattcagccagagactatatactactctagctaaagccgcaaacttaactttgttgtatgtttcttgtagaaaatagtaataaaaggtcatattgttatttttttactaggggtgtgcataaatcgatccaatataatgataactaaccgatctaattataatcgacagcccaacattgaatatccaattatgatcgg

SEQ ID NO: 319767 - DNA, 2177 bp, Cannabis indica
ttttgacatattattggtgaaaagaattgttggcaaaaaatctcactttccctcttcattgccgaccactgccatttccttgtggcagtgcccatcaaaattgaagagcactgccattttcatatggtagtggtcggctagggttagccataggtgggaaataatttctctcatttgttttgcattctttaatgttgagggagcatatttgaacaattttcccttcattgtttgtaaggagcgaccgctgccattcccttatggcagtgcccataaaaaatgaagagcactgctatttccttgtggcagtgcccatcaattttgatgggcactgccatttccatatgacaatgggcgcatctgccttttccttgagggtttgatgccatattaactttatgcacaaacctaagtaattttatgcccaaataagtcaagtccttgttggccaacgcttgcgcaggcccatgaatcctagtttgggcacacttgggtgtgtgagtcccgacaccgaatggttggttaatagttttgaatcctctagaagtgccacgggaccctcaagaaggatgtcttaacttatttgacatttataagtcttggtcaaagtcgcaaggttaactttagtgtcttcaaggcactcttggcatgtgggaccttgtgcaagagtagccattttattttatttttttgcgaaaactaagtataacaaagagtgataattacaatctcctattacaacctcttagtcaatctccatgtgaaatcacgtgtcaaaatattttttttcatagtgttattcattatagttataatatcgtccctataaatttttaaaaaattctgaataatttacagtactaaaaatagagttcctgacattctaacgtgttcaaaaaacttcaaacctatttttgacattgtaaattattcaaaaaaaaaattcagaaatttacaagaatgatgtgtaactataacgaacaaagccataaaaaaaattgaaaaaaatattccaatatatgtttttaaatacggaggttgactaagaggttataataagaggatgacgataacactcctcatattataaatgagtattattatttggcacattaagatgttcagtattatactatgtagcaccttatagttaacatttttttatattattttgttaaattaaaatgtgtagaactcaatcttaaaataaattaatagcgatatattactttatggtgtttggcattttaagtgactattattaatctgattttattatttgtggaaaagaaagttgatgaacactatttatgaactctgggaatattccaaaagagaaaaaaaactcaaagtatcaaaaaaaaaaaaaataatgatagccttgtatataataaatattcctatctaccattggcttgtgctagtatcatctacttgtgccctctttatttctccatttcttctctctagctagcattggctcccatgatgtaataaatcatcattacttaaatatttagtgtttgtgttctaattttttctttagaatatacatacatattgagttctaatgtgcactattcacaatctcttcaatatacatatatattacgaatataattaaacgagtgaactacatatagttagctagtgctattgtaatttaacttgtattaattattattaatttattgtagtttatttgctgggacagtgttcaattatatttatttatttgtccggaccacgtattgtctacatatatatttatttatttttagaaaacctgtctacattatatttaggttgtattaatttgaaattttgagtttcttgttggaattttatactgatcaattttttgtttcttatataatgaagagagttgccaacttaattattactattttcttttcttttctttttgctgaatgacttcatttgtaatttgccccacctaaaaaatttccaaagcatagtatactctcactttctctctctccctggaaaaataaaaagctaattttctgcttaactttttcttttaggataagtctttttattatacattaattaaatataattttaaaataattttaattgataaatatttttttcataatcaaaatattaaatataacgtcacataaccttttaaaattagagttcttaatgca

SEQ ID NO: 319768 - DNA, 1454 bp, Cannabis indica
attttgaatgagtaagaaaattataaaagaaagtttaagcagtttcaactcttgctaaatactctgtagccagtttgcttctttaaaagcctcaatagttaccataaactctgattctgtagtagatagagcaaccacttgttgttgttgtaacatccagcttatgcagctcttgtttatggcaaatatgtaaatcttctagtatctttgttagaagcataatctgcatcaacatatccagttttgaacactttctcttccttgtaggttcaattttagggcaatgctcatttgagagcttaaagtgtctagccatttctataattttttggaatatctcaaaaaaaaagtatgcattttgttgttaattcaagtataactagttctaagattgacacggtttgttactatcacataagaagggctagcatcctaaataaatgcttaacttttgcaattgagaataaagttaaggaaatgtatctatctataggcgatggccaatgtatctatccataggcgatagcaagctatttgactattttggagttgaatggagtagagttggatacctctcatttatatagttttccattactaaaaactgacattattaaatgtcaagtaatgggatactgaaggatctgatgtgccatctaagtttttgttggattctcctctcgagagattgagattatctaaatatgaattggcaagttctaatgttcattatcaattacaaagtttaagcctcaagttcttgaaaattatattattgcatgttgtacaaattaaagttgaagtaataaatcttgaatctttgtagtggaaggtaatcccttggacggtataaatttctcttcttgcaagaaaattagaaataatcaatatgtagagtttactttgaaaacaatcaccttgaaagctctcatttcaaatatttctctaattgagaatttggctttgagcaactgccgttcattagagtcggagcaccttaaggtggcgtttggttgggaggaatgaaaatacaagaatgggaatggaataaaatttaaaatgtacaaaaaaaattgataaataaaccattaaattttttctcttattacattagaataatcattccttcctttttaaaaaggaatagtcattccaccaaaatggtaaaaagagcattccaatggaatgttattctaatactttaaagtgcaaccaaataaaggaatgaaaattgtgtttttgttgctaatgatattattaaatgtaattgattaatttataaaatgagtaaaattaatgaaaatcttgagccaacacttgaaatgtttcaattttaagaatagttacaagcctaatagtcatgagttgaaggtagttacatgcaatcgaatctgcaccaaaattagtttatcgatatcctgaattttcttgtgaatctcaattgctcttggaat

SEQ ID NO: 319769 - DNA, 1366 bp, Cannabis indica
aaaaaaaaaattgagtttgacttaaatttttttatgtaaacatattttgatatagtattaaagtattaaaagagatatttttttttaaaaaaaattaagtagataaattaagcatgaaaatttaaatttctctattatgatttgacatttgatcaaatcaaatggtttaatatttttaaaattaatatttatagttaaatttatttagtaaccaatgaatgatatccattgaacactgcttcaaaattataattttctaatgtttttacaccgtccggtaaagaattcccgacggtctataaaattatcgcatataggagtgtcgcgaatactaggtagaataggcgatggtggaaaattatcagggaaaagaatttctgatagtttaaagtcgtcgactataatcgatacttaaaaccgtggcctatagtatagtcgacagttttaaactgttgctataatgtattgcccaaaaaaatcatcgtctttattctcctcgaaaccacttctcgccgatgtcgtagctgctctaaaacctttacaagtttcatcctcctccaccgtaactgtgctcgtcttcatccttcaaattttcttttacaagtttcagattgtttttcacttgataatccttgaaactttcttcggattgtaaactttgaatttcttttgcacacacacagatcaaaatcaacaaaccaaattttgactaatagaaatttaaacaataaataagagaatggtgtgcttacctttatgatgtcacgagaggcgacgaaggagatggatagcgtggctcatggtcgtggaggaaagagagtcgggaaatgaaacgaaatttacaaatgaatttggaaaaatgtgatctgatttttttaggaggggggagggggtttatatcttaagaggattagaataaaattttgaagtataagatgcgaaaaaatgaaattttaaatttaaaacatgttaaatttaagcatagaaattgccgatggtttaaaaccatcggcaatttttattttaaaaaatacgaaattttttaaggcacgtttaaaaatcaccacctatatttcttgacagtttaaaactatcgagaatatcttattttttggatagttttaaacactcgcttaatttaaaatttttaaagacggttaaacaaaaaagtattttttaaaaccgcacgtcgtgattgcctcttttttttttttttatatagtagtggaaaaatgtaaaaaaaattaaaaagtaatgatccaatagaaaaagacaaataatttttcttaatcactagtactattacaaaaagaccctaatatatgaaaagatttatgtgtatatgtgtatatatatatatactagt

SEQ ID NO: 319770 - DNA, 1078 bp, Cannabis indica
tcaatccatttaagccctcttcaactatgtagtcttatacctacacagtctcaaaatcatcacacatgaccttcccccaagcaatgtgagattgtacagttcccagtctttccccttcagatcacagggctttgactgtcaccataggtcacacacgtttcctcttgcatatgttgttgttgagaaagaaaatactgacaattggacttggtttttagggctggttaaagaggacttaaatatggcaaacacaagaagcttcactttcatatctgatagacaaaaaggcataaaaaaagctttgggtacagtttttgaagattctcatataagatttttgtgtgagacatctttatgaaaacttcaagaaggattttcctaggttgttgttgaagcaagcgctatgggaatgtgctagatcgactacctctgagagcttcaattcagcaatcttagatggcagggacaaaatgatcatcactcttttagaatcaatatgtttttggttaatgggaaggatgtgcaagcaaagagaaagtgtctctaaatagaattgttcagttggaaagaggatctttgaaatcattgagaagaacaaaaaggtagcacaacaatacatttgtactaagtcaattggtggatcatttcaagttacctacataacggttcaagtattatctattaatttggagacaagaatatgtacatgtagatcatttgatctaaacaatgtggtcatgcttcagcttatttgtggttttctaatcttaatgcctataaatttgtggatccttgctacaagaaggaagcctttgaagctacctatgcaaagggtattgcaccaatgcctaatcctgatgaatgggagaacaaaggcgaaaatccaatccttcctccacttgaaattgtattacccgggaggcccaaaaaattaaggaacagagaagtgaataaacctccagcatgtgcaactaaattgaggaaaatgccacaaactaaccagtattccaattacaaacaacgtgagcatatcgaaactagttgtaagaaccaaaaagtcactcaggtatatttcttc

SEQ ID NO: 319771 - DNA, 508 bp, Cannabis indica
gtctcttctctttctctcccttcaattattgtcttccattggtttaagtatcattacacctaagacagatccaggacggagaagaccagatctaccaacacccacccatctcaaccggactcttcgatgagatgcacgaggaaggttttcgctcgtcgcgaatggggttggcatcgccgttactgaagttggcaaagcatttgtcgaggatgttgccgatttcgttgttgctctgtttatttgatgttctaatctcagaggaatagtgtttggtttgattttaatctgattatattatttctgccgttttactgattttcattttccttattactttgttttatgttgttaatttatgcattttgatattttaatctgttcataatatgaagaccaagaaaattagtattggaaaataccataaataaagaatgtggtgacatttcagtagtgggccaggaagaataatatcttagatcctctgttggattggactgaaaactcgatt

SEQ ID NO: 319772 - DNA, 692 bp, Cannabis indica
catagtcttataatttaaggtcaattgttataaatttttgaaatcaggacatatagtaacatagtcttataatttagagttatttacaataatttagtgctaattttgacatgtattttcaaacacaaaataaattaaaaaattataataaaaaattcacgctaaatattaattagtatttatatataaaaaatcagacaaacgccatgaatgctggaaagtggcagcaaagaaaaccttaatcacagctaagaatgtataatgtgcgttggaacaaaacctttttttaaaaaaataaaaaaaaaaatactattttataaataatataaagaaagagtatgggaagtagttggtcccataagtagtgaattttgctataacacaaaataataatatagaggtgaccggatcccttgtattgaataataagttcccacttcacccaattgtcggtctctcttctcttctgttgacacgtggactaattaaattaatttttttttaaaaacagtattaaatttgagtattgctattagatacactaatgtctagtacctcttatataagtggcactttatgattgaataacaatattttttaaaagttatttttttaaattatatagaaaatacaccaataacaatagataaatttacaaaaatactaattttttccttaatctttacaaaaat

SEQ ID NO: 319773 - DNA, 1917 bp, Cannabis indica
ttcttactcaatcaataaagaggactttggtggtattctagaactactgaagtaaagccattgatcatatcgatttataggacttgaaccattatatatcttagtgttgattttactgatttaattgtcttggggtttaacactcctttctgttagtttaattatggtattaaattgggtaagcagcaaaaaatttgtatatctgattatcattgtaccatacttttaaagatcttcaaatgtgtatacattaaatcaaaatataaattacagattaatatatatatacctcttgaaacttagttcttatcataagttgtatccattagagttgattagaaactcacaccgtagtcttctgaatcgattcaccatacacaaggaatagtatgggcgattaggataaattgtataatttgttcttgttgaattctcaacacatgagtaagaacaattctagaaggaaaaataatttccttttctccaagttaatttcaaaaattatcatgtgaaaagcttgatctgttagttcctaattaattaaatcatatttaattatttaaataaatatctataattgaattcggttacagatatttaaggtgagggaatctctcaatcacttgagagaatatctcaactaactttcagggaatatctcaaccaacttgaaatatctttaaaccttttttaattcaaatacttatctattaaattaattaatttatttattaacttaaaaagaaaaaattaatagggacacactactatcaggtaggcgcctatatatcttgtctcaattacgacaagatgttgtcttttgtcctgacaacttttgtcttaacaatttttgtcttcacaaaagttttcttaacaacttttgttttttttcctatttaaataatttgaaaattatttatttattaataaaataattattattttttccaattcaaaatatatatttttgaacaatattataccactctttatccctacccttaacagtatttcaaagtggcaattcggggaccatggacttataattctaagctccaataaactagattatttattgagtctaaccaaataattatgtttattaattatatgattaactccactataaatatagaattgaactcttagtaattataaaatcatataaactgaattttactacaatgttcattgatgcaatcaatgccagtgattaccctccttgcgtcggttcgtaaatagttttgaacaaattactattttacccttctaattacttctttatcctttaatactattaattcactagtagaaatataatttaaatcccatctaaatatgctactttacagttgtagaattaacacataaagggaactaacatttgatcgattagaaaagttaaggtattataattgtagatcatatttagttttgtggcctaaataaaatcatttccatataatcagatttataattagcaaaagatcaaaaatattttataatgcatggttcatatgatttatttcatgattatatttaatgtataaattctattaagtccaaaacatatataaatatatatatatatttgttaatgattatagtgtcgttagtacagtagaatataatcatgattatatgttcaaaagtttaatcccatgatttttcagttcactagatttagactaacatgataaacggtgataaggtatacttacactttggatacatgttatatcctttcgaaggcattggtaaagtttaccagtatcagatatatagagtatacattggattggaccgatattgaatttggataagatattataaacttactgttatatctttctaagtcaatatcatcggttgatcttaggtctatggatcttaatcctgatatggttaggttcaatc

SEQ ID NO: 319774 - DNA, 989 bp, Cannabis indica
ttgatggtggggctgctggtgtgaggtccaatgttgttggtgtgggtgcgggctctggtgtggttgctggtgtgagggcggatggggttggggttgctgctggtgtggggactggtgtgaatgtaggtgttggtggtgtgggaaggggcgttttgatggatgctgccggctgccccaggtgcgaaagtctttcaccctctctgttgatggagcgattaccccaaggagtgggtttgcaagatttggtggtgtcgtaagagatgctatgggtactgtttgggcgtcttgggctataggatctgttggtgatttcaaagttgaggtggcagagcttttggctcttcgtggggggctgcgttgggtggccgaattgaggttcatggtgtgaaaagctgaaacagattcgttgattgtttataattgggtgaaatctccaaatggtaatcttgcttttagaccggttattgctgagattgtttctcttttagttgttgttggtggtggttcgtgtcataccatttcacaaaatgtgaggtgtggcccatatacgggcaaaatttattactaggttaataggagttaatgtttagacgaatatttgtcttcattttattagtgctcttgcaatagttggtttgagatttgttgatgaaaacatgttttccttccaaaaataaaaaaaagaaaaaagaaaagtaatcgggtacatgttcacaaacaaagggaagcgatcgtggcacgtataccccaagattagaaaagtaggccctctcacaatagatgatgacacgtgtaaagtaggaactgtacgacaagaaccgtattggattgagccataccctgcaatcctatccaacaacatccttcgacttcattaagacagatttccttcgaacccaaactatccatcccccatctccaatctccttccccccatctctctttctaactccattaatgagcttgacaatggatatcctttcttcttc

SEQ ID NO: 319775 - DNA, 1274 bp, Cannabis indica
tatagtttatattaaagtgtatataaaacaaccctaaaaataatatataactcagtttttaattacataccgaaaatagaaattctaaaaataaaagcatacctaatataaacgaaatatatgatgtaaggtccacccaaaattgcttctcccacttttaaaatctaaacaaaaattaaaatatattgcatttatattagcacacacatataaatacaaaaaattaaatattagattaatttatataaaaacaaagaataatatactaaaaaaactaaccggttaaaagagacgcggtgttgaatcggtggtgaatcagtgcaaaatggtggtaaatcagtggtgaaaaggaagagaaagtgaaaaatataaaagatgaaaaaaactgggggagggaaaaaaatggggaaccggttcattgctcttatttatagaaaaactattaccggcggggccccgcgggtaataataaacccgccggtattaataatattagcggcagacccccaccgatattagtccgccgctaaagacatttaaatgcataaagcgggaattttcctgcacttattttcccttcactaatagcggcggctacccgcctgtattaacctaagcccgccgctattgcatttaatatttattttttaaaaaaaattctaatttaatacacaataataccggtgggtccacatccgcggtattaatcccattattaggggccgccccacccgctggtattgggtccgccggtaattgtaaaatttgttgtagtggttaattgcagtataactcctaaaatttttattttgcttgcatataacccttaaaactaaattttggcattaaaacccccaaaaatctgcattctgttagtatttagtcattttcatctattttatgttgttaactaccatgttaaactgaccacgcgtacatagaatttatccacgttgatacagttaacacattgcacaatttaatttgcccatatatttaattattaaaaaattaaattaattaaaaatatggtatgcttttaagttccattttgcattgtactcgcaaccacataaccttacttggcttcccatcatcaactcttggcccattgttacgaattttataaataatatgcaagtgtatgtaatcaagtagtaagctcacacaggtaaagtcgaaccacatggagttggactgagtaccagtagattaaatctatgtttctatttggcaaatcaatatctttcaagttcaataatcgaataaaaatt

SEQ ID NO: 319776 - DNA, 845 bp, Cannabis indica
atctatattactattttctcctttcgatctatttttgattcattgtataatttttcttaacattttttaatttaataatttaaataaaaaagctaaaatatttgtccataataacttatatatattatatttaaagatgttaagatatttgtttcgtatctaactatattatactcttaaattcataaatttttaaataatacaattctttaatgatacagtcttctttaatgccattgttaccatggaagttgtcgaccgctgtgaactcaatggccagagaagtaatactatttttaatggccttgtatgagtacggtaataggaaattattctctcttgatatgattccaatctctaaacttaaattagaagtgatcatctcctctacacacttatatatattagttttcacttatcttgatatgttctcacaatcatcctcgcaagcagaaagcgatttcgaaataatgggctaacgatttagaaattggagatgacttaagtttttaagataggcctgaggtagccatagtcctccaaaggggtgcacccatcaagcgattttagttgggtgaaaatgtcgtagtaagaatactggccgagattgttttttgtagggagcttcaatacctaataatttgatttaaatgtaatttaacataattatttaatttggtactgtataaattaggaaacaaagcgcattttgtgtgcggttgtaatttatttagtgataattatatcttaaaattatattaaattttaaaattttttgtaataatatgagtaactattctactaatttttcttttacgtttataaaaataattttgatattgtaa

SEQ ID NO: 319777 - DNA, 498 bp, Cannabis indica
gttaatattcaatattagaagattggtttctttatttgtatacctattttgcgtagataatgaaattaatatattattaaaaattattattttttgttttgtttatcagaatcaagttggaacatgtccgtttcaagctaattggatatttaataatttttttttataaatatattaaaaatataaaatatagtattttgaaaatataattagattttttttcttaatatactaatatagtaacttaaaaagcaaagggaaatttcattttttgcccttaataatatatcttatatcaaattttataccccttactaatttatacaaaacaattccactattttcaaattctacccaaaataccccttccatttaattttcccactctctctttcccactctctctttccctctctctctgtctttcccactctctctccgacttttcctcttcgtccctgcccaaaaacaaaacaaccgaacaacgaaatcgaaccc

SEQ ID NO: 319778 - DNA, 830 bp, Cannabis indica
taaagtaacaaggtgcaccaccttttacttttggcaaactaaatatgcctgaactttatcacactatgataacctaattactttagtaagtattttaggaaacattatagcactaacaacttatcttcaaaggaagaattaattgtttatgttataaacttattcaaaagcaaggttttttgtgaaattaaaaacaaaggcttaaggctatattatattgcctttgaattttgacatatttactacaaaataaatgtgggactaaaacccacttcttttttcattcaaaaaaatattgactaactcaacttttccaacaatcctcacatgaatgaaaaattgactcaagaataatcaacaaatggttcttaccttgaatagagttcaacgttgcataggataggtaggttttaccctttgaacattttcttgtgtgagtacatttactttattagctgatcggtagacgtgatatctttgaactgttttgctgttcatgtaaacgatgatataccacaaacaaaaatctttcatggcatactttagttctcactaatatatttattttggacctgaacatcttcttggttctacaagagatattctaggaattaagccttaatcaattcctataaaagcgacccatcttctttctcacataggtgatttcttatttaagagtaactcgtattactctgctcgacgtttcgatgcataagaatcattaaaaacatagcttaatatttccttatgagtacaactgtttcatcatcggaatggacttgaggataacccccacaatgatccaccatagtctttacagttttagt

SEQ ID NO: 319779 - DNA, 1426 bp, Cannabis indica
atatagggtttaaacaaaaactaatcatttatagtcgttagacatgaaaaacgagactgccacttggagattcggttcattgttccccaaacggtaaaccagtttctgggagaaacaattcactgtttaggaaccggttaaccgtattcattacagtggtaaaaagtcttttttttcatactaaaacgaccataactctctacttgattatctgatttcaaaaattataattttattttcttagttaaatgatatgtgatttaaaaaggcaatttaaaaattttatgcatcatttggtaaaataacttgtcgcacatgttagtggaaatttatacttaaaacttttttaagtatggacttaaaaatcactatacaagactaggaaatgtaaataaaccttcatggagtcttgttttgagttctttgagccttggaatccacttcaggtcacttttaagaattttggtaaaattaccattttacccttggtgttaattttgccttagaaaaatttattctatctttaattgtgctacaaaattaacaaatcttagtaacaaataataattaaatatttgttaatcatcaaaacaagaatgcctaagagtttgagttaacaggtcgaaccagcattaaaggactctgaggtcctaggcaaaaaactgcccagtcgagtggctgctcccattattggtttcgtgcatggtccgagcttaaagctcgagctcacatccaatgaggcggcttgtgctcgtgcatggctgggtttcaagattagaaactaagctcttatgccatgaacattacattgtaaagttttcacgtaaaattaatttcaaaaaataaaaattaaataaaaaaaatacctatgccccataatggcttacattactttctaagaaaaatataaatgaagcctacacccaattttatcataaaattaatgatctatcacctctcatacattcacaataaaaattaccatctattcaaatacatatcacatatatatacataaaatcacacaacatttaatatatatatatatatatatatatacatattagaactactcttgatactaattattaattttatggtacttaatcaggtacgtagtagaagatttatatatctaattatggtaaactgattcacacaccatatttttcgtaaagtgtagtagtaaaaaatctttatatcaaatttacgaatccaatctatatataaacatatcaaaattatgtgaattttggttaagaatatagtaaattacaatatatgcattatcagatacgttacctaatcaagatttttaaaatttaaaaaaaaatacatttatataatcattatccaaatgacactctattgtagcattagctaattttttttttcttaaagatcaaaatctcaaaccctatttaaa

SEQ ID NO: 319780 - DNA, 829 bp, Cannabis indica
taaaattagaattaaaaaaaaaatagttaggaaagagaaaggggaaggtattccctataaaaacggggagaacttttccttttgttttttttcctaatttgtgtaggtcctactactttctcttttttcaaaatttagtaaacaattatataggaattaatagcataccatttattctcattccctttaagtaattactaatcaaacaaattccctaatcccgtgagtaaacataccaaaattaaaagaactaatatgaaagaatattgataagcaaaaacattacacctaataataatatgataatgttttttccattaaaatagcaagtttcaaaataaatgtaacaagttaaataatatgttacattactgggtgcaaattttaaatgcacatataattaattaaaataatgaaatggcaatataccatattaatattattgtgttatgaaatattatatatagatgtctaaattattattaaattaattatcaccattaatgcttgattgtattttcataaatttagtttctcattcttttagtcatatttttgtataaataggaatttactccatcaaaataaataattgagaaaaatctcattcattctcttcttctctttgtcttttctttgttcttgtttctttctttattatatattattttataacacgttattagtacaagtctctgtcaaagccccaaggtaaatattttgttaaaatttttgagttatttcaaggtcaaaatacaataaatatatatttatatatggaaaaccgtgtttttgcaaatgtcagttgtatataagaaaatataaaaac

SEQ ID NO: 319781 - DNA, 2800 bp, Cannabis indica
ataaagaagagtagttattcatgtttccatgatttttcaaaaaacttgcaggattaacaaccgtcatgaaactctggataattttcataacataataaccactattgtactctatccggctggataatcttcatccaatctctatccatttcgaaacttctaacaaaacaacaaaacaacaatttaattaacctaattaatacaataaaataattctatatcaacttaacctaattaatttaataaaatactaatcctactgaaatttctaccgaaatttcgacagcataacatctataattcggacgttcccgaaaattttaaacatgcaactaatctattaaaacatccacaataatacaaacaaacaaaactataattaacagtacaaatattaccacccatccgaccgcagtcatgcaattccagaacttacttcactatggatgaatatctaggatattcaaactcttctaggatttataaaatataaagaaataaagtttgagtagcttaccaattccaagctagcgttcaagcaatttcttcaaaagatactaccacaattgaaaagctgcattgtgaataaaagtagtgatgtgaaaaattacaaaacccaaattaagcctctcttcggagtgtgaacattaataataatcaatattgtacaagatgatgattattatgattattattatgttcctcccaaatctttgaacaatctaaaccgatcgaatatatataaattatttgatttggatgatcatttttctttttctagcttagaatcagtattttacatatactaatacgatatctctaaggatgcctacaattaagatcagcacatgtactaatacgatatttaactgcctctctctccctctctctctatatatatttgatctaataactataaacaatatttttctaatcctaaggaaaagattatttgctattattctttctgtgaataaaaaggggtcatctccttatataaatccataaagacataatcaaaataaagcacattttcaacaaacaatggtgaagagatgactatatctagactgaactcttgcaaacaggtgtttttctttcaataatctcttcattctgtttttggctaaaatttgggactggtgaagggttgaagagagattgatgacaagtaatgagtatgaacttaacacatgaaccagccctcatatttgaaatggttattatctttaatgacacataataatgtatacaacactagaaattgatttacatatttagctataaaatacaatattattcagatattgctagccaagatatatttgactagtgaataaaaatggtataggttcatgctatcaatgcagatagataatctcacccaaaccccacaacaaatctctaccagcactgcaccttaaacattccataccttcatgaaaagcttgtttctcaacttaaaattttgttttttgttttaagtactgcccacttcatattatctccttaatacaatataactcatcttcttgaacttgattaaatgatataatttttccttgtaccatctaagtcatctttaaatttatctaaagatttactcaaacttagacacagcaaggaactgaaaaacctttctcctcctattaccaaatcctacactacattctcaataaacattaatagacaatagaaagaaaaaatacccacaaacacagccttcttccataattttttctaacaaacactccatcaaacagtttacaggcatgattctcaaacaagaaatatagcataataatagccagaaaaacaatttgagtgaatgaaatgagaaagagaaagaccttgggattggtggagtgaggttcttgcggatctgagaagcgatggtggaacggagctgggagacagtgacgacgtcgtcgagattgtagatatcgatgatggaaggaatggatctagcacaaacaaacatttattgaatacaaatcatattattctaaatgagcgaaattaaagtagatgtacatgatgatatgaactgtacgtccattaatgatttttcacaacaagttctaacctaccacaagtccattactcaaaaaattattggcctcaccatacaaagtaatgcaatcactacataataggtatatatcaaagggaattttttttttttaagttgaagttgatacacaggctgtttgtgaatagagtaatatgatgtgctgtgtagtgtaatcgcgaaagggagactgagagagagagagagagattagttgagagaaagcaagagagaaagagagggaaagagagagacttacggaggtgggagaggagacctacgccagtgagcgaaatcgcgagcccttcagagttgaggacgcgcaagcccttcagagaaaaactgcatgagagcttaggacgcctactgttcgaaaatgaatagtcggatatttaggggtaagtgaataatgggagaatttgcgtcattttttcacactcgcaatctctttaccgtcagtttaaaaacgtcacacaaagaattcgtgagcctttaaaaacgtcgctaaatgtttgtatttttttttaattttttggcttttaccgtcggttgggtaattagtgagggatatgaaaccgacgcaaattgtttattttttgtgtcatttttcaaacgacgaatataatgaatagggtactattcacgtcggtcaacgcgatgaacagtcgcgttgaccgacgtgaatagtgaatttgtagtagtgtaggttcctgaccagggcatctcaac

SEQ ID NO: 319782 - DNA, 1575 bp, Cannabis indica
taatggcattaagtatctgtctgcccacttcgtcctctacgcctcccagaagtggggtatgccttctcctcatgaagttagttggttcattgatttgaagtccaaccctaagcaaggcaggtcggggaacttctatttctctcaaccagacttcaagtggtttgacgggcaccgatgattcggccatcagcaaaattaggcgttttattgatgagtacttcctggtggatggcgcaggcatcactcgcactcggttccagcagattctaacatatcaccgtcctcctctcactcttgctctacaggatagagcttagaagctttctcgactgccgggggaagatcggaatatcatccagttaacctccgaggataattttatataagggacttcattcccaaaccaatgaaggggaggaagaggaaatctgatgctggacgggttgaacgagctcattcaaagaatgaacttattcaactcaagcgcgaagctaagttgaagggaggtgcaagggccaagcagtatgctcaggagcccttgaatcctgaagatgaggctgaggaagagcaggttacttcgctcaagaggaggaagaaacttctggccctgcccaggcctattgaacatgcaattcgcattagggagcccatctcgcctgctcggccgccttctcccgtgcttggaaaagggaaagctattatgtccaaaatctgaggcatgttaggtgatgatggacttttgaggcttgttctcgcaatcaccttgcatattacttcatctcatttttaagcttcttgactattatgccttatgtttctgatgtttattttctctaaccatgttgtttttgttctgtgcagacatttctcagaagatgcttgacgctctgaagaagagaatttgcggaagctccaacgcatcccctccacccaagaagtctaaaggcggtgaggggtcctcttccaaggaaaagacgcctgttggggaggtcattgatctttctaaggagctagcggttgcaaaaccctctactccaaaacttgccaagtccaaggagttccgaggagggagttcggacgggcctcaacaaccgagtaatgggtctgagctgactaagagtggacccaaacaaatgcgggcccctaatccacctttgctggtgcttccagaggccaagaaaggcaaagagatgcttgtccactacatgaaccggttggttcctaaggttagtgagcaactggccggcgctgacaacgactcttctttggagctgctgatgggccgagtcttgaaggaattcaccagggtaagatttccttgaccatcttctttaagccttttttacttggctcaaatactgaagtttctcctttgtgcaggctgatctgaatttggcctacacctactcctgggctaagtctgctgcttccaggaacacgactctatccaacaccatcagggcggaggtggacttggccaagaaggacgctgacgatgccatggtaaaacttggagctgggtgaagccaacaagaagctttttaccgccaagaagaagatagctgagttgactaa

SEQ ID NO: 319783 - DNA, 3315 bp, Cannabis indica
atctaagaccaccactccaatactatgcctcctatttactgagtcaatagctgcatctgtgaaaattttaagccccctagaactagatatttgtactgaagccgagggggatgcaaaattggaacctgtgacatgatgttgctgtgcatccaaaaacttaaagaaaaagttaaggctccaatcatacacttccttgggaggaatagtatgctgattatgaacaaaattatttctttgattccataaagcccaaatgaaacaaacaaaataccaatatcatttttgtccaaagattgtagaagaccaagaaaaaactcatcaatacccaagtgtttaaaagcatcataataagcagcaaacctggaatatcgccaagctttcctggacctaaagcaatctagcagagcatgcttgatagtctcattctccatcttacaaacaggacacaaaggggaattgatcacacattttttaaacaaagaatgagccacagggattgcattagataacaaacgccaaacaaaaagtttaaccttaggaggggcaattaaagaccaaattcttgtccaaaacttcttaaaatcagaaaatgaagaagaagatggaaggtcctgattagagaaagccaaatgataagcagatttgacagtaaaacatccagaactctcattttcccaaatcagtttatcatgaccataacttccagaaacagggacctcaaggatatcatgaatcatggattcatcaaaacaagactgcaatttgccaacatcccaagtacctgaatcagtaataaagtagtacagggaatgagaagaaggaggtggatcatttgaggtaaaaaaacttatgtctatgattgggaagccaattatcatccaaagtatgaatcccatacccattacccactttccaaataagcccagaagccatcaggtccctaccccataaaatgcttctccaggaaaacgagggactttgaccaaggacagcctcaagaatagaagagtgtggaaaatatcgagctttaaggatccgaccaagcaaggaagtagggttttgcataatacgccaagcctgcttagcaagcatggcttggttgaaatgcacaagagacctaaaccccaaaccacccctaaatttggactgacaaagaaacttccaggatctccaatgaattttcctagtttccccagaagaaccccgccagaatctagccatcgcagcctcaatacctttacaaattttaacaggaagcctaaaacaagccatagcataagcaggaatagcctgaattacagctttcagaagaacctcctttccagccctagaaaagcacttagatgaccaacccctaagaacagaagcaactttatcacagaggtaagtgaaagagtgatatttggatcgagtaagacactgaggaagacctaaatatttacaaccaaaaggtcgatcctcaaggttaaaattttgaaaaaacagagcacgaatatcctgcacagtattaggagaaaaaaggatagatgacttagagaaattaatggcctgcccaaaggccttagaataaatattaaacacatcctgaagagctaagcaagagttcctatcagcagtacaaaataaaaggctatcatcggcaaaaaataaatgagagatggcaggagcatgtctagagatggctataccattaagaatatgagcttcatgtcgcactctaagaagagaggataaaccttcagcacataggataaaaagataaggggacaaaggatctccctgcctaagacctctcgagggcttaagagacccacgaacatcaccattgagaagaaaagaaagcttagtagtagtaagacatttcataattaagttaacgaaattgacaggaaagttaaaatagaacattaaactttccaaaaagtgccattcaacacgataaaaggccttagccatatcaagcttaagagcagcccagccgcgtttacctattattgatagcatgaattatttcttgggcaataaggatattatcaaaaatgatacgcccagaaataaaggcactttgaaaaggagagataattttgtccaagaccaatttaaggcgattcgccaaaactttagaaataactttatacatagtggtacaaagactaataggccgaaaatcttttaaagagctggcatgctgttttgtgggaattaaagctataatagtagtattaatattcgaaaaattaaccccattatttaaacaatctaaaaccgcattaacaaaactagctcccagagtatgccaatttttttggtagaaaaaagcattcaaaccatccaaaccaggagctttatcccctgagaggctaaaaacagcttgtttcacttcttgagctgtataagagctagccaaataatcaatatcagtcacatctaggggaggccctaaacaatccaatatctgattagttgcctcagcatcacaaccctcagagctgaaaagattggtgaaaaaagaagaaacaatactaaacatagcctagggatcattagtactattaccaaaatcatcctttaaatatttaatagtattattcttctttctatgagaagcaaacctatgaaaaaatttagtattcttatcacctgctctaagccaattaactcaagatcgttgcctccagtaaacttcctccttataaagaagagcatccaactgggactggagatactggaccctaagagcagactctctactactagaagcagagacctgaagcctagcaatctctttttgagtatcctgaattctagactagaacatcatcttagttgatttgttccaggacttcagagcagaaacacaagcatcttggcaaaaaagaaactcactaaagcattctcatgagaagaggccctggaagaattcatccaagagtcatgcaccgtggaataaaaaacagggctctgaagccaaacattttcaaattgaaaccgcttcctgaaaggatgtaaactagaagcaatggactcatgaaggaaaaccttaagaggacgatgatcggagccataaaatggcaagtgatgcaaattagcattagggaaaagagtcctccaagactcagatcccagagcccaatcaaggcgctcatgcacatagcgattatgccaagtatacttatccccctcaaaaggaaagggagaaaggcagaacttatctaaaaattgtgcaaatttctccatatcagtatgattatagtaattactccctattttatcatcaaaaaacaaaaaaatattgaaatctcccataataagcca

SEQ ID NO: 319784 - DNA, 1531 bp, Cannabis indica
taataattttttttattttttaattttgagccccaaaatgggtgggccttaagcacgggcttagctcgcttatgcctaggaccggccctgtacaccccttaagttaataaaaattatgtgtgagacttaagcggagggtgagagtacattgggcaactcattcacaaaaatgagtatattttaataaaatataatatgagagtatttttaattaatgaatataaaaaaaaaaaaatagtattcctcaacttatctcattactaagtattcctcaacttatcccattactaaacattataaaataaacattatagttacaaattgttcaattatttctaaaatagttagaaacggttattatacaggtcattcatataattttttttaaaaagaagatataccaaccttcgttaaaaataaattacatgaaatatgttttttttttttcaataagcttgataaataaaaaaaattgttttttatggcctattctatttttttgatatttttatgggattttttctcttatattttatagtaactgattaccaccacattaattatttttgaaaattagtaaaattatctaaatttatatttgtaaaaactaagtctaaatttaccacatttttataaaattatctaatttaacatttgttagacaaacatattagaatgtctttgggccacaattagttatattgaggcccaaactaaaacccattccctttctaaaatatggatcttttttatatgagtttgataaaatatagataacactttcaatgttgtgtgatgtgagaaagaaccccaagtttctcttaccatatcaaacaaaattaaaaatataaaatgatcaagtcgaacaaaattttgagacatgaaattaagtgccgattttgaagagttttcatccatggttatttttggaacatggtaatatgaaataaaaaattatagcaatatgaatggaatttttacaaaaatattggattttggattaaagtttataattttcctgccacacggattttttataaaagtactgtcttcttataaaacaatcgtaaaataacaaaaaagaacaattaaaaacaatagtagaacaactaaaaaataaccataaaacaacagtgaaaacttaacacagtacacagtatgaaacttacgcagtgtttttgaaaaaaattccgccccacagtaaaaaagaaaaaagtttgaaatttcaatatgtggtgtaaaattgaaaattttagttatatagggcctgctctaaaatttagtggttataagaaaaaaaattaatttttgagcccttatttaaaaaatatgatatttttcaaaatcaacaaaaattatttataattttaaaagaaaataatatttttttggacctctaaattaggtgggctctaagcacaggcctaatctgccttcattgtagtaataatagggaaacttataaaaatactgaaatttaagttaacttttacaaaaatactgtcacacggaaaagtttttaaaaatactg

SEQ ID NO: 319785 - DNA, 1598 bp, Cannabis indica
tctctctctctctctctcccactatgacgaacacacccacacccattaccgtctctctcaatctctcaatgtgtaactctctaactccactcggttcctcgcgacatcctgtgacaactcacaacaacccacaacaagatccttgaagccccaaaatcgacaacccacaacctacaatttccactatcgttgtcatggataaaaggacccgagccacccacccacaattctcacaaattttgataagttttattataattatcattgagtgattttttcattgattaggttttgaaatgaaattttgggttagttttgttgattatggttgaggttaaggaaatttgttcgattttaagttgattttttgtgtttgggtaagcaattgatgatgtctgttcatttttcttaatttttctgcatttatcgacatttagtgatatcgttagctatatataacgatatcccccaatggtttatgcataataccaattagcaacatctagcaatatttgttgcaacacgtggcgacactagcattgttgctataactaatgagcgattttatgcgatattgttaataatgtatggtgatattatcttcaacagaatatgattaagatgtttagctatatctggcgatttgcaacatgttacgacattaggaactttttttttgtatttgttgttatgtactgactagcaacgtttaacgatatttgtggcgacatactataatatcacctctaacaaactatgcatgaggtgtttagcaatgtatggcgatttgttagcgacatataacgatatcgataattagtatttatagaaattcatgtgttgtataacaccctaacctcgaggaacgctacgtgtgcttttataaattagtttataataaactaacagtttaagtaaaaatgtgatttaatataaatataaaaatcatagcataatcacttttataatcgggggtccccttctaaaatattacaagacatgctattacagtattattacaaaaatatacttaaaagttcagaacatataaaaatacaagtcacgacaactcagcaccatctgtcagataagctgatataattcttggagaagatctctaactcatggttgtccaaacatctcgtacctaatacatgcacaacatagcatccgtgagtcacgactcaacaagaaaagcagtaatatgacatcacaactcattacacgagcatcaacaattaaattcaaacaaccagaatcaaatgatcgcacaatactcatataataaaatccaaatcaacatagatactcagttgcaatatataccagtataaaggcattcagtaatacacaattacttgtctaataatacaaccatatccattacttcataaagtaacccttcacattgttgtctaaccaaacaaatttgatgcctaacctggcatcccaatattcttattgttgtctaataagataaccctgatacctattctcagtatcccaatatcactatcattatctaataagacaatcctgataccaatcaccggtataccaaatgtcatcagtgttgtctaataagacaatcctgatac

SEQ ID NO: 319786 - DNA, 647 bp, Cannabis indica
ccgggagtaccttgtactccgggtacatcttccgggacccatgcgaatagcgcttcctggtgtcatgaaaagacttagcagttcttcttaagtaatttgatccacgtgtcccctcttgactggtccacgtatattgggcgaatttaggagcaacaatgtggttaagtttcactaatcatagagttcaagtaattttgttgtcaatatactaacatttaccacgtgtacactgtgacatgccaccgtagcacttataacagagtcttttggatagaaaggataaataactaatcgaagtgaggtttgaaagattttactattaaaaaattaatttatgtagttaagtgttactaattttaaattttaagtagtaatattgttaatatccctttcataaataaaattttaattttttatacttgtgatcatcatcgcatatttcatttttttcctataaaatttatataattattattataatttgttctcatataattttattttccttcttctattttttatttttatctctataattaaagactatattttcattaataaaaaaatacatgtatatgttataaaataatataatataatataaagtagatgagaagaaagaagaaaaagatgaagagagaaagaga

SEQ ID NO: 319787 - DNA, 2400 bp, Cannabis indica
accaataaactcttaaaagagtaaatggttcaatattcatgtagtttactaattatacataattactaaataacatgacttgttagaattttatcaatgacttgtagattatcaatggtcagttatggattcttaataaccatttaaacttgagggttgttgtgaatcacaatcaattttatacttgaggtggaagtttaaaaaatatgaaagatctttttcagaaactattttcttggatcgatcactccacactgatcaagttaattcttaattccacaattctagtgttgtgaggtggacaacaaaacatgtaacccatcgaccttatagcatttaagatgaaatacttatttatggtaattaggcccagttctatcttttgacaattgtactctaactgtatacaagtatttctaaaatgtgtacatgtcataaagttggtttccaaccttataacatctcaaaatatgtttgaaaaacaactttggttagaaaaaaaatttgatatggacactgttaatgcagatttttgttaacctaaattaataagccttttagtaataaatactttcagaaataaataataaataatcaaagatcaattactctagatatttttacttgattttgcagttaaaatctgcatactccacgagtctttcttatttatgatatttgttgagtacagaatacaatatcaaaatgatagtatttttctagcaatttctctgtccctttttctgtagattctgcccctatttataggaatataggttgacagttattcttttgggatcagtttaaacataattgttcgtgaaatgtggacaattcacacgtttcatttaatcgcatgtgggataatatctaataactgctcaactgctttttatttttatcccttagatgattattgctaacttggaagattgtatctcacttgacatgagttatcctccctttctacctcagtaagaaaaatgctaagtgttggcaggtagttcgcctcgtcacatcccttcatttaagttaatattgcgagtgactgtctcgctatatgtaatccaaggttgtggtatgtgattatatttattatatttgaatgaataaatatcttctttttgactatatattctgaggcaagcatatgtctcgccaatatcagttcaatatttttttttatccttatctcgcttaagactatataatcagtgagttttgaatattttctattaaacctttatataataataagttattttaacctgcatttaacgatataactttattatatcattaaagttgattcatattccatttttaggatacgtgtcaacttttgaagtgcagctgaatttcaggtataacagacactaccgttgaagagtgtcaactgacaaagatttaggaaagtttggaatttgttatgcagactcgaccccatgtccaacaatgcttagtttcttaaacctgccacacaccattatttggttgtaccaggcatatgtattgggcaatgaacccatacttttaagaaactttgcaaatatattgggcatttatccatcctcacaaattttaatgtagtattctccatctatatttgatgtcactatcttaatgtgcaaattgcattatttctctactcaagatgtaaatgtctttgaaacatacaaatctttactttggtagagatttaaattatgtgagtaataattaataaatgagatgagaacttttatgaaatatgagtccatacaagcgttaattaacttgtatgatttctaatatgagagaattctaatgtgcaccattttagcttgtttttatacttttccttaatgtaattattaacccaaaaaaattcctttgtgacgtggacatcaatgtttgacatgtggaaagaaggatgatgtcacagagttaagtagacccaagtcatagcagtcgacctgggaggggaccctagccctgcgccaaggctgacttcgagatctctggcatgcaagtttggacttcaataacttgaatccaacttactatattttagtactctgtaccatgaagacatggagcaacctaatcaagccccgggagttgacatccatcgcccaggttgacaattaacctgcgactttaccttcaattgctcaaatgccaaatctgattcaactagtgaatctagaatggtcaaaaatagggtaggagacctcatcctcaaggtcaagaaccttacaagtatcaaaacgtgatcccaagagctcgaggatagggtacatagcaccctggttgacaaatggcatggcgcgctgggttttcttattcgattctgattttgttttgaccgtctgtctagtttttcacaataagtagaaagtcaaattcacaactttgcat

SEQ ID NO: 319788 - DNA, 2419 bp, Cannabis indica
accggcgcttatttattgccggcgttattcctcgccggtaaaaggacgttttaccggcgcagttaatgtacgcgccggtaaaaagtcctttaccgaccaagcttcccagataagctttgccggcgcacaactgcgccggcaaagctttaccggcgcagtcagtgtacttttgccggcgcaacaatgcgccggtaaaagctggatttcttgtagtgaatgcaataactagccacactctttctatcatttggatggcatgcccaatctgcgtccaaatccagtgatgttaagctgattagaaaacttgatgtggaggttgtgatttatagagccctttaagtaccttagtatccttttaactgctgatcaccaaggtgttgttatggggcctacagtattgacttggtttgtttactgcgaaagataaatctggctgagtatgagttaaatactgcaggccttttatgatacttttgtagttggtaggttgcagctgcaataatttaccgtcagctttggaaagggctctgccaatcgtcataggtgttgaacacaattttagatgaagcattcttgatctatcaagtaactctttgatatattttgcttggctaagataaaggccaatttcaactctatgtaattcttgttggaattttatgccctaaataaaatttaattttactgtaatcttatatacttccaataaagataaaaaatcatatcttgacattaccatatgcttcgttcaaatgttaattacgtgattataagtgtaatgtataagttatattaaatcccaaatatattattatttacaattataatgatgtcatcacattagaaagtaattgtgcttatatactttaaattatttaatcccataatttcttagtgcacagaatttacactgacgtgataatcaacgatgagttttacctacacttagttaagtgaaatatattttccaaggcattattaaagtaaactagcatcaaatgtattagctatacatcagactagatcgatattgacagttgaaaagatatcataaattactgttatatcatttctaagtcaatgtcacttagttgatcatagatcatttgatctcaagagataattaaataaatatgttgatattaaaatatataaataaataaatgtattagctatacatcagactagatcgatattgacagttgaaaagatatcataaattactgttatatcatttctaaatcaatgtcacttagttgatcatagatcatttgatctcaagagataattaaataaatatgttgatattaaaatatataaataaataaataggaaaaataatacttaacttgtacattaattttaattaattttagaaccacttaagttaataattttttatgtgtttatttcgataggaaattaatacttaagtattgaaagctaatttagataattaaatttaagatactaaagtaataattttattgaaaattttattatttgggtataaaattaatttattaattttgaacctgcccaaaattaagtaattttcatagaaatttattttaaattgaaaatttacacttaaggttggaaaataaatttatttactttcacaactacttaagttaataattttcattaatatagattaaaatttatactttggatataaaattaattttataattattttatttctaagttagtaattttaataaatatattaaaataaattgtcaaactaaatagttgaataaaaatactactttctttaaataatgaactttattttataggacattagatctccattgttggtcttacattgttattatttttaatgggaccttgtggcccttgacgtccccctaaaagctggtcatccattagaaaatttaacgcacggttaaattatctcaaaagataagtatttaatagatttattttctagtagacttatccctaaagatgactgcttagaattgggtttatgaatatgaaataatagtagaaagtcataaaataagaatgattttgactctctcctaaacgagacaacgtcggattcttattttgatcgaataaaaggttgctaaaatgtgttcatagaagagctcattacactgtttaactgatgatatatttgactctcgccataaatagggcactgcatataatttggttgttaaccttggagagttttagatatgctgtatttttttgtatttttcccatatgtttcatacttgattacgtgtctataatttttcgaatatgtgattagaatttgtattggacatagcattgatttctgctattgattgtgtagtatcaattttgacctttcattgttgatctaacttagcttgttatttttaatgagaccatccccaatagattgttatctgtt

SEQ ID NO: 319789 - DNA, 2358 bp, Cannabis indica
aggtggtttagcccccaatatccttaaaatttataatgacatataaaaaaattgataaaaaaaaatcattaaattttttctcatgttattggaatgacctttcattccatttcaaaataaaatagttattttaccaaaatagtagaaatgacattccattagaatgaatatattccaatactttaaaatgcaaccaaacaaatgaatggaatgaaaattgttttattttaactccattctattttattacctccaaccaaatgccaccttagggtgttcattggaccacatgcaatgtttttaggcctatctagatgcgatttaattatatattatattagatgttagatttcaatattcgatcagatccaattaatttcagtcattcaatcgatccaacattcagtggttgttggattgaattgattctgttcattggatgtatttcatgtatatttattagtttaatttgggcttctccaatattttggacctaatatttatcggatcggatcaaattcatctaatcttttaaatccagtatctattggattcaattggatttatccaatcccaaaaaaaaaaatgtaaattttaatgttaatttccatatatacatatatatttttttatgtataacaacaaaatctaattactcattcaaattaaatgaaaatattaattaatttgattggatgatagatgtattggattttaggacaccccatccaacatctgatcctatccaattgaatattcaaagataacatccaaattgatccgatcataattggaaattcaatgtttgacgatcgattgtaattagattggtcagttattattggattggatcgatttatgtacacctctaattacactacgtaattactaaaaactttcaattttaagtattaaccactaacaaatattatttttttatgtgtaataactaactattttatcaaataagatattatcaatttatatataataattatcatctcatgtctaaacactctgatattttaaatattgtgtaattactagactattactgcaccctaataattacgcaataactttccaaacacactctaaaattttaaaataataaatctttcaaaatagaaagaaaatctttcaaattttgtaaacttatatttggctcaatcaaaatgattttgtgcacacacacaacaattcagaagaaataaaaaatagaaatttttattaatagaataattagtatttttactcattgaactttttacactgttaagttgtgccccttataatgtataacttgttaataatacccattgaaatatattttacagtaacgtaacccttccattatattctatgtaattttattgtaaaatgagtgaagcagtggatgatcgttgataaataaacgcaaattaaatacctttaaccgtttttatgttaataaataatagaataaaagacttttttaatataataatttatattgatatttatatttatagtattttaatcattaaagtaaaaaggataaaaaaaaaagtatttaatttgtatctatatataactaccatccaccacgtcactcatttcaccataaaattgaatggaatatgataaaaggagttactgtaatggttatattttaagaggtattattcatgagtagtatactataacactactaaaaaatacgaaattcgtgacagttttacacccggtaaagaattcctgacggtcgagaatacatggtagaataggtgacggtaaaaaaattagggaaaagaatttccgacaattttatagttgatactataggccacgattttaaaacgtcacctatagtatagccaatggttttaaactgtggcttatagtggatttccccctcaaaaaacaaagtcatcgtcttcatcctcttcggaaccacttctcgcatatgtcggagccgctcgaaaacctttacaagcttcatcctcatccactgtcgctttcctcctcctcaaaactttcttttacaagcttcagattgcttttcacttgactattctcgaaattttcttcggattgcaagctttaattttttttgcacacacatagatcaagatcaacaaactaaatcatagctaataaaaatttatacagtaaataagagaatgttgtgcttacctttgtgttgctatgagagagcggaggagaaggacgaagtgagagagagtggaggagagggatggcgtgacttatggtcgcggaggagagagagctgagaaataaaataaatttaaaaaagactttacaaaaataagatatgattttttggggggtttaaatcttaagaggagggaaatgaaa

SEQ ID NO: 319790 - DNA, 2380 bp, Cannabis indica
agattgggacctggatgtgagacccgagacctgaactcatgctagggacgagacccaaactcgggacccggactagaccaagacccaaacccggaatcggacccgtacttgggacttgggacctggacttagaactaggacctagtttcaaacgaaggacctgaacccaagcccaaacacgagatccgagttccggactaggatcatgacccggacttaagactcgggacccaaaccaggacctggacctagaccagagacccaaacctagacccaggccccgggacctaagacctggactcagacctaggctaaacttgaactcaaatttggatccaaacctggacccgtacccgagacctgggactcaaacccagaactatatcctgttttagacccgagacctaaacccaaatccagacacaggagctggacccaaacccagacacaggatcagagacccggagttggtgttggggtaaagtttattgaaaatatattatctttatacaacacaagtcaataccaaacatagtattgtcttaaataatactaatacaaaattaaaatggatataaaattataaatttagatataaaattaaaattctaacaaaaaaaaagagaagaagtctggtagatcagatacgatctgaataagttgggtcaaatatatgattcgatccgagcatctaatcaagcgggcgagatggatcgttacctgatctgggtcaggttagatcatagtccaattaaattcgacctaacctatttacactcctaaaaattataaaatcaattgtaaaatagattctctttttgactttaaaagctcacttgagaactaattttggacaaattaaaggtctaattagagttcctcgttctataattttggacgagatcttgacaaaccataacattattgcaaaacccttactatgaaaaaaatcctcattgattaatattatgtgcttcgataatctttgtagcctaaatttatttatttctagttgttacaattactaacttattattttttcccattcttccctatcattttcaagaaagcaacttgagcttcaaattgactatatgtataaattcgagtaaatgtatagatcgatgttctatatattgatgacacgatgttgatccagtaacaataataattcaaatcaaatctctatctgaccattccaactaagaccattcactactcaatgacacaaaattaaatttcttcaatgccatttgacaattttatcaattagttcattaattttttctttggtctatttctttttcgtaaatttttaataaactaaataatttcttttgatgaaaaagatcattgtattgcattatcaaccatttccaccattacatcatacttaaaaaaaaaaaaaaaaaaagactatacccctgtacattaatgctcatttacttacgtacttacaaagcttcaacccaattcctatcttcaataaaaattttacaaggttaaaaacaatctaatctcactctacaatcattttgaatcctttgaactgtatgattaatctgccaaagcttttgttctcataaaacagcattccttacctttcaaagattattgcaatggtaatcttttttcaattgctggatatagtttttgatgatttggacaactttttcaacaagtgtgctagagactttgtcttcaccttccaatattgagctatgttatgttttaatagattccaagcaccccttgtatatacattcaaagaacaagtgctccaagttttcattgtcttccccacacaacaagcaaagttgatccaaagatgaatcatttttagcaatacgatccttcgtgtttaagtctcttccacccttaatattatatttcagtgcaataaagcagtcttggctaagtatagctttaaatttgtttttacatccactaaataattttttgttgaaactataaatgtattatattggtcccaagctcgatttttttatttgaaactgtaaaagtaattgataggaatttcctatcattttagtacaacagtagcagttatagtgaaatagtgagttgtatattgatataaaagaagagaataacaggttgttgggtattcgagagacccagctctctcccaagagctaaaagctcacttaactaaatcattcacaccctaaccttttctaatacactcttatatatactaccccaatatcccattacaattactcatttaccctcattatttattaacctaaggcctaacaatattataatgaataattaataagattatatattgttgaatagatttatgtaagtacactgattttgttcataatcactacaaaaaattgttactttt

SEQ ID NO: 319791 - DNA, 622 bp, Cannabis indica
aaaataattacacaccacttgaggttagctccagtcgttatacgagatgcgtgtgtattgaaggttctgagttcgagtatcaaattatacattgttgtaatatatataaacgcttaaattaaaaaaaaaaacaaaataattacacaaaaagtcaaagttacaatctttaattatgagaaaagagttaaattaaatatgaatatcataaaacaaaatcaaagatttgccgcaatactttataatccaccttaaataaattagtaaagtaataaagattacaaaaaaagattacaaaaataattgacttaaataaatttagactccctctaatgatttgccgcaatactttataatccatcttgctaatctgatctctgaaacacaccaagtagtgaactaccttcaactattgatgtgtgctttacttcctctctaagtaaggctttaaacaaatcttctcccaaagatatatgctcacatccttctaaaatgagacttagaaaagtcttctccggagacccacacttgttcaaagcttctcttcaacctattctatgaatagtacgagatcataataagaaaactaaaacttagttgaacactctaggtttttacaaatgaa

SEQ ID NO: 319792 - DNA, 881 bp, Cannabis indica
ggctcttcccaatagtaatttttacctcagaaagaacttctttaattgttgacgatcaatatgctataaattatctattgttttaatctaaataatcaacgatcctttatatattgtctacattgaataaagactaaaactaccatactacccttcaatatattttatccttaaaacagttggcttcctatagtatacgactcgttaataatggtgatgtttggtaacacttttatttttaaatttttgtttttgaaaaacaaaaatgtgtcttacaaccactttatttttttaattttaaaacaaaaaccaaaagtgtgttctgtagttttcatttgttgattttatttaagttgggtctgggtccggttttggggcaggggctagggttggagtccaggtctggggcaggggcaggggttagggctggggtttggggctaaaatcctagtttggggtgaggtacgggttaagggccgggtccgaggctagggtctggggtctagagccagggtcgggttcaggttcgcttttgggttcgagatctagggtcggggtttaggtctagggtcgagtccaaggctggattctggggtcggggtttaagtccgggctagaatttgggtctaggtctgggttcgggttcatgtctaggcttggggtcagggttcgggtctagggttgagtctagggccggagtctggggtcagggtttaggtctagggttgagtctagggtcgaggtctggggccggtgttcgggtttaggatttgggtcccaaggttcaagttggggtcggagtccaaaatattgattaagaaaaaaatttgtttaaaaaattttaaaattaattttttctcaaaattttgattcttaattaa

SEQ ID NO: 319793 - DNA, 890 bp, Cannabis indica
attaataaatgtttttaaatgtcaaaacattactagtgctttattatagaagcacttataaatatttattttattttattaattatgagaaggaaaaaaaaagtagttggtccacatgatgcattcttctctcctactttattttttaatttttctaaatttaattaaataataataataatataatggtagccaacatgatgcactcaaaaataaaaatctttctcaaatatttggaggtccccttgttttgctccactctaataaaattattatatctatgccccctacatgtctcttatgtattgtacacttataatatataatatataaatatgttataataataaaatcttatatatttaattttatgatgtaaccatgtacattgactaaaaaaaattgtaaccatgtacatgtattttattagaataagatgatttcattattgggttttaatgatacaaattatatttaattataattggatatgctcctattgtgagaagtgtataggtagcttcctttttttttggggaagtttttaataatctattttaattaatatggcattctcatatggacatttaattatttttttagtttaggattcaaaaagtcatattatttatgtgtggtttattttttcggtttaaatttttttatttataaaaatacatactttagtaaattatttaatattcttttttaatttttttcatagctaatttatagttgttataaggttgatttttttgttttgttttataatttattgggtaaatactattttggaccctgtgttttgcaaaagttacagattagatcctgtgttttgttaaatgacaaaatggaccatgtattttctaaaatagtaaaaataggaccct

SEQ ID NO: 319794 - DNA, 1222 bp, Cannabis indica
attctctatctgaatgtcaagtcacatccaaaaaacaccctttttgtgaaaatgattcctaaatggataggcatcaagtgaaacgggtaaccaacatagggatgggatgggatcttcatccaaataaaataacatagggatgggatggaatgggtttgatgagtatgagtatgttgacacacaacattatttttattattattaaagaaagaggataagtggtgcatatccgattcctaggcttaatagtaattcaagagatcacgaaagagtgaattgtgacttgttaaaatttaagatgaggtgaatgcagtttcacttcaaaattaattggcaatgagaagagtagtccatatgacaatttatttccacatattagcaatgtgtgactaactctaatacaccctcctcatatttgagcctagaaagtgtgggtgtaacgaacgacctttaaaaaaccacagggccgaacgtgatatttgcaagaatcccacaaggcaaaatatcgagaaaattgtgggtgtacatgtcggaaaatttgtggatttttgaaacaggtcaaagaccccaacactgaaaattagcacacattgatcgaaaggtcccaaatagaggttaaatgggagatagcagaagtatctttttggaccggcaacactttggctcaaaacggatcacaaatgactttttggatcggtgacactttgggctcacaacggatcacaaatggctctgataccaagttagaatttggaaataagataaatgaggttccatctcaaaactaattggcaatgggaggagtagtccattcatcttgtatatgacaatttatctccacacattagtaatgtgggactaactctagtacaccttcttggtggcccatgcatgtcactttagattttgagattgcactcctccagcaaattctctagtaggatcagaactagatttttgagattcagtatgaaaggtagtaattcctcgttggctttcttcttggatgattgaagcataagctttgttgatccttggaagaggatcttgcctcagaacttgagaccttgcaagactgtatgattcattcaatagtaaagaattaatttcttttctttcctaaaactaatatgaaattcttggctctgataccatattagaatttgaggtaaagtgaatggggttccatctcaaaactaattggcaatgagaggagtagctc

SEQ ID NO: 319795 - DNA, 2790 bp, Cannabis indica
tgtttaaacaacatacttgtgagtagatctaagatcctggtaaaataaatattccaacatgatgaactccatatgtagattggaaacttaatttcattgataaggcaaatatgtgatcgcatgagtacataatctatgtttggaggttaacctaagcgccctctttaatttagtataatgtactaaaggtaaactttccattgctaggaacactctcctgtatggtggaacttcacttttaggaacatcttagatgtttgatttttacgggtcgtagattgaaggcttcacttgaatgtgtcagcttatgagtgttgggagtattatttaatagaccttgtagggttttgacgagcttcccaaagagcactcacttgtatcttctcttaagactctgtttccttcctccatacaaatatacttctccacttttttgtagaagttgtctaagccatccaactgtctattcagcatactcccccacaggccacctccaaggtatacctcgaggactttggcaaacttgagttcatctttggaaaccttccctactttggtaacttcagtgttgaagcactggatgtagcttcacaaactttcttgtccccttgcttcacattggtgatacttgtgacagacataatgttatcacatgtagcctcatgttgttggaggaattcttctgaaagttgcttccaatatgtgatcttctctccagtcctagtcgtttgaaccatttatacgcggctccatttaatgtgattacgaaacattgacaccttgccttacataacacctttttcatcttcattagctcattaaatgcactaagatggtactttgggataacggtaccatcatatggtgtcatctgtggctccttgaattttgatagaagtggtttcattcgaatctccctcgagagaggggattctgtatcaaactcctcatcatcattcaagtctctttgcatggcgatagctatctttcaacgtaggccttgtatttctgcctccaactccttcatccttttgatcatcctcttttaagggttaacgagtggaaatcgggtcttctgtgtggtttgcattggctcgtgagaggttctcctcttgttcgatttgtgtgtgacttatcactaaagctaatggataagccctttttacttaccttgatcttagggggagctataggcgaggttcccctagtatgagacctcttgggtgaagtctcttccataggttatggggtgtttccctcagttaaatctcttttatggtgggtattgggtaggctcaagctgtctcagttggcccattgggctcttgtcttgcgacatgctccttctatgttcatctcttggggtgctattagtggatgacatggaatcacctttgctagcatatgcagttgagatctcattccccagttggtggcttttgtgacgaaaatgcaaggcttgggttttacctttgagtatgccattcaacacttcttgcataccagccacagtggtttttaacctcttattcttctagcagaggtcacctatttcctcttcatattagtgagcccgggatcttaactcaccgagtacaattgcttttcctttctaagcccacgcgttgaagtgttaaggtttgatggcacaaactgtggaaggcactacaccagagatgaccttttcgatagttgaatacttctatcaatgggatagcctttggtgtctttattaagtcacatagtgctaggggccctctttgagtgtttgcttggtggtctgcactttggttattcttcttttggctctctccgacgataagaggttgatgtcctcttactacggtggtcggctggatttcatttgaatgaactccattttcttagagatgatgggaatgtcttgacatttaaaaaatgatagttaatagtttaggaactaacatagctagagcttgtcgttcccacagacgatgccaaaatattgatggtaaaaactcgtaaactaaactttagttagaaaattaaatgcaaaggggtgaagatgaaaagctttagaaaaactcaaaaaattaatggagaaaatggtgttgtactaaatctctaaactctattacaaattattattttctaattcctttacaagttttcaaatggggtttttatacttgacctcaaatggctttgaaatacaagtggtcccaaaaataaggggacaaagttctgattgtactataagggtcagcgtgtaagatggggtagtggtggagtgttggtcagatgtcaacttgtatctagagtgagacaaataatgtctccactgcttgtacttgtattcgttgtacaaccaccttctctctacaggctttgtcagaggcgtgctagctttaacgagcgcgcccttggtcgtacatccctttggtattctttctatcaccacctatacatatgatgagggagaaacacttggtgatttggctaagtgttgagggagggagcaacgtttggtattttggccaattattgggagagggagcaagaattggtaattttactaagtgttaggagaggggagctcccttggtacatgtggggagtaatgggagcggggagctctcttagttgaatatggaggaaagagagggagagagcgcggagctcccttgcttgaatagggaggaaaggggggagagagggagggagcggggagctcccttggttgaacagggagcaacggagagagagagagagagagagagagagagagagagagagagagagagagagaga

SEQ ID NO: 319796 - DNA, 1328 bp, Cannabis indica
ccttgcagttgctaaagtacacagatatgtggatattatggcatgtacgatgtaactgcagagacaacgataacgaggacgagaactatttcaaatggcttttgctagtcagatgaaggaaataataaggtatccaatagttgcttcagaaaagacaagcaagaaagcataatatacctgtataagcataatgctgttaactcaaccgaatgaaatattcttctaaatatcgaatctaactaagctattaattaagttaacagcattaaggcaataatatgatattatgagctatttttatttttgttggggtttactattttattatcaattatttgtttttatatatataatatacaatttgcatgtttggaattgtttttttctattatattttgtgaaaagttgtatttaaatcgatattaaaattacactggtgaacaaataaatcactcaaattttgaaatttcgtctttaaaatttaccccaagagaattacgaaaataagctccaataaatcgccaggcaccaaaaataagtcatcactaccaaaagctaatttttaccgttagattatcatcaacggtggaaaatattttatttatattttatcttatatttttgtgggcctcctttacctataaaaggagagctcgcttaatttagttttcacattcaaaaaactacttacaaggtcagagcttctctctagcctttctctctctagagtttagagtttctgatactttgtctattgttgtaatcaccatctcgtgagaaataaaaactcgaagtagacgtagccttatgattatcgcgacatagcaagtgaactactataaattttgtgtgtctctcttattaattacttaacaacttatttattctcgccaatctagcgagttgatgttggccactttttactgcaacacattttgagtacaaaataatttattatagtcttttaatcaaaacagtttttttctaaaagttgggttataccaactttagcttttagttgtaacttttccataaatttttcaataagctattttttaactgctaaccaaataccttttttatcacaaaattttataaagaaacttttagcttttcgcaaagttgtgccaaacagacccttagttccacgatggaagagcatcatgggatatatccatgaataaagtagaaaaattttgaaataatcttactttaatgtgtatctttattttaatctgtttactgagaattttgaaactaataaataagagctttaagaattagataaacgattagtaaatgagatggagattttttacgtagttcgg

SEQ ID NO: 319797 - DNA, 1590 bp, Cannabis indica
aaagtggggcccaatatccaatctatggccggccattatgtattgattttaccagaaggagattcggactcagatcttggtgatactctgctatagaaaagatacaagggttagacatctgagtggaaggagacattatattccactgcaaccactataaggtttcttataccttatatgtgtttatttcatatcattttggaagttcatatttaggatgttaaataacatacttgttagtaaatctaagatcctggttaaataattccaacacctagtcctggtcccgttctagggtcccagtctgcttccggttctgctttctgtttgggtcacagggtacgggtccgagttggtttctgggtcaggggccaggtccgtgtctgggtttaagtccgagtctggttctggggccaggtcaaggtccgagttcgagtctaggtccatgtcccagatccaaaatactgactacgattcaggtctaagcccctggtccaaatctagatcttggtcttagttcctaatcttgttccacttcgggtcccaggtccagtccgggtcctagttttgggtccaagtttggggtttggtctagagtctcgatcctagttgtgaagcttgggtcccgagtcttggtgttgggttcaggtcccccatccaggtttgggtcctaggtcttggtctgggtctaggtttaagtttgggttcagaatcccaagttctgattcgagtccaagtctcagtctttgtcctggtctctatcggggtttgagtcatagtctgtgtctaggtcctggtttgggtcctcggtccgagtccaggtatgggtctgggtttgagtttggggtttcgatctaggtttgggttctaaggcccaggtctaggtgccccatcgaggtttgagtcctaggttccaatttcggtctaggtttgtgtcctagtcccagtttaagctctgattctaggtccaagttcgtgtccaggttcgggtctgggtctgggtctgggacggggtcctagcactagtctgagctcaggtctatgtcaaggtccaagtctggatctcggtctgggtttgggtgagggtctgggttaaggtcccaagtttaggtcgagggcccaagtttcaatcccagtctggggctgtatctaaattcttgtttggatttgtgtttaggttgaatttttggtccggatccctatttgggtctgagtttgggctagggtctgagtctagttctagttctaggttcaagtcctagtctcgatcctggtcctattccaaacaccctgtcccattctggttcaagttctgatttcgggtcctaggtctgtgtccggatcagggtccagggctttgtttgagtcctagatctagaaatcaactaaaagtatattcaaagccctggttccctgatctttggtcaagattgagatgttagtcacttgttgtaaagaccgcttagtttaatttggaaattagcagttaatcacgtttaattatgaaaattatttatagctatttaaataattactatactgttattattgaattgagagatgcatttctatgtcattcagtagttttca

SEQ ID NO: 319798 - DNA, 1247 bp, Cannabis indica
taaatctctctttctaattttgcgattttaaaacgtgtgagctatgaatattaatggagaacgaaataattgataataatcattattgttttattataatatagtataaacgacattgatttggagaccaattaaattggaaacttagaaaactgacaattataaaattcggtcaaacaaggaagagagcaactatagcattagctaccaattgagtaaagcacttttcatattatcagttgtggtcctatacatatttatcgacttctcccattacataaagtgttagtaattaatagacatttttaagtgtttaatatatgattaagtaatacttgcttgatcacttaagagtagttaatatagtttttcacattagttattaaatttaaatatatgagacataattaataagagttgttttataaatacataaaaataataaaaatgtaatatttttatagatttattttttatatttatatttatgaattttaatagtttttttttcacaaaaatatggagtattattttcggtatgtactatgtaattatttttacgttattattacagaaaataatgttgttttacattaaatactggaaaaataatatttttttcttttgaaaaatcagtaaaacacactaaatccgtaaacatattgttagaatttggaatgaaagaagttaaaatgaatgaagttctatcttaaaattaattgacaatgaaagaagtgaataattcattcattttatatatgacaatttgtttctatacattagtaacgtgagattaactttaatatgaaaaaaatctataaaaatataaaaaagtaaaaaaatccaattttaagtaacttgtgtaaattttggttaaaagtgaataggtaaaatgtaggccaagtggttatattcattggtcccgccacttaatataaatggacaaaagagaaagacagtacacaacatctccccatccccatgtgaagggcatttacaatttttaaacacatatatgcataattattatacataaagtgagagtcgaacacttaatctcatacatcatattacttattagtttattaattaatacatattattatacgaagtaatcattaaaatgacataacaaattagaaaacaattaattaataggccgtcaaaagcgctgcttaattagtggggatcttagtaataattatgattagatgaaggggtcatttttctatatatatatatatata

SEQ ID NO: 319799 - DNA, 1275 bp, Cannabis indica
acatatttgaggcaacagaatcataattggagaacttttaattttgagtacccaaagcaccaggtgcctaaattgacatattttcaaccaagggcactttcaaccacaataatgaagaactgtcccaataattttcttcgtcttcatccaaaacgagaaaacaagtgcttttattggaaaaacagattgacctagaggccaaaatggggacccaccacccagggttgacaaagtgtcaacttgggccacttccatcagcattttaggagatttcttagggccatattctctattttcatcaacaattaagatttgagtgcttttgggaaacacaatcatctcggggtcagaaatgggacccagtgcttgggttgacaactaacttggtgcgatgggttctacttatcagaatttgattctatttcgagcattcaactattttttcgtactaaatgagggatacaatttgtaataggtcaaatttacactttgatatttcaccctttatgcaaggtgcaatatcggcaaaataggggagttttaagtcttcccgatttcacaaaacagcaatatctctgagaactgttgaacaacttcaccaaaacatttaatctgactaagtcgtttcaacacatcacttaggcatcaaaaaatataagtatgggatgtttcagaactcacccaacatccatgttgacgtgagaatgtcaacttgggcactgggttgttaacctggttgtagggtattgaacaactttcagtaaaatagtcataactcactcaatatttatctgattgacgtgatttaacttgcattttgaagctatttcaaggatctatcagctcatgtctgtcacgcacatcgcacttcataatatttcgtgtccaatattcgtcctcaacaaagttgtgatttttttttcagcatgtgaccccaaaacaatccgacgaatgagatttaaaatttgaaaattgacgattatcaacaagattcaattttaccattggatcatcatgaatcatccccaatggttgtaagaagtagtgttgaggttgagttcaggactatgatcaacagtgtgtgtgagatccttacgagtttttggggagctaaaattgcaaattggtccacttataaagttgttttgtgaaaataagattgtgataagtattgctcatagctctatacaacacgacataactaaacataggttgaccaacagttcgttcaaaaaaaatttgggggtgagagtaatttgtatcttgtttgccaaa

SEQ ID NO: 319800 - DNA, 1162 bp, Cannabis indica
ctaaacgccacttaaatttattaattaataaattctattatctaaaattatctttttttacctcttaccattattcatactacgtaatttggtatggttttaaaagtttgataatgaaaaaaaaaaatcattacctaacttagaatattattttttatttttttttttcgttgagagaaccttagaatagtaattttgagaacaaagaaaaaaagttaaaaaaaaaaaaaaaatagtgggtagagagatagagagagtaagaagaattaacaatattttaataaaaagtcgtgcactaacttttaattaattcacaaatccctattaaatgtatgattaggtaattaaataataatttactttaataatttttattgtcaaattaattacaacatagttttttgttttaattttaagcattggtattagatattgatagtgttaagaagattgagtttgggctaagatgaattagatttgtatttagtgctaccactacatgctcaataaaatattttcttttgaaatttaaattatacattattttttttttaattatttttaaaattactacacattttattaataaaaagttttttttctaatatttttaataaaaaattcaataattttatttttttttactgagagtccaataccaccagatgacatattgtgttggttaatgatatttcataataattattaattgagcattgttataatatatcagtgatatctataccattataaaataccttgcaaatagttagcagtattccataaaattattaatttaaattatgttgaacatgatacttaatttaatcagttacaatatgacatattagagggtgctagacattgttagtgtctttcaacatttctcttattaattgaagaacattgctatgaagtgttacattatgattggttattaatatttcataaaagttaataaatcaaaggatatgagcctcgatacttagttgtatcaatagcgatataacacgatgaaaggtgtttcatactaataataccttttatcatttctcttaattaaaacataggctaattagcaatatttcctcccgaactttgacatgtactaaatcatgccccctgaactttttgaccgttaaaaattccccctgaactatta

SEQ ID NO: 319801 - DNA, 1788 bp, Cannabis indica
  modified_base (18)..(18): a, c, t, g, unknown or other
cttctacgttctttaagnggttgtttaacatttttcatagatggtacccctacgattgattaatgatattactcttaaaaaatttattttttttaagttatatgagacttgatatttaattacatcaaatagatagcggtatgacaccgatgaatgtactaagcaaccagtaatacttcttggcaattctccaataattaaattaaaatgtgtcagatacccaaattatattatatatactaataacataataatgtgttagacacctttaattatcgttaaatattttccttaaaaataatataaatcggtgtcacttgttttttattatgccctcatcgctttactaactattactaatagtcttttaaagtattttcccaaaataataaaaataaataaaaaaaaaagtccttttttaagaaagaaaaaaacctaatagtctttttttaaatatatctttatgtaagttgacataataatatatggaaataattacaactaaaaatatatgttgttagctaacctctcccaatattttatggtaaatattaaaaaaaaacctcaaaaatttaagcagggatacattactaagaaaactctttcctaagtctttttttaattgatatatctgacaaaattgagtcagttggcggaatacatgtatttttttgtattattattatttttctttttataaaaaaaatatcttttcacagaaactcaaccattaagaacgtagaagatgaatctggccaactcaactaaccacatcaaaatgttgtaaatttattttactcatatctcaaaatgttcattaagtttagaggtttgttaattataactttctattttaatcttttaattaatttttgtgtttgaaattcgtcaaaatatatattttttttaatttcaaacttttttcataacggtattcgttatagttataatatcattcggtaaatttttgaaaaattatgaataatttatagtatcgaaagtagagtttttgatatttcagtttatcacggctacgtaatgtttgaaaaaatttaaacgtattttcagtacggtaaactattcaaatttttttaaaattttacagagatcattccaacacgtcttttcgagtacgaagattgtctaaaaaattgtaataaaaagttgacagcatctatatatctctatctgttttagtatccaaaataattttttagtcaaattttttctcatgtactcatgtaaattatagttatttaagaaattctgcagaattttaaggaattcgaaaaaattaacacgctgaaaactacgttgaaacagtgtattgcacgagtgactattttattttatacacgtgtaaaataaactctttgaatattattttctataatgtaaattattccgaacttttcaaaattttgtataatattttaaattggtatagcgtacatttatatgacaaaaaatattaaactaaaaagacaccgcaatgaatacttttttacaaaaaacattccggtatatattttcgagcatgaagattgactaaaaaattataataaaagaaattgattgtaacactgctctaaattttaatctgagactctataataaaaaaatattatacattatatttatgttgtactttatcatatatatatactaggtgaatgtacgtgccgagccacgtattgctagtttcatttaagattttagtcttttgaagattttgaatgtattttatttttaaagattacaaattttttgtttgaaaaaataaaatat

SEQ ID NO: 319802 - DNA, 685 bp, Cannabis indica
aatttttttaaaattatatatattagtcaaaatacatcatttaatttagttacctatccgaatttttaaattgaggaatgagacggtgaagtgacaatttaaaaatattttaaagtatcttataatttttttctaattttttaatcactttctaaaaattatattaaatttaaaattaatacagttgtatcacttaattatcattaaataaaatacaatcgcaagcaaaacatagtatgtttactaattaaaaatatattatatatgtgacgttaaaaaaataaaaataaaaagttgctcgtaaaatgagagaaagagaatatgtgaaataacttcactacttttttttgttataataacttgtgcttcattagataaaacagtgaatacaaagccaacaagttataaggaaggtagatgaccattccaaactagttcattatctaatcataatcctaacttggcaactttatgagccaactcatttgactctctacaaacatgaacaatagttagattatgactgaacaataataagtttttgatacaaattaaaatgtcatacaagggactactattccaattacaagatgtaagtttatcaacaatagttttacagtcaattctgagaacatccgcagggagatgttgttggaatttattttgccaggatcttagatctact

SEQ ID NO: 319803 - DNA, 808 bp, Cannabis indica
ttgaaaatactaaccacagctagcaccaccgtgccttctaataaaaataaaaacacctccttttatcttggccgtacgtaaccgttctcagtacactacctcctttcttctctcattcttttacagattaatgaaaatcaatgaaccatgccatcatgatctgaaaccagcccggagcagtactgtcttcttcgttttcgttgttgtgaggtccaatcatgaactcgtgtctaaaatgcggaaagaagttcaactcacccaaagcagttcacggccatatgaggacacataagatgaccaaaaaactccttgcttctaataaggcttctggtagtagtatgacagtactctcctccatggagaagaaaatcgcctcctatttgatcctgttatcgaaaggtcagcccaaaaacgataatactacgacagttggagctagtattttcaagtgtaccagctgccataaggttttcagttcgtatcaggcattagggggtcacagggcaagtcataagagcttaaggggctgttctgcaattaataataaatgtagtcccaacactactattccagctatagagagtacggctgaagaggctcaaacgacaatgttttgccaaaaacgacaattacatgagaatcatgagtctccctctggtgatcaaccaagctgccctaaaactagggttgaagaagttcatggcttccgtggtattgggatagacttgaataaaccaccaccaatggagtctgatgatgatggtggtggggatattctccaaataatttagtctctcttcaactttca

SEQ ID NO: 319804 - DNA, 475 bp, Cannabis indica
ctatgtgagctatttggactaaagggaacaaagtctaccatgcaaataagggtcgagacggatctaacaatgctccttatgctaacacgtacttagagaactatattgcagcaaaaactcaccaactaaatcctgctgaattcaccacttctagtgtccgtacatcaaaacaacatgctgctactgccggtttcaatagaaagaaaaagaaggttctatggaagccacctgaccactttcatttaaagatgaatgttgatgtcacggtgaacactgagacaaaggtgctgagcgttggagcaatagtatgtgatcactatggataagttatagctgccttatcaaagttcatacaaagttgcttcagaagtgatgagatgaaagcaaagctcttttccataacatcaattgggcataccaacttcaaatcccaattactcacaagctgcccatgaacttgttggaaattatttta

SEQ ID NO: 319805 - DNA, 1092 bp, Cannabis indica
aatatacaatcattattcatttctttgttatttgtttctatacattattgtcttgtatatttgttttcaattcaatcctaaaattctttatataatttatcatgtatactgttaaataaaatttgctatttgtctgtctctagccttgatttgtttctcaactttaattatatatgaatatcttttacactaggactggtgtttaattatatatgaatatctctagccttggtcgataataaattagaagaagactaatcaaaaagaaaaaaaaaacatagaataatagaatacaattcatcaaattaaaaaatatgaaaatgcccacaatttaaggaaaaataatatatcatatactaccacgcttcaatacaccaactcaaccaataaaatgtcctaaaaaatgcttctcatgggtggtgagagcaaaagtaatgctcttaccagtttccttatatacaatgtagaaaaggaaaaaaaagaagacatttttaagataagaatatatgaattggggcaaaattttctaagaacaactcatatcacatatatgttcttatatatactcctcgtcatcctcctcaccatccatttactcttctttcaagaacaaacccagcttctccaattgtgagtgagagaaacttgaccggaagattcgatgtaacaatggtttcctcttctagtaaaccgacatgacggcttgtacccgcacaaccgttcgagtgcctcaaaatactccagggtttgatcaatatcagcttcagcaataacctgggtgatggacgagaaacactgttagattctcagagctcaaatgatcattaatatcaagacaccaaaaacaaaaacaaaaaaactgaatttttatcgaaccttatcaagtgcaactcgagtagcttctctctccctttttcgttgctgtattgactccatttcggtctttgttcttcttgagacaacctcaatcatcacctcctgtgcaaagttaagattttagtatcacatatttcattaggacagacatagaaagaagactagtcaccatgtttcaaagaaaactccgaattcatttactactttgaaactcac

SEQ ID NO: 319806 - DNA, 997 bp, Cannabis indica
ataaaaaaaatagaaaatgtatagaggcaagattgaattttctttttcatttttattttaaatagtaaatttccatagactaacgtggcataatgtatgtgtaattaaaaattgttaaagtatttttataattgtgttttgttatacctaattacctatacaattaaccaaataaaaaaactctacatatagtcttaaaccaccacccacccacactatattgcaaatattcttaattatttcgaaatgatcaaccctagattttatttttagtttaaggaaatgcaacctacttaatttaacattaagattattattattatttaaagaaattaaaaaagtaaactttattaggtattcaattaactaataagatataataaagagaagtaataaggaaacaacattaacgtaaatgattgatttttgaaacccctaaatttgtctttgtagagtaattaaaatattaatttagaattgcaataggagtcaatttgatagtcaatgactcaatattattaattagtatataacccacaaacacaattgttaaagttgagacatatattaattaatcaaaatttaatttgcttgattagtgttgtattagtttatctatatatgtgaaaacataccccaagttcaaacctaaccattaattatccatgttattatatatttttgagaatgactttattaatttttttaagggatgttattgtatttaaagatataaaatggattcttactagatatgcattatatatattggttgtttaatgcgcccaaaaaaagagtaagtgcaccgatgcatctttcattgtttcggtatttaagaaaaattttacagtctaatttttattatgatcatgtacattataattatttaaactcggaaaataactttaataattcatattaataaccatttggatcgggatcccgaatatcaaaatttaggttaaaagtactttactattacatatatatttttttt

SEQ ID NO: 319807 - DNA, 1110 bp, Cannabis indica
acttctaatcttttattgataacaaataagattatagtgaaatgaaggttatttagggcataaaatcccaacacctatttcatctttcagcaacaccattcatgctaggtgatcttggcatggtgttttttggaacaataccacattcctttaggaattcagtaaatagtcttgggcattgttcacatgagccattatatccaccatagtacttaccaccacaatcagatttgacattcttaatccttttgttgagttgattcttaattttagctttgtaagctttgaacatgtccatagattgagatttttcatgaataagatataggtacacataacgtgagtaatcgtctatgaatgatatagaatattattgaccattctaagatgtcgtaggaaatggcccacaagtatctgtataaataaattctaagacttctgaagctctattggcatctaatctcttagttttgttctattttcccttgatgcaatctacacaggcattaaaatctgtgcagtcaagagactctaaatgtcatcagacacaagacgctcaattctaccttttgaggtacgatctaagcgtttatggcataatgatgctaaattttctttatttaattttcgtttagtagctcgtgattccacgtgtaaggttttattataggtgcagttgtttctagcaaataaatatttttataagtatttaaataaccagtttcaataatatttgaatttaaagataaagtaaattgactgtttccaaatgaacagcaatatcgagatttgtccaccacccacaaaggtgtgtctttcatcatcatttggctttcggtagcttaggaaacttgtataaaaatacttatgttagtagtagcactagaatctatccaccaaatggttttcatactgaagttaaattaacttctaaatagaccaaagcaatattaatatctttctttacacgccatgcatgatatttggcataatctttcttcacatgtccaggttggctagaaaagaaacaacccttagaatcctgttgttgtttcttttgaactggacccttagcagcttcattctcaaactttgttttcttacccttat

SEQ ID NO: 319808 - DNA, 2375 bp, Cannabis indica
atggaattttatttagggcataaaacccaacacatactcccatgcatctaactgtagtacatatttctcatacttttggtcgtagtacatacttccatgtttttggtcctagttcatactccatccatctagtcgttacatattccccatgcaactggtcgtagtacatactctcatgtttctagtcgtagtacacactcccatacttctgatcgtagtacatactcccaatgcatcaggtcgtagtacatactcccatgcttctggtggtagtttatactcttatacctctgatcgtagtacatactcctgtctctggtcgtagtacatactcacaatgcatcaagccatggtacatatactccgccatacattaatcacgagaaacacaaacaagctactcgtaatacacatgactccgaacaagtaacacccaactggtattgttgaacgaaaaaataaatataataataagtgttgttattattattatttttatatttcctttataaatcagtaaaaactaaaaagaaatattcttttattaaaataacaataatagaaagaaaaaaaaaatcaatcaaaattaaaaaaaaaaaacaaataaaaaagactattaccacttttacctaaagtgaatttttatataaaaaaaaataataataaaaaaaggctataaagaagaaaggagcataacaattaaggggattgattttttgttttttttggcaagaaattgatccgcaagagtgaaacaaaaaaaaagaaaaaaaagaatatgagaaagaaaaaaaaattgcattatttaagtcattcttcaagctttacaagagtaagtgaagatccataaatagatccacctctttttcttcttaggttcttttatttatttatttatttttactggaatgaagagtcattccaatctcctttgattctctgaaaccaaacacccaattttcactccaaccatcttctccgcctccaccaatcccctctcaaaatttcccagcaccacattctggaacgcatccactacctccattattgacgctgttgcacacccatcccttgtctcgttgccgatgttgtacggtaccagcatgaccactaaagccctttttcaaaaaaaagaaaaaactcttattgccttgttatattttcaccttgatttaactaaccattttatcagaagaagcaaggaaaaaaaaagaaggaagcatggaggagtggagcatagaagaagacaatcaaaagtaggggtgtgtagaaagtcatctgattcaattacaaccgaccaattcaatcccaactgatccaatagaataaatattcaatcataactagatcggatcgaatgtaaactttgaaaattcaattggctcggatcagttgttggatgggacatccgatccagtgaataaccgaaccaaactgatccaattatcatctaaggatcatccaattaaatttatctttttaaaatacatttataattttatatattcaattatttttaattgaaaaatatatcaattgatttaatatatatactaaaacttcagttataaaatattaattctcattttcctaaacgttaataaaattgtcaatgggtattaaataaattttattttttggtaattttattataggaccgtgagaattagattagaccaaattaatgtttattatgtatcttgactcaagatacataaattcgtcaaaacaaaaaatggttaaaaaattactccactaaattttttaaaagaaaacaaaataataaactaattaattgtaatactaccgttattatggaaacgtgatagttttgaaggaaaaaaaatttctgactgattctagaatgtaccctcttaaaaaggatgtatcgatgcacgctctacttgttttggcatccagaagaatttttcagtctaatttttttcgtactcatgaccgttatagctacttaagatatcttacaaaattttgagaaattcagaataatttacaatgtaaaaaataatgtttaaacagtttattttacaagcatataaaataaaataatcatgtgtgcaacacgctgtttgaacaaagtttttggcgttttaaacttttccaaatttcttaaaattttgcaagatgtcttaaataattataatttacatgaccatgagaaaaaatttgactaaaaaattatttcatgtactaaaacggatagagatgtatcggtgcatcccttttaagggggtgcattatagaattttccaaaggctaattaggattttttttttcccaaaattttaacatgtaccaaatcataccccctgaacttttttttccgttaaaaattccccttgaactattgagattgt

SEQ ID NO: 319809 - DNA, 830 bp, Cannabis indica
ggttacaagtttgagccgattccattttatgaaattgatttggttggggtaagcctgatggtttagcacaggtgcttggagttttgataaaatcattgctttcattgacacaagtgatggtaaaggaattgaagcttatgtgaatttgaaggaggaagacatggccatatttgaagctgatgaaatgcttcgcaaatttacaactcctaattattattctcgccacaatatcaactcaaatctttaataatattaaatctcataatataatataaaaagtcccaactggttggtaattttatttgtattttcttgcctattatatataggtaggaattaatatatgtatgatgatgagttggtagacaatcaaatatattatatgtgcttttattttatttttatgcctaagattgattaagtttgttttggctaataagcttgctcatcattttggtgcctcaaaggttgaagctcccttcgtgtaatttgtttttgttgtttggataaattcatttcctttcaaataataataacaaagtaataatagtgaagttaaattacatatttatgtatatatatgatatgagaaattctataatatttaagctaatatctatgtgacaatttcttttttaaaatgctattgtgatattattttatataatataatatttagattaaataatatagtaataaataatttagtgtgacaacatacaaatatatgaagttgtatatgtgtgagttcaaagctcttaccctttatattgatataattataaaatttgtaactcatatctataattatcactcttaatttatattag

SEQ ID NO: 319810 - DNA, 1567 bp, Cannabis indica
aatattcttaatataaaaattatatattacttgtttctttaaaaaaaataagagagatgcaatactaaattaccatagctgagtgaaccggtgtatagtatatagaacatgattatcgaattgaagtgtcaatatcatgtgaaaattattaatgagaatacgttttttttccaaacaagtagcatttagtttctgatgttaagaatattaagttttaaaataaaataaaaataaatgttatgcatctgaacccttcacgtgtccatatttatgagttaatggaagtactggtagtaacggtgtaagggattgtaacattaggtatttttaccactaaaaataaatattaaatatttaagtgtataaaatcaaaaatattatgtatttataccgcaatttacgctataattataaacaaaccaaagttcatattaaattattaatacccttaaatgaaatacacactttcatttataggatatatatatatatatatataaagatttaatttgtatccctatttacccatcacctaaattaccacaatatattaaaataattttgaagaaagtgaattatttttaatcatattatttttacaaaatattaatttttattgcatttaactaaaataaaaacaaaactacattattaacaatttttttttactcttttttagttaatagaaatgacactaatcacattgaaagacatatttaagtagttgaacaatttgtctctaatcatatccaacgtaggaatgattattaatttgccaaaagatatgtgtatatatgtatatatattaatatatattaaaaaacaattttatatgggatagatttgacaagtttctaatttataatataaaaatttccaaaaatatatgtatactatactctatcataggtcttctctatgggaccaccactcataaataagtaaggtgtttcccattgctcttttgtcccttttaatttatgtgtagctgcaaaattcacatcaaaatagtaacaattaataattcaaacaaaataaataaattaattaaaacattacatttacatgtactaaatctttattggatacttttataatacactctttaaaagaagtttactgatacactatttatttgtttcgatatttttttaaaaaaaaattagtcaatttttttctttatagttatttatgttatagttatttaagatatcatgttaaattttaagtgattcgaaaaaatttaacatgcagaaaagagagttcaaagagtcgttgcacacgagattcttttattttatatgcgtgtgaaataaattatttgaactctatttttgacgtgttaattttttctgaatttttaaaaattttacaaaatgtcctaaataactacaacatagacgaccataaaaaattaaaactaaaaattctctaaaataccaaaataaataggagtacatgaggaccattttagaagtgataaaattattcatacatataaaacaattctctcaactagtattactactaatattaggttactaaataaatttatgtataatattaa

SEQ ID NO: 319811 - DNA, 1674 bp, Cannabis indica
aagcttgtgtcttccataatcattttctgatcacttctcattttaattacttgtttaacttttaaaaatcatttctcaatattctcatcacattcaaggttcatattgttattcttgtaaaattactaattgtccttttgagtgtatttttcttccttgtggatacgacatatagcctgtttactaccgcgaccgtagtgtaactaattgggcgacatcactcactcatgttcagctttcgcctttcctttacctacacatgaaagtagcatttgtgagtcaacagactcagtaagaaaagcatataacaaatcatataatattgacttgtatctaagcgcccatacacctatttacaagacttaacaaatgagtaagaacgttctatactaggatacgaccatgtaccactgtaccacatgcacttagtaccaccatcgtactagtgtaggtagggtatgaaccgtaccacgagtactgttaagtgttgtactacatacaccatgtacctactcatactagtgctggtaacacggtaatgtactcttcagacatcgtacactttaccaaagcactctgtaccactgccgtacaagtgttggtagtgtacgaatcacaacaagcatgcacatatatttcacacatacatacactcgaatatatatcatatgttatacactattcttacctcgtttctgaattcaagttagtagactgacctgaatagaaagtctcatgctggatggatgccctaatcacacaacataactgggtaaataactcgccaaaaccctaatctgggaaacctaaacctccaatttaaggttctgttattactaattcaaactacaataccctaagaaatagggaatcaccgaagcactaaaatggacatgaatcgaggaaaataaattgttcgaggaatttgccaaaaccggttaaccgattttacatgtcctggcaaattggttaacctgtttgcaccaggttccccaaacaattccaaacatgctcaaaacatgtccaaatcccaccaaaccttctagaatacctataatgacctcccaaaacataatccaatcaaccaaatttagaaaaacatacaaaatcaaaacatgccattattgagccaagtttgagttcttagaactcaaacttcctcaacctaagaaataagcttcaaaaccagtaaattcagacttaaaacactattactaaacatcataaaccaaacacacaacaaacctaacttccacagcaacaattcatcaattcatagattaaaactcaacttaaaacttataaattcatgagataaaggtttctagggttaccttcactttcaacaccttgaatccttgctgaattcaagaaaaactaaagaaatcaaggttgggtttttctggttgtgtgggagccgagccaagagtgagttagagaaaagatgatccttttttctattttgtttttctttgttttttcttaattgaataaaggttaattaactaaccctttgctaaaataacataggctaggtgtcaactccctaagcagccacctatttcccccacttgccaaattaccaaaatgcgcatgaacttaaactaatttaagcctaggggtataatagtcaaaaaccataaccctgcttaaactcggtattctattttctcc

SEQ ID NO: 319812 - DNA, 2611 bp, Cannabis indica
aatctaataaggcagttcaactagagaaacaatagaagaggccaagatctcatcagagatccacttcaaggaagaattgttgatagatcaaggaggggctcttgacatgttgatcaacccagttcctcgggaactaggatagatgttctcttgcaagaggaaggacatgccttcctcaaaggtgaaatggcaaaaactaccagatctcgacaaccagcagcatgggggccggccagggatctccatggccagccaaactcttccagaagtccacatggctggcaagactccttcaaaagtccttatggccagccaaagaggagcactccctctccaaggggagcgagttacccaaagatcaattttcaactgacaaggaccgagagctggtggaaacacccataacaaaaatttcagaagtgaagttaatcacgtcatacagttggatccaccaaactccaacaattggtgtcatctaccctatttcaatgcccaagcttcactagccaggcagagaagtgtgggcagccaggctctgcccagtttagggttaaccgaccatgtacaagcaccagactcagggatggccagccttgagtataccctctccaaaggtatggccagcttggctctagccattctgaggctacaactcaatcaaagagggccaatcaaccaagtccctgaagcaatagatccttttgtgcaagcacggttagataaaatacaagacatgctcaagagactagctagtccaaaaccttcaagctagaaagggcgaggggatcaccattcttggcatacatcaattccttgcccttgcccaaattcaagatgctaacttggaagatgtacacaagaaaagaagatcgtctagtacacctgaagtactttaagatccaaatagatctcctaaagaatctggagatgtgtgaggccaaatctttctagcaactctagctgaaatagcccaataatggtgttttaggctagccctaggaagattgaattcttaggaagagctctcccgagagttctatatttagttctctacttcaagagaaacacctggccaattggaggatcttgtcgaaataaagcgaagacaagatgaacccttgatggacgacattcaatagttcatggctgagaccactatggtcacatgcctgacagaagaaggtcgatatacggccatactcggaggcatcttaccgttgaatgacctctagaaagatatcaggaggatctcaatgaacagcatggaggagttacttgagagagatgatggctacataaagttggaagaagctatttgacaagcccagacaagaggataggataatgctgaacaaatacagggcctcatatcaccccaaacactgtccagcatgccgaccaacacacatgatctctatgaattctaaaataacgagaatggtggaggcaagcacaacaacaatggctctgaccaacataatggaaaagagggaaattcaacgattcctttaatccatgaagtccaagaaagaaggaggagaagtgtgtatgcttcactcttctatcaaaactcccaaagcacatcatgccaagacatacctggagggtgagtcagcaacaggcagtccgaaggttagccttcatctctaaaggctgacctctgccttcgaaggctggcctacaccttcgaaagctggcctccatatttgaacgctgacctttgcctctgaagactagcctccacctctaaaggctggcctacatctctaaaggctgacctctgcctccgaaggctggccaacacctctgaaggctggcctccatctccaagggttggcctccatcttttgccaaatgtaatggcaggtaccaccaactctgcccaaacctcaaatgacaggacacttaagggtcgacattggcgaacaccatattgcaggcgagaccaataaagccagagagttctatgctcatacactccatcacgagcccaaaagtgagtttctggtgggtgaagaataaggctctaagcaaccaaggcttggagagcccatgatctctttcttaaaaaggagatcctgcctaagacagtttcctgcacaatgaccctctggtcgttaccggacaaatcgagaatatgactgcagcaagatatatggtggacaatggagcctctttcaacattcttttcaaaatcaaaacatgaaatgttgaggctcaaactcgctgacttggcaccctgcaatcaagtgatgtatggcctctttgccaaaggcgtcgcaaccatcgggtagatcagattacccctcactgttggagaaaatccaacgaccaaaactctgatgggatagaactctgatggcacaaccctatacaagtagaaggcgtaacatccatctaccacctctgcttgaaattcccaacaaggcatgaggtaagatgtcaagaggagatcagtaatctgcctgtcactgttacaactgggacttgtccaaattaagccaagaaatagaagatgttgttggatatattttaccaggatctagatttactaacagtatgtttcattaacaacctaatatgaattcgaaaacaatgaaataaacacata

SEQ ID NO: 319813 - DNA, 786 bp, Cannabis indica
tctctctctctctctcttccttgtgcaagcatgcaatggcgatttggggtttgtgggggaaggtggtggtatggggtttttggtcgaagatggtggtctgagagttatggacgaaggcagttttgtactagatttgatttgtttttaatattttaggtttctttttcttttttgttcctaagtgtgttcatacccacttagatttattatttgtatttgttaattaatttgaactattttgaaattttgtctttgtttttctttatttttggttaaagttaatgcatacccattattttggtgattaatgtgaatattttcagttttaaagtgttgtattgtgtctcttgagtaattaatttctaaaaagcattctgatacaaatgttagtatttcatattttatatttttgttaatgtattttttaaattgtatcatttgttaaattaattatgaatttataatatataatttgaatttaaaaaaaataattttttataaataaaaaaagcatagatatagtaacgcgttttgagagtagttgttactttcatagtctgataaggtttcactctaaaatcctacagtgacgtgcggggagggaaactaaaagggtttagtgaaccaccataaagggtcactaaatactgtttttccagtcacccacataagtgacgtgtggtgaagggtcactaaatagttttagagtcacttaacacgggtcacactgaaattagtttttcgtagtaatgtttgaagaaccgcttgattcatcttcattcctta

SEQ ID NO: 319814 - DNA, 904 bp, Cannabis indica
tttcatttagtttaaatgagtaattagattctatgttatttataagtatatgtatatataaaaattaatattaaatttttttttcttgaatttgatggattcaatcaatagatactggatataaaatattaaatggatccaatccgattaaataaatattaagtctaaaatatcgaataaatttaaattaaaccaatagatatacatgaaatacatttaatggatagaactggcctaataaatactcctagttagtaatttttaatattatttattaaatcaaaatttgcggagttttaataataggataaatgttatgttttgtacactcagaagctatcaagctataatcacacgatagagttttggtaattggatatataatgtgtttgatgtgatttatacaaaaaaaaatgtataagagctaaaattaaattgcacacactaataacaatatatggtgcttgacaattttcttagcatttttcttttaatcctaaatttagaattttactatttcttttagttgggattaaaaatcatttttttgtagttttttttagtttgtgttttttggtattatttttagtaaaataaatgtttaccgttggtattatttgatgtattatatcaagtaaaaagttaagtcaaagttaaaaataataatataataattatttttagataatgtgttatttatatatatatttttttggttgtaggtaggaattttgtgatgttggtttggccacaacgacaaccaatagatgtttaatcgtttgattgaaataaattgactaatttttcttttagtcttgagaaataaataaatagaattgactataaagtaattgatgattacaagaattagatttatattaagatattttattaagattttttt

SEQ ID NO: 319815 - DNA, 1148 bp, Cannabis indica
tataacatatggatttactaaaaatgtcctagtttttctaacattaaattgcaactatagtcttgtcagaaaatttgataaaaatctgcagttggtttagtagttctatgtattgctagtaaatacataggaatatcatatattatgaaacagatttgaaagagagcacaagattcaacagaggaaaatagattaattagcttagaaatctctactaatttgacatcttatttgaaaatgaaaattgactgatatatgaggtgatttagtcttgtacacgatcacacacttagattacataagtttatttgaaaagggataagacttagaaactttttctgcatataaatctgatagtgtcacctgttgcactagataaatataataatatagtctcatttaacaacgcaggataaaaaataaataatatatcaagcatttaattgtaataactgcataattaaatatagaaattacgctaactaaatttttttaagataattatgtaactaattagaattataataaagtggattattatgtacatcatttaattatgacctatttgtaagaaaataaattgttgccttgaattttttccaaaatacgtggccgcggctgtgtatgacacgtggattaaaaggacaccctacccaagaattagctgtgtcatatatagacgggcaagtgtacttcagagagtgagcccccagagaggcacataaagcatgtccttcctctccgagagatagaaatataacaaagcatctccgggagaaggagaacctattcgatcagtcacctcacatttaatgcaatatgggaaaaacatcttggaacacccataagagaacatgtcagacaacgtaagcctcatttacggtgattacacgataatcaaaggggttagtgacggctccattatgaagaatcacatcaatcaaagaaggataaagattaatctcgcctaatccctatgatacctacgacataggtcatgtatgccctattttgtatctcttgggaacttgtgcacatacattactgacactcaaagataagtgatcccttttttagctatgcttaccaaactctataaatacccctaaacaaaatgggaagatggatcagagagagagagagagaga

SEQ ID NO: 319816 - DNA, 536 bp, Cannabis indica
tgttatttagatgttattttcatgttactttttatgtagtttttttgttgttttcgtgttgtttctatagaaaatcgtaaaaatatatataaaaaaatctttaaacgtaaaaatgtaatttttttacaaaaaataatacctaatgtaattattcctttaatttttcattatttggtaggttttaattttattatagttttattgtttggtatgtagtcatattttcctagttttgttttgttgttaggaaaatttgttatccaacattcttataataacatgtcatttagaatattttcataataataataataataattaatcattgatgtaaataatgaataatttgtgaggagacagaattaatttatctcaattaaaactacattgatattctaaagatttatgtatatatatatattaaaagtgcctatctaacggcatttcttggtttaacagaatatacttaaaaaataaaagaatattctgttaaatttaacgattacttttgatctcccgttaataaataaacccaa

SEQ ID NO: 319817 - DNA, 736 bp, Cannabis indica
tctttcttttgggcattatatcaaacacatgacatgcatttctttatatccatatacacaaaaatcaacttaaagaataaaaaaaacaaacataataattgtgcaaaaatattcagatccaaacttatattaatgtctctatgtttctttaatttctccatacttacaatgacgcaaagatgaacactaaaatctaatcaatcaatccatcattgaactcacaaccaatactataaaatgtaacaattttaaagagggataggaatttgaaagaaatataattttcaagaaatcagtatttacccaccattgttgaggggaatttgaaaccaatactctctcaccatcgttggacatggatgaggtcctagcacacttccacaaaggtaatagttgttggtcaagttatctgccaaataccttacgatgcatctttcaaattttcatcaaccaacttcacctatatatatattattacaaattgatcaattacctataaattttacagtatataattcaagaagaataatttagaatgttaacttactcaaacaaaaatagtagaaaaaaaatttgaaaagagagagatagttaaacaagagggtaaataactgttaggaactcatattgtaggcgtgcgatggcaatggctggaatcaatgatctccgttcggcaaataggtgctagagacgacgaggaagcttcgacaaaggagggaatggagtttttttttct

SEQ ID NO: 319818 - DNA, 716 bp, Cannabis indica
ccttgtcctagaacaagtgaacaaaatggccgtgcggaacgcaaacatagacacatcactgaaactggcctcacattattagctcaagctgggttgagcatggattattggtggtttgctatgtcttgtgctgtgttcacaataaatagacttcccacaccagttattggtaatatgagcccttatgagtgtctctttggcactaaaccagattacaacattttaaaagtatttgggtgtagctgttttcctcatttgaggccatacaataatcacaagcttgaactaaggtctcaagaatgtctttttttggggtactcttctcaccacaagggctatttgtgtgaacacccaaatggcaaagtgtacatctcacgcaatgtcatcttcaatgaaggacactttcctgccttgtccaactcaccaaaggtgtcctccaatcaggtattgtccttgaataactctcctaattttagtttccaaactaatgacaataatacatgtactaatgttggtcttattcactcttctcttacacaacctaccacggctgctgagggaattgaccatacatatacattgtctcaaggacaacctgctacagcccctcacccacgccctacaccacctattatcccacaaaatgacaacatcaatactattaccccacaaaatgacaacaccactactattaccccacaaaatgacaacatcaa

SEQ ID NO: 319819 - DNA, 2624 bp, Cannabis indica
aactgatccacaactacccatataaaatcaagcatacccgtggttctaggtactccaaccaaaaaatccatggtgacatcttcccatttccattcaaaaagatttaaaggctataacaaccctgcaagtctttgatgttcaaccttaatctgctaacaagtcaggcattgagatatgtattccaccacatccttcatcatactgcaccaccagtaaaaagactttaaatcttgatacatcttggttgtacatgaatgtaatgaatagggagtggtatgagctttatcgagaatctcctttttaagctccacactatttgggatacaaactcgagttttataaagtaacatcccgtttgctgatatcaagaaatctttagcttgaccagctaagacttcttcttgaattttcactaattttggatccatcaactgagcatttctaactttgtctaaaaaaattgattgtagtgtcaaattattaggttcaccaaccgcgaactcaatacattgatgtagtttctttttagttaagggttatttcaaaatccaagacatcaattcatattttttatgatgaatgttattttttaagtttccaatatattgaattgcttctatttttctattttcaatgccatgattattgttttaatcttctttagataaagatgatcgctaaattatattttactttaatctattattatcttagaattactattcacctaatagtctagggttttaagtgcttgtgataaattataatttttaatattgtcaaaagtattttaattatgatgaagaatagaacctaggtgaagtaaattatatgcttcattaatttattgcctaaattaatctatctccattaaatttaaagttttatctatgttaaataaattgcatgcttattgcttggaatagttgtctgctttagtgttatttgcgggattaataattttattgaaaaattgaaataacattcattattaggaattaaggatgattgttgagggtgaagattaacttttaattatttcttgaatatcgtagtatcatattttatttattttgttaatttatttctaagaaaaaaaagcaaaaatagtccctttttattagtgtttaattttgaataatagagtaaacatagtccacgtgggatcgacccttacatgcttttatacttaaataattggaagtactgaagtcaaattaattagtaaatttgatacgacatacaacatgcatcagtgctcatctagtggagccggacccatgacgtgctgattgtttgatgacgtggaggtcacatctcattgatagttgtcaaaccatgtcctacttttgtggataatataaagacacattaatgcttgatcgttaattactatctttccatattgggaagatatgatccttgaacgggatctttggaattacttctactatcacgagatctagtaattaatgagtgtgataatgagttggatgtcgagatgctcactaagtacttctctggatgctctgactgaggtcttccggacacatgctatgctggagggttatctcacctggacgagtcatttgtccagcttccggaacacatgactttgctaaatgatctagtaaattatcttggttgggtctgctattgggtctgaagtaattgagttgtatcacttttgaaattatgtgtcctaatctgaaaacatggataacacaaattatattaattctattaaaacattatcataataaatatactaaattaattataacattataaatattaataatactaattaaatatttaataaatatatatatactgttcatataatataaacaaattttgtaaatatatttgtatatatattaattttgtattaaatttagtaagcatattattttaatgatatattaaaatataaatattgacttatatatttatatattttactttatttgtttcatttataaaaatattaatatatattaaaatattaaatatatatttattcattaatatttataaaattatataattatggttgtttttttttccatagtaaatttaattatctatagtgaaatttgaacttaaacacaaataaaaaaaataaaataaaataaaatatttcaccaaatacatctttaaactacaaaatatatagtgtttattctactaagtttattagtaggtagattcatgtttgcctaccataatatttcaggacttgagaagtcttgaataaacatttcataaatgtttctccgaggaggtagagattagttggctgagattttgaagctccaaaaataattaaaaagttagttggatttctaatacaatttaacttttaacattaaaccaactttaatgacttcttcagaaaaacttacaacctaaaacaaaagcccaaccaaacaggcgagaaacataaatggagaatattttacaaaagattaatttaaatttttgctcttaaattttaatatgtattaaattagaagtgcttcaatcaaataatttaaataatttatgaaaaagttttaaagacttaaaagttaatgggtgattctacaatgcacccctttaaaaagggatgtattgatgca

SEQ ID NO: 319820 - DNA, 2550 bp, Cannabis indica
gaaattatttattttaaatctacttatcgatggttgtagggggtaataacccatttatccagattggtcatcttggccatatgcgtgactagtgcttgacaacggatctaggcttcagtggcaatggcactaggatttagaaatacatatattctgtttaatccattgatgtctaacaactgctctttcaagtgcctaataaaaagacataattaataatcgtcactctcaatagaaaattatcaagtttatagagttagaaattatacttgcaccaaactgctataggttgggctcctaagtattgcataatgcacaatttatatatgccatttttcgaaagccaaatcgagttatcttcaaccccaaataccgcaaccgggaattggattattgttgactacgaccactttttcaccgagttctgacagttagtgattgaggtagtttgtcgtggttggacataacgaccatgtcctgttggcttacttggcctctcagggtgttttggaggctgtgttcaaggaacgagtaaatcttcagaggcgtgtttgcttctcctcataagttgcttggtgggtggttgtgtttatatgaaataaaaacaataaaattagaaatttcattaatcaataaacacaataagttaagtaaataaattaaaacataccaagtatttttcagtaggtgtaacatagtctttcgaccatgctacataactttttatagcttgacctactattgtgaatgtatcttgggagacgggacatagaagcagtgcattctccatattgacttcgtcgatgaatacttgaagataatctttgtataggtattcaccattgtaaatcgagaactttccatctttcaaacatttctccttcacaatgtgccccaaaagcaaactttagtaccattccactgggctccaatcgacaatgcatcaaacatggaaaggtctgcatatctaaatcaaaaaagcaacaattcagtttgtaaattggctatatttatgactttgcattagatcaatttgtaaaataatattaagattacctcttctgaactaccaccagtaggcggtggtggtgctgttggagccaaaatctttttggaacgcagtggcggtgatgtagtagagacattggtagcactcgatggttgtgctaccggatcggaggtaaggtcagcacagacttgttcatttgatactcctccaacaccgacaccagacacatgggatgtacccataatgctgctatgctgggaatgaactagatgaatgagctcatccatttgctcccgcagctgtctattactctcctctgtctcacgaacgcgtctcttcaaatttgatgataactcgttcgacccatccatgtttttacttttagggcatggactgttgaaatgtttggtttgggtgacaccctaacccatggctcaaacccaaccaccatgcccatatgtccccagcgtcatggtcaacacgtccctctcccttccacatgcacatctccctctttcacttgcttacgaaagtcgtcctacaaacataacaaatagaattagaaatggtaaaaatgaaacataataatataaataaaattatattttaaacttacaattcatttaatgatttctacagctgggccttccacctcgccttttgtgttcatgtgaagtctttttcatacttcacatctatcaaaatcgataatttggtggcatgcctttttctccatttattcttgaaccatccttacaccacctcgcctagtgtgatggtggtaaatatgtttttccctgctctgttgggcctttattctcctatccccaaattctagactcagtcttatagccacaaacactctccattgttccaaatcaattatgctttcttacagttttagtggattctagtagttagtgaatcgcatctttgaatttaaaaatatcatctattaggatatttttcgaatccttccacctctctccaccttctgaaatggttggtctcttgtcgttctccggtatatcgaacacagactaaaaaaatgaaaattatagttataagtacaatcaatagtaaaaaatatgaataataaaattaatattactcttttgtcatcacataattagtttttaatgtcctgactcattttaggccacgatatatctcgaagtgaaacactaactcccacccatgctccaattcaggtaacttttaccgtccctctctttcctagtgttgcctgtaattattgtactcaacctctaactttttttcctcactttttatttttgttatatcgctctgtttgcttctcctgtgagtatttttctgtggtggctgttcaggatcaacactatatttttctgtcatgaatggttgttcaagatcaacactatatccttctaacacggttggaccatcatcacgatcataatcaaactaagcactccactcatcatccccacctggttccatgatgaataatcctacaaaaatttgaaaacataattagaatatacaaaaatatgcaaatt

SEQ ID NO: 319821 - DNA, 1018 bp, Cannabis indica
aattaagaaaaaaaaagtatttaaatttaaaaaagaattttttttgggtctttactagacacaaatttaacccacttatgctcaaaactaggcatgttgaccttactggtagaaatatttttatttttgatggtaaagactagaaaatttataatttaattttttttatatgatggtcggatggtggaaatttgtaataagttttcatgaaattttttaaaaaaattatggtattaaaaatacggcttctcaaaataatccttttcatgcccttataaaataggtgtcaaaacaatttgttttcgaattttaagcatatgattaattacaatccaatttttttcttttttatatttttttgttatttgacagttacattatgtatagttattaatttagaacctctcaatcacaaaaggttgttgtatatacttgcataaaataagttgttttgatatattatttaaaatttcacaaaatttttaattagtgatgggggcaaaaagcatatgccccaaccgtataaatgttctatactagatttaaaaaaaattaataatttatagcgttaaaaataaaatttaaaatgaaataaatagttagttttacaccttataaattataataagaaaaataaatattcatataattaattatttaaatttatttttcttgtaaactattattgatggaattttttagtataattaattaatgtctacaatatgtataaataaatttgaattataatttttggatttcccttttgtaaaaatcctcatatatatattatctatataatgattcctttgacaattcttgtaataactttacttaattctttctctttatcacaagaatatataattacggggcggcccaaagggagagaagaatactatttacttattaagcaaccaaaaaaagggttttatttgcatacacaataacaagttacaaatattaggtttccattaaaccacttgaggctagttcaagtggctataggtgggtgtgt

SEQ ID NO: 319822 - DNA, 785 bp, Cannabis indica
atctaacaatctcagttcagtggatttttaacgaccttaaaaatttaagggcataatttgatacatgttaaaattcaaggagtaaaaattctaattagccctaatataagcaaaataatatttaagtggatagaaaatgaattagatgtatgaatggagaaactcttggtcctatttttcaattaatgccaactaatatagttggaaagggtttcagtcaacaaccctttttctccacacaatgagaaaacacacacacacaaagataattctcttgacaattaatgagtctttaagatcattaaagtttatatgtatattttaacttatgttaatgaaattaaactctaatgataatgatagtgtataatatagtttaaatttgacatatattaaaagttgtattaaaattagcataaaatataacatgataaattttacactacaataaaaattacctttttatttacgcttttaggactcattagtaccttaaaattaaatgactttttacattttatttaaatattcaattagatttttatacatttttaatcaaaatttaatacatttgctgacttttttttaccctaatgcattgaattacaattataaaatttggacaaaatataacattagcttattttttgaattaagtttagtccaaaatttatacttttcattgaagatagtctaatttggaattgtgtaagtaagttgttaattccatttttggcatatttaattgacaaaaatattttattatttaatgtatatttcggctg

SEQ ID NO: 319823 - DNA, 1861 bp, Cannabis indica
atcataaatacttttgatttgccaaatagaattataagtatagtttagtagtaattaaatccaattccctgtggttcgacctcacttgcgtgagtatactacttgattgcgtgcagacacctcaaaattatagaacctaggacctaggccctgtataccccaccctaataagggcgggcctaaaaatgccttatttcaaattttgccataacacttagcttgtgtgtcccacacgcatcaaacaaatttatttcaaaattcgcatttcgtccttcaacaagttaatgatcgatcaaacctatttttttttttaaatgtttattagtgtgtaggttctattcttcacaatataacatcaacatattaatgaaatataatcagagtacaaaaataagttctcactattttattttttgtaagctatttcataatgtaaaatagtttttttttttctaatttttttatttaaggagaaaagaaacattaaccaacttaagattagggcaataatccgtgggcgtgcgaccatgagagcataaggaacaaccgtacgctataaccactaagctacctcctaatcatgcttacccttctattaattaattaaattatatatttaactgaatataattaataatattagctagctagggtttcataattaacattcattgaagttggggtactacccaatttaattaaacttatatcaataaatcgtgggggaccaatctatatatatctcattattatatctcttacacatttttatttattattatttagtttgaaaaattaccaataagatatattttgttatttttaaacattttaaagctttaaatggaagacttaatttgttaatgtgaagtctgattgggtagaacccacgtgattatgattcctacaatcctctaaagatacgatgttaccttaacacaacaaaaaaaatagtcccaaataagtaaagggataagattaaaaataattaaaatatattaatatatatgtgtatatttataggttggctggtgagggagcttttagttctggctccaactaatcaataattataagaattaattaaattaaagactatttggactaattgaaaaatcaacaaggaatcatattttgtgttcacattgactaattaattatttaatcacctacaaaaaaaagaaaaaagctatatatatattatcataaaattaattacagaaacatttgttgttatacatatatggtatgtgtacatgtatatatgatttttttagattatctcaaaaataataaaaaaataaaaaaaaaaactaaaacaaaaaaactaaaaattttaaatctctcccccccaaactaaaatgcacattgtccccaatgtgtgaaaataaaccagggtgagagaaacttacctgagccccatcagaagggatcaagtccaccctttgcattcaaaagagccctcgcactaaatgaagaaaatttaccaccaatagtgttgatttcagagttttgcacaagagtaagctcaccttcagaactaccacacatcaatcttttccaacgacgctgaatcgttcgaagtcgctctttaggctttgctttcttcttatcagttttaacaaaagaacccttcaccacctcaatcttgcaacaggtaggaatgtcagttggggcaaaaacattaaaattgacctcttcatcttggactcgcaactttaactcccccttttgaacatctattaatgctcgacccgtggccaagaatggtcttcccaaaataatgggaatagttgaatcttcctccatatcaagaattaagaaatcagcagggaagataaacttaccaaccttcaccagt

SEQ ID NO: 319824 - DNA, 1317 bp, Cannabis indica
tgtttctggttttgtaagttgatcattttctggtttatctctctctcactcattgattgtaatcaaagattattcagcaataaagattcttcttcatattcaaaactcagcctcattgattcttggtgaattcgatttcatatactttcaattcagttcattattaattgatctctttgatctcttgagtttgttctgttattgtttgcattgtattgtttcagctgtgttcttgcacaacactcctaataaaaatactcttaattgtaattcatttttctggataattatttatttgtaaaataattttacatatgtatactaactatataatttactattaacctcttttcatatacagtaccaaactactcagctaacaggagagtagttttcttggataaagcacacactaaattatagtcagattcaacttctacatctaagaaacccaaacgggagcaaagaagcaacccctgcaaagtcgccatggcttcaactatcgggacaacaaagcctggattggcactgtcataaaagcaagagatgttggatcttattttactagaatcttatttactaattatgtatattgattataattaataacataatctaacatcataaatatacttttacataatacaacgaattaaacacataaagaatataatccttacactgagatggcagcagaatataatattggctcttatgttctaacactctaacctttaatttatttttgtagcaaggttttaaaaaaaataagtgtagaatagaatgtggatattctttctctgagttgttaattgagatctacacaatctttcacaatttcttgagtaccaccttcacaagtgtgggctaatactcgaaattgagagagcgagcttttctgtctcaggtttggttgtctgatggcttatttacgtctgatggcttatttactaagtcctcttctctttctatttacaaccaaaagttaggtttatgtttccataatatattattattttttaattaagaaaataaattaattattctatttaccaataaaagactattatatattttcttttccgactaaaaatactctttactatttttctaattaaatcatattaaattaatgaaataaataaaagaaaaatttgaccaaaaattcattgtggagacccaattagatttttgtcatttcttttaaattaagttttgattaaaaataaatttttcttttttaaatttatttattaattcaatttaaatttatttaaacgttaattttaatttaataattataaaataaatatattt

SEQ ID NO: 319825 - DNA, 1452 bp, Cannabis indica
tatttaataattataattaatcaaataaaattactaattaacttatttataattagaccttataaaatcacttaattaacaaataaaccctaaatcctcttttcttcctaattgagtcattacttagtgaaaattcataaataagacagtctaatttaggattctaattgattaattaaaaccaattaactgagtctacaagctaatattatgctccaataagtagtattaaaatttactaaataaatattctccatcttattaattcccctaactccactatagatttggaattgcactcttaattttataaaatgctctatatgttccaaatatagatgcgctattaattatctattgtttcaatccaaatcatcaatgattctctatagatgatctatatcgagtagagataaatttaccgttctacccttaaatatattttatccttaaaatacgtagcttcttgtaaatgatattttagtaaactaatataattactgaaattaatactctaccatttaatctcgtttaacaaagctcgaaagaaattatcatttcagttctatacatttatagatgctatagattctatatctatgattagcgctcccactcaattgtactaccatgttcccaagatgtaagtattgggaagatctaattggtcaatttgaacaagcaagtcaaagaatactagtaatacaattgaaccagaacctaaccatatcaggattgagatcattgatctaagatcaactaagtgatatttacttagaaagatattatggtaagtttatgatatctttttatgtgaatattagtccaagtcgatgtataacaatacatccaatacaagcttattttaccaatgccttaaaaaatacataccactattcaagtgtaagtaaactacattgttgattatcatattagtagaaatcctgtgtaatgataaatcgtgggactaatatttaatcacatagtcttgattactttccactgtgtagacaacacagtaatcatgaataacaatgtgataagaattaaagaatttacaaatcaaaaaaataatcttgaagcaaacatgtgaaccaagcattaaacaagcaataaaatatttttgtttctttattgataaatgaatattcaagataacattaaaatcaagttttagtttgggcaaaaaacccaacaggaaattcctcccaatcccctcaacttttttactcttacttttttaaaggatcccagtcacaacaaccaatgtttggtcaatttgcgagtttatcgcagaagtcgatgatgtatgtgttgggttttgtgccctaaataaaagccattacaatctgattagttatcaatctaagaagtttgaagtgatttatgtttgcatgaatttttcatgcttatggtttaatacatattcaatatatgcacaaaatcagttaa

SEQ ID NO: 319826 - DNA, 845 bp, Cannabis indica
gaacctttaaaaccatggctgctctgataccaagttgtaacgccctaacatatagggacaccacgtgtgtgactttataaactagtttaatactaatagattaattaattattaaaaatcgtgatgatattaaaaacttgactaaaataatacactaaaactggacatcataacgatattaaaaatgtgttatggggatccttattataaaaggtttacaaaaagactatatacgacaacaattcaaactcaaaatcgagatacacaacaaatacaacccaaaacaactcctgacaactcggcaaacaaggccgtggggtcaatatgtacattgttggagaatactgtcatctcatggctgctttaactttttcttgcccttacctgcaccacaaagtactcgtgagtcacaaggactcagcaagaaaagtaaaaaagaagatacattcaatatctagttatccaattcattattataaagcaactaaacaataatattcaaaaatgagtaatataatcattcatatgcatgggagtagaaataatcatatattgcattgcctaattaggcaagccgtgtcataatttaacatcatatataatatcactgcttcacctaatcaggtgagcccattccacaacctgacacaaatatatcacatcacttgatcagacaaacctgtactataaactgcttccacaagaaccggtggaccggttgggcaaggggataaaagtcacaatttccaaatttcacactcaccgaaatgctaccgaaacctatcctatgttgggaatattttaccaagatctagatttactaacaagtatgtttcattaacatc

SEQ ID NO: 319827 - DNA, 897 bp, Cannabis indica
agaatcaaatcaactaaactttaaacaatcaaacaattaacagtgacaagatttataaaacacgaacaataatcagagaaaacagggatgaacagagtatgaaaaaaccaaaaaataaagaaatcaacaccaagatatatactggttcaagtttgataaatcgatgtgatctgtgactctactctagtttcaaaaaataccaccgaatttcctttattgattgagcaagaagaataggtacaatacaatcgagatcgattctcttatgagttttttcaaagtgtttcaagtctcacactcttacctaattctaaatactgtataataaacgtgtcaagggtgtcatttattgaataaaagagtgacacgtggcgttatttcttgttttgagaaacatgtgattaatttacgttattatctttccctctctttgtctcttcaatccccttcttcgtcgtctttttttattgcgaatttgtaacagcaagtctgaataatatttatatattccacccactcattttttaaaacgcaaacaaaactcagctaattgacgttcatatattcaatttaattattttatcccaatatttattttagaatttttcttccatttttattttaggtctacagatacatgtgttctttgtattcttaaatctcttgtcacaataaacctttaagactagaatcacaaaaaatgagaatttgattagagcttgggttcattgaaggaggtagtggttggatttattgatggaggtggtggtttgatttgtcgatagtttgtgaaactaaaaatgcacataaaattttagagagatagagagaaactaacaaaacaaaaatatatatataaaaaaaaaaaaaaatacagaaataatataaaaataaaga

SEQ ID NO: 319828 - DNA, 1180 bp, Cannabis indica
cttttaaaaatattgctaactaatgaagtggtgttaagtagcaccgtgtccaataacaatgcttctaagaagaataagaacattagtaatttaggcaccaataatatttagcactatctaaatacgacatcttgtaattagttagtgatattatataaaaattaatatattaaattatgtaaaacttaatatttaattgttattagatactaatagtgcctaacactttttataagtagcggcgtacgattagttagtaatattcttttaattttttttttttttgttgtatgttatatgaaatttaatatttaattataataataataataaaaaaaaggtgcttgacattaattttgttttttttatcaatactctactaataaagtgtcttttaacatttttagaaaatatttgtaagcttgtggcggtgtgatatacaagtggtactatattcttttattattattattattattattattattatttaaatacacttggtacaatattcgaaagaactgcaacttgtttttttttattattatttatttaatttaatataattttcttggttttttgtatgagatatcaattaaaaaaagaaaatcaataatgaaagagtgtagttgaattgaatgaagttgcttttgctttttccactttgttatttttgaggtttaatttaaacttgaagaaaaagacttatatagccaatttattaggggtaaaaacggaaaataaacaaaaacaacaatccacatacttacaatacatgacatgccttcaattgaaacttaaaactattttgatgtattttttagaataattatttaattattcattttattgtttttttttaatacttacaaatgtacatctggtttggtccatgtgtgttttcatttggtgggtccaagattaggtgtcacgtggagttgcacgtgacacctcacattcaatttggtagtggtataaaaaatgcaaaaaagaattattttagtacattttaataacaaatctcacatatttaatttagtaatttatttaaaataataactaattataaaatgttaagtcaatagacatcttatattgcattttatagtatattatatattctaagtgattaggggtggaccatcccattgtcaatagataagaaagtgtttgatcaaac

SEQ ID NO: 319829 - DNA, 1994 bp, Cannabis indica
tatatgtgtcctatttaagacaataataaagtctgtatgacgaaattagagaaaaattacagttttacaaatattgacactacaaaaaataattttttagtcacaacataaattttttgtgactaaaacatagtatttagatacaagttgtcactaatatagttagtcacaacaagtattgtgactaaaaatatatttagtcacaacaaattttaatttttatgactaatacttttagccacggaccttttagtcacaacataaaaataataattcataattagtcacaacttttttacttataatcacatacttttagtcacgagttttgttgtgactaaaagtaaaattttttgtagtgtgagtactttaattatgtcgctaaaagaaacattaaatttatactacttacaaacttaaaactttcaaccgttatttactcttaaatctatataatatatataattttatcatggtattattattttattatgtaaaataataaaaaaaaaattataaatagtttataatttaatactgcaacaaaatatattaataaaataataataattacataaataaaaaaattagtgtatctttgaagatataaattttgaacggtggtacttgattttgaatagaggagaaagtctaattcttatttaattatatattatacgataagcaattttatttttttccaaacattattataaatgtaaattagaaattaaaagttgatgtacacaatggaaaatgagcatttcatgtagataatgttttaaaataattatatgcttttatcctagtgcttttattaaaatcattaattaagcgaggataagattgacccaataataggagagaaaaaaagataacacaataggaaaacccataaactttggaacacgttcttttttggttttttcttgagaaaggcttaaagaaaatggtactgtaatattaaatcatatataatttaatataataatttttaaaaagtattgctaaattacaaaacagcatgtctaaaaatactgaatactattgatactcaataacaatactcatttccttcactacaagaaatgagacttttaccagcgtatttttgtgttggcaaaagttggatattgtgctgtaaaacattatttacttttgctagcgtaattttgcgctagtaaagagaatcgacaaatctatattggtattagaacttttaccaatacaaaataaaaagtgttgggaaacataatttttccgagcgcaaattcaataagcttattatattggacatataagactacttcttataaggtatgtcatgtgtttggttggggtttaatcattctcttaggagacgtttggttgggaggaatgaaaatataggaataggaatgggaatgggaatatgaataggaatggaatggaataaaatttaaaatgtataaaaaaattaaattgataaaaaaataattaaatttttttttcttgttacattcgaatggtcattcctttctttttaaaatggaatagtcattccaccaaaatggcggaaagagcattccaatactttaaaatgcaaccaaaaaaaggaatgaaatgaaaattgttttctttccattgtattccatttcattacctctaaccaaacgccaccttagtgtgtgggactaaactaattaaacatataatcttctatctcctttaattcttgaatcaaccttatccacacattatatctttactaatttttgcaattaatcatttttattgaaatttttaaaaaatatatacatttctaattacttttgaaaaataaataagaattaaaaggtatcatagtatttatttcatgttgcaccaaacatattagggctgaacattttgagcgggtttgacccgaacctgagcgacccgcccgaactcgaactggtgaacctgcaaaatttttttttaaaaaaagtttcaggcgggttgggttcaacccggta

SEQ ID NO: 319830 - DNA, 2430 bp, Cannabis indica
gcatcagtgaaatccaaacaagccgtgtggaccttcaccacctcacccagatggtttctggccaccgccgctaaacacatgctatcaagccccgctctgacatcacagttcagtttgatccagccctgaggaggggggatccagcactcctctcggcccggagtggggatagggaaaacagtatcacgcaagtctgcaaaagtaaatcgaatagaatcaatgcaatttgttatatttaaagtaatattattgtggaccttctcatttcgagtacgccataaattgtcgaccacaatagaagcataaaggaaaacctcttccccatttaatcccttgtgagacagatcccagatgaatttgacccaatcccacagtctaattccgttatcttgagtggggtaaataccccaaggagaagagcgccagacatgaagagcaatatcacaggtaaggaatagatgttccacagtttcttcctccctcccataaagagggtatctcacctcctcaatatgaaatcgctttttaaaaacagatctaagagagagagagcattggagagaatgcaccaccagagaaccttgtgtcgttccatcactttactattccagagtttgttcaacatagaaggagccacaacacactggggagctctctccaacgcttgagagagataggcaaatttccaggagaaatgtccatccttttcaagagtccaaacccacttgtcctgccccaaaccagatggaactcctcctctcaaaatagccgacacagtcacatgatcaaacaggctattaagtttatgaacatcccatcggccatctgagattagatcagccacaaaagtgtgatctccaacatttaaagagcgaggctttggtctgaagtcctttaagtggggaatccaaggatcctcccagattcgagtatcccttccatcccccaccatcttgcaagcacctttccttagtatgttcctagttttaatgacaattttccaaaactaggaatcagaactcttggaatcacaattaagaaactcttttcctctaaggtatttagcagtaagcactctgcaacacagagattggcttccattcaagatattccacccccacttggcaataaaagcttgattcatttctctcgatttcctaaaccccaaacctcccaaaaatttcgaaagacataacttgtcccaagctttaagatagagcccgtggttgtccttctcaaaaccctaccagaagtcactcaccatactatcatttctggatgccattctattagatagcttagtagtttgcatggcatacatcggcatggacaggcctaccgacttaatgagagtcgcccggccggctttggagagggttttagctttccaaccttgaagctttgtagagagattatcctaaatgaagttgaagtcggcatccttttgacgagatctgaagaggggtaatccaaggtatttaacatttccttccggagatccaatacccaacatctctttaatctcctgtctcaggccccttggcgtattcttactgaagaagatggaggttttgagtttattaacctgttgcccataccaagagcaaaaactctccagacactgcctataacctctgacttcatccaagttagctctccccactaagattaagtcatcagcaaagaatatatgagatagaaccggacctcctctactcagtctcatacctttaatattgttcctatctagggcacaatttaggagtctagatagaatcttagcggtccaaatgaacaagtaaggagacagaggatccccttggcggaggccacaggaagggttaatcgatcccacttgccccccattaaggcagatgttgagagtagtggtggcgacgcactgggatatccaattgcgaaatttcaagggaataccaaaacaagacaacacttgattaatagctccccaattcagcctatcataggctttcatgagatcaattttaatagcaaagaaaccctctttgtctctttttcgattaaatgagtggatgatttcctgaactataacattgttatcttgaatgttccttccgggcacaaaagcggcttgagtagggcaaataagcttcggaagaataggtttaattctatttgcaatgatcttggaaatgaccttatacaagacattgcaaagagaaataggctgaaagtggttggttctcttcgggttctggactttagggattaggacaatatttgttgcattgactcctttatgcattttgctagtcgcaaaaaagtccgtaacaacctcacacatcatgatgacttaagtctaagttagaggacaattctcatacaacaaacaataaattaaagttgggaaatttgattttctataggtattaaacttattatttttttttt

SEQ ID NO: 319831 - DNA, 823 bp, Cannabis indica
tgcgtcttgggccactaaaggcttaggactccaaaattgtaaaaaaataaaatattattaaatagataaaatattcaataataaaaaaaaaaatacatcaaaataatattttagtgtggccatagagagtattattttaagtaagaggtcaatggatcaatttccagcctctactttttatattttctttaaaaatatttaagagattttttatttgtatactaaaaattatacaatattactataataatactataaattaatattacatatctgttaatagtaagaactcgtcaaatatgttaaagctgaaaaaataaatttagaatagagattacatatagttaactaaaaaagttttagaaaaataagcaacaatggtgaaaagtgtctcttgtattagttttaagagcatgagattataaaacttaattttccaacctcttttcaaataaaataaatgggtatttatagggagctttaatggcttcaaaatacaagtggtcctaaaactaagggaaaatattctggtggtacgttgtgggtcagcgtatcagggggagtagtggaagtgtgttggtgagttgttaacccgtactgaccatgacgcaaatgatgcctccactacttgttcccatcgaatgattttctacattcacctcatctccgtaggctttggcaaaggcatacctcatctccgtaggctttgtaagggggtgattgtgacagtcagtagtcccgtgatgcgtaaggggaaataccggataagttgtacaatcccacatcgcctggagaaggtcaagtgggatgattctaagactgt

SEQ ID NO: 319832 - DNA, 875 bp, Cannabis indica
gtaaaataatttccaacaaaaccgtcatacacaactttagcaaacataaaacaagatgcatgtgagactttataggattactttaagcgttttaacgccggggtaaccaaagtaaagaaggcctctgagtctttgattatttgtatgcttagtacaggtgtgttaccaagaaaagacttctgcaaaaagctacaggcacgacgccgtaagaaattagtctagttcttcgccatgtcagaaccccataagagaatagagaactcgattggagagctcgagaagagcaaggagaaacaaagatctccaataccgagaatgcggtccagaagcccacgatctagaagttctaggggacgtagtccaagacatagcctaagaaaacgcaactctacaaggcgttgaagcccaaagcttgccaagtaaccaattaggaaagagagttccccaaagcagaatggaggtctatgatttgtcaattgcacagaactttgtgtctcttgcgatcatatatatgccatcgaagagcacaagagtgttttcagattaccgcaacctataagaggaaatcatgacaaaagagacccaaaaaaactgtaagtaccacaaagacattggccacataacgcttgaatattggtttttgcaagatgaaatagaagaattaatttgataagaaaattttggccaatacaagaagaacaacagagaagccaatctctaagcagatagtttaaataatgcagaggaagcgagtggctccagagctcctcgcattggtggacctcacgtcaggagagattaagcgcaagagcaaaatgtgttatcctcaaatttaaatatatttttagtcacaatacttgttgagactaaaacta

SEQ ID NO: 319833 - DNA, 1413 bp, Cannabis indica
tcatagtgtgtaagactgtaggagaatccaaacaacaagaaggagaatttatatgtgtttatttcattgctttagaattcatattaggatgttaatgaaacatacttggtagtaaatctagatcctggtaaaatatttccaacacaacattagtactaggtgcttaagttgacattgtgtaagtcgtctcacatcagctttggttcttatcaacttcttatgggcaatctgctcaaccattttactaagatacatgggagacatgccagagccatgttttagactttagatatgagtctacatgaaattgcacatgggcagctaaaagccctaaaaggcgccaaagatgacatatagtcaatcttggtgcaccatggctaggatttaggtttctcaagaaatttttagatcacaaatcctcaaatccatcaagacataacacaaggacatgatatttcatcaacaacatcacgaaggaccctaggttgacattttaaccagggcactgattttgtttcacaaagttttgcatgtgcaaattcgatgaaactgaaatatatcaagaacttttgactgaaaagaagattgagaatcaacaaaatgaattttgaagattttgacccccacctggctgcccagtgcatgccccgaggccaaagtgggcgctcatgttgacatgtctcaaccatgagcactttgagacttccttttacagaagttctatgagcatttcccttattttcaaccacaagcacaatacaagtgctttcgagaataaaagaaatcaatttaggcccttgaaaagttgggcgcccaagttcacatcttccaagtcactagccgcctagattgacatagccaccccgctagtggttctgtaaatttgattgccattctttctcaagcattctaatggtttttctccaaaaaaaaaagatatgagactttgaatcagtataaaatgtcatttaagtagcaagttagcccctaggcatcaccgggtaccagcaagcatggggctcggtgttcagtccttcaaacaacagttctacttcgaggatcggtcttatttttcccccgaaataagatttggacacttctgcaagtcaatattgttggaatatcttttaccaggatctagatttactaacaagtatgtttttttctaacatcctaaatatgaatctctaaaacgatgaaaataaacacataaaagctatgagaaaccctacattggttgcagcagaattaaatcgctccttccactcatatctctaacgcttgtattctttctgttgcagagtatcaccaagatcttagccaaaaactccttcagttatttagattctttacagtcttacacactatgattgaggactaacttgctatgggtggacatgcactcaatcacta

SEQ ID NO: 319834 - DNA, 775 bp, Cannabis indica
tgaaattcaaactcataacccctcatggatgctatgtaactcatgcacacaccataactctcatagcattaagaatttcaaattaaatgtgtaacacctttttacacacttaatattggtgataattgtggaggttacaaaatgtaagtaactccacctcttatgttacaatttatgtgaatattagatgtatttaactctcaatcacattatatacattaatctcatatcaatatataatatgtcacattttaatattttaatctatcttatattataacaatataatataacagtgagaaataatggatgaattacgtttggagagagtgatgtgtatacgtggaatgagaatatttaccaaaggtatagttcctattaaattattgtataatgctttaatagaggtattgaaaatgactttatgttgagccattttttgtaataggtgttattgtttcattttatgttcatatttaatttaatttaattttattatttattctttttctaattatttgtcaaaaataatcatatccactaaaagaaattattttttggtagatatgatctgagaagagagatatgtacaatttttttttttttttgcattgttgtttgactttgccattagagaatttttgagtctcaaacctttattttttcttaaaagaaaaaatatcaaagctcttagttttggttatagtttaggtttttcgataaacaacttttaagaacttttagagaaaaagggggaggagaagaagagagaagt

SEQ ID NO: 319835 - DNA, 1985 bp, Cannabis indica
tgaaaaatacaaataaccctataaataactacaacagtgtacaatattaaagaaaaaaaaaagtctacctaaatgaacacctctttaggaagtgtactacaaacttttccatttatttaaacatacatattttgtgatattttccacttttaatccccattttggggatatctcatcatgtggcaacaaacaatatactagtcaaagtgaccgtttttggtctttgattcttttccttttcaaaatcgatttcactttaggtgtttaataagaagagagttgaatggagattttgtacttatcccaaatataatttcatatatttccaattcatttgattgcttgaataagatccttccatcctcctatgagctcatgtcattaaaattaatggtaaaagaatttgagggccaaaaaaatggctagaaaaacggtttaaaattttatttaatttttgttttatttttcaaataaactcgtttttttttttaataaagtagtaaacttttattaatgatagcaattattcataacaattgaacgcacttcagcagaacagtcctcaagctgaagtgcacgacctaaagagaaacaagaacttctagtaagacagtgagctgctttgtttccagatcgtttaacaaaacaaatttcaatataattcttagacaataaaaatttacgcacatcaatcactaacagactaaattgagataacataggagtgttactcttaattgcttgaacacacagtagactgtcagtttcgagaacaacattttgccaatcatgtctatcaatccagctcaaagcctctttgataccgataatctccgccatttcaggttggaccaaacctgtcctacctagagtaaaggcttcaatcacttgaccggaattgtgaatattttgtaattgatcgattctcattaattgataagaagctagcatgagaatatataattaagaatagtattatactttattttcttgttgcaaaaacagccattttcatttgttacaatgacgattatacactcatgcaaatgcaactcttataagattcttctcatttttacgttaccatttgttatttcttataatatatccaatttgaattatttcatatgtattattatatatatatatactttatagtttaattttgtcttgaatttattgggcttcatttaattttttattaagttataaatatatatgttgactagtcaaaatcataactctaacttgcataaaatttgcagccaactacttaagattttagttagaattgttttgtagtgaaaaaagattaaaaataataaaaaaaaaattggtaacaaattgtaacaaaactaaacaatgttagctagtttttgctacaaactttcttattattagagcattactattaataatcattactatataagatgtaatatttaaaaaagaatattaaaagatatcagtgtatttatctaatataaaaaaattactttaataatttttaattaatcacaacataaattttttgtaattaaatgtaaattttagtcacaacaaaaaattaacatgtgtctaaaacatagtatttaaatacacattatcactaatttagtttcaatgacaatactttagccataatatattgtgatttttataactaatatctttagtcacggaccttttagtgataatataaaaataataatttataattagacatataagtcacaagttttgttgtggtcattctcatataataaatttttttataatgctgatttattgttattagtaaaattaagtattgattttatataatttagttttaaaaaactattataaaatatgtgcccctttctaggtgatgcctactggtgcataaaaataatacttaatatttaattatactgataatagttttacacttaggaggcgtttggttgggatgaatgaaattataagaatgggaatgggaatgg

SEQ ID NO: 319836 - DNA, 846 bp, Cannabis indica
tttaatatttttaaaattagtatttatagataattatttttagtaagggtaattcaaagtgttccatttatattatgtggagatatttttatttaataattaggcataactactaagtgtagatatttataaattaataaaagaaaaaatgtagatatttataaaggcttagtttagatatttagtttaggttgaattttagaataaaaaaagaaagtgaaaattggagaatataaataaataaatagtattgaagcaattttttagtgtagatatttatacctgtatagaataaaagaataaaaaaatgtagatatttttaaatgcttagggttagatatttttggggtaaatttttagaataaaaaaagagtaaattggagaaaataattaattaaatagtattaaaacaaattcaaaacatcatctcatattctaaaatctcagttttatatagatatataaagatatagatagatattttatttaaattaaaagaaagtgatgaattcaaaataattaattaaatttatattattacagaactattgtacaaattaaattaaatttaaaataaaaaatttgcacgaattgaatgcattataagtaaattgaaacgaatgaacactctaaaactgtctccacctctattaggagatttcccatcctattctcactccatctggagatttcccgctttatcgcttatagaaaataaacgagaatgaaatttaaaattttgaataatttgtggtataaatacttaagtttaactttcagttacaaataaatagttaagtttaatttttgtacggtaataatacttaagttataattctagaactt

SEQ ID NO: 319837 - DNA, 993 bp, Cannabis indica
aagttttttttcatatttattttcaagccttatggtatttttacaagtgttgctcaagctttgttgtatttttgatagtttaattatttggtaataatcttaactgcagaaactgcaaaaaccgtaccgcaccgcaccttttttttgcggtacagtttctgctattttttagtatcgtggtgcggatacggtttgagaaattaaaaaatcgcatgtgcgggttggtttaagaaaatggtcaaaaaccgcaccacccgcaccacgaacattcctaatatcttctatctcttagagatcagtaggagactgttccttatatagtcgcaaaccaatcaaagataaaatgtgtgtccaaactgctctcctctagacttttggaaatacttctgctcattatggttgggaaactatctcggaccactgctcctgtgttgtctctactaaggctgacatgaaaataggggttaagccactttgattctacaatttttgggctgaccattctaatttgaaagatatggttttacatagctgggagaagcctcttgcagcatttggtatgaaaggaatttactttaagcttatgagactgaagcatgttcttaagaagttcaataatgagattattggagatgttggtaagaattttcaacaagccaaagattattatcaagaagctcgtatgaaggctcaagctcatccaggggattcagattttcaggatcaaaagagggtagcttctgccaattttaacagttatgataaaatgtaccagaagttctttagacagagaagtaagatcgattggatttaaaagggtgatgataacacaaaatatattcatgcttgtataaagaagagaaaatatgaaaacgggattgcttcttttactaatgatcatggagttgtcatcgataacttctctgaagttgtggatcacttcatgagtcatttcaaaggctttatggggactaggaatgaaattgtagcaag

SEQ ID NO: 319838 - DNA, 862 bp, Cannabis indica
cctttttacatggagaactagatgagtaaattctgattgagcaacaagagggctatgttgaaaaatgaatggaggacatggtgtgcttgcgtaaaaggtccgtgtatggcctcaagtaatcacctagacaatggtacaaacagtttgataattttatacttaaggcaggcttcaaaaggagtgtttatgacagttgtatctatgtaaaatcatcgaaaactagggccactgtctacctacttttgtatgtagatgatatgctaattgctagcaaggatactcaggagattaatcaggttaagaagatgcttagtggggaatttgaaatgaaggatttaggccctgcaagaaaaatccttggcatggaaatattcagagataggaggttaagactttaaaactgtctcaagctaactatatttctaaagtattgagcaattttggaatctctaagccagttagcacaccaattgctcagtatttcaaattgtctagcaaacagtcccccaccatagaacaagaaatcaaggaaatggaaggaattccctatactaatctggttgggagcatcgtgtacattttggtgtgcacaggacctgatttaagccatgttgttaacatagtcagcatgtatatggggaacccggacatggaatattagaaggtcgtcaagtggctaaagaggtatctcaaaggtacaacatatgttggtttactatatggctctgatggaaatgaacctgctgtaaatggctttgtagactctgactatgctgatattgacactaaaagatcacaaccaggatgggttttcagagtcaaaactgcactataagttggaaagcaaatctccaaactatag

SEQ ID NO: 319839 - DNA, 606 bp, Cannabis indica
ttgattgatgattgatattgattattgaagaaaccaagtgtattcgctcttgtataatgactttgtaatttttatacagtattatatatttagtgaatctattaagctttggagtattaatttattttgataattaatatagcatttgtaccaaccgctaaaagcaaattgtagttaattttgaaaaataaaatattttagttatttattatgaaatttttaaaaaactaatttttataaatgacattattttagtgtcattatttatcaaatattgcacttaatatttgttgtaaaaacttatttatatgacaatttattgatgtaatgtaaatattaaaatattaatattttcatttttataagtgttgtcaaaatgttctattataacaatatgcatgacacttaaataatgtcactgaatgtatttaactttccacggtcacccccattcaacacattgtgaaaaatgttgttaaaagacattaatgacataattttaatgttatgaataatcatatttgttgtagtgcttgcatcttttctgtcgcagagtattatcaagatctgagcccgaatttccttctttttgaatttgattcttca

SEQ ID NO: 319840 - DNA, 1369 bp, Cannabis indica
atatatataataatatattatatatatgaatatgtgtatatgtatgcatagtatattgtgtttttatgttgcactatgctttggatgtagtctttttcagtagttttactctatagagattatattaaagtgacagggataaaattggtaaagtgtttaaaaaaagaagtaaaaataatagacttcaaaaaataaggtaaaaataaaagaggacaatataaaaagggtatggagtctaatttcctcaattttttttatagcacgatacgacctatattttttatggcacgatacatctcgacccatattttcttatggcccgacacgacacaactttaattttaaaaagcacaaaaatattagtaggactagcacgacacaccgtatttacaattatagtttttagcttttcaactgcctaccttttaagcataaaattactttccatgactttcaatcaggtaaatcaagggtggttcagactttataagctctacccaattagatcaagaggaaattatattgtatacccactttactttactttacttgttttaatttttacttctttttttatattctttaaaataaccaatttttatagatgatgtccctatcagaccccttaggttaatgtaaattatatgttagacttaagtagagagtgagtgtattttgggcaacccactaaaaaaagtgggtatttttgataaaatataatatgagagtattttgattaatggatgcaaaaaataggtatttttcaactaatcccttggatcaagcgatcttttcatattgggcctgtgtatgggcttgatatctgcgataggcctctgagagggagaagttgaaaaatacccacttttcttacacattaactaaattcacctctaaataaaatttaatttaaatatacctcttttttttagtattgtacccaaattattctcacacactcacataatcaagacataatttcaaacataataaatttgtattttttgtagatgggtatgtaggtttgtgaaaaagttgggacaaaattttgattagagaaaaatgaaaactatggtgaagtgatagaggtaaaattggtagaatggttaaaaaaaagataaacacaatagattttgaaatagaggataaaaattaaaaatatcaaactaaaagagatatataatgtaattttgagaagggacactcaatatctatcagaaaatacaaataacaatatttatataacagagaagagaagaaaacaactagctgaaaggcagggacggagggactttagcccatatgtgggctaaagccctcactcaaatataaacatcaaattttttatatgtagatatatacatatatt

SEQ ID NO: 319841 - DNA, 1134 bp, Cannabis indica
gttaatcaaacatacttggtagtaaatctagatactgataaaatatttccaacaattgtatgggtggatttgtttataataagtgaaggtagttgtttaagttttgaagtttgaaaaggccttggttttaagacaatgttgcacgattctacattctactttttttctttaagacaattacttgctactaatttatacaaaaaaaaaaaaataccattaaataaaagggtgaaaacccataatcttttaagaaatttctcctacatggttttttttaatatttatttatatatttatatataaagctgataaataagacgatgacatgacagtttaaaattattttaaatacctctatttattatctctttaattctttaatttttctatttttattctaatttaaattctctcattcttctatttttttattctactttaaattttattttattttttctaatttttttattctactttaattcatacaaccgtatatgataaccactataaaaaatgctacgtttagtgataaatttttagttacaacatagatttttttgactaaatatcacattaatttagtcaaaaatatatatatatatctaaaaagtagtatttagatgcaagttgttactagtttagttttggtcacaataagttttgggttgaaaacacattcacgacaacaacttgtgatttttgtgactaatacttttaggtatggactttttaatgataacaaaggaatgatgatttgtatgtttagtcacaaattttattgtgacttaaagtaagatttttttttctgtagtgaaccattaaatatatatataaatatgtattaaaaataaaacattaatctacatatacaactttaaatgtagtgatgactacaagtaagatacgataatgacagttgttttgaaattatatgatgattatttttttttgtttttttacagatacatcgtcctttttttattttgtatgagaattgtttaatttttaatgtttcttcactatagcatgcatttgaagatatttattcatgtgcttttttttttttaattatttatattaagaaattgtacgattgtatatttttttttagaattctttagaatttttcta

SEQ ID NO: 319842 - DNA, 1133 bp, Cannabis indica
attttatccctatgcaatgtagatcatctataaaggaattgattattgagattataacaatggataattaataacgtatctatatcgtggaatgtagcttaggtttttgacaatacgagagtaaaagtcatgaagaagaagaatgaggggtttttatacaccaacctaagaaacatggattgttaaagcatctcacggtcctattcaaaaattaaaaacccccatgatctgatggctagagaacagttgtcatatgaacgggcacaaaagaacagttacactactcaaatacccttctaacaccctacaattaatggcatcaaaattgaataagaaataaaattattttcataaaaaatgagagaaataatgagaatcgttcaaaatggtcacgcgcaacatgacatcgacgctccaggaggtacatcgcaactcccatcttgcaaaattataagaaaggacttggggtaaatgttgcctagaatttctcccaaaatacattgcagttcagaagcaaaccagatggcaatgggacccaagttttcaaggcacgccacctaaattactccagagtttattatttcaaaggattaatgatagattagtcatctctgggaggatccaactagacaacgagtatttcttgtcttttcctctttgtgagtgaagtctacccggaggagggtacgggaggactgatgaagtataacatgttgcataaggattaaaatattgtatacgcatctaatattgtatgaggaagaacatctgacaccttacgctgataaacgtgtttaagggtttacacccatcattccttaatttcacgtgaccccatcaacagtttttaatataagttgtctttaataaattgaaaaaaaaaacatatactatttctattgttttattatatatatataaataggtgactactcaatagttacgtcaaatatataactacgttggttacactaattttgactattagatcattattgaatggttatgatcatttaaaaataaatatattacatgtaacctgaagctacctttcatttattattatgttttgtttctttataaaatactaattaagattaatttattaaaaaatttaatttaattataattac

SEQ ID NO: 319843 - DNA, 835 bp, Cannabis indica
atatttacatcataatttagaatattattaaaatagaatttttaataaaatgagttatattttacttttattgaaaacatgctcttatataagatgtagataaaattaagaaaatatcacagtaataataaaacctagctagcaatattttcatacattttttacctatatattactctatttattaaaagaattcaagctttttaccaaaaaaacttaataagtactttttcactttttattttttagttcaaaatatttttattaagaaaaacaagaaattgattgtttaaaaattattttatatttttcacttttagattttcttttatatatataaaattcaataaatacaataattcagatttaaaaaaataaagttatataaatattaatttatatcaattaaaaaattgtaaaagatcaatctactttacatgataattttttttatattaaaggcttataattatttgtttttgaaattatattgagaattaaaatgtttaaaattttaatgttaactttaagatagtttttcttatttaaattttaattatatatttatttataatagtattcactattatctatctgccatttacaaaatcataaaatagttaatattttattttgaataaaagtcataagatctattaattaataaatttgttcaaaataatagaacgtactccagaagaacagttctccaactgaagcacacgatatgtagagaaataagagtctcttgccaagtaatgagccaacttatttacagatcattttacaaaacacaaattgtgaaggcataaaatatcgctctgaatcgcttgga

SEQ ID NO: 319844 - DNA, 1114 bp, Cannabis indica
gaggtacttcataacacccctataagtaatatataataagtaagacataatacgacatatacagttgagaaaatataaagagaaaattccatatagaatttttgaaatctctctctctctctctctctctctcactaactattgcgaaatctctctctcttcttgtgattgagattttcatcctcaccttataatcacagtgtctcatgagttgagtacacattgtgataaaaattcttcttttaatcatatttataaactcattcttatcctgagtgttaagactgatctgaaagactgtggtgtgaagtcttcatcattgttcacaacaaggattggatgatcgaatattttatacgagaagaatcgaggatctcctaatagactacaagaggtattgtttcattttcatgtagtttaaatttaatctatgtattattatgtcgagattctttgagattatggttcatattggataatcatttttaataaattctgtttatgtttttcaattatgatatggaccataaaaactaacacgggatccattattcattcaatgaaaattattgttggatattttagtagacactcctattcatttcgatattgaagagaagctttttatttatttattatgatcgttcacgttgtgattatttagaacaatttgtaagttattgtagtatcatctaacatacttaaaaaaaattgtgcaatatgtaaaagtttggatatgaaattcttttctttaacgataacataaaaaaaaaatgctatgttatgaattaaaataaaaaaaaaaacaaaagtacatcacaaacatttacaacattttaatctttagaagcatagtgatcagggccggtcagagggtggggcggccggggcatacgccccaggccccaccattttggaggcccccgaaaaattaaattaatatatatacacacaaaagagtatatatatcttttagttcaacaaatttttagagaaagctgtagcagaagtgggaagcaagaaagcatatatttgtagagattgttgaggtgttgggttcgattcattgctgagtccatttttggttattttatttatttatttctttaaaata

SEQ ID NO: 319845 - DNA, 1071 bp, Cannabis indica
tttacaaattaatttttaaataactacaacttacacaatcatgaaaaaaattaataagaaaaactcttctaaatactgatagagagtgtatcatgacaatccttttaagtagtgttgtaaattcgcacgtgtcgtgctagtcccgtccatatttatttgtatttttcacgctagtttattcatgtcttttaggctagtctatctgtgcttacatgtcgtgccttcttgcttatactgtgtcgtgtttaagcacatattttttgtgttgtgacatgccactttgtaatatcgtgtcgtgtcatgattaagtccatattttttcgtgcatagttgtgctcatgccatgttaaaaagcctgctcccactactttattctaattattattattattattagagtaatttgtgacataaatatctaaatttaattttgtacggtattattatctaagttatgtttctagaacttctatgaatacttaaccgttaagtaagtcaatgaccacgtgccagtccctaataggtcaaagtcattaaatttttatttttatttaaaaattaatttaaatacacttataagaaaatcatgtaaataatgacttgtcatttaacggttaggttcttacaaaaattttaaaaatataacttaggtatctccaaccaagagttaaacttatatatttacgctacaaattactcttcttctttttcttattattattattagaaaaattacctcatataacggtttttaatatattttttttttcaaatttactgtttgtgttgcgccagcagtttttatgtagattttgattgcgatttaagttgctctgtttgtttctacgtagattttcgtcaaaatacaaaaaaaaaaaaaaattactttaaaattattattattattaatttggtatataatagaaatataaagaggggaagcgaatgaaaaggaaagtgggggtggagagttggccgagtcttgaagcataatcatcgtgatatcgtgcatgcatttttgttctctcttcttcttcttcttcttctctccccatctctctctctctctct

SEQ ID NO: 319846 - DNA, 1078 bp, Cannabis indica
gatcgaatgttggttctctttatatgttaatgttagtattagaaagttgcgcgcaagtttagatgtgatctaaattatacttgcactagtgaattaatggaactaaatgataaataagtaattagaagggttcaatggtattttgactaaaactaattatgaatcaatacatggagggctagtcactagaattgattatatcaatggacactgcagtaaaactcaataaatataattctataattactaagagttcaactccatatttttcgtgaagtaatcatgaaattaatgaacaaaaaatttttagttgatgagactcaataaataatctaaataattagagcttagaattatagggccatgatctccaaattgtcaccttgaaacactgtcaagggttgggataaagagtagtataatgtcgtttgaaaagatctattttgaatcagaaaaataataattatttattttgtaataaataaataattttttaaattaattaaataggaaaaagacaaaaattgttaagaaaatatttgttgagacaaaagttagcaggacaaaagacaccaaccttgtcttaaataagacaaagtaggcgcctaccatgtagcctgtccctatgaagtttgtctttttagattaattaattcaattaaataaatatttaaatttgaaaagtgattatagatattttaaagttattgagatattctctcaagtagttgagagattccctcataaatattagtaaccgtattcgattatggatatttatttatttaaacaattaaatatgatttaattaaaatgttattaactacaataaataaaagccatgatgtgtgttttgattatatttttatttagtagattaatcaaaataaatttatcatttatttattaaattaaatattttataggataagatatttaagattaaaatgataattaaaataaagatataactgattatggttattcagttaaaattttgtcattacatataacatacatattaatatggaacacttcttaatgtgtattacccatgaatggttactaaacaaattta

SEQ ID NO: 319847 - DNA, 507 bp, Cannabis indica
aatgaaaagtcaccattgataatcaatgataattaattaaaaaaatactaatacaaacattaaattttagaattaaattataattaattaataatctttcattagtaataacataaaaaaatagaaaaaataaaaaattaaataaattcaaaaaaatgcaaaaaaaaaaaaaaaaaaagaacatagaaataatgcagggagaatgccacaaaaatctataagtagcttccaagagtctcaaagcctacgacagttgaaaaaaaataatattagtactaaacaatgcaatatgattaaatatagagagagaattaagaaggtaattactttttttttaaataccttcggtagtgcagaagacaatatgatcacaaaaattaatttatcaaaatattttttataagaaattaaaaacaattaaacatatacacactgcacacaatctcaaaatttttgtctaaaaaaaggaataataataatattagagacaaagataatagcataagt

SEQ ID NO: 319848 - DNA, 2185 bp, Cannabis indica
ttctgttttgggaatctaataatatggatgactaggaacatgatctacgattatggaatcctgactttcctaatggaacgaatgttggttccctttaagtgttaattctggaactggagagttgtgcacaaattaagctgggatctaaattatacttccactagtgaattaatgataataaaggataaagaagtaattagaagagtaaaatggaaatttgaccaaaactaaatacgaaccaacacatggagggctaatcactggaatttattatatcaacagacactgtagtaaaatttaataaatataatactataattactaagattttaattccatatttatactagagcaatcatggaattaataaacaagattatttggttgatgagactcaataaataatctagtttattggagcttataattataggtccatggtccaaaatcaccatgatgtgtgtcgtatgtcgtatcaaatttactattattttgattttattaatacttccaattattttagtataaatataagtaagggttgatcccacaaggactatgtttattcaattattcaaaaattagtgacaagaattagaaaaatggggttttaaagattataaataaaaataaaaaaacgaattaaaagttatactacgataagagataaatagttaaaggttattctccaccttcaacaatcattcttaaatcatattaataaaagaaattttagttgaagtagtcaaattatctcaatctccctattaaatgtaatcaagacgaagcgttcaataattgactcttttacataagtagtaaatccacgaagtatgcaatttatttaactttgataaagttttaagatttatggagatagactaatctaggcaaaaaattaataaaacatataattcatttgacctaggttctattcttcatcacgattaaaatacatttgacaatattagaaattgtaatttatcatagatacttagaatcttagactattaggtgaatagtaatcctaaaataacggtagattaaattaaaacttaatttagtcatcctctaaataagattaaaacaataatcataaaattaaacatagaagaatagaagcaatttgatgtaatagaaactagaaattaacattcatcaataaaattaaaaatttatgtctcgagttttgaaataacctttaactaaaagaaaactcctcgaaactagacattataatcaaagttataataaatagtaagagtttcaggagaaaaaatgaattatgataaagaacacttgaagttgtaatctccgtccttttttttgctttctctatgagtttctctctcaattttgtagcttaaaagttctaaaattcgtagcctaaaaggtcctattatagtgcttgaaaatatctcactaaaaaaagatatctccctttaaaaaaataaaaatttcgaaatttcccgaaaatcacctcctcgtcccggccatgacttcctgccaaaaaatttctatcacgtgatttgtattttggccatagcatcttcaatacaactcagaatcggaagatttaagatgtttcaaaaagataagaatgagatctacaacttttatgttgagctccaagtctagttctgcttctagggttacaaaaactctcatttacattcaattttgttaaatcgagatcgccggcttccactattttccatcaaaatatactaaaatctctccaaaaaactctaaatgcatgattagtctttgaaatatccaaaacaattaaaatcacactaattaataatttaaagaataaatttaagaatattaatacatagattgatcatatttataagacaaatattgactcatcaaattctctcacttgactcttgctcgtccttgagtaagttaatgagaaaatgaataatgcttaaacaaattagtctttatgaaaaataattttagtttcaaaaattctacgtccacttataatttcaagaaaatccaaactcttcaatcattagaatttcaattcaagataattacttttcaaactcaatttttgtgtgtgtattcaatcaactgataatattactaacattcaaattagtttatgcatgccaacaattaatgtttatctcaaaaaaaaatgtgtatttcaacgaaaatccactccata

SEQ ID NO: 319849 - DNA, 900 bp, Cannabis indica
aatgtaaagaaaaatttaaaaaaaataatattaaaagtaatttttaaaaattatttaagtttatatttttttaataatttggtgcattgataaatttatggggtgcaaatagaactctccaaaaacaaacatcgtaatcaattcttattactattcttattcgattccattactattattattcatccaagctaaacatcacgtaaacttgtataattttttacactattatttactaataagaaaataagaagagaaaagataggcaaaaaaaatgtacaaatgattaaaaattgttatacccatatttcgagcaattaatatggtaatgatgcgtattaaaagctggaatataaaccagctcgtgtgataaaacaataaatacgttcaataaactcgcctcggaaagtacaattagtagaaatattcgaactcaccctttaaagataaggatgagtcgtgaataataactaccgatttatgagactggcgagacaaacaatcaacgtagaagatccgtctcgagatacacagaatactcaactgaaagtatgattggaaagtgtagataattaattctttaaagagcttacagctcattgatccagagtattacttagagtatacttaggcgttgaaaaccctctttagaataaaacaacttaagaagattgtttgtattacgatatgaatagagcataatcagcataaccatttacagataaagataaagagcgattatagcagttatttattactatcccatgtgatgtaaatatgaaatgtggggaatgtccacattttacaaatggttacaaggataagatcccaagtgaataactctcaccctaaaactcctataaataaggacaaaatctagagaacaagggacgaccaatt

SEQ ID NO: 319850 - DNA, 1163 bp, Cannabis indica
acatacatataacaaaaaatgaataacaaattaacaagagtttaacataaaaataccgtattttctgtaaataaaattaaaaaatagtaaaaatatttaaaattccataacacaatatttttgtaatttttttgttatttttgtatatttgtaaaataatctcattaataatttaaaaatattaatatataaattaattatagaagataaatatgaacttatcacatatcattattcttacgtttttcacgtgcgatctaacaggtcatacgtcccaactaccaatataattttttgatcaaagaattcatcaatggtagtgagttggacattgtcacttttgctgcaaatcatagtctatactagtccctatttgtttggtacaattcacgtgccttacccttcaatttgtggtcataataaatgtgctagtggagacatgtgaggtaggggtgtcccaagtagttttctacaaattcattactggtcactatttgatctgtacaattcccagccttaacttcagtctgtggtcataatgaatgtggtattggagctacataatgaatgtggtattggagctacatgtaaggtagggttgttccatgtttttagttttctacaaattcaatccaaaaatggtaagacaccactagtctctctttagtgctattaatgagtctcatataaattaaaaaatatttttttaaaaaaatattactaacgaatcaagacaccacttataaaagatattagacaccactagtatctattaacaatgctcacaatatatacatatacaggaccggtcctaaggtatatagggcctaaggcgaaattaaattttggggccctatatatagtttaattattataaaattaatagttctagtgcttagtgaaatagtaaaatttttaaaaactcttagaggtctaaagttcaatccctcataactacacattaaatattttttaacaaaatgaaaaagtagaggttgggaattgatcccacgacctctaactttaaagtaagaccttctaccaccgcactaaacaattttttattgtattttcttcttatttaattctttatctatatattaattattattttgtcacaatttcggggccctgagcgttcgggggcccgaggcgcacgccta

SEQ ID NO: 319851 - DNA, 946 bp, Cannabis indica
aaaaaataaaaaataagaattaagatgctattaaacagaacgttagacaatttatctatatgccattaaatccacatgttacatttcattatcagaaactacttatagtttgaaaatgattttttttttcaatgaatataaaaataaaatttaattacaaatacattaatagtcatattttgacaattcattttattttctttatttgtttaataggaatgtttaatttttaaaatattttgccactttctttttggaatgcataagctatgtggcttggagctctactgaagttctctcaatttcagaatatctcagagtcaaaaaaaaaatgaattaaggctcttattggatgtcaatcacttccatgtcttcttgagtgtttgactagtacgtgtaaataatttttcttactatttgttatgttcttatatggtgaagtaaaaacaaaaaatttccatatgttgctctgatgtgtcaaattggtgagaatgcttcatattgcaatgtaagttacttactagctattgtgcactatataatagagtttttgtttcttatccttgtctttgtgctagatgagtgggtgtaaggaaggagttagctcttgcaatagcatggcttgtaagggccatgaagttgatgttattcacttctcaaacggaaatgccatacctagatttgaatattcacacaacaacatacaatttaccaatacatttggatattgatatgtaattaaattaaattaaatcttatttgtttccccttctttgagaatatttggtcattatctctatgcttggaactcacagtgaagatacatagatggaaagggtacttcaggtatttgaactattagtctatgcaaattgcaatattttccttgtttttaagaaaaaatacgttgcttggtgctaacaaaagggcttatgctttataaaaa

SEQ ID NO: 319852 - DNA, 880 bp, Cannabis indica
gaaggtattttgtcttctttttttgtttcattcccttataacatgtttaaggccttgtttggttaagcatttttttctgctttttataagagttttttcactaacccgaaactcagtaaattcgctcgatgttcagtcctagcaacaacaaaagtatttttggagtttcagaagcccaaaaacaactttgccatgtacaaggagaaaagagaaaccatttttatttacatgtaaaaaaaagtgaagactgatgggctgttgaacttgttgtgatgaaattcgcaggcgacggacaaggaagtagcagtaagtggctgcataagatcccaaggagacttattcatgtgtggaactcaggcagggctgatggccgagacagagagcggcggaaatggcatgtttcatcctagtgaatattacccgaaatggactgtggcaccacccacagatgctctgaaacaccatgttcaacactgtactggatggcacagtgttgctcgcccagctgatcttcaaaactagccacactcatatataaatatttatagaaacttgctatgttttatatgatattttggtgtttgtaagtaaaaatggttacttttattattgtaactctgtactaatggttttgttatcaataaaacataaattattatgattttatttgtatttatttctgtttttaagtaatgaactatcctattatggtttatggtagattggtttattagtaaaaaaaattatactattacataaaatgatataaagaataatttgcggtataaatacttaagtttaatccttaactctcggttttagatgcatactttagtttaattttttatagtaataatacttaagttataagtacctgact

SEQ ID NO: 319853 - DNA, 1215 bp, Cannabis indica
atataaagatgtagggtactcaagtttacaaattaatatagacttctaaattaagttttttaaaagtataataaataataccataaaaatataaataaatagaaatgccataaaatatgtacaaagaaaaatatctcatatatttatcaaacaattgtttaaaatctcataagtataatttcctctcatttatcaaattgaagaatctattttcgtatatcagtcgaacaataaaatactaaaaattatatatttatatattagtcaaacatttaatcaatagtacgtatataaataaccaagtagctagaagtgatgaaagtagttgtttcaatttgtgtgatgtacaagcttaattaattaatgtacaacatcaaaggttctttcaatatattatatatagctgctggttttggttgctttctcagagggaaacaacgtcgtttgttgcttagctgagtgtggatgatgcacaaccactactcctttgtatactttctcccaaaataactaaccatttctgcatgcatccaaaacttatatatataaaacattatcaactactcctctatatatttattataataattttaatataaatgtatattacatattagatttaattcccttattaattattactaggctagaatgcttatcttgtataggaaatgcttgttcctactaggatgatttttgttttcacaattctcatatttctaaggtatcaaaagataatattatatattagatgtctcgaatctattgtttttttaattaattttaagatgaaatgacatgtgtatttttatatactcactatattttattaataaaattctattgctctatgtagaaattataatttaaatttttatacatatgacaatgtatattatagttatataatgtattctaccaatttttaaaaatattagaataaataaaataatcagttgtaagtatataaatatattttttattaattagtttttaaaaataatatataactgtatcataccactatattaatatgtatttagtttaaaaaggagtaataataactttaacactaatatattaattaattaaaaaagagtaataataatttttttaagtatataacatagggataattgcggcaaaagtccccaaaaatttgaggttgatgccgattagtcctcaacctcaaaaattggcggtgaaaatacctaa

SEQ ID NO: 319854 - DNA, 1132 bp, Cannabis indica
atagtagaatttcagatgcattaggagtttttcgagagcattttgttcactagtgaatcaaactaagaaattgagttcaaaatgaaatatgaaaggttgcttttggtgtgtgaaaattataatggaatgggtcacaaaactaaagtatgcaggtgttaggtttatttttatgtattatttaaggtgtgttttagtatttttattattttattgtgtagatatataattggttttagtttttatttattttttaggaaaagtaattgaagatcttcaattttagtaattttgatgttttgcaaattttttttagcaaaaaagaaaaaaaaaataataataaaaaaagaaaatttttagcttggattgatttcctattgtctaaaatgagttaagaaatagtatttttagctccaaaattcgtggtctagagtaaagaggaatcacttcaaaaataaattgaaaaaatttaaattttagatgttcaacatgatcggtttgtgactgaaaataaaatctaaagcttcaaactaatttttgactataattcattcatttctaagaaaagctttctaaattaaagttctagatctttcttttatctttccaaaacatattgaatcatctaattatgagttatatctaaagaattatggccaaaataatggcaaaactttgacaccattcgaaaattgataggaagtctgagtgtaaattgagagcaaggagtagaaagcaccagtgaagtattccaatagtattctatctgttcaactctatcttttatgtctttagttagatttcttttattttagagtgtcttttagtagctaagttcttataaagattattatgtgaatcacttgagttaaatttataaattatacaattttttttcttcttctcattattaaattcaatacaacctgattaattttataactattgaccgatcaacttcacattgatgtatgattataaatattatgtgtttttacaagtttacttactaatttcttgaaatatctctattctataacatcttatggattagttgtgcataaattcagggtggataagaaacttaattcaatttgatggatttttgttaagctatttttagcctatgttttgg

SEQ ID NO: 319855 - DNA, 1200 bp, Cannabis indica
agaagattaaatgaaaaagaaagagaagtccaaaacatttaaaaccaagcctcatgggaatgatttaaggaatcatatcaatgatcgagtccgcagaagggagtcttcaaatgataaaactcagcgcttagaacgcaaagtataagagttaacaaagctcacagaaaagatctcccgaaggtagaatgaaaccatgttcgattcaaaagaaaaagatacaaaaccatgtgtgaagagaattatagacgcactgttgttggagcgcttcaaaatacctcaaatgaaattgtatgaaggaaagacgaaccccaaggaccactaatccaaatacaatcacatggtgcaagttgttaaggctagtggtgatcaaaatgttgttgctttacgttgattctaacaaaatccgtagaagactagtggaagaggttatctttgggatcaatctacaacttgagggacctgtaagaaatattcaaaaaccaattcatagcagcaaggaccttaatctggaagctagctccctaactatccttaagcaacaactaggagaaagcttaagaaagtacatacggcttatgatggatgttgctgcgaaaataaaggttactaatgctataaagatggtggcttcaacgttaggatttaccattggatctttgttatggggagatctccaacataggagagtggaaactttgtctgactttctgtcaagaacatttgagagaaaaattctttctttctttgtatctctatattttaaaaatatatgccaaagtaaagtgtttggatttctcaaatcaggcttctttttatagtagtttaaaaccttttgattaaatcatatttaattatttaaataaatatctataactgaattcagttaccaatatttatgagaaaatccctctactatttgagacaatatctcaataattttgaattatctttaaccactttttaaattcaaatatttatctatttaattaaatgtaattaacccaaaaagacaaacttcataaggacagggtacatagtaggtgtaatgactgcatactagaatatggattagtaaaggcaattagcgtaattattgatatttttataattatgcatgaatttattatgttgtgggtcccattaatagaaagaggcattagagttataatgtctcaatttcggagattttattaaactcta

SEQ ID NO: 319856 - DNA, 830 bp, Cannabis indica
attcttatcatatattttagtgatataattagagatattttaactattattctacgacattattaatcgaaataatataaattatgttatcatgatttcctgatcgtgtaagttcttttactaataatttatagaaaccaaaccattgacaattatgttggaattaggataatcaataactatttgatcactagtttattattattatatatcaaagttgttaaacagaccttaatagaataataataaaatagagttgaacaatctaataaccaataaactaagtatccgaaaaagaataaggaaaattatcttacgagacaagttgttcctccatttgcatgcatcgctaatctatgtgcagtcattggtcgtccaacgaatatgaattaaggatattgttaaaaatttagataacaaatttgctgaaacatctaataataatacaagattatttaaaaatgattgcctttattaaaactagacgtagctactagacaaaccgtttcaattacatgataagttgtaaagcctaaagaaataaaccactctaatattatcataacagccatacactttgcttaaaccacagagaagcaacatgtaaaagaaaagaaaaaacaagaaaatatactaactttagtaacaaacataatatgaagtataagtacacaaataaccactaatacttttatagtactgaagtaaaatataacaaaaattaatatttttattaataacaatctaataattaattaaatttgtacagtcaaataaaggctaattaggatatttacctcctaaattttaacatgtactaaatgatgtcc

SEQ ID NO: 319857 - DNA, 989 bp, Cannabis indica
aatcaattattgagcagttttttattttagaaaacctttctttcaattagtgtaaaaaagtaaagaagaagaagtgattaacaaatagatgagtagagacaataaatatatttatttttttattaactgaatcatattcaaaatactttgcaataaaaaaaatgaatagatgttataaaaaaaatacttgtaaataagaaattgttataaaaatgaataaaaaattgctactcacattaaaaaaaattgttatatcctttaaaagtaaaaataataagaataataattataaattaaattaaaattgttatgggcttgtttggtaggctatataaaagtcatattgtattaaataataaataatactatgtttagataaaacaatgtattatattaattgttacgacaaatttttttaatacaatgtaagttgtattatttaatacataacaaatgatctgtattaacttgtattataatatttacaaaaagatctagcgtcaaccccaatcttcgacccggatgaaaggttctagacctggacccagatcgggacccaaatcctagacttgaacatggaccccgaactggacccagacccaaatttgggacccaaaccggtctctggacccgaacaccggacccagacccaaacctggaccaagacacgggacccaatacccgagacccgaacctcaacctagacccaagacctaggaccagacccggatcccaaacctggatctgaactcgaacctgaacccgaacttgaacccaaacataggaccccagacccagacccagacctcagacagggacccgaaccccgaaccctagacctcaaaccaaaacccaaaccccagacccagacccgactcgaaatcggtgttgggctcagtttattgaaaatatattctaactttacacaacctattaatgttaggatttataaaatactcaagaaatatatatattatcacaaatctaaa

SEQ ID NO: 319858 - DNA, 543 bp, Cannabis indica
taacaacaaaaaaataacgtacagataacaaaaaaatcaacaacaaattaacaagattgcaacataaaagaccgtattttttgtaaataaaatcaaaaaaattgtaaaaatatttaaaattccgtgaaactgtatttttgtaatttttttgttgtttttatgtttttgtaacataaataagtattttgctcgctcgataaaaattgtctcttgaactacatcattcttaaatagatttaaaaatttagaaatgacatcttttaaaatacagtcatttgtaatgtatggggtaattatatcaaaactaaatcaagcaattattatgataattctattgggattacatcaaattaaacatgacataataaaatacatatggtgtgagtattctttcaaaaaaaaaaaattaataagtagccttcttctttcaaactcttgtttgtgccatatcaacaacattaagcccaagaaagatccatagatggttggggaattttgatttttatgggttttaaggtatgagtttgtaaaaatatgattttt

SEQ ID NO: 319859 - DNA, 1464 bp, Cannabis indica
gacaaaggcaaaggaatcgatgtggaagaaccgaagaaggctctttatgcaaaacaacgtaagaactctaaaactactgaccaacctcaatagaagaggaaagggaaccattcctcagggcatggtgaccaaaaaaattctagaggtagagtcacacaaaaaagaaagatagatgtcagagtacggaagccagagtctcaaaaagaaccatctcctcctagtgattctaggtaaccatgacgaggatgttgaagaagtgaattcagtatgaaatgatagtggcggaagcctttccacaaacgatcttcgaagaagattgaatgccaagaaggaaatagccaaagctgaaaaagcaagactcctcataaacaatttgagaaatcacatcaatgatcatgtttgcagaagagaatcctcaagtgataagactcaacgcttggaacgtaaagttgaggagttaatgaagatcactaaaaagatttctagataacaaagtggtgccgtatccaactctgaggaagaggatacaaagccttgtgtgaagagaattattgatgcacctttaccggagcatttcaggatgccccagatggaattgtatgaaagacgaatggaccctagggaccatttgtccaaatacaaccgcatcatgcaagtttccaaggccagtgatgatgcaaaatgtctatgtttttcattgacattaagtaagtccgcagaggactaatggaagaggttgtctccgggatcgatccataactggagagacctacaagtaatgtttagaaaacagtttatagcagccaaagattatgatttggaagctagctctttgaccagcgtcaagcaacaacaaggagaaagcttgaagaagttcattcaatgcatgatggatgtggcaactaaaaccaaagtcactaatgacatgataatggtggctctaacatcaggacttacaactggatctttaatatggggagatctccaacataaaagggtagataccttgagttaattcttaacaagagcccaagggtttatcaatctagaagatgcttacacccaagcatatggagtactcccaacaccttccaccacgataacaaatgcctaaccatcacagatgacaactccagccatttaccctccatgaactgcttactcttacggtatatggactaagcacttctgtacagcaagctgtacaagctacttttttttgggtttgaagatgcacaaacggaatacaacgaaccgaaaaatggaagttctagagtctaatatgacccactcaaggagtaaaaggagtacaaagggtccacattagagtgagtccgcaaagaagggaaaaaccaaagaatcaaggtagaccgagtatacaagtctcatagatactcgagagaatgtatacaaggcaacctgtaatatggtacactataggaagcctccaccaatgtataaggg

SEQ ID NO: 319860 - DNA, 1174 bp, Cannabis indica
aatgccttggaaaggacataacaataatccaatgtgtaagtatctcttatcgccgattatcatgtcagtctaaatctagtgaactgacaaatcatgtaaattaagtatttaaacatataatcatgattatattcctttgtgctgacgacactataatcatgaacaaatatatatatatatatttatatatgttttggacttaataaaatttatacattaagtataatcatgaaataaatcatgtgaaccacgcaacataaaatgatttttgatctttattaattagtaaatctgattatattgaaaagagttttatttagggcacaaaacccaacatgaagtccactgaggatgcttgtgggacagttagctcgttaaagtgaagcaagaattcttagagttggggaccttgggggcgtcaggttgccaagggagatgaagatcttttttttctttttctcaaagagaatttgaagagagtgagaggaaataataagtgtggaaatgaaggatggccaaatgaaccttatataggttctggcatgctcttccctttaaaatttagtgggcagttgcactgcctacaaaatggccatgcaaaagatcaatagttccctagtgggaacgtgtgcaacaaaaaaaaaaagaaaaaaatttaatgattgacaaaaaagtcattctttgtcatcaagcgcgtcatatgagaggccaagtatctgaccagccataagctacccggttaagactttaatagtcaaagctagagttggaaagtccctatcacattcaaagagacccacactagaaattacaaggtaagagcctgtaatctgtgtggtattatctctcgaatgaatacaacaaaaaggagagtaggttattacccgctaatcaagggggttgaacctctacaaatcgttgtgtctatttaattacttgattttattgtttagatgtggtgattttgatcataaataaggctccgttgttaactcaaacttttaggtcttcttattttgatgattaacaaatatttgattattatttgttactaataattttttttattttgtagctcaatcaaaaggtaaaataaatttttctaaggcaaaatagtaattttaccaaacttctcaaacgaacccgaagtggattcaacaaatatatcaactac

SEQ ID NO: 319861 - DNA, 699 bp, Cannabis indica
aaaaaaaataaaaaaaaaacaatgataccacattttgaatctgcgcaactcctaaatggtgtaaagttaaagatattggccaacttccaattgaatttccatcaatgaacaacttttgaatatgcttggcacttctgcctaccgttatatataaataaactttaatcataactaaatctactttttcctatcaatagtatttgaaaataattcaattcaaatgtaaacttgcacttgcacacaatatgctatctttcatttgatgatattcaaattatagatctgttacgtcaagggtcattgaaaattaatataaatatcacttttaatttcatgggccatgcaaacaccagttattatatatcttaatgtgtgggtctcctttcttttgtttatatttacgtaaacacctatttattcctttatctctattggtactatactattttattaaattggtatagaatcttcatatcatttcactttaacaatacattaaattatacaccaaattctacaccgttagagcatctccagaaagcacaccaaatttggtatcacactatcactaaatttgatgtcaaaaattattttcactccaatgacaacaccaaaaattatactaaaaaaatattctttattattatattaaatttttaataaaataaaaaaatatatattatattaattaactaaaat

SEQ ID NO: 319862 - DNA, 619 bp, Cannabis indica
catgagaaaaatttgactaaaaaattatttcgggtgctaaaataaataaaggtgcatcaatgtatctattttaaggagtacattgtagaatttcctttattttcttaacacgaaataaataaataataaataagctaggcagtaaaacacgtatttccaatcatgaaaatatcatttttgaaaaaaaaaataaaaacggagcattaagtcattaacaatttctactacatgaggaggtgaccctttaaacatttgaaatgtcattttatattggccactcataaatataattgctcattaatgtatagatttatgtatatgtattgtcaacttaaaacgaagataattatctgaagtattaggttggtggtacgtgaaatatatgtataattaattttttttaattaagtttaattaggtgatattaagtgcaatattatatatgtatgtttaatttttttaattaggtaatgattttttttttaatttttaaatggggtaagattttgatctttaagaaaaaaaaattaactattgctgctaaattacgtaaccctgtttcttttttgctctgcacactttcgttcaaaaatcacaattaagtgtcacggtagactgt

SEQ ID NO: 319863 - DNA, 1668 bp, Cannabis indica
ataacatatatctatctacttcactatcaatgctcaacttgtcaatagaatgttgccaactacatataaatggatttgaaagtaaggtttcatttggattgaaattcaatttaatgtgtgcaaacataagagagtgataagagagttaagttgagtaatttgactctcataaaaaatactgttttgctccatataattctgcatatggttattctgttggatgatgtagttaagttgggcatacgtgtatcgccttgtcggatcagtaggatcgagtaattgctatggcatgtcctcgtcctcattctttcttggccatcaatgtgcctcttttcatgtggttgggcctcaagtggatgttgcccataggcatgtgggttcttgagcctatttaccatgcccacatccatcttcctttgtggtatcactttattgtcataagaaagttgcttcacgctatatgttctacaaaggtcggtgatgactccagccaacccaattctatctcacgtggctccttgaaccatcaagtcaaaactttggtgaataatctcgcccacattcagattatactctttcatgatgccaagaatggtctcccaaggataatgggcacattgctatcttcttccatgtccagaacaataaaatttgctaggaaaataaacttatctaccttgacaagaacatcttcgatgacccatcttggatgggccaacaaacgatcagctagttgcaagttcacgattgtaggctttgctctcccaattacaatcttctaagataagaatgcacccatctgaccaagaatacacaagcttctgaacagacattagtctatactattatagagttatgccatttggtctcaagaatgttggtgctacctaccaaaggttagtcaacaagttgttcaaaatatagatcagacgaaatatggtaatatatgtggatgacatgcccatcaaatctaggaaggctgggggcacatagaggatatggataaatgctttaaaatccttagaaaatacaacatgaaactcaatccctttaagtgttccttcggggtcagcttgagtaagtttcttggattcatcgttgatgcccgaggaataaatgccaatcaagagaagatttaagctctcctagatatgaagtcaccaacaaaattgaaggaaggacagagcctaattggttggatagccatacttagcgaatttgtttcaaaatcaatagacaagtgtgctctcttcttaacatccttcaaggtaacaagaagtataaatggatagaggaatgtgagattgctttctaagaattaaagaagcaactcaccagcctcccatactctcaaaacctttggacggagaagaattagggatgtacctaggagtcactgaatacacaagtggcgtggtgataagagaagagaataatgttcaacatccaatttattacatcactaaaagactagttgaagcagtgggtcggtaccccctaattaataaaatcacttactgtctgatcttagccacaagaaaattaagaccctatttccaagcactgttcgggtgtacactgacaaacctttacgccaagttttgcaaaagcctgatgcttttggacaactacttgttatgaattttatgtttattacgcaagtgtacg

SEQ ID NO: 319864 - DNA, 852 bp, Cannabis indica
atagtaaaaagatgacaactctccaataaactatatttaaaaacttaccagcaaatctctgtaacagtaggccctccacaaaatcgacttacaaaataacaataaaattctattaccacacaatttaatgaaaaatatataatgtgaataaagattgtaaaataattcagataataatatctagacttgaaacacttatctgtcaaatttcaaaagtcgttttgcagaagccacgaataccaaatataaaacttttgtcttaattattgttcatactacaaatctatttagacaattagggacaagccataaaaatagcgcaaatgctataaaaggtatccaaaccatgcaaaaatataatgctaataaaaacaaaataaataatttgaaataaaatataaaaaatactcaaaaaattagaataatctcaaattattataatttgatgtaataaaggactaataataataaatacaataatatgataatataacaatgatgattatatgataaagtataaaattattaatataaataaatggtcttgatgatacaaaacccaaatccgtaacttgattaatttttggtaaagtattaattattaatacttattattaataatagctagtttttgtgcaaattgaagatcatattatggggaagaagacggagctgacgacgtagaagagtgttagcactactacaaaaatgggttttcccgacgcttttaaacagtcgtttaaagtattgtcgtcggtttctataaccgtcgcctacttcggccgtcgtaacttagggtcgaaataaggcgacggttcgaaaccgtacgctaatctggagttccgacggttt

SEQ ID NO: 319865 - DNA, 831 bp, Cannabis indica
cctttgactatcaatgaaaggcatggaattatattctttcagttccaaactagttgtttattttttatccagcagaagatcagagcttgagatcaagaaataattataatttatatggttgctttttttttttttttgaaagaaaatttatatggttgcttgccacctacttattctctgtctgtttctatcttgtataagcgtgtttgagtaaccaaaataagagcaagtaaggaaaatacattattcgatccctacttaactcagttaaggagtatggattgcatatttcatttcctaataataataataataataataataataataatgagagtactattttaatctcctattttaacatcttagccaattatttgtcccaaaatatatgccctaatattctttttttcaaattctttttcatggctatgtctatcataattacaatatcatacttctaatattttttaaaaaaattgaataatttacagtatcgacaattcttgatattccaatttatcatacatttaaaaataatttaaacatattttctcaagtataaaaattaggataaaatatttatttacaagaatgatattgtactgctataaaaaaaattaaaaaaataactctaacatgcgtttttggatgcaaagattaactaaaatattgtcttataataaaatgttgtaattagcaagattcatactaaattgagtagagtagaattagtatgtatctatacttatctataatttaagtataggcatcgatgcacattttatctatttcgatatttgagagaatattttagtctaatttttttat

SEQ ID NO: 319866 - DNA, 1450 bp, Cannabis indica
tatgcataaggaatacatgatgtcgggcaccaaaaagaaaagaagcctgaagatacctctaagcagataagaacttaccgcgatcatggcagtgctcacgtcctggatttggtagacgggattagtagaagcacaagccgcgtatctcttcatggggaggtgaaccaggccggtggcaaaatagctcattgattctgaagcgaagggagccagggtgggtccaatgaaacggttgaaccagccagtcaagggatccagatttaaatcctagacgttcccgacatactcactgcgagtaaaactgtcctgggcctccctcaagatcttcttcaaggcttccacctcggcattcccctttgtgtactctgccgtggcataattgtgtttggcgatccggagttgggttctttcttcatcggcaggaatgggggttagaacgatacgtagaggaatagtatactcgtcgacctcggacaagatccttgaatcacagttgggagtcagagtgtctgagggagaatttcaccttcctcttcttctacctccttgtcctcgttgattaaaatgacttggtccaagggaaggttggaagaagacctccgaggagtcaccatcgggtcttgtgcctgaggcagagctgggtcaggactgtaggtttgggcgagagcgtcccggagctcatccattggcttcgctgctgaaaaacatagacaaataagggtgttagaacattatcgagaagtcatgcatgcaagaacaaagcaataaagctaatcctaccctgacgatctaattctgccctaccaaaagcatgcattaaaatactggtgtcgtcatccccaagaaagctgtccgaggggaggaaccagctggaagataattaggccaaataatccaaagggataggtgcgggaggacttgaccccatctgggaccggcctaaaaagtgacctaggttggaaaaataaaaacctttggcatgatcgccccatcgaaaagggggcatccaaaacctatgaagacgttcatcaaactctactggcctacaaccagaataatcttgaacggaagggacatgatgaacgattagtggggacttactagatccagaggtactggcatcaggagccccagtgttggaaccgggaacggaagcttgggccgggaggtcgcctgctcttttccggcctcaatccaaagaaccctcttggcgacagcttggcctttgatataagccaattcttgttccctcctgaagagttacttcgtataccggtcctcggtggaagcaatgatgtccgcccaaagtgccttcttggagtcgagattgcgaatgttgggacaaagaacctttgataaattgaaatcgtccactgactggctctctgtgatcaacttggcccttctgcagtgtgcagtcgtgaccaagtccccaacattcaacccatcc

SEQ ID NO: 319867 - DNA, 3667 bp, Cannabis indica
ttttgtcattatcttttatttattaccccaaatttgctggtgtggcattaatggtgttggttttctggcttatttaatgacttccaatatatatgtgagttttaatttgcggtttaattcatagaaagttgaaaattttattttgtgcagtgaaaaagttgtgctgtaggctttgaaggccagtgactggaatctcgaagaagcttatgatctattctactgccatccacagttgtaattatttactgattctagacacttagaggagcctttcaatagatataaaggtaggtttaagtttacatttgcttgttttcccctaaaagaagtagttgcacatttttcacttttcttgtacagaaaattcattgttcttttatatgaagattatgaagattattaggaccttgatttgcataaagcattttcagaaagaagtgataaataggttcatttaacttttcctaacatatgtggccattagtatgttgtatccaccttataaaaaagtgataaataggttcatttggagtagtttttaattatgaaaataatgtttaaatgttttgttgcagttacagttaaaatatgtaattatatttttacaaaaataaattggtaattttaacaataattttattttgtaaaacttctctctattttttctccaaattgaaggattatttttttaaaaaaaattccaccttaaatttttctccccactgatcctcttctccacacttttccttctaaccaaacaaacatttttttttactctctctccccttaactaattccaaacaaactttgcatcttactcaacttaactccatctaatagtagttcaaaacttgtgaaataaaaaaggattattttacaaatacacaaaaataataataaaaattacaaaaatatggttgtatggaatttttaaatattttttacaatttttgtgattttatttaaaaaaaatacaatctttttatgttgtactcttgttatttgttgttaaattttttgttatctgtatattatttatagttgttgttttgatattattttcctattatttttatgtaggttttttgttatttttgtgttgtttctatagaaaaccgtaaaaatataaaaaaaatctttaaacataaaaaatgtaattttttgtacaaaaaatagtattttatgtaattattcttataaaaaatagaaaaatttacgctaaaggacgtaattttaaaattaatctaatagttaccactgccattttatttatagtaatccataaaattagtagtatattgaaattttaaatttaaattttagttatttatttcttaatatattataaatgaaactaaaatattactttttcggtggtatgatatttattgtgttagtgaagaccaaaaaaaatatatatacttctaacattttaaaattattgtcttaaaaataggtggcaatggtatatgtatatttttttgtagtataaacaattaatagtttgaagttgtgagaaaataaagattgagaaatgtatataactttaaaaaaaaaaaggaaaattacatagtatattaacttttgcaattttttttacaaaaatactgtcaggcggtattttttttacttttttactgtgtttttaataagtttcatactgcagtattttgtgttaagttttcactggtgttgtactgttattttttttagttgttctactattcttttgagttgttctactttgtgttttactagtgttttatgaaaatgcagtatttttgaaaagatttccgtatgataatatttttgtaaaaaataccccaaatttcagtatttttgtaagtttctgaaaaaaaaggcacatgacgtagcaataaaagagttctaaaaaaaagaaaaagaaaaatagcaatcagagagatcggacccatacttccagctaccaatctaatatttttttaatttcagttgtcaaagttttaatttcgataggcttccgtattaatttgacttttgtttttaagtaattattttcacatacactacaagaaaagttacttttatcggtacatttttgcactggcaaaagtttagtattacactggcaaaatagaatctacttttgatgtattggcaaaaggggttggcaaatcaacgttggtattagaacttttgctagcacaaaatgaaaaacgctgacaaaataatttttcttagcacgtaaatacgttggtaaaagttagacttttgccactgcaaatgtgcgatggtaaaacttgtcaccgcagtttgtgagatgcgctggcgcttgtaaaagttacttttaccagcacagtagcgaactgcactggcaaaagtaacatttcttgtatttccttaatttggaaaccacattctttggatctttggatacaaaaattttttggttgcaccacataacttttgtcatcaatattaccattgatatataacactttaataatccatttgatataactcaagaccataatgagcagttagcgtcatgcttgtcctgaaataatctttcaattaaaccaaaagaaagtttatttaaaatgaatatatgctttatgagtaattctttacatacaaaacataatgtgcatctctccacattacaatttgcattcctctggattataaatatttatttataatcaattggttttacaccttataataaaagaaaaaataccaaaattttataatctcacatcaatttgtactccttttttatgatatcaatccagtttcaagagttggaaccttcatggtatgataaaagtgttggaatatattttaccacgatctagatttactaacaagtatgtctttaacaacctaatcatgaacttctaaaacgatataaaataaacacatacaaggtatgagaaaccatacagtgattgcagcggaattaaatggctccttccactcagatctctaaccctcgtatcatttctgtagcagagtatcaccaagatctgagtccgattctccttctcttgaatttggattcttcacacccttacacactatgattgagtaccacttgatgtgtgtgggcacttactctaatcaatccagggttcggatttgaagagagaaagagagagaggtggtttcgaaataggtatagagaagatggctcaaatttgactaaacgaaagtgtttgcatcatcttttcctttgaggccatcactacctatttatagaaatccacctaaggttaggttagaattatctggcattaaaataataaaaaaataaatggtaaatttcccattaagtggttggccatggatatgggtcccactttgcaattttaccatttttttcaactacttatcttgttttctcaaaaaatgtcaattttttaaattcaaccacttaaatatcaaaactaattattttataattaaaattaattattattaaataaaattatcatttaatatatttattaattagacttaataaaatctcttaattaacaaataaaccctaaaatctcttttctccacaattaagccatagctaagtcaaaattcataaactagagatagtctaattttagaattataattgattaattaaaatcaattaacggagtcttacaagcagtattgtctcaactagtat

SEQ ID NO: 319868 - DNA, 2548 bp, Cannabis indica
tatactccatacatctagaaactagcatactttggtaatgctctagaaagaacatgacactcatcccaggtgtaagtatgctttatcgctgattatcacatcagtgtaaatccagtgcactgatgaatcaagggacattatctttcgaagcatataatcacaattacattccactgtgttgacattactgtaattgtgaataattatatgttctggacttaacaggttttgtacatattaaacaataacatatgaaaactacatgtaaacataaatgacttctaatcttctattgataacaaatcagattacattaaaatgagttttatttagggcataaaatcccaataggccagctaggcctcaacatgcagacattgtatggtaggccatcctgcatcctgcaggcacatggctggaaaacttttgcttgccaggctatgatgcatagccctcattcatagacagcaagacaagttgtgagttgggccttgacagccacgaagatgctacaaaaatatccacgaaaatgcatagccctcattcatattttaagtagttgttaatatttttactcaataagtgaaataatattataactcatgatcatttagtattttctaattatatttttaaataaaaaagaaagaatcttttaattcctattccatcatctttttttcttatcgcttgatttaattattagtgattactgtaattagttagaataaaaaaattgattacctattattaatttaaatatattaagattttactctgttaatatatcaatatgtatactttattgttgtatatattttttttgggtaaatatatcaaacatcacttaaaagatggaaaaaataaaattaagaaaataaaatcttataataatagaatcctgcctcacattttttgacttataaatatatagatatattagataaatatatagatttgatttgatgactcaaaataattatataaaaattataattaattggacaacatcaagttatcaattacccatatattttgacaaatcaaagtgagtgtaagaatacttaattcatatagttggaagtatactaatcatgtaatttttaatccaagtaggatttttacaaagggaaaaaaaaacttactaagaaatcatatttctcaatatctacaaatctataaaataagctaaatttattaaaattctaataaaatagacaaaatggatgaaaaatatcaaaggatgtcacctcatattctttacttctttattttatattgggcctaaattaaaaataatgtaacctaatgactacatattataataagattgtgtaagaataccttattcatatagttggaagtatactaatcatgtagtttttaatccaggtaagatttttacaaaggaaaaagaaaaaacttactaagaaatcatatttctcaatatctacacatatataaaataaattaaatttattaaaattctaataaaatagacaaaatggatgaaaaatatcaaaagatgtcacctcatattctttatttcttttattttatgtcaactaaaattcatgtgggatatgccacataaatcattttaaatttcatattttgtttttaatttttaatgtaaaacagcaaaaattattttttaggaaaaaacatcaatttttatctctaattataactatttaaataatttaaactaaacttaaaaaaaatatataataagaaaaatgctatactataaaaaaaacaacttgtagaaatagatattttctatattttaaaatttaaataataaaaaaataacaaaaaattaaaaatatatatataatcaagaattctcaaataatcatataagtatggtcaccttttatagataaatttttaacttttgtaaaaattaagagaaaatattttagttgtaaaatatatttttaactcgaacaaatcgcaatataaaaatttagaatagtaaaataaattcgtaaactaaaattaatttcataaatatatataaaattaaaaattattattacaaagttaactattaaaaaataaataactacttatacatatataacaaacttattaggtaagatattaatcaactacccataataaataatatttcttggacaaaagtaagtaaaataatagcacctaaaatttttttaaccaatgtgggacttttagtttgtatatgtagtgtatttttgaaagaaaataagagtgtattagaaaaataaaaaaataggaaaacaaaaaaaataggatgtcgcatagacttttcttgggctttcctttaaatatatactagggaactaagtcacgctttgcggagtgttgcccaaattttataatcttttcatacatatatatattgtacttattaagtgatataatctaaaaatataatattttaaaaattagaaacatttatttgttatttttaaaatatagagaaagatagcaattttgtaaaaaaaatatttgaaattgtgcaacaaaaaaattacatgtgtttttataagaaaataaa

SEQ ID NO: 319869 - DNA, 542 bp, Cannabis indica
ttaaaataattaaatattataaatctcaaaatttgatatttaggttcaaatattaaaaattatattttatattgatatgtagggattcgaaattgaaaaattaaaaatttggtgaaaaaatgacctaaaattagaacttttggtgtgaaaatcacccctggccgagaaataggttgcatgcagcctgttccgctcacggatggaggagtctgcagcctccttgaccgagaatcctctatcatgtgcaacatctaggtgcgcaggaagtttttgaaacttggagctgactgagattcaaaccaaacatgtatgaaggtggcacgcacagaaggcttcttgttcgagggtctggtgcgaagagcaccatgcttgacatccacatggatcaaaatttttaaatcctcatatctcgcttaattttaatcagaatcaagttccgtaataaccaaacttgcttaataatttttactaggaatccaaataaattatttctaaaaccgaaataaaattatttttccaaaaaaaattcgtaattcatattt

SEQ ID NO: 319870 - DNA, 433 bp, Cannabis indica
ttttttttttaattaatttattaatttttgaaaagccatattaattagattaaaggtagctagccaagtgtggatccctaacattaattatatattttcaactaaaaataatatataagtaataaccaatttgtttatttttaatttattccaatggataattaaaagcattactaactgcatgcatgtcaagttctcattagcaaggtttttatttatttataatatagttaccaactaatttaataggatatatattattaattaaattctcactcctatataacaataataattgattgacttttttgcaaatttttttattcatgaattgttttcttcttacgtaattttctatatgaccctctagatatttatatatatactagtatattgttacgtgcgatgcacgtatgctatgttttatattaag

SEQ ID NO: 319871 - DNA, 968 bp, Cannabis indica
tatatatatatactcattgcagtcacaactataaaatttaaatattgtgaagaatataaaaatactccatttgctgaccacccaatcattaaacaacataaataaatagatgaatattattattaaacaaatattaaatagatcatgaatattaattaataattacagctcatcttaatgcatatccattgtgtttaaattttaattacggcaaggcccatggccatgtaagattctaataaaagaattttattacggccaaagccaggccatgtagttttgattcctataaatatataaatatttatatatgtataaatatatttatatatacacctatatattctcaattatatagctttattaattaataaaaaaaaatgggaattttagagagagaagagaaataatcacatggcaccatgagaactttatttgaaattatattattattaattacaaatagctagctagaacatttaaaaacaaaaaaatatatattaaaaataaataatattttttgtcaatctattaataggaacacaagaaccttagaaagattttagaagatcttcgtttcaaaaacttgttcttaattttatttcatgtggagaactatgaatctttcactaatatcaacaatggtatacattaatatatttttgtggatggaatatttttttaacaatatataataattttgtatctttatatgtttggatatgtaatgatatataagaacccaaaaatcttatgaagtatatatgattgttaaaatgctcacatttatttgtgtatatatacatatataattatattaatgattacttgggattttagtgggcatttaatttataatttataatttatttatttatataaatatttattatggtcaagatcttaagagtaagatcatgaattgtcgtatttgataaaagggtttcatggagtgtcgtatacagctt

SEQ ID NO: 319872 - DNA, 790 bp, Cannabis indica
tgggagtgtagcaatttttataaggggaattcaaaatttatcgggactggtttcaacttgtgctttcctgtcatgagttactttagtttattatttagagagtagagtactaaagggtgagttttgagcagagtgatatgttgtgtctgtgatttttggctagatagatctgattttcaagtagttatgaataggaagagctgggttttttactgaatcgattttctcttcagtgtcttcctttttgaaaaaagaggagagatcattgtcttagactgatcaccctcagctatagattaatgccctcacttaaggcggaggaaagccgctaaaacaagagatagaggaagtataaaaagcagaaaaaaataaaacaaacagaacaaaatcaaaacgaaatacagaaagatacaaggaaatacaatgcagaagcagggttacaacaaggctctccattctctgctcagatctaaaaaggacagatcttcgaaatgctttgctctaaaaacccatgttgctgtccaaaacttaattttgtcccacactgcttctgctgagttctctctatcttcaaaaattctggtatttctctccatccaaatagcccatagtgttgctaggacagccgtcttccaaaggacatccttacgtttgctcccttgtagcttactcactatcatttgtgaaacatttctaggtaaagcccaaaacagtccaaactccttcagtaagtttgcccataagctggaagaaaaattacaatgtagaaataggtgatcgacttcttctc

SEQ ID NO: 319873 - DNA, 449 bp, Cannabis indica
aaacaaaaaaaaaaaaaaaaaaaaaagcatagtacaacaaaatgcaatttaagatccaaaacaaataaattagccatatatgagaactcatatgttgttgggttgtgaaaaaggtttgatctttaattacctcagtggaagaaccaagcttctcaaccgatttcctcatctgggtcagtgtgatttcttgggtttctcccattacagctcacaaaattgtaagacagacacagagtggaagctaagaagtcaagagagagagagagagttgaaaaaggtgaagtagagttttgtactttattttggagaaaaatattagtaaatttggtactttggttaaggtgtcatttttagttagttttttgtatagtggtttacttatagaaaatattttgtaaaatttgaagagatttgaaaatatttaatacgtttaaaataagatttaaata

SEQ ID NO: 319874 - DNA, 1164 bp, Cannabis indica
ttttcacatactcggaccctagacccagacctagacctggaccctgacccgactcagacttagaccctaacccgtaccaggacccaaacctggacccgaaaccaaataccgaaccctgacccagactcggacctagaccccggacctagatccggactaggaccaagacccgaaccccatacccagactcggacctggccccggacccgaaccccgaacctgaacctcggaccttgcctcagacccaaaccctagaccccgaccccgaccttgaaacccaacctgaacctgaacccgaaccctggacctagaccccagaccctggacccaaacccttaactcgaaccctggacccgaatcccagaccccgacccagaccacagaccttgacctcgacccgaacctcgaccccaaactcaaactcgaacttggggctaggtcagaggtcttaagctggatctgggtcctggttcgagttcaagtctggggtctaggtcgacgtccagggtttgggtccgggtcggtgtttggggtcggggtcggggttcgggtctgagtagagtcgggggtttgggtctgcgtctggatcggggttagatccgggtcagggtccaagtttgggtcaaggtttgggtccgagtttgagtctagtgtatggatttgaatcagggtttagtgtccaggtcagggtcgaggtctgggtttatgttcgggtcggggttcgagtccagctttaggttcagggtcagggtacgagtcggggttcaggttaggatctgaggttcttgtcggggttcgggttcgggttcgggtcaagatttggggtccagttttgagtataggtttggggtccgagtttaggtctgggctgggtctgggtttgcgctgagttcgaggtccgggtctggtgtttgggtacgggtttgagtctagttctaggtcttagttcgggttcgggctaaggtctgggtccgggtcaagggttcgggttcaggtgcaggtttgggttcgggccaaggttcggggtcgagggtctagggtctggggttcgggtctggattcagctggggtctggggtctaaggtctgggtccgggtctagtccagggtaggatggtttcatgtcatggtatggtgtagaatattgatgttttctttttttttt

SEQ ID NO: 319875 - DNA, 2928 bp, Cannabis indica
gatataactcataagctacatgcaaagctgaatactaacggctcacattatataggagagtattaaacgggacaccaaaatgccttgaaaaaaaatacttaaacctagtatatgaataaatgacttaactattcatataagcaatcaaaaatatacaaagtcataaataagtatattcaagtttgcttaaaatagattataactgtttatgcgaggcagaattgataactgctcgcgcacatagcagataataattgcttgcgcacatagtagatcattaactactcatgtaatgtcaaaggaaaatatgagcaatggaaatccttaacataatttaaatttgatcaaaatataatttttaagttgtgaattgaaacacaaacaaacagatatattaagttcagataaaaatatacgaagcattcaagaatgatgaaataaaagcaaagttggccatccaaccttgcaaatttgtctttacaaaaaagttccacaaggggcaaaccattgtctcggtcttaagaccgtttgcctaaataaaataaaaacaaataaaaaccaagcctacatagtaggagacttgaacagttcttcttctgctgctcttcgacatcttcttcctctttcttagtcttctcgcagaaaggaagaatttcttcctcagactctcccaagaaactcgtatccatcttcggattttccatacaagcttggtaaatggtacgaaggccaacaatgttgcatcgttcaatggtttcggtctctttcccatcaagtgttaccttggctgcatcaagtcccccttggagtttcacacatggatcagtcttgtccttcgcctccttcttggcatcttcaagcttggcatcaaggtcattcttcaccttctcggcatctttagtaaggcaagtaatctccagtttagcatcattccattgcttagtcatagcctcgcgctggcctatcatgttctggacctcgccctctagatactttatcttttccaagcctcgctgctaggcaacaaagcataggaaagaagtctggaaaccaacaaacaaagatacatgagtattttgaaagtgataaaaaaaaagaagtgagcaaataaggataaggaaaacctatcgagaggctgtgagacaaactccttgtgagcatcgcccctagatccccatgattgattaaatcccattcatgggggaggaaagccttgaaatgacgccagcatactgcaccaaactctacagtatactctgggccagtttttccagcctcgacatgcaatgtgttcgagggcttggctcgaggaggaagaagcttgagtcgctttgagaagaggcttgtcggtacttgcggggatccaaggagaaatcggatcctaagtttcagttttagggacctcgagattaacgacctgggaggctcacttcttgttagtagtagacttcttatgccttttagggagttccacgtcaatgtttgatggagcctccgggatggtcgtcctcttctttcccttgctgtgtacgagaccctcgaaattcatttctgcgagataagataaagtgttaaatatgtattgaaagagaaataaaaggggagattggggcataatttcatgcctaaggaatttaccataatcactagaagacgaggaagaaggactttaatatccactaaaatccctacaacccgtgatcctgaatatatcatagggatcaattggttctaaatcccagcttgcgtctaagtgactttccctatccatattggttccgtactgtttggctatctcgaagtatgactcagtagagttaatttggacgtggaaactgggataccatctatcaaacctatgcgtaatgcgatctacgaggaggggatgccaagtataaaagttatagtgactatctcaaaatgacactagagtgttacgctcggccctaagcactgtgggtgaccaaccacattgattacctcgggatgctctttcatcggcttcccgagtggaagtgttctggaggtattgtgcccgagcgacacgatcctgagcttcttcctcggctgggatacgaagttgctatcaagaagaatacttcggatatttataatcgcaagtaaactccttgtcagtaaggagacccacggacctcgagttgacctcgttcaaaagaaagtcacatgaccgaaggccgtatgggagacccatcaggagcttgtgtcgctcggccattttaggagtaggggcaagtctttcgagacaactgccaaaaataaagcaaaaattgtagtcagataaaccagaataaaagtcatggattaatttaaccaagtcttatgcaaatagtcacttacgaattatacaaaaagtggttgggccaatcggggggagactggtcgtctaaaagaactcatctttaaaaggagttttattgggaaaatccacaatgatcttatgatcacttgtgtgagtccgaagatagtaaaaatgccctgctgtattcttcctcgccggaactaccttgacagagtagagatactctatttctaaggaagtggggcactcccatcttaaaattttgtacagaaccttcaagcttgcgaggattctattttaaatgggattcagttgaaacggggcaagccagagatggtttaggaagaccttgaaatagtcttgcagggggattattgctccagccctgatgtgtttgagactccaaccaccaatcccgatcgagccacttgtactagtcttgccactgaccccctcagatgtttcgcgagtaagccgcacttgtggataacaactaaactcgccaacaaccaccgatcttacctgacagtctcgtttatattaaataccacaagacctcagtgtatcacctacataacctccgatggctcgcaccttcgactctatta

SEQ ID NO: 319876 - DNA, 1416 bp, Cannabis indica
acttctgtttctttattgatgttgaataaaaaggattacattgaaatggagttttatttagggcataaaacccaacaatacaaaataaagagagagaagataaaataaacaaatttaaaaatgggttggctggaggttcacagttggacgctgcctgatggagaggatggacctccactggacatccactccacgatctccatataaaggtcgtgaacggccttcgtattctggatgaagcgatccagcgtggaaggcattttcctcctccaactgcttattgtcctacagtaggccctcaatttgaaacatggcgtcagtaagttcatcctagagggtctcgttagcaatgcccaggtcacggtttgtcaccctgacccgatccaattctttcactggtctgcaaacttcaacagtggccctttctaccagcaaggtcgcttgtcaagaaataatgccaaggcagactttaagagccaaacatcttagagtcctaccccaatggagtgccgctttgtggagtgggccaacgccaaggcatccgcgctgctgcaggatgcccaagtctccgtgggcaattctgaagtgctcccggccacttggtctaagagctatgaagtaatggcaatctacagaagcttttcgacttctagacctagattttatttatctaaagaaaagtttcaactattccagaaaagataaaagccaaagaaagaattccataggatcaacagtgagaggtctcagatatgctttgctatgcattagacaagacacctactattgagtgggagtaatgagtaggtatcaaattaatccaagaaaaggaacattggaagacaatcaagtaaagcttataattataagaagaggaactatatgttagtcgataaggttggtgttttaatactcatagactacaccaaatcagatttctagacctgcattaccgctaaaaagtctactgatgagatggtgattactctgggagtggagcagtgattttggagaagtgtaaaaactgatccggagtctaactctaccagtgagactgaatgttaaagttgcaggaatgatacttattcagcctatggaaagttctatacaaattttggcattgtaccaataatttattaactactagtgttacctcctgactaacatagaagtagttgccaaaaagtaaagaatccagtacccttagaggagtagacatatagagagggatttcacaatataaaggttcttgtgcttaaggatatgtaatggtggagaaagtttgtattgaatacaacctgtcagatcctattacaaagagaatactacgtactacacttgatctggatatcaaggtactgaaattatttgaaatacactttttgttttatattagtgtaagtgggagtttgttgg

SEQ ID NO: 319877 - DNA, 587 bp, Cannabis indica
ttcatctgcaggccacaatctgactatgagagttttctaaacattggagtttggttcaagaagtactgcaaataagcttgctccttgattagctttgcagttgaatgactacttgaaggaaatctaggacttggaatcgttttaagcttataaccaaatttaacactttctttattaaggtggtggtgatacctggcctgttccattttgtaaaacattttatctgaacaatacagtttctttttattttctactttatttctttttttccgaaagttattaagaaaagatggtggtgaacctaagaggaatacacaatcggttgtttgttcccacaaggtttgagcgaggttcgcatcatatggacaacttatcgttgtatagtgctatattttagtactttttaaacatttaggtggcgtatggttgagaggaataaaaatataggaataagaatgagaataggaaatggatgaaatgggacaaaatttaaaatgtataaaaaaaattgataaaaaaatcattaaattttttttcttgttacattgaaatggtctttccttcctttttaaaatggaatagtcatt

SEQ ID NO: 319878 - DNA, 1640 bp, Cannabis indica
tctatagatgatcttttgatttattttgggtttataacaattgataattaataccgtatctatatcttggaacatatagagcgttctgtacgtataattaagaatgcaattttgaatctatagtggagtcaggagaaattaataagttagagaatttacttggtaaattctataactacttattgaaagcttaattatataggctcatggtccccacactagttgagataatatttcttgtagactcagttaattagttttaattattcaattataattctaaattaaactatgtcttatgaattttcacaaaggaagggcttaattgtgaagaaaagaatttttagagtttatttgttaattaagagactttgtaaggtctaattaataaataagttaaattgaaatttttttttaataattaattataattattaaataaatagttttgacatttatcagattaaaattaaaaaaatatggcattagtgaaagaaaagataaattgttgaataaaatggcaaaattgtaacaagtgaggcccactatgtatggccagccactaaagctattttttggccattgttttatcttttcattccatataatttaaatccaaaaccctagttcaaatactataaaaggaataagatggctcttattcttatctaactcaaataacctagttttcattttttgtcaaacaattagaaattgagagcctctttctttgtattttgaattcccctcttcctcttgttcatcaaatttgagccattagcgatagagtacgtgcctactgatatcaagtcaaatattcaattatagtatggaagattgtaagtaaaccagccaaactgaagtagagaagatctaggttcaaatctttataatgctctgctacagacacgaatcaagggctagagatctgaatggaaggagtcattattattctgttgccatcaatgtaaggattttttaatctcttgtgtgtttattttatcgtattaggaaattcatatttagggttttagattatagttaataatcaaacatacatattagtaaatctagatcctggtaaaataacttccaacagaaagacccaatggtctccctgcaccctatcatcaagaacttgaggctcgccagcctatattaggacatggtctacaccgatcacccaaggctgaccaagcctattcaagggctgcctatcattgtcttacgagcccagagggctgttggagaaaacagtacatgtcctgtacttcctcttcttggaaggtacaacctcctccacctcgaacttattatctgggctctcagcaccatggttggccacatgtacctctgcatgaccaacctctggatctctaccgttaagaggttgtgtggcctcatccatagtaccgaccctgcccattgttggcagcctgggaatgtgagggtcaaaaggtggtgctccacggtaagactgcttagttctggccataatgtattaacatcagcccagagatcactcagaaagtggctagagaatggagtagatgctaggcaagactgaatgaatctatgacaacacaattctcacctccccagaccaatgctcaaaatcacctgcatagaagagataaggg

SEQ ID NO: 319879 - DNA, 1650 bp, Cannabis indica
gtaaaaagttatgacaaaaatacgattctccgatttcccgagacagcccagaaacggtaaaccagttggaaacggttaaccacttccactagaaccggttaaccagttcacaactggtggatcggttggacatgtggcaaaaagttacgattttcaaattttgcacttaccgaaatattactgaaacctatccaaatcactccaaacttcatagggcacatatataccataagtacaacaactctaatcatattatagcataagatattatcatactaatattatactttaatatagttagtataatagtattgttaagattttttttttgaattaaagcatacttatcataaatgacaagtatggttagacctcatggtcattacaaaataagttttctggtatgggatccatcaggataagaccaaacaactggtgagcaaaagcccatttagtcacattataagcggcaaaattacaagttctattaacattagaaaaattacaactaatacgaaagagaggacttaatacaaaatgagacatagttctctagagcccaatgagactccttaccattgagagcaatgataactaccctcaagtcattctccacaataacaaacttggacccaatatccaaagccaccgccacagccaaacagtaggtcgcagcttctccacataaagcatcagaaaaatccaactgggacgtgtgaacccgaatcatcctgccaagatgattcctagcaacaactgcagtacacatgctttctaaacccacagaaacatcacgattcagttttatccagtctggtggagggggagcccaagtctcccgtaaggccggagtagtgcaagggaaaaatgaagcatgcatatctgcaaaagaagtacaaacaaagtcaatacacttcttcacatcagtaggacacttattgtgtacatttttattgcggatccgccaaatggtgtcaacaacaatagatgcataaaggaaaacatcctcagcacggatacccttgtgattaagaccccagatgaacttaacctagtctcagacacgaatgtctgtatcacagacatgataaatacccaagtcccaaatatataaaaaaaattattttctatgttttcatttattattatattttctcaaagtttagattaatatgcatataataaagtataatttaagaatattataacatgcaaaaaaaaaattattatagtacatatataactctaattaacctaatgtagttttgattaaaaaatatatataaatttaaaatatttttttgaacaaaataagaaataaatatttaaatattatttatgtagatacacacaaactccaacctcaaccaaagatttgaaggagcctcaacactagtcaaaagaagtcgaacttagactaagaaacccaattactaaattctgacgataacagtccatacaggcacccatatgggttcaaaatggtgaaggggtcaagacaagagttgcacatccctttagataaatccacgtttcctccctcaacatcaactaaactctgcaaagctcaagagatcctcggcaccgaagccagggccggccctgaaacaaagtgggccataggaatttttttttaggcccttatgttag

SEQ ID NO: 319880 - DNA, 908 bp, Cannabis indica
ctgttattgtcttaaacagaacacatataagacccaaattctagattatttagtttggacgaaaatatgtagtatcagtcacttccaaatcttttaataaatttaaaacggagtttgtactgataaaaatagagaaaaattacagttttacaaacattggatgcttatgccattaataaaaatcattgaatttatgccgcttaaaaactcaaaactttgggtacttatgctgctatttaccctaataataatatactattacaatctatattaaattaattgaattaacaaaatcttaatttgaatcgatttaatttaattaatttctcatatatatatatgagcattgttattaagcatcagtggtgcctagcaccttctcgacatgttgcgttgtgattgggtagcgatactctctaaaagctattatattaaactatatggtacctgatacttagttggaccaataacgatattgacacataagatagtgctaggtaccactgatgcctttagcatttctatatatatatgtatataatggtttggtcaaaagaagaatgaaattggtgattgaacacaacaaacctttgcaacttggacatttgaatgatcatatcgactaattacttagcaattaattacattaaattctgccttccaataatgtaacccaaatggccactaaattaataaaatctaatccaaacatttgttgtgattttacttgcatgagatatcatgagtgggaatcaatattattaagatataatatttagaccattccactataatatgttgttatatattaatctttattaactttattttttccacatataatttctacttaccatattgttatattttgatataatattttgattgattaaataaatgttacaagt

SEQ ID NO: 319881 - DNA, 1461 bp, Cannabis indica
gtgtgttttcagattatttttttgtccccctcagtagtgagattatgccactatttataggagcttaatacatgaagaatagtttcccttaacctataatgaataaaataagaaactatatttattctataattacaatgtaaagaataggaaactaaggcatattgcctttattctcggactaaatcccacgaatatagtgattatcttcgtgtcctggaagcgataaggattgtctttaaaatcgccaactcatacatccttctcggtgcatatgagtgtgtactcaggtcagatatcccttaattaccctattcgaacatcctgtcgcaacagacattaagattatttattagtgggctggtaggaatacttttctttgcccaggtagcaaaaatgtaggacacatgtcatccagtcttattgccacgtcacgtttcaagaaataagataacaaaaggcttggaaacattcaaaattctacggttactatagtatgcacaagcattatgatatcatggattttctttatagtgcttttggtttttttgctaaggaaactctgtctttgtttttctgttttctgtggtcactatgaaatcaaaggaataatattttcttcaaaaataatgttatctcaccttatagtttgtatgattggactgttttgcatagttatatgaatgctcagcaggtttgtatgcatcaaatgatggaggttgctaccattcagctttgtagtgcatcacttccaagtgggtgcatgaaaatcaatacggatgttgctttggactgcaagagaaaaaagtacagtttgggtatagcagttcaggatgacttaaatgcagttaaagttggtatatcatcaagcccatgctaggtgctatatctccagagatttctaaagccaaagccattctccttgctgtgcagtgggctcaaatgattaactttcctattgtagtaattgaaattaattgtaagtcttttgtaaataaattttctaataactgctggaacaataatgtcttgggtgatattctgagatgtattaaaaattcattgtccttcaatattgggctttgtgtttcttatgttactagggagcttaataagattgctcatgggttatgccaaactaagcctaagattaaatgatgagttagtatgaaatacttctttaccttatttgtaattcttgtttgctatgtacttatttatttatcacatgaaaagtgaacatgattataaaaaaaagttcttacactttatggtgttaagtatatgtgtggtatatatttgacagatatggggtatatgtgaggaataatttcagaaagttgtattctctgtaatgaaaaaatagatgtttacaccatatattaattttttttcttcaaaagtttacatgctttgacaagagaattttcatatttatatttttcctacatattttttttt

SEQ ID NO: 319882 - DNA, 590 bp, Cannabis indica
ataaaataaaaagtcacccataaatttctcataaatcaagaattttagttatataggcacactttatatagaatagatatataattgtaatattgtacattgttatataaaaagaattaaataaattgaaaaaaaattgtccttacaataataataaaagtgacacttcttctgcctaaacattttcatatgtattgctatcaatgaattgacgataatgattaaacatcattacaaaaatcattgatttgaaatatatcaatttaagtgtgaaaaggttggtccaacctctttaatccaaggccactagttttagtataattttatcagtagctaggttaaaatgcaagaaaaaggaagggaaatataacaacttttgttttgatgaagtgatagctaatataaaatcttggaggtgggatcctctatcaaaaatgatgacaaaggcttatctttattaagtcatgacattagaaaagtacccagttaatatcttagagctaataaaatggggacctttatatcatattatttaaatatataatacatacataaaagctatagcaaacttattcttttttttttttttt

SEQ ID NO: 319883 - DNA, 858 bp, Cannabis indica
tattagtttagggaaaaaaatattaagtatatgtaagtatagaatttcaaatttccctaacataaaggcatgtggcgagtcgaggttaagggcctctattaagtgagagagaaggagtgggttctaaggagaaatcgagaggaaaagcaactgagaggagagaacaagaggagaaatcgagggagactgagagagaatttatgagatcaagagacaagaggtgagctatttaaggggcatttggtatgaggtttagacttgatgagaataagaaggttaaatttaaattaaatttgaataacaaagagtttatgtttccaggcaaattttactttttaaattgaaatgtcagtaatgttaatcccctcaaacgcatgaataaatctattccctctaactctactctctttaactcaaactcgcataacaaacaccccattaagtggtatttggttgaaagaaataaaaacataactaaataaaaatgacatttcaaatattttaaaataaaactaaacaaaagaatagaataaaaaatatttactttccgttccatttcattctctctaagctactttagggtttttcgtttttaggcatgggacatttatatttaactatgtttcaagctagacatttgtcaaatacaacacctacacccgaacccgaaaactatcgagtgatacccaaacccatcatttttacactatgaacttttggatttttaagttcgggctatgcagattaattaagtggttcgggtttcaggcccaaatgtgcattcctaagcccaagtaccatatttcggtgatgataaattaaagaatacctcttttttgtatccattaataaaaaata

SEQ ID NO: 319884 - DNA, 2120 bp, Cannabis indica
aaataaaatattaaaaatgaaagaattaagaaaaaaaataaatagatatatatgtattgggatacgattttttcccatgatgtactttcacggaatgtattccgtggtattagatgggtctcaggatacattagatgagtgtcagggtacgttactatttttttaaccctaattacccctaaatcaatctcagccccagatcaaataactacctcatctaacggctgtcgtacatcacggaatacattccatgaaagtacaatcacgagacaaaatcatcttcctatatatattatgtcaattaacatttatgaaactaataaaagtttttaaaaaaaataagagaattaagaacaactaactataattaaagatattttaaagtgtcatgtcactgtttctttgttttcttttatatatatatagatatataaattattaactaatatatataaataatttaatttttattttttcacggcctcaatagagttgggtgctaggcgtgggcctactttgtttatctttaaaatcgaccctagattcaatgagtcattagtgaataaaaaatagctaccatattatgagaattctaaaaaggatgttgaatatgaaataattagataaaaatattgagtaatggtgagataaatccacataattaatttaatagtatcatatatttcaaataatacaatgtaagtggtgtaattattattgtgtcttgtattaaaaataaataatacattacagagatttaaaaaaaaaaaaagtaataaaatacaaattaactttgatcaaaccgggataaccattacgaattggacgaattaataagaatcacgctaccagaaaaagaaaaaaagaaaaaaagtcagaatttcgtttttagagttcaactagaataggaaaaacagtaacctctgtgccctgttttgggtctgtttctgttttttcttcttaacggtcttcttttgaattttaactgtttctcctacctatcttcttctttgttttgaatttctttgccttcaactgctcccgcctcttctctcctcccctctccgccttattcctcctcagtctcctccgtcgtttgctcctctggtgtatcccacttccccttccctggccagatatggatccattctcggattccctacgcactaccctctcccttacagatgaagaaagaaatattgtatctctacccactgctacaacaacaaacacactcaatacatcctccttttccctgattgcccgagttctaacttccagaccagtttacaaacccggtttctttgagcaaatgcctggtcattgggcaggtcgctaccctgtggtaatcactgattttcactctgatatgttccatgtctcctttggttgtgaaggtgatagaagaagagttctgaataaggagccttggcattttcaaaatcacttaattgttttactcacgccagatgctcgattaaatgtctcaaaggaagatttgatcttcacgccattttggatccagatataccgcctgcccttcctcagtaagaccactgcccttgctgaagcccttggtaatacaattggtcacttcattgaagtctttgaggattccactaatgaaggttggggtccttttctccgtgttcgggttaaactttgtgttacaaaaccacttctacgtggccaaatgatacgattgccgtcataaagatgaattttggattgactaccggtatgaacgtttgcctgaattttgttttgaatgtggcattcttggccacccctatgagcagtgtgtgttgtttatggaacgaatggataatgggaacgatgatgatctaccatatggaccatggcttaagggtgctagacttccgactaatagctatgatcgataccgcaccgatttctctaaggcgaatgcatggccactcttaacacgtttggctcgaaaatccttggtctctgctgtcccacggttagccacaccaagttcccctcacccaaatccaattcatgaccgtgagaaggactcttcaatttcccttccccggcctcaaatggtctccactacaacaccaatttccatttctcaacagcctcaaacaccacat

SEQ ID NO: 319885 - DNA, 700 bp, Cannabis indica
tcggtttgggcgggttcattgggcggtttgggtcaaaattcaacccgcccaatttacagattgggcggtttagaattttgtcaagttatgtcggtttgtattttttttcggttttgtgggtttggtttagtcgggttattcgggttgggcggtttacgaaaatttctgtacagccctactaataagcatagcaataagatgtgttgtgtgtgaatgtggggaccatcaatgttattaccatttaagcagacgggcccactagtcactaaagccaacccagtaacaccctttacataatttatccatgataatgatattaaccccacccaccaaccattgcacgtggtgaataattgagtttggcacatgagtttttaaacccaccaaccaaacaccacacgacagaaagaagacaaaataaaggatttgagaaacagacagtaatgcaaggaagaagaataatggagaggggtcacacaaaacaacagggacaaacatcataggaaggaagtaaaggaaagaaaggacacggggaagtaggagtaaccaaggaaaagtagaagaccatcctccacaactagtcatttttcataagtaattaagaaacagtagtatatagtaatatatatagtaggaatggagtggattaggttttgctttatgtatatatatatagtcagtgactactgagtctatctaa

SEQ ID NO: 319886 - DNA, 1262 bp, Cannabis indica
ttgaggaatcaaaagtagaaatttcactcagaaatagaattttcacccagaagttcaaaacttcgaattttagtttgattttcactaaacccctaatggatgagtgaaaatggatattgtaatgttaaaatgaaagtgcaagattccattgttaagcaaaatcaagattcctaaactttgaacctaggatttttagggttaccttagaatagttcaagaacaggcaaaattcatggcctaacatctagaaaattaagcatgcatttcattgcaactatgtaaaaggaagaaataaagaacttgaggcttcttgttctgctcggatgatgttgtcgagagttttcttgggaatcctttgaagaatttgagagaaaaaatttcttgaaaacttttacgctctggtttatcaagaatgagaatggataaaaggatccttgaaggttctcgatcctatttaaaattagttaaaaaagggtaagtagtcatttcaaaaatttaaacacctcgaattcccccctaaaaatatgttatgtactttttataggcagaataaccgttagcacgcgcagacatcgagtcatgatttgaggcaggactgtcaatcaacattaaatgagttacaattgatgagagccctagtcaaggtcacgtcggttcgtcattcgacgcctaggacacacgtcacccatcaagacaagactcttggttgagttaagtccacgtgcgattaggaggatcccgtccagacatgcaagggaaatgttatccagatttttgcaccttgatgtggtaatatgatcacatgacacgtgtctcatatgtctgatgctttggcagaggaaaatgtccctagcagcccgcacatgactagtcagcatctataacagtcggttatctgagcagggctgtggagaagacatccgaccaggtagaagcatttttccactgagcgacttacaagagatagcaatttcagagaataatctcgttgtgtctagacacaaagaagatcccaatattcatgggattgagtcaaagcaaaatggcaacttgttttagttttctatttcatatattgtaattatagaatcattgtaatttcttattttgtcattgtaagcaaaagggaaaccatccctcatgcttaggttcctatattagtaacctagcctcactatgaaagcgatcgaaagaattgcctcagacagatattctagagagaaaagagtgatctaagagagaaacacactcagagatcagtt

SEQ ID NO: 319887 - DNA, 755 bp, Cannabis indica
tgaattcattcagcaaattccatctaaagagagttgagagagcgaggaagcccgaactccaataccgaagctatcgcagggattgaagctcaaagatcaatggctggaggtatattgatcctttcattgcatatattattgatatgattacagtttgttttccgcatttcatatcatttgtatatgctatattacatacactatattatagtctaacacttaggcctttctctgctttggaagaattggttaaagagagcttagttagctttgtttttctgttataacaaactcttctctaccactatgtattttgattttatatacataaagagtcttaatctcatattgagattaatttttcattgtattcattgttgtctttttaagattctttgactgtaagcttgaaattcgtcatggtatcagagcctttgattcacctccataaatttctaaggctgatcctaaaaaaatgagcgtaagatgtttttaataaaatgattattttagaaatactctaaaacaattaaaaatttctatttttacaaaattttgagttttttttttgtatatattttaacaatttttttaatagatcgttgtttagacgttgttctaaaaaacttgttatttacacattgttttcatgttgtaaaaatatagtataacgttgtaacaacatgaaaataatattgaaataacatgaaaacgtaaaaatatacaaaaaaaatcataaaaatgttaaaaaaaaa

SEQ ID NO: 319888 - DNA, 726 bp, Cannabis indica
tcataaactaagaaattcagttatataggcacactttatatagaatagacatatatgtttagtaaaaacacaacacacactggtgtgtatatatatatatacataaaactcagaagaaaaaatacaaaaaagctatgatgaaagagagtagtattgggaacatgagagttgtccatgcacaaaactttgatcatcacgatcatcataataatgtatgtattataaatatatatatatttctatatatgcatgaaatattaatatataaatatatgttattaatttgttaatatgcagaagaagaataataataagatgatggtaccaagatggttaattgtaatgtacaagacaatatatttcagtagatgcatagttcatccaaattcaaagaagaatgattctgatcatttctgtatcgattgtcttcgccctctttgcttcaattgtcttccttctcatttctctcacaaacatgttaaggtataattattttctgtgtgatataataatttcaatttatttatttaatgataatgtttatatatattatatatggttaattatatatagattcgaaggtacatttaaagtgatgtgattaatcgccaagacttgtccaaactcttcaactgttcaggcatacaggcaagtaattaattataattatattaatttcagaaaaactatatctgatctgaatgtgtatttatatatatatatata

SEQ ID NO: 319889 - DNA, 957 bp, Cannabis indica
attgctattgggcactagtggtgcctagcactttctaaatgtgtcgacttgcaattggctagcgatactctataaaaattattatattaaactatatgggacccgatacttaattgcaccaatagtgatattgacacgtaggagggtgctagataccagtggtgccctttagcatttctctaattttttagggtgcctttcaaagcccaatattttagggtgcctttaaaaagtttatataacttttaatctatacataaattttataaatctaaacactattatgcaaattagaaaggctaaaagtagttatgcatagtatcatctaataatattgttattgatttaattaagtataaaattccacataatttaatgtaataaatttttaaagattatcactagtaaatcacaggataatatatctagtggtactagacaccattagtacccaataacaatattatataactttttttgtttttctcattttctaaattttaggtgggacaaataccttctttagttgctagggggtacataaatataaataaaatatttttttaaaaataaaaaataactttaaaaattaataggaggtgtttaactaaattttttaaaagcaaatttctaaaaattgagttacaaaaaactaaaagacaaaaaacatcaaaatattattttttattttcaaaaacaacttttatttttgtctaatatattcatttttacattttctctcacatactcgggtttgggtccagggtttggaactcgagacatagatcaagacttggatccggacccatacctaagaatcagactcaattcgaccccagccctgaatgcgaactaggaccccaagcttgaactcagacccagaccccggtctcgaactagattaggacccaaactcggccccgaacccagcacctacgggccggacgtccaggtctg

SEQ ID NO: 319890 - DNA, 1047 bp, Cannabis indica
tttttttcttttgttttgtttgatttgttttagtgttgtttacagttgttttgccatgattacttatttgacatcgatttcactgtttttcctcaatctcgccggaattaatagttgttttctggttgttctggtattcctgtggtggttctgtccgtgggtgtggacgatggaggtctcggttttttgtttttttttttttttgtgtatttacagtataaaagaaaaaaatggaggagaacaatgtaattaatataatttctaccgtgtgacagtaaaattgaaattttttcctaaaatccagtatttttacaaaaattccaatcttttatgcttttcaattggtattgagctaccagcccaattgtaataatggctcagtgatcttgtttgttttgattttttatttctccttgctgtaattttacttaatgattaatattagttacatataactttgatatttaaatcctatatatatttttaaaatattagatgtggaacgaaatttctagaattttttaaaaagtgagtatatcatttgtatataatttaaaatacaacaataattacataataattaagtatacatacataactaattagcaattatttcaatttgaatagtgcaatactattagggtgtgtttgaaaagccacaatgtaattggatttgtgtgtaattggaggtaattatacaatttgacatgtttgtctgaccatgtaattacactgtaactgtgtaattgaaagtaattgaggggtttctaattacactctccaattctcatgacccccatgagaatgagaattggatgtaattacactgtataattactaaaaactttccatataaaactttagctactaaaaaaatattattttcccatataattactaactattttgccaaacaagatattaggaatttatatgtaattaccaccttatatccaaacacacattgcattttaaaaaatagtgtaattactaaactgtgtaattaccaccctagtaattacagtacagttacttccaaacacaccc

SEQ ID NO: 319891 - DNA, 1482 bp, Cannabis indica
tatttgtgaaattatccctatattaaaacaccatgatttacatttaaacatgttaggccaaatttccttttaaaagtctatataagggtcattaatgcaaagcttttagatgactatctaaataaagaatgacctcaaggcagttcctcttcagagttagatccaagctactatggcttgagattgaacctcgttaattcttgtttattagtttacaatgctacaacattatagcattattgtagttagttgttgaattttaattttaatgttgagacttatagattaacttaacatgttctttgactaaatgatgagttctcttcaaagaagctcctcccccacatgtaattgtgtttaactcgaatgttaattcaatatcgtattccttacaaaagaatatatattaaatattaatttactctagttttaaaaaaatataattgttaattaacattcctatggactagtgctataaatatgagtcagactttttgataggtacgaaattggtactaaattagcacgagcatgattgaacatgaaaaaatacgtgtttaggcacgacaagacattccacaaaaaatatgagcttaaacaagatacgacacgaaaaatatgagttttgacacgacacggcacaacaagcccgaaagcacagtacgcaaacatgaataaattagctcaaaagcatgatacattgagaatctcaataatttgataacaataacagtaataaatatatataaattaaaataatagtagtattaaaattataataattataattatttgttataaaatatacacatatattttagtatttaactcatcaatttacaacacgaatttaagcctgtagaaaacagttgttggtctatataagagaaataagctggtacgaataaaatacgatacgaatttgagcacggtactaaattactagacttgcgggccgtatcgaacttatcctataaaattgttgcacgacacgttatgacctatattcaggactggccagagggtggggcagccggggcatacgccccaggccccataattttcgaggccccgaaaaaatttaaataatatatatacatatataaaaacctataatatataaatactaacatgaatgaaaattttatggtagaactggtaattgaggttatctatgagtggagaggttgtaggttcgatccttgccatcttcattttttatattttaaaaagttatttatgttattctttcatttcaaagtcataacaaagaaaaaagggtaaataccattttggaccttctgttttacaaaagttaccaattggaccctgtgttttgttaaatgacaaaatggacctgtattttaaattagtacaataggataggacctgaattgagttttattcaaataaagttaattataatccgatctaaagtagctatgacaaactagtttactatttttgttatctgttcttatt

SEQ ID NO: 319892 - DNA, 1858 bp, Cannabis indica
gacctcttaatgtactgttgctcttctttttgcattaaattagagaaggcctccgcacaaaaaaagaagagaaaatgagataaagggtcaccttgacgtagttcgcgtgttggcaccactcgtcctcgtacttcgccattaacaaggaatgaaaatgtggtagaagtaacacatcgcataattttttccacctagtccatgtgatatctcaatcgtaacatcattgccttgagaaacttccactccacccgatcatgcccctttgccatattaactttaaagtcatcctccttccattttgaaattaatttttctcatacaatgtaacccttcatacccaattatagcattagcatgtatcaatctccccttgacaaaagcactctgggtgtccgaaataaccatacccaatgttgttcgtaatcgattggcaaaacacttcgagacaatcttatatatgacattacacaagcttatgggcctaaaatcctccacttgcgtgggcttcttaatttttggaatgagcgcgatgaaagtatcgtttaaacaaatgatgtcatccccttcattaagactcctaaggcacacagtcaccacctcctccttcaaattgttccaaagtttttgataaaaaagtaccggaagaccgtcctcaccaggagctttagtaggattcattttgtaacagccttcacaatatcatcttccaacaacatatcattcatttatctagtcacccttggatgtacagcccgtaaaactttctccataatctcatcactgatagtagaagcttggaaaaagttagagaagtacccctcaatcaactttaaaacaattcgattgtcatcttgccatacccccacattatcgaataaccctttaattggattaaacttccgtcttgccgaagccttgtggtgaaaatacttagtattagtatctccccattttaaccataacgcactgcttctttgtcgccaatacatttcatctttttcaagaactctattcaattgtttttctacatttttcatctcaacccatgtaccaagctcatgtctagaggataacccagccaaagattttttcaatgtagcaatctttccactaagtgtctttttttttttttcctattcctgtaacactctactcactttaacagttttcctcctaagccctcttgcagaacgagaaccccgatcttcattctagcaattctccactatgtctttacactcttcatcctcacaccaagcttcctcaaagtgcaattgggttttcttaataacctgttcacaatgttctcgattcgcatccattggcatataaacaagaagagtgttggaattattttaccaagatctagatttactaccatgtatgttatttaacatcctaaatatgaatctctaaaataatttaaataaacacatataaagtttgagaaaccttacagtgggtgcagcggaattaaatgacttattccgctcagatctgtaacccttgtatcctttctgtagcagagtatcaccaagatctgagcccgaaactccatccttgaatttggattcttcacagtcttacatactatgattgaggaccaacttgatgtgtaacaccctaactagcataggcgtgttgacgtgattttaaacgtactgtgcagctcgttgctaatcagcgaggttaatgaaaatcgtgattaattaaaattttacttatttaattaaatacttataacatagcatacaaaatactttgggatcccatttacaaatcattttacaaaagtttactagttctttacaaaatatttgtcgcctagcgactaactacaaaagcactgttgtcccga

SEQ ID NO: 319893 - DNA, 574 bp, Cannabis indica
agatatatatgtgtcatctctctctctctctaattgttaaaaaataaattaaaaatattgttccaaatacatgtctatatattgttgctccaaatgacaggttacttcaaattcaatgagccagcaagtcataaatattacttcaatttctttctttcttttttattcttaaataatttaaaaagattttgtcaaaatttgagtaatatacacttgttcaaatagctcacgtaacatatataatttttaaaatcacacaaatttagcttaacaaacgaataaatataaatagttcatgatataacttagcaaaaattaattaaattaatatttaaacatcaaaatctaatatatttaaaaaaactagtttgttctcctaataaccaacaattcgttaatgtattacattaattataattagtaaaaaataaaaaagaatgatatacatcataggaaaaatcaataatgtggtaaatattattgttgaataatgtatatatatttatagggaaacttacaaaaatattggaatttggggtaaattttacaaaaatactgtcacacggaaaagttt

SEQ ID NO: 319894 - DNA, 732 bp, Cannabis indica
agagtgcttggagataacgtgcgcagagtgcgatgggttatatgtgtagtcacatcaacgtcgcttttgtctaaccacaacagaaaaatgctctattattaattattattattattaaatattattgaattacgtgttatgacattttcctatttctttggctttttctctaacgttttttcttttctgtttttttgactgccacgtgttaattacgtatgtagtcacatgtcatgtgttttagtgtaattaaatattacatctttatactcaattttcaaaaataataaaataactattcttgtacaagatttcacatgttaagaatattttgaaaacactaaaattaaccttgcgactttgatcaaaactcataaatgtcaaataaatcaagacatctttcttgagtgccccatgacacttttagagagcttgaaatgtcaaccaaccatttagtgtcggaactcacacaccaaagtgttcccaaacaagaattcatgggcccgcgcaagcattttcaccttaaaaacctcaatccgctagaccaataaaaacttgacttatttaggcataaaaataacttgggtttatgtataaagtcaaaatagtactaaaatataacgtccccgcttcaagcctccattgggcccttacacccacggactaatgactcttatacacgagtacgccactctggctgcttcctggattgatgactgaccctacagacca

SEQ ID NO: 319895 - DNA, 884 bp, Cannabis indica
atctttgaattaatagaatgacttttatttttttatctaaacacttctacaaatttgatattattttttgaaaagaaaaatataaaaattaaatcaaatagaatcataaaatgtgataaaaacttttcggcacaacacaagcctttagaggcacaaccacaacatagtacaaacaaaattattattcatcttgatgaaagagcttatgtggaatttcaccattaaatggttgaaaaaaactctaaaatatcatttttcttccattctggaactgttagagtgagactatacttttgttagttctccttatgttgaggactcctttaggctggccctgtgttctagtaccctcaaggggattgtggattatagttttgcaatctcgtttactgcttgtcatctgtgtgtggcatttgtctcgtttactgattgtggattatagataagcagtgtaatcagttgcatttggttaagcaactcctctgaccttcttgacgacttcttcgagcttgctaaaattgttagctctatctagaaactcttgaatggtgtatgctgatttgagtttcaagtctttctagaatggactcattactgttagtccagctatcattgccatgaccgtgccatctttactgagtatcttcatctgcatggtttcctctaagaattgttgtaggtaatcctttagaggtttgtcttgttgcttaatgcagaccaaatcactgggttcgattggtctgtgtcttgatagggagaatcaatcatagaatgcttgcttaagcattttccaagaatcaatagatcctagagaaagcttgagataccactactatgctacttcttatagtgtggcaggaaagacttgacaatgagaatcatct

SEQ ID NO: 319896 - DNA, 532 bp, Cannabis indica
acaaattattaattaacatccaaatacactatattttaaaatagagtgcaattactagggtaataattgcactatctaattatcacacaattacttccaattataatgtaatacaattttatgattttttaaggaaagattaatgaaattttaaataattaaaaatttgtaagaaaagaaaaagttgaaaaaggagtctattattattattattatatgagaaaataaaaatatccattaataagtaaattcaagaaagtccattgcttgaaaatataactcaaatagaaaaatcatgaaaaataggcatagcaagccatttataataacatggaagaaaacactaacaataacctcaactagagaaccaataagccgccaacggtcaaacatcaaggaaatgtaaagtatactaggatttaaaaccaaataaaaatctgacatagtcaacctatcaatgactatcatctaatgatcttcaaataaaaattggaacataaaaatagttagacttttatttgggtcgttacat

SEQ ID NO: 319897 - DNA, 2197 bp, Cannabis indica
attggcatttaaatggttgaatttgaaaattggcgtttttgagaaaatgagatgcagaaatgataaaactgcaaaattgcaaaaagtgaggcccaaatccacatagccatggccggccacttttataggctttatcatctgatattttcattattttaatgccaaataattcaaacctaaccctatgtggaatgctataaatagatagtgaaggcttcaggaaatttacacttttacttctggtttccttcagagaaaaacctgagccttctctttctaaaccctagccgccaccttcatactcttcttcttccttgaataatttcgaacctcttagtgttagagtagtgcccacacacagcaagtgatacctcaatcatagtgaggaagatcgtgaagaaaaattgtatattcatgaaaacagttactacaaatgaaaataaaaaaactgaaaagctctttcaaattttacatagtttagaaatttcgattatataagaaggagaagaaagaggaagaatgtgtgtaaatcaatattctatttgtcaacataaaacttgttattgtcttggcacatacaattttgcagaaattttttgcacaaaaaatatatataccaatcaagttttattgtgttataataaaaataaaaattgaaataataaagaagatattaccttaataaaagcattttacatgtttgactaatattttttggagcatatcaaatataatatgattaattaagatgatgtagagatcaatatcataatcaaaataagagatttaaagttataataactaagcttaagagggatattagaaacaaaaagagaaaaaaaaaaataagtataaaaagcaagagaagaatatgataatcatgagaatgaagatggtacatactatatatatacatacaatgaaaaatgtaactgcaaaaaattaaagtaaaattttttattgtaattaatattaatattcatatataagttttattattaatagctttggcttttcaacttgcataccattttattataatgaagaaattgagtataaaacgtatatactaattaacatgatttataaatgtaaattggttgttggtctcaagaaatttgactgtttgagagtttaaagtattaggtataactttggtaataattaacagattttattatcaaaagagggtcattaatgttttgatttaaatgttgtattattattgttaaatatagaaataaaataatatagaaaaaatgagaaaacaaagaagatgtagaaaatgtcatagaggctgccacattattatacctaacaacaacattatatatagatatagatagatactcaaaaattacaaaatgtttatgttgttacagaatatatatatatttacatttttacggattttttttcttacacaatgttatttatacgttgcaaaaatataatataacgttgcggcaacatgaaaataatattaattttttaaaaaaaaaatcacaaatccgtaataatataaagaaaaaaaattcgtaaaaatatataaaaaaataattttaagtactttatgcaaatttccctaattttattgctattattattttattattattatttccttaaaaaaaaaagaaatactcgatctcattaaaatccaaggaaaaaaaaaatattaaggagagaagagagtgtcatgctgctattattattgttcaaattacaaagaaaatatataactaataaaaatgtttttttatataactaagtggaaatgattaattattttcattattatagctcttatttttataataataaattatattattgtaactgaaatagtaaaatttataattagttgttattaacattatttgttattaatttttttaaataattagtaaattttttattaattacactatatcacttgtatattttgtatacaaaattatgtatttttttaatgaatttaaaagacataagaaaaatggtactaataaaatcaaaaaataaaggactgaattaaataaaaactcatttaaaaaaaaaaagaagagatatatatgtatctgatatacattagattataaaaataatctcattttgtaagtaaataatagaattacaaaaattgtgagatcttgatgagagaggagagaacaaaaacataagaggtgtttgagagcaa

SEQ ID NO: 319898 - DNA, 1229 bp, Cannabis indica
taaatagaagttctactgtagtatataatttcttaagcaattttatatttcttaattatcaattaagttgggttcaatgcatataaacacaattttctctcttcttagtaagtcagtcactttcattgtttttttcttgtgtattattttattgctaattttcttttgaaggaatataataagtccacgtttgggtgtttggtttctatttaaatatcactttttaattttggatttttgtagttttgtggccgaacctttgaacctataaaaaacaatctaaaatcttctatcaaaaaaatttgcatgcgcctaccaacccatcaaaattccatttccattttgtcaataaaaacactttttaagtaatttgataaatattggtataattatcaaaaaaataaataaaaaacaaaaatttgtgtgcttgtctcatactactcgtttgtttgagtaatttgtggtgtttatattatatttaaagattatttagtatgatataatcgaattattttatatattattttttaacttctttttttagaaatttatgttttaggttgcttcagtagtttctatgtagaattttgtgttgcgaattttgatgggttgatatacgaattttgattgcgatttaggttgctccgttaattgttatatgagttttttatgtgaaaattacgtaaaaaaaaaaaaaaaaaaaaaaaaaaaaaaaaaaaactattttaaagtataaaaatgaaaaaaattcatattttatattaccatattaagtatgaggttatcctatttttaagtatgggaaaattattactttgaaataaaattagaagggtaatcttaaatactttcaaacaggtgagttctaaatatttcattcaatcttaatacaatggacttaatatattaatattttttatataactttttacaacactttatcatattctttagccaaacaatataatccaattaagagtaatataactagatatttttattcataactaaacataattataagtttacagataattatattctctactttatcatttcaattaattaaattattttgaacacctcatactaaataccattgaataattagtagctatgaaggtttaatttcataataaagttttgatattaaataaattctatgattattgtgatttatttaaaactcttttaatttcatttttactaatatatgcatttttttatat

SEQ ID NO: 319899 - DNA, 2786 bp, Cannabis indica
acattattatttaattttttagcaacaataattatttagttttaatttttcattaaaaagataataatagcattaatgctactatatagcattcacacatattctagaatagcattatttttcctccaatagtataacatctcaacattttgtcacttcatctatctacctcagcaagtttattatatattatttcaaatcaaaataaattaatagaaaaatataatggaataaataaagaataatcaaaatttatatttataatatgttatttactaaaattatttgaaataaaataataatttatcttatttattttatcacgaaacgtaatcaaaatatttaaattgattaaattatcttttttaattaaactataatatacggtatttattttgtaagacatattttaaaggttaaaattgtcattgtatatttaatattaaaaataaaataaaaattaataaaagtcataatgtctttctttaaaaaaattagtagggggaagtattcctttcttttatctcatattaataaagttctaccttttctaattttaataaaagataattgcgacaaaaatcctaaaaaatttaaggttgatgcagattagtctccaacataaaaaatttgcgataatagtcttcaatgtcacattttttataagtccgttggtctctctttctaactgatctgttagatactaataaaatatcacatgttaattttttattagtctaaataataatttaaatttaaaataaaataaaataaaaaattattttagaatcataaaattattcccagccacgaccttcgccctcatcccattcccagccacgaccttcaattatagacaaattcaaacacaaacacatactgaacacacaattatagaaattgaacaatgaattaacatatcaaatccaaaccaaacaatcaaagaaatattttttttatacaaaacccagatcacactatgaatgaatattaatacattagctctgcttaaagagaaaggagatgataaagaagaagaagttgaagggaaatccttagcaggcaagatcctagcatattaacctctcatactttgttgagctttcataataaaaccactactgaggcttaacccaaggcccaactcgagctcaggctcatctggggaagaaaaatcctcagaagaaaaaatcaaattgtcatctttagacaccttagagatcgacccacttgttgatgaagctttggaaagaccaccaccacaatcacccaaaacaacaccttaaattgaaaaaacttgtaactttcttattttttttcgaaagcccaaaagaaaaattatcgcaaaaaggggttttagagagtgttaattgaaaagaaaggctatgtgaaagaatcaattatctgttcatttttttttaattttctttttttgttctttttttctctctcgttgtctctcttttcttgcaaggtaatggtctaatggatttggccttggttggggtcttcgatcacatacgggatgtgagggacgacctggggttgtgataccagtggttcagacctggcgaccaaagatggggaataactgcagtgaaatatatatagggtattcttggttttttggaaatttttttacttaattatttttctgcagacagggttttgttttgttttgttttctggtggtctttgacgtcgacggtagacggcgaccgtggttgggaatgggggtggggtgagggtcgagctggggatgtggatgggtgaagaagacaaagaattaaaaaaaaatatgattttaaaataacttttttagttctttttttatttttaattaaaattatgattttgaccaataaaaaattgacacgtggcattgtataagtatctaacagatcagttagaaaaagaaacctacggacttacaaaaaaacgtgaccttagagaataatctgcatcacccctaagtttttctagatttttgctgcaattatctcttttaataaagtaagtaaacaaatgtaagggaattaggagtgtaaatagattgggttggatctgatccgactatgatctgacctgatccgaatcatgtaatgatccacccccgctttgcgccgctagatcaattacccgaatcggattagatcccacatgtcttattttttttttttttttaaagtaattttaattttatatctaaatttatatattttttagagtaatataattatattgatttcataggtcatgattatctgggtgaaccaaggaaaagaagtgaggcggagtggatctgatccgagatccaataagtattcgaatattttggatcgaaaatgatccgtcggagtggagctccaacctgattcgtataaatagatctttttgacatacctaaagggaatgattgtcttaccattattctcattacttattagtaaacatgctattaaggtaataacttttaaagaatattgttaaccaattgtaggacgtcatctctaagtggtattaggtattactggtgccaagtagcaatgctcttaatttaattattatataatatttttaaccatttagaaagtgttaggtaccaatggtccctaatatgaatgttcatgtaaaaattacgagaattgctaaaacacgttagtagtgtctagtaggccggaacataaaaaccgctaaaccgtgggaaccgcctaacccattagaatccgcccgcatggaaaccgcccattaaaaaaccgcaaaaattgggttgggttgagttttaa

SEQ ID NO: 319900 - DNA, 2879 bp, Cannabis indica
ttttttcaagaaaatgtggactgaattgggtgttaatgtcattaaagcaatagaaagttcttcaataatggtgtcatgcctcgggatcttcatgctactatgataacacttatccccaaaactcgagagtccgacaaaagctgtggattataggctgattgcctgctattccacggtttataaatacatctccaagctgctttgttccagacttgcccaggtgttgcctatttttgtcaatcagaatcaaggagcctttatttaggggagctctattgcccataatatcatgattcttcaagatatcttgaagaattacaacagaaggattgtgtctcctagatgcactatcaaagttgacatcagtaaagtgtatgatacggtaaactaggagtttttagaggagcttcttaattcttttaagttgccagccaggtttatcacatggattatgacctgtgtgagagccacttcctactctattttaatgaatggtagagttcaaggcagcttcaaaggcaagaaatgtttaagacaaggggaccccctatctcctctcctgtttgttctgataatggagtatctaacaaggagattacgattggcagccaacaattcagattacaggtatcaccccatgtgcaagaacatcaaaatcataagcttatgttttgctgatgatttgtaaagggaatattcagtcgatccaggtgcttaagaattgtttggaggagttcaaagacacctcaggccttgcaatcaatacaagtaaacctcagatgtactttggaggggttggagaagagacaaaacaggctatcttgagagaattaactctcactgagggaaaatttcccctaaagtatctgggagttcctttgaaacccacaaaatggagagctgaagattgtggtatgattatcaagaagattaagcaaagacttctttgttggacaagtagacatctctcttttgcaggaagagctcagcttatccattcagtgttgcttggacttcgtaactactggatgagcatatttgtcttgcctcaaagcatcaccaaggaaattgaaaagttatgtagagggttcctatagggttggaatgggaatagaagtaagctccatgtggtcaattgggagaaggtttgccttccaaaacattatggagggctggggttcaaagaggggactaagcgaaatcaagcaatcatagctaagtatatttgggccatttcaaccaaaagtgacatactttgggtgaaatggtcaatgatatttatcttaaaaacaattccatttggtcttatgatctcaagattgatacgagttggtattggaagaaaatttgtcatgttaaagacaaattttcgagagctgatattattaaagcaggtacggcaggaaggtttaaaacaaatctgctatacaatagcaggttaccccaggttatttgtgagtacagcaggagcatatggtgttccttcatcatgccaaaacatagattcatgctttggcaagctataaatgctcagctgctaactcgagataaattccaacaatttcgcatcaacttggatagtgttgaatgtccggtgtgtggagctgcaacagaaacaaaccagcacttgttttttgagtgcagcctctctcaaagaatcaatgatcagatcaggttgtggctgggcaaaagggcttggccgaatgagtttcaaagctggaaaagctggctggagcaggacagaaagggtaagttgcacagggttcatagggtgatttttgctgctgtgatatatagcatatggatcaatcggaacaattgtatcttaaatgaatattcttgctcggtttctaagattgtacaggaagttcaaaaagctacattttatcgattgaaaattgcaaaaagaggaacttaagtagagacaagagacaatgtatatagagcaattatgttgtaaataagggttggttgtgctaagcttgtttttgttgcttagctttggttttaaatgcttgtgattattgaagattgttccttcttgatcaaaaaaatatagaaagtctcagacgacatatacggtcaatagctttctggaagagaagaggatggcacatactcaaaccagaaatgctaatgaactattttcccaacaaccagaaatatcccagatggaaattggcaatactctaaagtccactagaaatagtgagatacacaaacttactgcatatatatctatatataaaaaatcaagagcaataatcagcgtctaaatcgaaatgggtcatcacatttcaactaaaaaagaagaagaaaatataaatcacgaagtaagagtttgtgatgaaccaaatatagggatagaaatgaggggaaaaggtgagagaagattgtaccttttcagtgtgggattgatgaagagaatcgatcttggactgtggagtgatgctctcaatggatgggaaatcgtcgtcttcttcactgctctccatttttgacttatgtattttgatgttttcagagacgagaaatggaaattaaggcaaatgggtctgcgttcggaactgggttttcttggttggtcggtcagctttacagtaaactgcttatgatttcaggagtagtgtattatgtttttatatttttattttatttaggaatcatcaatatatataggtaggaactaatatcaaaataaaagaaattgaaaactttattttttatttaatatcgaaataataaaataaaaaagagaaggataaactgatagaaatgaatatattaattataaaaatatattgaatcttgaaggaaagaaaaaaacttatgtaaggagcaatactaaacttgttgatagaagtttggtattgctcctt

SEQ ID NO: 319901 - DNA, 754 bp, Cannabis indica
tgaggcctcaatcatttaaactcatttagccaagctctaagaaaactatggttcacttctaagtacttatagaagctatagattctatatatgtgactactgctcactacttcaatcttaggctttaaaggcaattttaaatccttttaacgtcgcttttggcaaaattcactaacgacactgatttaggagacgctgttgggtcaaacacaacgacgccatagatgagccctatggcgtcaattattattaaataactgacgccatagtgtaccctatggcgtcatttaatattaaataactgacaccatagggtataataaccgacgtcataggtacaataactgatgccatagggtataaaaatcaatttattttttcagttttaaaacttaatataattcacaaatttaatttatttaaattaaatattaattaatttaaattaatttcatggctagctaatatgcttaaattaattttatggaagcaattaaaaaaaaaagaaaaatttgcggtaaaagtctccaaaatatttactttgatgcagattagtctccaacttcgagaaatagcggtaatagtccccaacgtcacgttttttgtaagtctgttagtccttttttaaactgctccgtttactaaatgagaaccaccacgtgttgaaatattattagcttagatcattatttttaatttttttaaataaataaattaaaaattataaaaactaaataaattataaaacaatctt

SEQ ID NO: 319902 - DNA, 1634 bp, Cannabis indica
acaaacaatatcataaattttttataaactacatttttttcttttacaaatgataaaaatattaaaaattatttttatcaaatgcatgtaaatttatactgtggaaaaaaaataattaaaaatatatagaaaataaaagttttgtatttgtaattataataaactagattaaaatattatcattattataatagaatcttaacaactcacttcactttaaaatttataatttatcaaatattcattttttttcatagttctgctatagctgttttatcctacagtacaactggttatttatctagttacctttaggataaaactaaactatattttcatattgtttttcttttttagtcttcccataaaatatacatataatttattttttatttaactttgctaaaagagcataaaaatgaaaatttccaaaatgtatggctaaatcataccaacattattgtttctctactatatattttgatgataaattaataattacttaaaatgtttggaattactataattaattgcagaaatttttagtacgtgcaaagatgaaagaggcaattttatggtgtctaccaataatatcaaaggaatgttatctttatatgaagcttcattctatttggtagaaaatgaagatggtattttggaagagacaaggcaaacaacaaagaaatatcttgaggaatacataatcatgatcatggaaaaaacaacaatcattattagatcaaaataataataataataatgattatgattatgattatgtttatgaactagtgagccatgcattggagcttccacttcattggagaatgttaagattggagagtaggtggtttattgatgtgtatgagaagagactagacatgaaccctactctacttaccttagctaaactgatttcaacattgtccaatcaacatccaagatgaccttaaaatatgttttcaggtaaataatattatgatgaatttcatcattttatttcgtattatggtttttgcactaattatatcatgtgtggtgaattgatagttttgaacacgaatcaaaacaccacattttatgtgcaggcctgactttgggttaaggcgagctagactcatgcttagggcctactcaattttatagccaaaaatttttatagtatattttttttttgcattaaaaaagtgattcttttgtaatttcttttgatgtttttatgtatttttgagataatctctcatcttttcttgaaagatttttttttttctttttgctcaaggcttctaattggctttaggccagtccccctaaatacttgggttaggtttggcataacactcttaatttttgagtgttgcactaaatcaacaccacttataaagtattattttataggggaatttttatttttaagatttttaaagtataagttttcaaaaatataattttttctcaaaaaagttatttatgaaaaaaatttagaaaacagttaaaaaaatatatataaaaaaaacagtataagatacttggttaccctttatgggaaacgggtaattctctaggaataattatcttttttaccccctgtactatgacactatactatatgccccttaatctattcagcttgt

SEQ ID NO: 319903 - DNA, 1088 bp, Cannabis indica
taaagaaaaaaaagaagttcggtttgggcggtttaaaccgaccaaactgaagttcaaaacggccggttttaagataggctctggattagtcagtcggttttcgaattgcaccaatccagattgaaaatcgaattctagatttttatgtagaaaaaactgaccaaatcgattgatactctgccctagctaaaaggtaccagtattgcctagcaccatcttatgtgttaatattactagtggtctaactaagtatcatatctcatatagtttaatgtaataacttttagggagtatcgctagccaatctcaaggtgacatgtttagaggtgctaggcacaactggtgcccaataggaatggtcggtgattctataatgcacacccttaaaagggtgcactgatatatttcttatctgtttcagcattcagaacaaaattttagtttaattttttttcatagtcgtgtacgttatagttatttaagacatcctgcaaattttaagatattcgaaataatttacaatatagaaaacaatattcaaacagtctatttcacatgcgtataaaataaaacagtttatccattcaaaaaaaaaatattagagtttctcattccaaaatttatagctacatgagctcgtcttttttctaagattaggctcgtcagccttttttgggcataggtgcagcttggtcgagattgtgttttgttattgcgattcactttttgctattgcaattagtcttgtctctgtgatatatttttgagtgttttagtcttgtctttgtaatatggttttgagtgttttagtcttatttgtgtgacgtggtttagttttattttgttgttggttattctttgttctttgatggctcaccatcaaatcgttattagtggttaggaataacaaattttttgcaactaaaagggttgttagtagtgtagttacttaccttgcagaatagttgagtgctcaagctacgaggttgaatgaacctgctgtaacattttctacggttgtgtcttctaagtagtagatgaaactgaatataggtgttcttaaggttaactgtgatttgcatcttttt

SEQ ID NO: 319904 - DNA, 1093 bp, Cannabis indica
atgagaggtattctaatttgggattgtttagtcgtgagaaagttttatatatttatatgtgagactacctttgaattttacaaaataatatatttactaaaaattaaataaaattaaaaaaaaaaaaaaaaaaagtagacaagatagaaagtatatatggaactgtcaatagttgttcaattcacaattaatgatacaaaattagtgtcattgttaaaaaatgatacaaaaatactaaacaaacagaataataaaaattaaaaatagcatggcacaagttcaatgaatatgttttaatgatgatttattattatttagtactgacgagagagactattcaaagtggtgccaacaaccttcgtactaatcatattaattattaaatagaaaatatcaaagaatatgcacaaaattcttcgtcaaatcaatgaatatatttaatcgacactaatgtaatggtcgttataagaaagttactatataaactgacaagtttagattttcaaattagttatatcatcaggtttatagaattgtagaagtcttttcttctttcctattttttaagagaaagtcctatttgcgtgctcatataatgagcatattgtaacttgtcaaaattaccacttttccttactaagatcactaaaagtcctattatgctcactctataataaatatgtacacttttcctactaaaacatgacaaaactatataactttttttcaattacctggctaatattaatatttacaagctgcatgcaccttaatatagcattgctattaggtactagtggtgcttagcacattcacgacatgtcgcgttgcgattggctagcgatactcctaaaagctattatattaatttatgtgggacccgataattagttgaatcaataatgatattgacacataggaggatactaggaggcaccactggtgccctttaacatttctcccttaatatattagtaatatatttggggtattgtaaattttctcaacattttaaatttatactattatagaatttttacaatttatatatttctatataattttttttactattttttatttattaaagttt

SEQ ID NO: 319905 - DNA, 1615 bp, Cannabis indica
ttcatattttagttcttaacccctgattagagatgggaaatttataccgcgggaatggataaccgcggtgacccgaccctaatggggtggggattccccatcttggtggttaatgagggcggtggtgggggacaatttcaatacccgaagcggggatagggcgggggcggggataatactatccgcaccatatccgaccccgatatagatatatataatttttttgttttttttttaaactttgagacatatttagtttttattttctattaagttatgctttttttaagtagatttatcttttatcttctatgaactatgaatgcataataaatatttgtgagaatattggtttaatttatttttcaattattttaaattaatttgttttttcattttaccttaatggatacctgatgggttccccataaccgatgggtattcccctactccaaatccgttggttattagacggggatggggcggggatgggggtataaatatgtagcggggatggggacggggattgcattccccgtacattaaccaaccaatttccatctctacccctgatcgagtatagtgtttattattatcaatgataaatatgataaaatccaaccaataatttatcttttaacctaaaaaaacaacatttgaataaatttctatttattattattattaaattgttaaaagtaaatgtatagaaaatattgaaggaaaggaaatatataaaagtacttgtattttttttattcttttttcaatttctctctctcttgcatatacaaattgtgatttttaattacaaaccatatgcattgttttaattataaaaactaaaattacacatatatttcaaaataaagaattcaaaaaaaaaaaagtataatattaattataatcaaaatctaactatagcctttggtatcatgactcaacaagctccggtgacagttgtggagtattgatcagtgaaccaagcatccataaaattatgatcatcatgatctaaaaactcataatctaattgatcaatctgatcacaatccaatattttttctaattttgaattagtactctcaacttcatcatcaatctcctctaataatcccttttccaaatcttccaaactcggaaacagatacccattaccattactattactattaccgttacaatcgagatttagagatttgttattctctaaatcgcgattattattaataacaacattgttattaatactattggataatacggtattggtatttgccgtaccgggagggaacttggttcgggtacttccggctagagaattgcggcgcgtgggatgcgcgtgactgtgttccgaggtgtaagtgacgatgaagatgtcgggatcggaagggctccgttcgacttgttttcttgctaagcaaccttttgagctactgcatctataatagcttcttggatatggagaaccctttattggtttttgaccatattttctccatgcccatttatctgagtacaaaccatcttctctaacctctttcaccactcttttttgctgattttttcctattaaatcaaaaaaaaaaaaaaaaaaaactcaatacataattaa

SEQ ID NO: 319906 - DNA, 4567 bp, Cannabis indica
aggtatccttatttctttttgtaagttgtattattagatgaagatgaagaactcataccatagtctttcactacgcacaaggattactgtgagctaataggacaaaatgtatattatgttctttgtttaatctcaacacacgagcaagaactctgaaagtgatgataatggaaaaaaaaattaatcagattaatcctaacaataatacatatctatgtttaggcctatatggtttatataagtcaaaatcaataaagattatttaaataaatatttgaattcaaaacaacaaattaaatcatatttaattatttaaataaatatttataatcgaatatattatagatatttgttttgagttacatatttaggtttgaattaaatatttaataatcaagtgagagaatctctcaactactttgagagaatatctcaaccacttggagagaatctctcaattactttgaaggaatatttaaaccaacttaaatatcgataactaccattgaaatttaaattcaaataaatatccagtggggacaaccctacatatggggcgcctatcattgtgttaggacacagtgagagtgctgccacccttgtcttaacaggacaacgacagtatctttgtccaaacaacttttgtcttttccttaatatatttaattaataaatttgaaaataaattatttattacaaaataaataattactattatgacaaatcaaaatagatttttctaattatgaatatacaacttttatctagtgttgtaagtttgtgtgtgttgtgttggcccggttcgtattatctgtgctttttagaatactcgtcgtgttatgtcgtgccaaagaaaattatgggtcgtatcgtgtaatgctaacatttttaaagggtaggctcggcacgactcgtagacttggtattttcgtatcgtgcgcagattcatgctatgctttgctcatgtcgtcctatatttctcaaacagtctgacccatttttatatctgggttttaattcgtgctttattttttcattttttttttaaaaaaaaattactaaattatatgtatatttcacagctttagttatatttatatagttttcaaaaaatatttatagataatcatataaaaaaattattaacatgattataatttgaatatttacttataaatactcaaatttttatatcacaccctatatataaattaatatataatcttagtttttcacatttaataattttaattatagaattataatatttaatattgtatttaatttttattattattttaacttatttataattgataaatttatatcttattattattaataatactaaattagaaggttttttaatatgttgcgttgtgtttttggggctggtagtgtgtcgtgcttttttggaatagttcatttgtgcttacatgtcgtaccttttgtgcttctcgtgtcatgtcttgattaaggacatatttttcatgttgtgttgtgccaatttgtaccattgtattgtgttgtttccaagctcgtattttttcatgcctagtcgttctcgtgccttctgggctcgtgccggtttcatgttgtgtcaaaaagcccatcccatatttacaacacgttttatccatacccttgacaatgtttcaaggtgaaaatctagggaccatggacctacagtactaagctccaaataaacaagattatttattgaatctcatcaactaaataatcttgtttattaattccataatactccactgtaaatatagatttaaactctatgtacaccactacaaaatgcactattcatgtcgtaaatagaattatatttattgagttttactaaagtattcattgacataatcaattctagttaataagccctaattctgtcggtttgaaattaattttgatcaaattaccatttcagcattccaattatttctttatcctactattaattcactagtgaaagtataatttagatccaattaccatttcaccattccaattatttctttatcctaatattaattcactagtgaaagtataatttagatccaatctagatttatgcacaactttttagttccagaattaatacttaaaggaatccaacattcgatccgttaggaaaattaggatttcataattgtagatcatgtttccagccatccatattattagattcccaaaatagaagttgtaagaatcatcttcttgaaaaaactttaacgagtgaatcaaagaatctaataacatgaataggtgttcatgattactcaagattcgggctaatctattattgatcatcattttgatatgaatcaagtctctacagtaaacgacatgtttgataaggatagctcaattacatatcgatcctcatcatatatattctctattatatacagcacattcacttagatgtcatactatataagcaatttgaattgagattacttgcactaaagagagggcatcattgaatcgcacttacagtcgttgattaaagattccataactttaatatgttactgattattttattcatggctaagtgatcttaattctccatacaacataagtcacagcctcacgtatgtataaggaattatttgatatttatatataaattattcaatattaaatatcaataatttaacattcaagcatatatcaaaatgtttaacttatatttataaacaggaattcatttacaggcttattagggcataattcctaacaatattgaccttatacatagaaatttaaaatattttagaaatttcatgagtttctaaaaatagttcaaaccaataaggtaagtcattaaagatcttgtgaactaataatggtggaaaaatatttggttatgcattaaaaagattattaagttgaattttaaattgtatccaaacttaccactgagaactttagaatatcatattgatgaaaatagaaaggtctatgattagttactagtagcgacctgagtccttttagagatatgccttgacactctatgtcatcccatctaagtatgatcccaagagaacctcgaaatgatggaatgggcatatacatagtatacaccattactagatttagggatgcctgatcatgaaattaaggaaagctagaacttccaattgaggtttgcatggttgatagttattctaaaatgattaggagtggaccatcctatgctcattaagatgagaaagtgtttgcttcaacaaatactactcatctaaaaacatgactgtatccgagtacaaagtagcaaagtatatgacatactattgattcaatcccaatgtgttgcatcatcttataccatataagatggtcccacgacttctcttgtgttgccacgaacaaataattaccactaatgttcctagatagaaagtcacagaacctcgtcgtagtgggagagttttaaggaacctaccctgtaatgacttggacgacactagtgatgagaatccattgttaatttaaataagcaatgaatagacctaataaggaactaagactcaaagccaatagagctatggttcaaaccaatcacatggagcaaccaaagattttaaatataatgataagatgcgaaaccttactcagtctattcaatggacttaaacaaacttctgattcctagtattatgggtttgatgagatcatataaacttatagcttgtagtataccttgtaatttacttgtaatttacttactcaactgcaagtaacttactttagtaagatgctagaaaagtttttaatggaaaactctaaagaaagtcatttgactcttagatgtagagtttatttatctaagaaatagtttcatccattccagaaaagataaaagtcatgaaaataattccttaagcatcaacagtgagaggtctcatgatgctctggtatgaattagaccagacacctgctgttgagttggagttatgagtaggtatcaatatagtttaagataggaatagtgaaagacaattaaataaattttaagattaaaggaggatatatatatattagtctataatggtgaagttttcgaaaccttataagctacaccaactcaaattactagatttgcatttatgctagaaaggctactttttggatggtgattactctgagagtaaagcaataattttttgacaagtgtaaaaatctatacaaaatctctaactctactaataagactgaatattttagtggctcagaaggcaactagagaattattttggctaaggaaagttctatacgacctttggcattattctaatcatggatgaactattagtgttacttgcctatagcacaattgtagttgcaaaacagtaaagaattcaaaactctaagaggagtaaacagatagataagaattatacaatatcatgaattttttcactaaggaagatacaatggtggagtaggttgatactgaatacaacatgtgagatcctattaaaaagataaaactacataatttacttgatgtagacatcaagaagatgagattaattgaaat

SEQ ID NO: 319907 - DNA, 680 bp, Cannabis indica
cgttggcagatgtaattttctcttcattttatatataccaatttattttcacatgttgtgagactttaataatatcattatggatcaaaggttacttttttaatgactccatcaatatcgatctataagtggtgctatattttatgcaactaataattaataatatatatacatataaatattttatggtgatatgaatcatggaaaagagaaacctcgaagtggaggcacttcttaccaacaagttttttttgtctatccaaaagatatataaaatcgatttctaaaagatagtgttagtaattagcttgagactacctcatcgagcaaactgaggtaaagaaccaacttgagcaaaattacttataaaatatataggtaaagaaaattgattagcaaacaactataatcatataattttatatatatgaaaaaaaaatatgcctaactattacttttaaaaccaaacttatatttaaagtcttccgcatgtatgcagataggagtgttcattagatcacattcaatgaatgtggactcaatcgatccaatccaattatttattagatgttaaattttgccatccgatccaatctaatcgaattaagtcatctgatttgattcgatcctatggatgtattggattagatcggttctaaccattagattcattgattggt

SEQ ID NO: 319908 - DNA, 1478 bp, Cannabis indica
agttcgtgggtgtaagggcccaatggaggcttgaagcggggatgttacacgtggtttccaaagctccattcgtcgttcaccacgaagttaagaaaaaatcaactaaacccacatttttctcacataaaaatataaaacgagtgagaaagggaggtggagtcgagaaagagagagacgaagacaaagacaagcaaggaggaattattgtggattttttcttgtcaatagtgaaagcgggagagagaaagggaatcaggtggtgacatcgagatgaagacgagatgactgagggcgagcgagagaggagagtgcctagggtcaaaataggggtttagaggtaaataggttatgtctgtggcacgacatgtatcgtctggttactgtggtgaatgagagacctgatgaggatgcatgttatgtttaagaagacgaaggagaaaaaaatagaaaaaaattagattttaggattttaaaatatttagttttgttttataattctagtttatttttaattaaaattattatttggaccaataaggcttcaacccatggcacttttgaataagttaacagagcagttagatttaggactaacagacttacaaaaagtgtgaccttgaggactattgttgttattttcaaagattatggactaatctgtaacaaagtgaactttttgaaaacttttactgcaaatttttctaaacattatttaccatttgtttccatatcactggctctcatattaatatgatattcattataatacacaaattgaaaaaataaataagggtataaaaataacatgtcattgtcttcgattactaaagaacatgtttaacatcagtcattacatataaagtcgtataggagaagctctcaaaaacacatctattttgattagtccacaagttgtacacaatagcagcaaacaaatcattaacaatagaggctactaaacttgatcgagagttacttatccaccttatccattatccagctttcatagtcaagaggccaagctttataccccaaccaagtaaatagtaaatccaccaatgtcttaaaaaaacaacacttaaaaaaatgataatggttctcatttttcaagccacgggctaaataaagagagctctctatagacacgcaaaacctagggagaagatcttaggtgacatgtgagaataatgtccctgctttaagcctttattgggcccttacacccatggaattatcgctcttatacacgagtatgccactttggctgtttcttggattgacgattgaccctacaaaccaacacgagtgtttttagcgtgctttgtcctcactcgcatgcttcttgggaaaactttctaggaggtcacccatcctgaaattactccaggtcaagcacgcttaaccatggagttctttcgtgatgggctaccaaaaaataagatgctctttgttgatataggtagtaccaatcaatcaat

SEQ ID NO: 319909 - DNA, 1202 bp, Cannabis indica
cttccccaggcgatgtgggattgcacaacttacccggtatttcccctcacggatcacgggactactagctgtcacaataccataactgcaaaaattattttttatttgtacaaatttaaaattgagttttgaacacatgtaagaatgtttagcaccattgatcttcctttttttccttgttttttgaaaaaaaacagcctcactaaaaccttaagagtaaacttaatggaagaaacctcaagaagaaaaagagtgtcagacaatatcattaatcataagagtctatctacagagcaatagaaatacaatgatcattcaaaaacagtgctaactttgctaaagtgtggaccatgctattagcaatcctaagagcacataaaaaaaatatcaataaaatgattacaataagtaagaatatctctgataacgcaacctaagtaagacagatcaaccttacaataactaatggcattgataacagtaaggtagtaagactccaacaccactctctgaaagccaagacaagcaagcaagaccccagagtaaatacccaaagcgtcagcaacgttaaacaatcattccaattccaactattaaaaactaagacgaagccagtatatcattacaaaataccgctctagccctagatttacccaacgtctcaggattcaaccctgcatcataattgattttcaccaccccagcaagtgatttagaccattgacaatcggctgtttctcataaagattaccaagacgaggattacaactattggcagaagagtaacgttgaagataatttatattccagtcaaacaaaaagatcatcattcacccatttactctgtcaataccaaatctctaaagacagactatgaacttcaagcataaatgaattcatagatatcccaacaagagaatataggtacatgaaaatgggggataatgacctctcgtaaagaagaaagcttattacaaccccaaaagacatgtaatgatacccaacaaacaaaaaggacaagtagtagcagcagagacatcacgatggctcaaaaaaaatttgttctcttttatgacagtcacagcgctttgcacttagcaaataatccgacatttcattcacaaacaaaacatgtacacgtcaaatatcatttttgttgttacagattcacttatttatcctaaagttgaataacaccactc

SEQ ID NO: 319910 - DNA, 1428 bp, Cannabis indica
ttgaagctgaatcttcaattctttaagctttaccagagccattctataaggtgttttagagactggttctggtccaggtgcttaatcgataacataatctatctactgttgcagtggttaacccacaagtacataaggaaatacctataaaaattcctgaactagtacgatgtcctctggccaaaatgatttaggtcgtgtggtatctaataccactgccaacaaccctaggcatccatcttgtagcaaatctctagctttcaatactgagatcactagaatttaggatccctgaactaatcccataaatataaatagttcctcacccttaggttggaggatcaccatcttccgcttatagtgaatactagtagagtacttggacaagaaatctattccaagtatgatatcaaaatctgctaagcccaattccactaaatcagcactcaactctctatcctcaattctgatcgccatagacctaacccacctgttggagataactaattctctgtcaggcaatagggttctaaaccccttataataactatcaaacggtctatccaatttatcaaaaattttggtcgccacatgtgaatgagtggccctaaagtcaaataacacaaagaaataagagttgttgactgagagctgacttgtaacaactgagggactagcttctgtattagcctgagtaagagcaaacatcattgctgaaacgggctttgctgctgtctgttgctcttctttcttgagttgcaggcaatctccttgtagtgtccagacataccacactagaaacatcctcaccctttacactcacccagatgatgcttcttgcagttgtgacatttcaggtatgtgtatctggtttctgaaccaccctaacgatttccacgaccctagttcccttggaacctcttgtttaaagaatatatataatacttgtcaagggaaaggaagatcaatgattggggactgtggaggaagaggaagcagaggggagagacagttcgatgaagaaaagatagagagaaggaggcggagggctggtttgaaatcgtggaaggaacaaagaagaggaacgaaatggtgatggacaaacgaaggaagaaaaagcgatgaaggcaaaaggctgaaattgcaagtggcgcgcacagtgccgatctttgatagtggtggagaggaggaaaagtggctaagggattgatcgtcaatcgtggtggagaagagccattgtttctggagaaaatattcaataaagtttttttttttcaaaacataagggtgtaatagaaatatgagcaataaaaatggtataaattaaatactgagaaaggtgaggtaaaaatgaaatggggtaatgaaaaatggttatagaatgtaattttcacaaaattaagagcactcctcctatatttttctatc

SEQ ID NO: 319911 - DNA, 1079 bp, Cannabis indica
atactttcatttttagtgaggacattttgccgttagtaatagtgccgttggtgatgctattaattcttgtagtgtattttcttctttatttgttgattttatttaagtcgggtctaggttcggggtcggagtcaagtccaagtctgggacatgtgttagggtctgaatcaggattctaagatctaggttgggatcgaagtccaaagtattgataaaaactgtttaaaaaattgaaagtgacttttttattttaaatttggattgtcaattaaaaaaatgaaaagtaaatacaattttatagaacattattttaggaaaatatctaattttaaaaataaaaaaatgattaaaacagtattactaaacacactcataatgtacatgaagaaaaacatccagcgtaagagcttcttaacttgacaaacatgttgtgttttttgaatgaaacttggaagaatattccacttttgcgagagagttatgagacacacgaaggttcaccttataacactagtatgtaacctcgagtatctatggatttacacgacaccgttcaactcaaaggtatgataaaattacctcaaactaggaacaacaccaatagcagtgaagtccatggcagattttgctgtaattgattagtacacaacttacaaagcatatatcccaatgtacgggtaatcgggatacaaccaaatcccaatgtacgagctagatcaagagcatatatccttcgttacacatcaaggtttgtattgttataaagtaatgtcctttggcttaattaatacaggtgcaacatattagcgacttgttaacatgatgttcgcaggtatgttaggaaaaataatggaagtgtacgtcgacgatttgcttgtaaatgttacgaaaattctgtttattacgcaagtgtacgtatcaagtagtatctcacgcaagtgaggtcgaaccacagggaattggattaagtactactaaattatacttatgattctatttggtaaaataataagtttgcaatttaaaaataaagaactcagaaattaaagggaatataaacgaagattaatcaagatgag

SEQ ID NO: 319912 - DNA, 928 bp, Cannabis indica
caacatataagattaaaattcctcaattaaaagatcttcataaatgcctaaatgaggaagaattaatccacactacactctttttcccttatcaaattttttgtcctaccaggttttctagtaagatttttaataagacagatattatggatatttaaaagagggtgtgataaaatattattaatggatgtctaaattattaaattatttatcgccataaatgtttgattgtatttacttatattatattgatttgatttctcattcttttagttttattcttgtataaataggaattcatctattggaaagagttagaaattgtaatttactttctctttctctccatcttattcttcttttttttttctctattttaaattattcataataattttataacggaatttgaataatgaagaaaatatttatagtggaaccatacaaagaatttgattgataaaattatttaaggaaacttgttgttattgtaaaaaatttaacaaaaatataaatggttgatatttatacatattattgtgtaaaataagtgtgtatttaacattattctattacaccaaatgaaattagttgtatagtaattattattattgtaggaatttttaagataggattttactatcttgccccctacaccaacaaacaaaacaaatcaaatgataaggtcaattttgacctttccctgttcaaagacttttcaaagtctgaacacccaaaacgacagcgttttgtatttgaacaaaaccccaagcctcgagaaccttctcaatcactttctctcttccttaggtttcacttcgaaaccctagcagagagtttctctctgagaaactcaaagccaaaccctagaaacccagaaatcccaaacacaaacccagcaacaagatcagatctacaatgatctgat

SEQ ID NO: 319913 - DNA, 1063 bp, Cannabis indica
ttccgaatttcttaaaattttacaggatgtcttaaataactataacgtatatgactatgagaaaaaatttgaccaaaaaattatttcggatgctaaaacagataggggtgtatcaatatacccattttaagagggtgcattgtagaattttcctgaattaaattactttctagaaaatgtaaggatgtatctctttaaaggttgtctattaaaaaattttccaaaattattatataccttgtcgttacaggttttccaagtaaaatctaccacaatctatataaaggaataacctgtccatatttacccctagtattttttacaagttatatacattatctgtattttttatttttaatctttccaagaaaaaactaagaacagttgttgtatcaattcttttgtcgtgttgtgtgtaaatatgtgatgtgggtccaaattatgtcgaccatgaaagtacaaggttttcattttagaaaaatagaacaagaattttctatgtttataattgagataaagttgagaaattagcatacgttaataataataataataataataatattactactcttttaatttagtcaaatcttttgatttgatatcaaacacgcgcgcttacaaaacatgattaaatgccaaaactatatccaccttttatctttagtggaacttccacatatttttggtttctttcctttaattctagttcctttaattctagtttttttttaaaaaaaaaaaaaaacattttattactatccaaaattaagattaacacaaaaataaaagggattttcacacctttttaaaaaatactgtctcttttttgtaatgtttattatgttaagtttcatttgttgttctacttttattttttaattgtttcactgttacttgttacttttaactattctgtttaatgttttatagttatttttataaaaaaaataatatttttataaaaatatatgtagtcaataaaattataaactattatttaaaagagaaatttacatagtatactaactttggctattttttacaaaaatactgctaggcg

SEQ ID NO: 319914 - DNA, 1492 bp, Cannabis indica
taggacataaaacccaacataatccaccatagatggtatgccaagaatggtgtcatccatccaggtcttaaaatgctccccgtgtcacccaaatgaataccacgtcatcctatgcagaatttgagatagcatttgcccccaaagtcctcgtgaaaagtttttgctcccacgtggacttattgcgccactaagttagtcagatgagtgacatttgtgtacagtcttcgtaccatatcgtgatccgatgtgatttgatggaaggagtgcagatacaattttctaagtattttggcatttaatgtcttgtcttgaaaataaaaccttgattgggacaatgattgttattaagtaccaagtgcctaatatatgtgtactcctcaatatgtgatgattatacttttttgggaggaaatccaaaatttatattctaaattttagaattacctttctaaccgcccatataaggtgttaaaatattcttttacactcttttagccatttttattttcaaaaaaaaaaataaaaaccatagcacaaaaactcctttatccctttacaattgaagaattcttacttgatttacagaaccatcccaggcaatattagagaaatttgatattttcacacgtaccctattgaagaatcttacaattataaaagtatagataatattttaatttctcttttataatgttattttgcaaactgatactcttttgataattgatgtaaagtaacattttagtaaaattactttgtaaaaatttaattagaaaattttcattttttaacactgatgaagagtacgatttggccttaaatttttagtgatcaatgtcataggcaatattagagcataaatgtttaatttatattccatgcagtaatattaagcttaagaatattgttgtagaaggaaaaaatagtttattaatttcagcatacaaaaaagtctttttgtttattatatagaaaataagacttaaatactttattgtatacacgactgtttgtggtaaccaattggttgaatcttatttttttcaaatagtcgtaaataactataacataaatgatcataataaaaataaactaaaaaactcttttagatgtcgaaacagataaggtgactaaaaatttaatagtattatatatcgtaggaaacatttacagtacaccattgaaaaagagtgcaccaatgtaccacttactgtttcggcattaaaaaaaaaattaatctacttttttttttcatgggtatgttgtatttatttaaaatattttacaaaattttgagatattcaaaataattttgaatgttagaaaaaattataatatataaaatttaattatatgattttttttataattaaaactataaataaaatataacaatgaaaactaggcatcgtgaattgcacgtgttagcttcatctagtgttaaataatataggtgacatttggtaatacttttgctttctaattttttaat

SEQ ID NO: 319915 - DNA, 1028 bp, Cannabis indica
ttttttataaattttgaaaaaaattaaagaaaagttattaaaaaatctgttaaaaatattaaatttactaaaaaaaatttaaattattcttaaaaagttatttttaaatattattttattcataaatatatatcttaaaaaattaaaataaaattattattgaaaatttaataaataatttaaaccaaccaagattttgtaaagagaaaaatcaagcttatttgtgcttacaaatttatatcttaaaaataaaaaaataattagaaattcaataaaaatataaaattatttaaaaatatatatataaattaaacttaaaaatatgttatttatatttaaatatatctaaattttttgagggaaaaaaatcaaatttattcttgtaaaattagtttttcagatcgaatttttaatatatatattttttaaaaaaattaatttttcaaattacttaatttgttttaaattttttatttattttttaatctttttaattattcacaatgatttttttattgatctaaattaattttcaaaatatactaaaaaaaatattgaatctttcatatttttatttggatagggtacgatatgataattgtcaaagtttagagaacaaaattactgatttacaaacatatgtcaacatttaaacggaaaaatatgaataatatgatgaaacctaatagaataactaaattttagtatttgtaaaaatttctaataagtcgtatattttaaaagataagatcaataatatcgaaagttaaagggtaaaattactaattattcttgttataataaaggagaaaaggggttatcctagtttgtctgttgtgttcttcaatggtaaaacttgagaggatgcttgatgaggtagacatattatgtggcaaaatattgagatgtaataccattggagagaaagtgatgccattattgaaattcgtatggatgctatgttgtagcattgatgctattaatttttttaaaataaaaaattgtagctaaaaagttattgtagctaa

SEQ ID NO: 319916 - DNA, 466 bp, Cannabis indica
gtgattttagtcataataaaaaattatttatagctaaaaatattgtatatagatacaaattgtgactaacttagtataattaatcacaatagtgttgtgaaaacatatatatttattcacaataaattatgatttgtgtgattaatatttttagccataaatgttttaatcaaaatataaaaataataatttataaagagatagaatgtattatactgaaagttattttgagataattatatatatctactcaataatttttattaaatgttttttaagcatataatctcatttaagttttatttctggttttgtccgtaccaatattttggtctctaataagtacagtttgtttttcactgttgcgacgtacgtatgtgcaacttttatttgcaacaaaaagtaattaaattacgagtaaatttaacattgaaacaaacgaacactactgtaacgtccccgcttc

SEQ ID NO: 319917 - DNA, 733 bp, Cannabis indica
ttttaattagaaatataagttaaaataattagtattaatggtttaaaaaaaaatctataccattatacttggagagagaatagtattctgcttagagagaatattagtagtgaaaacaaaatttataccaatattattactttaaatttaaactgattattaatttattatttttattagagagataacatagcaacaattaattagagagagaattgagtaaaataaggctaacgttaacattaattaattgaatctgttaattatatttaagtgaggtggtgttgagttgttggtggcacagggtgcgaatagggtattggggacagtaaactttttctcaacattttgctaatagccataaacacattttttcctctttattttgtcgaggacaaaggtaattgtaggaaattagctagagggggcttattagatgtggcttcagtctaagctagaacttaaggaaaagaataaatagaagggagagggttcaattttgggggtgtgaaggattgggtaggttgtaactttagtgggagagaactagggctctcaaactccgtaggatatcaaatataatattaatagagaaatttcatttcttatacttgataaaaaatcccatctacaaaaaataccctattaatttttttatacaatattattctaataattccttattttacctaacatacccttaccatttattttttttttcaaaagctaaaaa

SEQ ID NO: 319918 - DNA, 1048 bp, Cannabis indica
aatttttactgtaaataaaataaatttttactgtaaataaacagtattgataaatagtaacaatagtcgttataagtggaaaatgagaattcctatttggtattgacacattagactattcaataaatgatgtgtattttgggttaaatttggccttaaaatataccataaagctatatttgatcaaatttttgtatttgtaatttaatgcacatgcaaattaaatataaaagttaatactaccattaatgctcattgaaaatatattatacaaaataattaattttatttatattattttttttaaaataaagcgtttataaatagcaattagacctcacggtcattatataaaataatgttcaggatagagaaatcactcaacctaccaaactggttgttcgtgaaagcccatttggccacattatttatattattttaatatcttataaatataaaaactttttcatcagtgaataatattaataagtggaaaaaaataattaaaaaatatggtattttattgtgggctaaaatttggcacatgctattatttgtaccaaattagcataatatttagtttgggctaaatttagcacacattttccatcaccatataaaatggtaaatataacattttagagtttggtagcaactaagtgtaacataaacactacaaattactcacgcatgagcaatatgagacaaacacacaatttatttatttattttttatttttataaaattacactaaacatagcatttgtacaattatcaaaactctatgagaagtattaccgtcaatcttctattatagtctcttaattaattttcgtgcctgaaaacatgccaattttttttttatatttttttatggcagtattcgttatacttacaacattattcatgtaaatttttaaaatttcaaatactttatactgataaaaaataggttagaagtttttttaaatacacattatagactggaatattaagaattttatttttggtactgtaaattatacaatttttttaaaaaaattaaat

SEQ ID NO: 319919 - DNA, 2615 bp, Cannabis indica
aggctgaccgtacttttactgttagtagagactctttaaccttttgtttttgtcatccttgattttggatgatttagtttaatgaaatttaactattattcaaaaaaaaaaaatttaaagcattgacatttaattttgaaaaaataattataattaattaatactattttcccttccgaaataattttacaccatatttattgtcagagattttattagggaagataaattaaataattgaattcaattgtaaaaataatataagaagattgattatataaatgtgttacaatatatatattattttatttttatatttatatataaagttaatgtataaaataatgatatagtagtctaaaataatttaaaatacttttatatgctttcttcttaaatctctcattttataaatattttattaggtttataattattaattgaataattaattaagaaaatatatacaccaaaacctatttatctcttttctcaatttttaatcaaaaactaagattaaaaattcatttttatatcctaaaaatatctcaaatcgtactttaaaaaaatatcatacatatatataggatttttcttagagttctcaccagtaaaaatattttttaaacctttgatttttaatctgatggtaatgatttgttgtagtttatttggttaacattaagtagcgcatatagaattattatttatttatttttaactcctctattttctagccatgatttaattttttttgtttctctaaaatgatacacgatgttattattattttttgccaactttaatgagatggtgatgatgaacgaggtggattgagactggtgcagcttggttcaggcgaagatggtgatgaggttgtggttcgggtgaagagaagttgaaaatgatgatgagatgagagtaaagtgggcggagggttttctaggctagttgatttctgggtttggtgatggtggggaaagaagagaggaaaaatgtgattggggtctgataatggggtttttggcaaatggaggtggagaagggtatatggtggtcatagtagtcgtggttcatgcgaggagaaggtagagacgaggtggctatggtggttaggacggaaaaggaagaagataggaaaatagggtattatgagaaaaggaaatttgaggtatttgagattgtttgggttaggatattatttgagaaattatgatttggttttgctttttttttattttcttgtctaaaaattccttcacagcttgcaaagaatcccaacttacgcctattgtagcaatattttcacaaaaattcaaaaaatattgtgattgctcctttaacttgtaccacttttgctagaaaattactgcgacagacgaacttcttcaaatcaacaacaaaagtcttttgttcatgcccaatttcgctgcagtaaaattcaattaaaaatctagcaaaatttcaaagctccaaatcacatccaaaactctaaattatgctctaaaaacacatgaagcaccaaactaagtgtaaaatccacccaaaaattaaaaagtttaagaaatgtgagttttggccgcactaagtaagtttcttagggcatgttgtgaacaagaatgacattctggtggacccggtgaaaattgaagcagttcaggattggcctcaacccaagtttgctactgaagttagaagttttatgggattagcaagatactacaaaagattcattgaagggtttgccaagatttttgcccccttaacgtaattaactcaaataaactgtaaatttgtttggactgacaagtgtaaaaatagcttccaagagttgaagctaaggctaattactgcaccagtactaaccttgacaatcagtgatgagaaattcatgatttgctgtgatgcttcgaaacaagggttaggttgcattttaaggcattctggtaaagttattgcttatgcgtttagataattgaaggcgtatgagtagcggtatcccacacacgatattgaattggcagcaatggttttaactttgaaagtttggtgtcattacctgtatagcgaaaagtgtgaaatctacacggatcacaaaatcctcaaataatttttcactcaaaaagatttgaatatgaggcagcgatgatagttggaattggttaaagactatgactgtgagatcctctaccatcctggaaatgtggtagcggatgctctaagtcaaaaaagtctggggcaagtatatgaaatgaagaagatctcaccggaattggctgaggatatgactagagcaagaattgagtttgtaattgggaaaattagctaacattacattacaatctgattttttagagagaatcaagacaacccaacaaagttatctagtattacaagagtataaagaaaaggttgaagctggatcaataaaggatttttcaatttcatcagattggttattgagatataaaggtagggtttgtgttccagctgatgatagtatcaaacttgagattctagatgagtctcataccacgccatattcatcacactcgaaaacaactaagatgtatcaagatatgaaatctgttggaagttattttaccaggatctta

SEQ ID NO: 319920 - DNA, 863 bp, Cannabis indica
ctctttctttcaacaaaaatacactttaattcctacaagaaagacataaattgaatcaaaatcaaatattttcatttataaaatatattacaataatttcatgaaaatatcaattaaaactcaatttattttatcatttaaaataaataaaaatgtatttttaaccactaatcattcactgttttagcttgttggttttttcaattttttaacagtatatcgaaagtatgtcgacatgttatttatggtttattgacatttttgattagttatctgatttattatgtcgacaattatgtcgatgggttgtcgatattttgtcaacaattgtatgatattttgttattttttaattgtgaatatatcgacagaatgtcaatatgatgtcgatattttgtcgacaattgtatgatattttgttattttttaattgtgaatatatcgacatcatgtcgacattttgtcaataattgtatgatattttgttatttttcaattgtgaatatatcgacagaatgtcgacatgatgtcaatattttgtcgacaattgtattatatgttgttattttttaacagtgaatatatcgacaggatgtcgataattttctgtcagagtatctttgatattttttaatatattttttcatatggctccacgactcatagttctagcatccgagtattttactggctgggtgacatatagaggcaccagtgcttttgcaaaaatcaaatctcggtttgaggagtaaaatttgaataacacggcgaaagaaagcggtttcgataacttttggaatgttgtacttctgacattctcctcaatgttatttcaccaagtcatgttgcacaagatgaaggtt

SEQ ID NO: 319921 - DNA, 1514 bp, Cannabis indica
gaaaaatctaaaatttacacttgcacaaattaaatgttgatttagaagtaactaaatcaattcaatttacactatttatatatattttaagaaaattatttatataattaatattttaatagtaaaaaaatataatttataaattgaatacatacgatacaaatatattttaaatcaaatgtattttttttttaaaagaaggtatgtatatttcattcttatatataaagaaaatataatctaatacaaaattaaacaattctttctacatataattttttttctatctttgaatttgttatttttttttattttatttattgtaatttgttattggagacataaacaacaataatttattttattttattgctagttatgtaaaaaaaattatatttttttttaaataattcaatattaaaaagtaataaatctaaattaataaccgagtcaatccgcacagtgtggattagattttaattcttgagcagattgagttggattggatccaaaatataaaatccgtacttagtacagatcagatgcataggaaaaaaataatgcgaattagattagatgaaaatcattaaattttaaaattgatttgataaagagttttatgtaataaatattagtatattatttttattttaattaataaaaaaatcttttattatatataaaattatttattattataaatttatatatttttccttaataaaacgtagtaataaagtcatataaaactaagcaaatattgcatgtaagtttggagaagacttcttttttaacatataaaataattatacttcgtgttaattttgtacacaatgatcatgatatacattatatattgtaattagaacagacataattctacagctaattgaaaaaagaaaaacctccaaagaatttagtgtcaaattttttaaaaattattcagaaattcctttaaataaatggtggaatttatatctaactattaattaattagtattgtcatatatataaagaatagatctcccactagataattgatctataaatgtaatgattattttatgatgtaggtgcaactagtttactgcgtaattatagtctatatgtgtatcatgaattcatataactctatatacatataatcaaatgtacagtctatgattgttttgactgttcgtttcagaatttatttatatatatatatatatatatatatatttatagctacaatttgtgccaatatatatatatatgaatgaattgcacttattaattcatggtaggtggactatatatttatatgaaagctaggatgatcttttacgtggagagcccatacatatttataacgagtttatagtagtagttaatgttacactactgcatacatatatgcgtgtcctccttcacaaacctttaattaaacttccatttttctattaattttcttttcaataaatattattttcggtattatctaattttgccccttaaaatatacggcttgttaa

SEQ ID NO: 319922 - DNA, 874 bp, Cannabis indica
cttttgaattcggttttgccgcttaggtcggctagaaagaaaagacttgtaataagtttgtaaatatttttgggatcccaactattttgaaagtttaaatatattacaagtttattttcattctgtttaatataaaagtttaaattctgcgctattttggttagtaatcccgattaggggattagggtttcataagcatttttgggtagcgtgcctaattattttagggcgttacacattctaccctgacatcttaaattcacaatttcctcactgatttaagaatccacatgtctcgcaatatgatggaaccatagatccagtcgcccatttaaataatttaatactataatgcgatcatgcaatgtttcaaaaaacttgcgttgcatattatttccaacatcctagacaggagctgcgagtagttggtttgattaattcaccaaccattccataacatcctgggaacaattgttgaaggatttcaaaaagtagtttcaagctacaagagatcgttggccagaggcatcatctttgattaacatcaagcaacaaccaggagagtcccttaaagagtacttgagttgcttcagtacagctgtagcaaaagtcagaaacttgaatgataacacacttaacagcccttcaagctgaaattgcaactaatttatctactatagggggtaaattacgggatgatttgcaaggtcattctgcgaggaatgtcaatgaatttaataaaagagcacaaacttttgtgcataaagaagaagcacggaatgaaatgaagttattaaagactagcttaggagataaagccaacactagtactgcattagcgagcaccgtgacaacgaaggtagaaaatcccaat

SEQ ID NO: 319923 - DNA, 1342 bp, Cannabis indica
tgtccaattttagtaaaaaaaagtccaacatagatgaaagtttaggaggcatgatttagtacatgtcaaagtttgaaggacatgatttggttgatatcaaagtttggggagcatattttagtacataaacaatcactaaaataataaaattgaatgaaattagacaaaagtccttaaatctaacaatctcaatagttcaggtggaatttttaactgccatattagttcaagaaacatgatttagtacatattaaagtttaggggcaaaaatcttaattagcattctaaattcaaggcataacatattattattggagtgtctaccaaagtatcctttccaaagggtctaccacataaattttaatatatcttattaccttaatattatattataactattaaaaaaataaataatattaccttgaaatatggatctcatatatttcttatgagaattttattattagttttaatttaactttcttttaatattgggaatgtaagaccactgcaattaaccttttgttttatttgttaataagatattattagtcaattaagagttaagaatatgaagaaaaaatagagagatcactgagagatttgcaaaagatacttagatgtctacaccaaccatttcaattgttagcttctaagaagcatatggaaggaatctccatgaaatcaattaaattatattccaacaccattatttaagaatgttatgcatctattattttttatacatctttcaatatcaaaagtttcaccttaacgttaacacttaataaataaatatatcgatttagccatttttgacctcttattcatcttccaaagcagcagaataatcaatataattggagtgtataattcttaaattaagagaaatggatctcactttatatacaaatacaaataaacagtaattgagtttgaaatatattagagaattaaaagaacaaagaaaaaatatagagagagatggagggtgaagagaagaaatataagcacgtgggattgttggacatcaacaaaatgactcacttattccattagaaagttgaaatgggaacaaattaattgggaaaaaaaaaaagataatggcaaaagagtaagagttgtagttttttttagtatattaatattattttttattgaattttaagtattgttttagataataattagttcattgaataattaatgtgtaatattttaatttttatctattttaatgttttaatatatttaaatttttattataaacgttattttttaattagggaattccccgtcccgtcatcgttcctattaagagattattcgccatccccgatga

SEQ ID NO: 319924 - DNA, 1190 bp, Cannabis indica
gatcaaacatactctggatgagtttggcatgacttcaggtttgttcttaaataccaataaatctcatgtgtattttggtggggtgaatactgaggataagtaggctgttttaaaagactttcatttagttgaaggtttttttttcctctcaaataccttggtgtccctttaagaccaactaaatggagagcggaggatagtggtatcattcttaagaagataaagcgaatattgcacacctggtcaagtaggcatctgtcttttgcaggtaaggtgcaactaatccattctattttacttggacttcgtaactattggatgaacatttttgttcttccccatagtatcaaaaaagagattgaaaagatgtgcaaaggttttctttggggaatgaacggtaacagaagtaagattcacatagcgttctgggagaaggtgtgtctcccgaaggcttatggaggcctcggtttcaaagacgggattaaatggaatcaggctatccttgctaagtatgtctgggcaatatccactaagcaataccttctttgggttaaatgggtggataatatctacttaaaatccaaaatcttctgggagtatgatctcaaacttgacgtcagttggtattggcggaaactatgccacataaggaggaaatttaagagggaaattcttaaagctggtacagcctctcagttcaaaaccacaagcttgtacaacaacaagttatctcaagatccagtcaactatcataaggtagtttggagttcgcttaatgtttctaaacacaagtttatcctctagcaagtcttaaactctcatcttctcactaaagacaatttactccgatttcatatagaattggagttaatgaactgtcttatgtgcgaagaagttgttgagactcatgaacacattttcttctcttgtgttgtgtctagaaaaatcattgatgagacgttttcttggatgaattttaaaggctagctgagtgactttaaaggctggtatagttggatcaacttgagaggtcactcttagattcaaaggattaacatctcatattggctgctgttatttacaacatttggcttaacaggaacatatgtatttttaatggctattcaagagcaattaaagatattgtaatgatataaagagtaccttaaagtatagatggcaaattataa

SEQ ID NO: 319925 - DNA, 1619 bp, Cannabis indica
aattaagattttataagaaaataaaatataaagtatcgtattataactcatttataatttatttttatttaatttataaattaattacaataatttaatagtgattcaatgaataaaatatatttgatgtaaccattaacattctcaatataaatattatgggaaatttttaaaaataccattttttatgttttatttaaaattttacgacttaaattttttatttataaaattacactttcaaaattttaaaattacaaaaagacattttgttcagcaaaaattaaaaaaaaaataactaaaaaattagaaatcaacatcacaacaactataaataaactataaaacaaccaggaaaataacttcatgacaactataatacaactataaataaactataaaatacttattaaaaaaaaattatgaaacaaccaaaaaaaacggtttattgtttttactaaagatttgaataaaaatgaaatttttctgtgctgaattatttttgtaacctttttttcaaatttttggtaaatttttctaaaaaacttcttttttttcttaaattaaaaaactgctttttagtcctcctatatattccggccttaaaattgttgatgttaaatacgttgaagactccatatccacaacatgaaaatctaacccaataactatagtgttttttctaataaataattatattgttagatgctctggctacctaaaattttagtttaaaaagaaaaattaaatacagaaattgtttgggcaaagatcagtacatataattgataattgggccttttattcagcccttagatgtgaaatgagaaaactaccacttacatatttgttatatatttatgatagtttttttgtagatacggcattttttttgtaaggtagatatggcatactttaattgtttacattttctttacagaacatatttgatttattaaaattgcagttagttctgatattttttttacttaccacataaatttatattaagtttgtgtgtaatttgtgtacatattattactattattattttttttttttttttatcttctgttaaggtactcaattactactaagtatagcttctccaccaaattatttggtttctaccatcatattcttcttcatcctttttttttttaatttacttgtcattatttacttgtttctatgttattttaaaggaatttcctaaaattgtaattgaaaaaaaataaactgtaaaatcgaaaataaaaattataaaaatgtatatttatatatattttgaatgaataaatattaagattgggtcaaaaatgatactttgtgtaaaaatccttaattttattttacttttggtgatgtgttgctaactacttacctttaccactatgaacaaaataataaaccaaaataaattattgggtaaatattattttggacaatatattttgcaaaagttatcgatttaaccctctgttttattaaatgataaaatggatcatgtatcttttaaaatagtaaaaataggattctgggcttaatttttgacaacttttttttaatataaccaacttaataataattcctaatacgaacagatacaaaaaatgtaa

SEQ ID NO: 319926 - DNA, 1686 bp, Cannabis indica
aaaaattcactaaggtgagactgtctctgttgtttaaagttttatagattttggctaaattgcttaacctgactgcctttttctatcatagaattttatttggtgagaataatattgtaaatctgtagtttgaaggttagatgaggcaaggactttccattaggaaagcttaagtggaatcttgtgtttactcatttgattgaaatgtagacagagaagacagaagatttcagtgaaggacttggattttttaagcagtcattttagctgctgtacaaatgagaggaccttgtaaccccttcactttcccaaattaatgatctttatgtgaacaagaagtttttctcaatgctcatggacaagtattattgtttactttacctctagttttcattacttggtggagagatgtaaatatatgttttctactctgtgcactaaatccaagaatcattatatattgatttgtaagacctatttcacaacaggcgaaagagtatttcgagaaggctgctgagaatgacgaagctggtgggcactataacttgggagtaatgtattttaaagggattggggtaaagagggatgtgaaagctgcttgtcaatacttcctgtatgctgccaatgctggtcaaccgaaggcattctaccagctagcaaagatgtttcatatgggtgttgggctcaagaaggatctcgttatggtaaactcatcattattatttttaatctatctatctaatctccctgtttatttattttacttgctcctacattttcctgatctttctcctaataaaaatgatatattattttcattatatcgcacgcttaaccacttaaccgcttaaccggttcatttcttagttttgctatcatgttttgtggacctgatccgttaggacccatattaggttaggtcagtgaacttttatacagtaagtgtagtgttctttactttgtcaccgagaaattaaagtcgaaacaatgcacgtttaacgtcagactctttatcaagtgtgttctttagcatgcatcgaagtaatgtggaagtcaaagcgagaagaaatagtagctgctagctataatagatgaagatttttctgttgccaagccttttaaaatagcttgctttgatgctatggaactgagatgtatctcaattgatgattgtcccatctagaatgaatgatgattctttttttttttatgactggtatttggggctatgatgtgatagctaatgagacagttttatgtttatacacactataaatttctttagaatggtaatcttgtggctagctaagcttaaaataagatgatatcaattttattcatgatcctatattgtacttgatgcttaaatctttagttgccgtatacatgtttgagaatgactttaaaatagctgagttgttaacatttttaagacaacattgtaaatggatattccattcaattcaaaaagctaaaaaaatttgttccactccttgaaagagctttagaaaaagagatatacaaacattacaataacaattatgtaaaaaaaaaacaatggtttagtctctgccccaaaaacttgtataaataaaactaatatgtactaaacatacttacatcatagataattgggtactgcttcatgaacaacttcaattttttttcaggcaactgcattatata

SEQ ID NO: 319927 - DNA, 1474 bp, Cannabis indica
atatataaatatatatagataaatacatatatacaatatatgttagtgtaatatttatttaatatattatattgcaataacgttataatattttaattttcttgtaataaaaatttcgaacatattcatgggtccacacataatttataaatattatctatactcataaatcatgccatattcactactcatataaataccaattattgttaaaccttataacttatgagctccatatatgtatagtttatttctaataattaatggtagaatatattgatacactacaaactaatttaaattaggtttttgatttcttgaacaagcaactgattaaataaatgtaatctcaaattaataataataataagtgactttgtaccagattatattaaaatataatactattttaatgtattattaagtacttactttctcatattaaattttctttaaaaaatcatttaatataatgacattttaaacgcttttattttaaattttataacttagtcatcacaaaataaataattaaataaattacaacttaattatacaaaaaatatgtctcatttgctttcatgtagcaatattgtgaaaacaatagaaaaataattcttcgtatttttatataaaaaaataataataataaaaaccgtaaaaaaatattaaaaagtttgttgattcctattttttgtaaactttttattatttttggctctgatactatttgtaacattctcgcatcaaatctctattgagattcgccccacagacttatgactcttatgtatgagtatgtcactttaaatttttcctgaaatgacgactggccctataaaccagcacaagtatctccaacgtactttgtcctcactcgcacactttctaaaaaaaattgaggatgtcacctattccaagattactctaaatcaagcacgcttaacttttcagttcttaagtgatgggccaccaaaaaacaagatgcgccttgttaatataaatagtaccaatcaatccatttaagtcttgtgtactgtgtagtctcatacttacacatgacttagaatcatcacacattaactttctccaaacggtgtgggattacacaacttactcggtattttcctatacaaatcacgggactatactagctatcacaggtgcaattctaagttcgggtccaagtctggggtcaaggtccaagttccaggcgggagtccaagtcttgctccggatccaaaatattgatgaaagaaaatacaaatagactataattaacaatttgaaagtgacttttttattgttctttcaaaattttcaaaattttcaaaattacgattctcacatcttaaattaaaaagtaaaagggtaaataccattttggactctgtgttttgtaaaagttaccaattggaccctctattttgttaaatgacaaaatggaccctgtattttccaaatagtacaaata

SEQ ID NO: 319928 - DNA, 996 bp, Cannabis indica
ttcataaaaatcaaaactttaccaaagataaactaattcaatctgaattatcttcatcttcagaaccctttttcaactgcaaaggccccttgattttaccttcattatcactaccaagaagctccaaagctgctttttctaaaaactccttagcagcagtcttaacagatctcttctcacttgattcaaactttctcttattcttattcttcttcttctctttcccaatagctatcatactcctcttctgttcttgactaagatcaggcaaagaatgttgaataaaacgagttgcagcctcaaaattcaaacttgttgaaggtctaattggggctttactcatcccaacaaacctttctaatttgttctgatacaaactcaacctctcaacctctgatttgactggatgctcatctgggtcaactccattacacctcaatttcaaagtgaatagggttgtgatggtttttgctaacaagagcagcgcgtgggcgcgttgcaatggaggcatttgggaaaggacatctgggtctgaggagagagataagaaatcaaagaagttggtttgaacggcttctaggtgagtcaaacttctcttggctgactctgttactgagtgtggtactgctgagatttcacttgtggtaagttgttcttccattgttgtgtgagtgaatctgaattgggtttcgaaggaagaagagaaatctgtctcaaagattgaaacttttccttgttaacggtggagattggaaggtggattgaccgagaagacgatggagattgagagaaagacgactgtgtaagagagaaggggaaatatagaccgaggggagaggaagctttgccctacaaaggtcctactcctaaacaaaaaatacaattaattaataattaaaaaaactctaaaatactattattttttagttttttttaattaataaattgttttttttaaaaaaaaaaaggttatttttttagggtgattctacaatg

SEQ ID NO: 319929 - DNA, 802 bp, Cannabis indica
tttctaagtatagaaaatcaaatttcccttataaaatttgaatcaaattcattattttagcttattttttgaactaaattttgtgtaaattttacaccattcatctaataataatattttaccatgataacaaagtttgtcactatcagtatatctatctagtactgatcatagctcagtgataattatgttggtgacctaacaaatggtcaacttaaaataacgtgtaaaacttaattaaatggtggtttaaataagctaattaatatgctttaattcaatcaattaacaaaaaaaaaaatagtttttaattcattaattaaaaattaaagataatcttatgtgacatttaatggcatgcaaaagtaagtagctcactcttatctttgtgagaagagtttgcagttgcaataaataaatacaagaaaagttttacttttcttgtatttgccctataaccatatgacaaaaggttttcgcaacaaccaaaagtacaagtatcttaatggcaaaaacaagaaagttctggacacacagttatgattatgaattctcaattaatgtacccttcataatacttcaatagtgttataagaggttaaggtgtgaagaactattagagcttctccaaggaagcggcattttatataaatgccgttcctttttgttccaaggaggcaccattcaacacagcattttgaggttaatgctacagtgcacggcatatatgccgtgcactgtagaccacggtatatgttttttttttttttttaaaattaatatttatattaattgatttatt

SEQ ID NO: 319930 - DNA, 1450 bp, Cannabis indica
ttttcactaagcaagggcttgattgtgaagaaagagtttctagcgcttatttgttaattaagagactttgattagtctaattaataaatatattaaatgacaatattatttaatacttaatttttagttattaaataattagaattggcatttaagtggttaaattagaaaattggcgtttttgaggaaatgagatggaaaaatgacaaaatggcaaaattgcaaagaggggcccaatccatatcatggccggccacttatgtagcaatttaccatttacttttcctttaatttaatgccaaatatatataacctaaccctaggtcgtttcctataaataggtactgatggctttagggaaaagatgatgcatttcattccttcaaataaaatttgaaccttcttcctataccctagctgaaacctctcttcctctctcttcatcgcttttaaaccaagcctatagtgaaacagtaagtgcccacacacatcaagatttaggatgttaaataatatacttgttagtaaatctaagatcctgttaaaataattctaacacccaacacatctcatgccgaagagcatcaagtatcttattggtgatgttcgtcttgtatagcttgctaggctagccttcacctaccccttaccggatcaactactattttgatctaaaatctacgtcgaagcagagcaggattggatatttttattttagccaaattagtcaccaatggctgggtgacactaactgtgcagccatgtcaaatgttggcaggtacaccaaaaaatacattgttccatatggtctttgcaagattgggcaccacgaatttcggtatgtgccactcttcagacgttccatccctactttggaaataagggataaagaaaatcacatcatttctttatcagctgagcatagaaatattatctggttgactagtgtggacaattttgaaagtatggcttgtatcctcctgtcttggagctgcaagagtgccaactgtagatggggcctgtcctggagataagaaagttcctggtttggatgatgatgaagtacctttgcctcatattgcacaaaatttttagaagagagagaaggctctccgccggtgcctggccaatggggatccaataagtgatgcttctctccatatcggccctagacaccaagtttctaggaaacctacatgccctatacccgcatctagtggcaagggaaaggttgtggttgaggactctgatagttcctcttccaatgatgaaggtatttgatagttgataacatcaagtttttgttcttgtattgaatgtttatgatcgctttttgagtttgctactttattttgtagatatgtctgttggaaattattttaccaggatctagatttactattaatatgaattctaaaacaatgaaaataaacacatataaagttagaaa

SEQ ID NO: 319931 - DNA, 1079 bp, Cannabis indica
taaatattagctactaaaaaatattattttcacatatatttactaactattttgccaaacaaggtaataggaattcatatgtaattaccactttatatctaaatacaccttgtattttaaaatataatgtaattattaaattgtgtaattaccacccttttaattactttacctaataattacacagttatttccaagcacactcttaaaacaaaattacaagaactaaatatgctgatataaagtcttccaaccaaaaaaaaattgctcatacatccaaagatagtacgcagctaatttatgtgcaactacacattgatcgtctgctgaatatggaataagtaaactccaataaaacttgataaccaactttctaacatcaaatactaataaatcttaaagagagaatccaatgaaatagtttcgtctaattccagcgttgagcaccatcatcctccaaaccatagctttccaactaaagctacaaaataaattgataaaagtaaatgggcacacaaactttgtcaacataattaataaaaagacttgacaatgtattttaaattggaaccaaaaaaaaaaagattgacattgataaaatattataactatttaaagtgttctacatctaaaatagattatttttagggaagtaaagattttaattatgaagtaatttcatagcagtacaattatatattgttttaaacgagaatttagttgttaatagtgatgaaacctatatgaaaaattgggtgtaccaaagaaatagaaatttgaataatacatactactatttcaaattaaaaatgatttaaaaggtaatcaaattaaaaaaaattgtatgtctaatatgatattatttgataaaatttttaattatgatatcatatgtttaaatatacacattctaatttactttcaaaaaattgaaaataacattaagtcgaagcacttctaagtaaaataacattaagtattttgtagacttatgcatattgtaatgagtcctggacttataaaaattatatttattttaaaagttatattatttaagaaagttttaattattcacgttt

SEQ ID NO: 319932 - DNA, 805 bp, Cannabis indica
aaaaacacatttggggaacccccaatactatccaagctgatgcctggagaagctttgtcaatctacccagtagtgttcgaatacgtgattagttcaatactaacccgcgaagactagggtaggcaacatcagtctactacgtaagcaagcgtcttttaaatgctgaaacccgttatccacaaatggaacgactagcatctgcacttgtggttgcttcaaggaagttgcgaccttattttcaagcacacaacattgaggttttgatgaattatcccttgcgacaagttttagccaaaccagaggcgtcaggaaggttactcaagtggtcatagaactgagccggttcgacattaagtacaagccaagatcgacaatcaaaggacaagcccttgcaaatttcattctagagtttccaacgaggtggtaataattacagaagagcgagtcgatcctgatgtaccaacgggcaaaggttggacttttgtatgttgatggggcatccaatagtgtaacaccctaatctatagggatgccacatgtgtgattttataaattagtgtattactaatagaataattaattataaaaaccgtaataatattaaaaacttgactaaataaaatactaaaacggactttataacagcataaaagtgtgtttcggggattcctgttataaaaattttgctaaagaaatatatacgacaaccatttaaacacaaaatcaaaatacatagcagatacaaccagcccaaaacaactcctggcaactcagcacgcaggtcgatgaggtcaatatgtacatt

SEQ ID NO: 319933 - DNA, 1011 bp, Cannabis indica
aaaagattgaataaatttttgaaaagcactactcctaactttttagttaatttctgtatttaaaaatatatgctagaatatttatttttaattttttttcacaataatattctttatactcataacatcatatctataaaattttaaacaatttgaaataatttacagtattaaaaataaacttagaattttttgaacacatggtaaaccaattaaaattatacaatgaataccaatatataaaaataaaattattttaacatataattttaaaaataaaaattaattaaaaatttataatagattatagcactcatcttatttttttttttatgtatttattacttattctaatatttgtttgtaacaagaaacaaacgaaacacgtgataaaagttcttgaaatgaatccagctcaattgatcgtaatccaattaatacaaaaagaatcaccctctttttcgtgtgccatatattcatgactcacatttctaactagtaaaaaaaaaaaaaaaaaaaaaaaaaaaaaaacattccacatttttattaatttgttggggaaaagaattattatacatatataaatttgtgtagttgtatgagtgtgacgaatatatttccctaaattttggaaattttgtccctattatatatatgatgtgcttgtatgacattataatgctttatgtataaatttttttataaaaaaaatagaggaggtagtgctgattattttctcagcttttcgatcattttgacaattttagagaccatgaatcaagtataagagttttatattttagtttactttaattaaattatcggttatcactttaagaatttttaccacataaatagttctacctacaacagctaactttcagagagcaaaaacttttttaattatctccagaaaaattgtggtagcactacaagaaaagctacttttgccggcgcagttgaccaattgcgccggcaaaagttgtcggcattaatgagatgctgaatttg

SEQ ID NO: 319934 - DNA, 1550 bp, Cannabis indica
ttttttaaaattggtaaaaaaaatatgtaattttaaaaggagatgattttgtatggacccctgcactatttgggctctaggcacaggcctagcccacctatgcccaagaccgaactagaacatgtgatagatttttgccctctgaactttgatatgtactatcatacccccctgaacttctaaggtcgttaaaaattcaatgatttttatttaattttaataaagaaagtctaatatgaatgaaaattcaaggagtatgatttgctacacgtcaaagttcgagtgcatgatttggacccttattataaaaataaatggtcccaacgcccaaaaattctgtccacagtaaaagaaaattatttaatttagtatttataaaaatctcaaaaattcatttttcttaaagcccaaatcaactcaaaatcagccctatatattacacacaacattgtgtaattaataatctcttaaaatttgaaaaatgctaattaaaaggtacgtattaaacattgcacaatgatatataattaacctcatttttgtactgtacaatttaattgtgtattaaacaagactatttaggaattgagataatataacattagtcataagataaaatgcatgaggaaagtgtttcgtacgtacgtacttaattataccctccgcacacaaaatagctaaattaattagaagatgactacaactaaatatatatatacttctcaacactttccatatatagtcgtctaatcttgactttgagtttgactatgacttattccaaataagttaattacagtacaatttgtttttacgaactagctaaactagatgactacaagtaaatatatactaattcaataatctaagttcaacttggccactatatcattagaaatttccaatattaattaatgcatgcagtgttattataccaaactaattcatccattatttttctataattagattagatatatatagagagagaaatgttaaaatatatcactaatatctttttccatattatattattcaattatgcattgggtatcatcatataattgaataatgtaataattttaatgaatatatactattaaccaatagaacaccatctttagagggctggtagtaatactcatttacatatatgtcatgataagaattgttataagatacgtactgctagtgtgcatagcaccctcttcgcccagtgtcattatactcttaaataaattaagtatcaagttaatttcatacaacttaattaagaaaaaataaattttaaagaatatcaacttgtaccacatgccctcctatcatatcatgatcagtagtagcttaattcagtctaatcatgaccacgcaggattagatgtttactaattaattaagaattaattgaattcttaattacgatcaaatagccaaaatatcgctattccggtggtctcctttaatcaaatctttttgggctcgtttggaacgtccatattaagtcgtattgtattgtattgtattatattgaattggattatatatcatat

SEQ ID NO: 319935 - DNA, 627 bp, Cannabis indica
aattaatttacaatcatacaaaacctttttagttatccaaccttatgtgaagagaaatgggaaataaatggtaaagccgggataagactaaataagaattttaattcttttgtagttgaaatgagaggatatgataagattctttttttggagaaatattgtagaaatttaattataaaagtacgacatttacggcgtgggcaaggagatacttttgcacttcaaaagtattttatgaaaatgtaaagcaaaaatcctaattgttctatgtgatggatttagatgaaaaaaagtagaaaaaataatatattttggggtgacgcaagaagtaaggatgcatatgaggagtttggtgacacgcaatgagtttttacactacttaccttactaataaatataacatgccatttgctatatttgtagagattaatcatcatggacaatctacattattgggatgtgcgttacaatcgaatgagaatattgaaacatttattttgttatttaaatattggcttgcatgtatgttcaatcatgctccaaatacaataatcacttatcaagatcagacaatgcataaatgtaacgccctaaataattaggcacgctacccaaaatacttatgaa

SEQ ID NO: 319936 - DNA, 1022 bp, Cannabis indica
tgtacagaactatggactctggagccacgtacactgttttaaaagttactgttaggagggtaaagcatgtaaagctcctttccttctcatttgaatcttgtggcatggggagttatttaatttcccccttttgccattttcttggcgagagttgttgttgccatgcttgcctccattatttttaccattggagggctggtcgcctatgttggcaggtgtgctggatagagctgtgggttgtccagcactcaagacctacccagcacctgcctatctcttattttgggcttttcagatagcctcttcaagtttaacaaagccttctgctcgatcaaagaaatcaatcatgttttgagttgagtgtcggcggatgtccatcaaaaactcactcaaaggtagtatgccactcattaaggttttctaccttcattcctccatcagattcttgatcttggtagctttagttatgaatctttggagatagtattttagaggttcctctggtctctgtttgacctcaactaaatcttctagcctataaggcattctttgagaagacgagaaatgtgtgtagaactctcgtatgaaagagttccacaaatcgaagcttctaacagaaattttaaaaaacaactgctgtgcggttttagacaaggtttctagaaagatacggtaatgaatatcacctcaacattttgcaaacccatctagattttaaaatacttgatgtgtgcctagggatcttctttccttatgaacatcctccaagtaggcattttcaacttggtaggcaaaggcaaaacattgatgtcaacaaagaaaggtgaccctcaggtgttgtccacctctaagttggacaattttaggccaagcagaccttgtatcatgttcttgaattgatccagttgtgcttgcactaaagaataaacttcagcttgtgttttcccgggcaagttttgacctgccagccccttggtcggccatccccctactgggttgtaacaccctaactatcttaggcg

SEQ ID NO: 319937 - DNA, 686 bp, Cannabis indica
agagagagagagaaacaatgagagaggaattttttaattaaaggacaatttgggtatcttggaaaattataagcattattttgtacaaattagtttagggtataaattttgatatgagatattttattaagtattgatagtgaaattattctatataaagcacttttgcaacaaagaaataaagcaacactcttttataatttaatttagtatttacaacaaatttaaaagttatctgattgaaataataataataataaagagttcatatagtttttaaaatgtgcttctagtaagataatactttggcgttgctcacatgatcctaattttaagttgattatgaataaaagggttgttgtgtgaaagaaaaattataataaatgatccaaaaacatactactttctatggatggcaattatactcacgagttcgagtatggggcaggtacgggggttaactttcgggggcgagggcgggtataggtttaaagattcatattcgagtcgaaaacagaacaggggcgggagattagatacccgctccaatatgatatttgtatatatttaagttttaaaattataactactacaattaaaataactttatactttatgctttttattgattatactctttttttttactatacacactattccacttaagtttattgttttactaa

SEQ ID NO: 319938 - DNA, 1853 bp, Cannabis indica
acccggtgtttccccttacggatcacgggactactgactgtcacaatatgaatatttcttgtatcaactactcttaaatattaattatctagtaaaggtgacagcttattgttagaatcaaaatgtaataagattagttatttaatagcccttattatatatgactcagtcagcaaatatatattttaaagctaagcttcctttaattattccaccatatacacttgcactatgtatatatatatgtatgtatatatttaatggaatataaagggcattacttttgcttttattatatgagcatattccttgtattttcggtttacagagtaattatagtttaaaattataataaatatcgatctctcatttatttttgaagaattttaaataattttaagtgttcaaaataaaatttgaaacataataaattatacatataaaagaaatattcacacatccaacggtaaattatttaaattttttttaaatagacaaatatacttaatgaaactacaatatagattatcatataaaaaatttaaaatatatataattctcggcaaaattctactgcaagacattatttttattcttattggtaaaaatgattatattttgaggacttagagaaattataactaatatttatatatattattgtacattgttgatataattgttgatatagtagatattttatttgatttgaaaaaaaaataaaataatttatagtgtcaaaaaatattaaaacattcagctacacatgttcaaaaactaaacaacatgcattaattgttaaatctttaaattatatttttgacattataaattattctcaatttttcaaaaccaattaaatgactataattatattattgaccatcatattgaatgttaatttcctaaaatgtcaaacacatagatataaaagtggtgttcccgtatagtattacttagcgatattttttaaaattattatattaaattattaatatataagactagatatttaattacagtaatagtgatataacacctaattattaaaggtgttaaacaccactcataccttttaagatttctcaatatataacatagtgaataggtttagtattatcacaaaaaaaatttgttgtcctcaaattggtgtgtcctacatatcccatcaattattttagtacatatcatttatatctagttaacatataataaatttgttaataaactctaaattaaattaatacatgtaaaataggtatagataatgtgtcttaaaatgggtgtataagaaagattttttttggagacatcagaattttttggtatatcactatctaagaacacgtggcaccatggagattgggacatggataccttagagaatgtgatttgaaaaatataagtataatactctaataaaaggcaaatttaatattataattaagaaaaaagttcccatttaggcttatcactagtatagtagtactagtattataatatatgttatatgttatataactgcgttggccgtaagaaactttacttttttctctaattactttagtattttatgtgtatatatatctccttttatttacattcttcattaataataataaaaagtagttataatataattagggacaagattatggtaggacctaacaaaagttccctaccggtaagaaactttttttgaccattgattttagatcatgtggttattatgatgtaaggtgtatacatttacgatagaactgtttgtatacaattaaattttttttatatattataataatattttattatatatttattttaaaaaaataaaataatattaataataaaaa

SEQ ID NO: 319939 - DNA, 1631 bp, Cannabis indica
ttagtcacaacaaatattgtgactaaaaatacatttagtcacaataaattataatttttgtgactaatacttttatccacgaaccttttagtcacaacataggaattataatttataattagtcataattttttcacttttaatcacaagttttgatgttactaaaagtaaaaaatgaaggaccatttgtattatggtatcgtgttagagttctcaaactccaattatcataatcttaaaagctagaaatctattacgagatggatgtataaaatttgtagtagtggtattaggtaccacttagcccgagatagtttgcctaaggatattaaagtggtactatagttcttggatgaattccaaaagaacttccaagatttccaccccagtgagaggatggaccttgtcattgaatcagtatctagagtagagccggcttttagggctccccataaagtagctccaacagagtttaagtaattaaagttacaatttatagggatgtttgacctaggattaatccgacctagtgtgtcaccttgggaaatcccagtgttgtttatataaaggaaagatggttcgtttcatatgattattgactaccaagaagtaaacaagttaacaattaaaaacaagtactcttggcctaggatcaagattttgttcaattaactttaaggaaaagataatcctctctaagattgattttcgctagggttatccttagttaagaatctaagaggaggacctcttaaggactacttatcatattaggtatggtcattgtaaatctctggttatgtctttaaactaattaatgctccgacaactagatttggtgaacaggatattcaaggattttgaacttccagatgcccctcactttgtatgcaagctccacaaagctttatatgggctcaaacaagttccacgagcttggtttgaaaagcttcatcactgtcttgaattacttggcttcatctcttctaagtctaatcatagcctcttcatcaagcacacatcttcttctattacattgatcttagtgtatgttgatgatatcatcatcacgggtagtgattctactctcattactactttaatcagggatttacattctcaattttctctcaaacaccttggccagctacactatttccttgtaatcgaagtgcaacctactgctggcctgcacctatctcagggtagatacatacacgatctattggctagagcacaaatggaaggatccaaacctatgcctacacctatgataagtggattgaaattatctgctcatgagggagatcctgtccctgatccacaactatattgttctatagttggagcacttcaatatcttactatcacacaccctgaaatatcctacaatgtgaataaagtgtgtcaattcatggcacacccactcaacacacattggaacgctgttaaaaggatattacgatatttaagtggcactgtgtctcgtggattgacctttaaaccaatttcagatcttgaaatcacaacatttagtgatgctgattgggccagtgacccagacgatagaagctacacatcaggcttttccattttcttcggttcaaatttgattgcctggcaatgtaaaa

SEQ ID NO: 319940 - DNA, 849 bp, Cannabis indica
aaatgggaggcccttgagcgagaagtatgggatgttcgaacagtacgagctgacacctctgcatgccatgtgatgaattggccacctactagatcaacggtcagatctcttctagcaaaaattagccctaaattcacgtgaatgaacagaccgcctataaatacccctaaatttcacgagataggggcaacacttaggagtctaaaaaccattatttactaacaaaaaactctaccaaaattcctattgagcttcgtcttcttcaagaggaacaagaggaattcagagtccaagtccataatataactacttgtaatattcatcatttcccaataaggctaataaaataggctcacaaaataaggatagttaatacctgaaccacataaaaagccttacattaattatttattattttatttctttcttaagctctaaatatttagttttcaaaaatctcgataaacgtatatatattagggttagatgtgtaatgggtcgatcgagtaatatattacagtttcttttatttaagttttgtttgtgttggcctctatttgatgctactttgcggcagtttccaactgacacaaaatctacatatgtcatttttcaatcgacgtaatgtagcgacagatagaaactaatgaaaaatttagaactaatctttttgtgtcaatgtttactgttgattgatgtgttgaccaaagcaaaaattcaattttttagtagtgcgttgacaatttctcactatcaacagtagtgatggtgaagcatttcgccttgtggtggttgtggtgatggtttcgctgtggtggtagttgtttcggggagagagagagagagaga

SEQ ID NO: 319941 - DNA, 1386 bp, Cannabis indica
cacacttcaattagcagatgctttcaccaagccattgtcctctactgttctcactactcacatcaacaagatgtttgtctatgatctataccgtccatcttgaggggggggggggggcctaacaagtttactttgacttctctctagatggactgttaagggtagttaattctgttaagtgtaagtgtaagtcggtttggataagttagttaattttgtttcttaggttctttcctttcttttagttaagttggttatgctcctttaaccaactctactgtaatataaatagttgtattaacttcctttgtatcaaatacaattacttttctgcttttcattcaattccgcaataattattataaaatattatttactatttggaattgtgttgtgaatacatatatataggttgaaagagcagtggggaatggaattatcatccactatagcaactctctttcccaactcatttagcattattgcaacacctttttgattgtcgagaagaaaagaataaggtgtgtagtgagattttgagagaatctttaaccaaaaacactaactatatataaaaatataataaatgcaaaacttaccaaccagctaccgagtagagtagaggtcatatatatactacgatcaattaattggtctcaacatatataatagccgtaccacgtacttaattagccacttcaatacacattataaataaataatgatcatatatattgaagaaagttaatgtataaaataaataaactcaaagaaaaaagaaaaagataactattataaattataatagaaattgaaattggaagtgataaataatggtgtgtggtggtcgtgggagactgacatgagtctattatttgatttagattagaaccttagagtcgatcatcactaataatatatgccattgaatcattatagtgtaccttagcttcctcaccaagctaaaatattaattcaaacccccttttcccaaaatcttctttatttcccaaaatatatatcattctttattttgcaacaaaaacatagaagaatagaaaaccatatatagccctacccctagctagttatacttccagctgcgattcttataaggttttagttggaggccattcatatataaatacatttatatatacatatgtgggggctataggtccctaatattataattaaagggcattgctctatggcaatggatcattcaattaacaaggcccaagggggaccaatttaacatatatgaaaatatagttattatattttaagaaaactatcaacttattaattacatagggaaatttgattttctatacttacatatacctaatattttattcctaaactaatacatatcaccattga

SEQ ID NO: 319942 - DNA, 1105 bp, Cannabis indica
gtcattaaaaattaaaaacaaaagtgttaccaaacggcacctaaattatttatgaattttttatatatatttctttttattaatttaaataaaacaaactaagaaaaaaacccaaacccacatgtttataggaccttgctctgattttattttcttaggtattgaagaaattctccgcacgttgtgatttggaaaagggttcaacgatgacggtatccaccatgtgggatttgccttgttggcgtcgattttcatggcaaaatttaagaaaaataaggagagtttgcggcgatctttttctcagcaaaaaaattatggccatatcttatattaaagataaaattatagcagggaatgatccaaatttacccctttcttggccctgtcctggatgggcatgatattatccgatacccaatctgatgggcccgatacccccaataccccgtccgatgtaggctcgatagtgatgacttttttttttcattttttattcgatatacgtccgattgtggcccaattgttggcacgatagttcatgcattttttgtgttttgtccgatattggttcaataaggccgaatagtgtgcagtagaatctctcttgaatttttttgtattttttttttcgaaattcaagaccgccatgccttataattctagtgtcagagtattacactgaccgtgtcacttggcgtggtggaagttattactatctaaagattaaggcaaaatttgacgaattctaattgtgggataaggtgaaggaatccccttttaaacaattcgttgagaggaggccgctaaatttttctggggcattgatccatcaattattcacgcacaagatcaactctgagaagccagatgaggtacacttttattttgcaaagaagagatgtagattcagctgggtcgagtttgcattagtgacggggttgaacatgttacccgggcctacggaacaagagattgaagagaaaggaaattcggattggttgattattgagtactttaacagtgattcatccatcagctttggccaaccgtgcaaagtctacaagttggggatgaccttgtttgttatgggcgtcctcactggtaa

SEQ ID NO: 319943 - DNA, 1874 bp, Cannabis indica
agtaaaagaccttttcacatgtgtgtggtgtacgtgtagctaagctatagctagaacaacataatatatatatataggcagggccggcccaagcattgagcagcttgggccattgcacaaggccccaaaattaaaaaggcccatttttttatatccttttatatataatatatatttgttaataatataaatataataaatgtattaaagactaccactaacggaagaaaaaaaaaagttgttaaattaaaaagtaaactgagtcaattatggttagttttagcctaattttatgggttttttttttttttgaaaattttaatttgttggattttaaaatttccaaccgttacacacatcatttatttctgtttttttttttttctttgaattgggattatgaaattattatatatagttgtggagattattttaattttacacactttttatatattttattatttttgctcatgatatatttgctctcatatttcattactctttctccttcaaattatcaattggtttgcaatttgcatagaagaggccaagaagaaatatatatatatatatacatatatataacaggtatacatatacattttttttaattattattttgattaattgttgttaatttctatatatatatgcaatagtttaggtttttattttatttttaaacttgtttttaattttaataaaaaaaaagaaattttttaattttaaaataattaattttttatttttttaaatatttatttacgtggaacaataaaattgtgccacgtgtacactgtgtacacgtagacattacaccatggcagttaacaaccaaaaatggacggaaagggctaagtgctaacagaacttgggtctaggaggttttaccaccaaaattttagaattgggggttagttgcaaaaacctggccacttaaggaggttatgccgcaaattacccaacatatatatatatatatatatgaagtcataccaagagctccctagatccaattgataaaattggcagaagggtcatcaaaaacaattgataggccctttgataaaaaagaacatattcttccgatccttatgagatgattccaagttaataatgagacatgttgctttttaggacgtagatgataatgtccttgctcgctttccatcaaagagtagaagtgaagaatgtcatatacctcctgtttattccccgctttatctcctaggactatcacccccagaaggataacccaaatgttaggaagaagctgagttagagtaatcacgttgtgcaaaagaaattctttcattagttaaagaatggatagccttaagttgacattctgctcaaaccaataagaatacacacaaacccattaaccttgaggagaatcaactttcttgttagctccaggaaccctaacttccactcttccaagaatctgcaagtagataccagagaatctaattttgctcaggttaggattaaagagcagcttaatttatgatccaaaaaggatttactcagggtaggttatttcctctttaattttctttgtggaggaactgcaactgtagccccttctgaggaagtaccatcaccagaatgggagggagggattaaagatatgcttgttgaggattattttactaggatctagatactaccatgtatgttgtttgacatcctaaatatgaatttctaaaacaatagaatttaaacacatataaatgttgaccaaaagtcaatcactcacttattttgatgataaataaatatttgattattatttgttactaatcttttcttgaccattttgcaagcaaattacacaaagtatcaatatttgctcagtaaagtcaaac

SEQ ID NO: 319944 - DNA, 585 bp, Cannabis indica
tacttagtagtaataaaaatatctctcttcaattttttctattctatatacatttacattgaaaatcatttctttattttctttgttagaatcaactttaggaaacataaataaattttcttcagaaattctacaattaagaaggttaacttgacacaataactaaaaacaatatttttttattaatttttgaacacaaatagatgtatttagcattattctaaaaaaaacacacactacgaaagaaaaattaagaacaaccaaaagttttactaaatgtctatataatagactcctaaagaatcattttggtaaatttttatatattatgacattgaagagaatttcttagtttcttttttttccataactatatacgttgtaattatttaagactacttataaattttcaaataatttataatgctgaaaaataaaatttaaacaattacgtataacaaaatatgtaaattttacggtattgtaaactactcaaaatattttaaaattttacatgtagtcttaaataactataatatatataatcatattaaaaaaaaaaaaaaaaaaaaaaaaaaaaaaact

SEQ ID NO: 319945 - DNA, 968 bp, Cannabis indica
acgtttgtttaatattttaattttttaaattttttatacaataaaaagtaaaagtaagtatttattagtttttaaatataaaaatataatttataatttattttattttttaatttttaaacaacttaaaaataaaagtatattttataacttttgtttttatttattaattttattcaagtcagatctagattcgagagcgtgttccgagtgcaggattaggactgagaccggagttcatcgtacccaaaatctaaagttggggtacaaattaccaaaatatagattaagaaaaaaaaaaagactatttaagtaaaattttaaaagttaaattttttttttcaaaaattttaaaaattttaaattaaaaaattaaaagtgaacagttttataaaacatattttaaaaaaaaattaattataaaaataaaaaattgattaaaaagtattatcaaacgtattattaaaaactattatacaaaattaaaattactttttatttcagttataatctacaaacaaaatttatctaacactacaaatttattgactttcatagtcataaattttcaaaatgttttaattttatttacatccattttttctatgtactaagttgacctcaaaaagtgatcaatcgacagcgggtcgtatgaatctaatatttgccatgtgtttacacaaataagaatgaaaagcattaaacaatagatttgttatagaggttcagcccccttgtgatagcgggtaatgacctactacccttttagttgtaattttgagagaaattgtaatgactgcatgttaaattatgaattagtacaagcaattagcattaattactaatattttaataattatatatattattttatattattgtaggtcccatttttataaataggcattagagttataatttttcaattccggagattttattaaattctaagggtattatttatgcta

SEQ ID NO: 319946 - DNA, 902 bp, Cannabis indica
attttattatataatttaaaaaaatttaaacatctgccgcgaaatagaaacaagaattcaattgattggtacttagctacagtcctcgtgagaacgatctcacctgagtattacttgttaaagcgatacatatacctattagagatatatataataattataggatatactaacacaaatacaatgaaatgataaaaagttggcatttacatattcaacaaatatacaatatactatatatatatatattaaaagtaggtcccacaattataataaaataacaatattataattatattataattttattatacttatttatattaaattaatatttgtattacatcattctttttttttctaaaaatttataattactatacttattgaattacaccattcttaaatattaaactaatatttgttttacactattctttttttccaataaaaagttacaagtaaatattaattttaataatattaaattgagtccctaacgccgctcacattttttagcttaattatttgattcatattttctaaaatatttataaaattaaaataaataattactattttactaatgcaaaattaattttctgaatatttttatcttgcatcatccatatccttgacaatttatatagtagcgattctgggaccatgaatttataatacaaagctccaataaattaaattatatattgaatctcatcaattaaataattctatttattaatttcatgattactcaactaaaaatatgtaattaaactcttagtaattatagacttatattattgagtttaactaaattgtctattgatatagttaatgctagtaattaacctccatttattggttcataattagttttggtcaaattactattttaccct

SEQ ID NO: 319947 - DNA, 1413 bp, Cannabis indica
ctttaatgttatattaacatattcgaataactttctaattattatcattatcaacaaatgcctgattctactaaagtaaataaattttgggcatcgattatgaatgacaactaactaaattaggatttttcagatagttgtgtatggaatagaatttatatattattagttttttttaacgagcttatattttggtagttttattgaatctaaatgtagttgaagatcgtttattcttgtttaaagagcatgatggtttttattcggtgcatagtatatacaagttgatacaacttagaaataaaattggaatgcaattgatttttttgggttttagcacaagctttagaatttgaaagtactattgaaagttctcaattcggtatgacgggctaattcaggattgtttttccttgtctaaagagtattatagtttctactcgatatgtagtgcatacaagttcatacaagctcagaaaaaaaattggactacagttgattcttttgggtcctggcacaagctttagaatttgaaggtaccaccaaaagctctcaatttagtatggcagactgctttaaattgtttgcccatcttgcctcaattaagtagtaagagggtcccagttcaaatcatgtgtccagtttatcaaagaagtgaggaaactatagttcatgcgcttattcctattcatttgctgctcaatgctgacagaggcttttggttagggttaggtcgattgttgttgttgatttttacaattgatttggttaaattttgcaaaggtgcagtaagaataagtgtggagaggctattatgttatggaaggcttgaaatgatttggtttggaaccaaaagtatgctacagtagatggtgttcttatctcatctataagttgtctcttgtgcaatagaagttagcccaaaatagaggtttagaggcttcttttttcatttttgaagctagtgatatagagttgaattttaggttaagctccaggagaatacaattaaggtaactgttgatactgctagtttttgtgatcgagttgcgtttggttatggcaaaatcgctcgagactctcaaaaaactcaactatgacagaaagttgagttatagtcacattttagtagcagatgaagctatttgaaatttattacctatattttcttcttctaaggttaaaagattgtcttaaattttttacatttctaaataatattttcttattttttattaaacaatctgctaataagattatttataattttactagagcatcttgtttttttttttaaattaagagtttaagatattcatactttatcttttagttaatttgacaaattaataaaaaaaaaaaaaaaataatattatttaaaaaaatatatattaatataaccataaataatgg

SEQ ID NO: 319948 - DNA, 523 bp, Cannabis indica
acttcaaacaaattgaaattaaaccctttaacccttttgccaaccgcaacttcctaaccatacttatgttacgttcgcaataagctagattagtctttctccttctagagaatcggaattccaaaacttgtggcattttgaaatcaactcatctatcgattctttgaatagtttcattactgtcttttatgaggtttattgaaattgacacattcgtatgtcgaataaatggattctaagaaaaggaaaggtagagagaaagcaaagagtaatcgattctttgaagttcttgaaattggccctcagttttattgctatatttcttgtggaatgtttaaattgattcatattgaaatcaattccattcctatctttggagttggtaagtttttaatatacatgagatattataaatggtgtagaaacagagagaagcgtcaaggtgggttgcacatattgcttagatcttatttacataatatcatttttatttactattttcttaaatctgatctgatgcttt

SEQ ID NO: 319949 - DNA, 1163 bp, Cannabis indica
aaagctgaaaaaaatcataggaagcccctatggagtcacttaattatttcaaaatacccaattccatatggtcccatggcctcggttatttcataataatagactccatagggaccctatggagtcggttatttcataataatcgacgctatagggtccctatgtcattgaatgcttttaacccctacagcattacctagaagaacatcagtagcaaattttgccaaaattatattaacactgaaaggccttaaaaattgcctctaaagcccacttttgtagtagtggtgtggtccctttgtccctatccttgcatatttcccataaattataaaatataaaatattattaaaaaatatcaataataaactgttaaatgataaaacttcacatttatttttgtctagtatcttgaattataccagattaacgttataataataaaatgttttaaaaaagagtaatttgcggtataaatacttaagtttaattttcagttgcaaataaatacttaaatttaatttttggcagtattaatacttaagttatatttttagaactctgtagttacataatcgttaaatgttaagtcattatattcacgtgtcatttttttattggtatatttgaagtaatttttttttaagtaataaaaatttaatgacttggaccattcaggaattggcacgtaataatttacttaaccaggtacctatagaagttttaaaattataacttaagtattattatggtcaaaaaataaacttaggtatttatttacaattaaaaattaaactatattacaaattattttattaaaaaaataagtaaaatgtaactaagaatatttgtaattatatttttatagttcacgaaaaattttcaccaaaacaaaatttagatacaactttataaaatcatagttgggagaacaaatcatattgattaattatatattatatatgaactattattatatttataatatgaaaatgaaaagggtccacagtggtggaagctttctgttttcccggggactggtttttttgttcactgacttaatgctttcatatgctaataatatatatatagggcaagactatggtaggacctaacaaaagttccctaccggtagggtatttttttaaaccattgattttaga

SEQ ID NO: 319950 - DNA, 667 bp, Cannabis indica
atatgttactaatagtgttatttatataaatatacatatatatctacattctaatttcaatgtatttcatatatcaaaatatttttttcttaataaataaataatataaatattttgttaatataatatcaagtgaatttttttatttattaattttgttgctgcaactcaattgaaaatttaaatatctttctttttaaatagagaaattaattataatctttttaagtttaaacaataattaatataataataataaaaaaaagagtattgctattaggcactttatgctacccaacactattttttttttattatttattaaattaaaaaatgcaagacatgatattaatttataccaatatagcaatgttccttaacttttctcatataaaaattactcattgtcaataagaatctctcctctattgccaacgcttctcttataaaagaaaaataaaaataaaaaaaaattaagaaatagtgttttcattttatttttaatttataacttttctctaaaattattttgggtaaatatgattttggaccccgtgttttgtaaaaattatcaattagactctctgttttgttaaatgacaaaatggaccctgtattttttaaaatggtacaaataggaccctgaattaattttttgtcaaaataa

SEQ ID NO: 319951 - DNA, 605 bp, Cannabis indica
tttttatattatgtttttattttctcataaaattgaagtgatcgatttaaattaaactgcttatagtcgatccaattattgtccatgacttcatatcagaaatctttagttttctcatgcctttaatgttttgctgttttattttatgatcacaaattgccaaagacttgaaacaattattaaagaggaaaagagaacacatggtaacagaataaacccaatttgccgaagcaaataattaaatgataatccaagagactgaatcacattttgttttgatttttttttttgcattaaatagatatttcgtattaaaatagttaattcaaccgaacttatcactttaatttttcttctgattcctttccctagctatgtcaattcttggaaaattcaaccccaaattatattatctgtttggtggcactgttcatggcttggattacctacatatataggtgcctcatatatatatatatatatatatatatctattctatataaagtgtgcctatataactaaatacttggtttatgagaaattatgagtgtacttttatatatctattctatataaagtgtgcctatataactgaattcttggt

SEQ ID NO: 319952 - DNA, 508 bp, Cannabis indica
ggaaacttaatcacattaaacattatataatgcttccatatatagtctacaatatgtatatatataatgacttaattgtgtgttgtttcaaagattatttgggcggctatatatgacagtaacatctctctttattattattatgaattaataattaataatgtatatatatatatatatggaagaagttagtttaaaataatatatatgtaggttacaagatcttttagcagttttgtaagttaataatgtatgaaattatagtacttactcttgcatgtgtatatataatataatatatatatattttatatatgcatatgattaacaataatgtcaggggggatatgcatgtgaatcgtatctaaactcacatgttcttacttaatataattaattaatcatattatatgtaaaaacatttatacatttgtatatatatttatttggggtttttctttggaattctttttcctatcgatcgaatatgtttgtttttttttttttt

SEQ ID NO: 319953 - DNA, 1706 bp, Cannabis indica
gacaaaagagctatgctgatccaaagtgtagagatattaaattccaagttggcaatttcatctttctttaggtgtttccaatgaagggaactcagaaattggaaagaaaggaaagtttaagtctcatatttatcggtctgtttgagtttctgaaaaggggaggttaggtagcttattagctagccatactccctgccttacctgcagttcacaacttgtatttcaatgtatcagaaatatgaggcagatacgattcatataccgagttacgaaattatgaaacttcaaatagacttgtcatatgaagaataatcgattcaggttttgaaataagaaaataaaaagtactgtgaaaaagactatatcgttagctaaagcgttatgggtgaacaacaagattaaacgcgacttgggaattaaagtcgcagttgcgggaacggtatcctaagttgtttagacaaattttgaggacgaaatttttataaggagggaatagttgtaatatcctataaaattattatgataattaatcgggcatattttattaaatatgtgattgtattcatattggagtaagattatgatcttacttaagctaattgtatgataattagtgaaaatttaataagtggttaataagacataatttattaattatggagattttatcggataatgtagaaatagtaaacattatttatgtgataaaatatttttaggtttggcgaccgtggaaactcgacggagtggtcgaagatgtcatgacgatataagatgaactatttggaatcagaattataccagagtacttcagaatttcaagttgtcagtttgacagattaattagaatgaccaaaatactcatagggtggattttaggctttaaggttatataaggggcaatttagtcttttcctagggatgggattttgtctttatgtgacttatttgggctgaaaaggggtaaatataatttagattatatgcctaagtattaatctttttggaagaaacctagaaaactaaagacaattgcataacaccattactctccttcttctcctccttcgaaacctagaaaaccagctgctgcaagggatttttctttgagttttagctgagttaatcaaggatgtatatcttctaagctttaaggtaattttccccttcttttcctttgattttctagagttgtaggttaggttttgattagagattctagtgaattttgggctgtgaagttagtctaggatcaaagcttgttataggtttaattttagtgctgtgtaggttctagttggatgaacttcctggttgattggtttggaagtaagaactttagtttatgagctcaattttgtttctaacatggtgaattgggtgttgtagtgaatttctatgaattgatgatttaaatgtattgtttttatggtattaaactgttctggagcttttggataggtgtggtggagcttggattggatttgggggaagaaaacccaaaatttcttccctgccagaactggtcgaccggtttgttctagtataacaaaattggtcgaccggttgccctctagaagaaatttttgggttttcctcagaatcgattatggctcggggtggtacccagcatataatttaggttatttgggtgttgtatggcttattttggagttattagaagttatgattgttgggttttatgc

SEQ ID NO: 319954 - DNA, 2226 bp, Cannabis indica
gtgatgatgttgggtggtatgtggatacaggtgcaactaatcatatagcacactcaattaaaaatcttgaatctgtcatcccctattctagtcatgaagctgttgttgtggctaatggtaagaaattagttatttctaacattagtacaactactcttccctcaaattcttattctttaaatctaaattcagtcttacaaattcctaccataactaaatacttggttagtgtctccaaacttactaatgataagcatattttcttagaatttcataaaatgtgttgttttgttaaggacaagaaaacaggggcagtcctgcttaaagggaaaatcaaagatggtctctatctcttaggagatgatagcttgagtctttgcaacaaagctttacaggtgcatcttgcaacttcaggtagtcattccaagtttaggttgtgtcattctaagttctgtaatcaatgttgtactcaggttgattcttcaacctttacttgtactgaacaaaataataaaaagccctctattgcctattctgatgtctttaattctattgttttgctttcaccaactgttaacgacataaatgcttggcatacaaaacttggtcccctgcccctcacactctaagcaaaattttaactaaagctaatatatcatgttcccttaaaattctaaattttgcaaaagcttgttaattaggcaaaagtcataggctgccatttccattgtctcaatctcaagctaatcaaccacttgcacttgtgacactgatttatggggtcctttccatattctatcaaaagaaaactacaaatattacattgtctttgtagatgattatagtaggttttcttggatctttccacccactttaaaatctcaagcctttgaaacatttatcaagctcaaaagtctcgtagaaaaatagtttaatttaccaatcaaagctgttcaagctgatggaggaggagactatagaccttctgaaggatttctagctgaccaaggtattttgtttaaacaaccttgccctcatactcatgaataaaatggtagagttaaaagaaaacatagacaaataattgaaactggttaactctcttagctcaagctggtcttgatctctcttattggtggtttgcctttcagtgtgctactcactcaattaatagaatgcttacacctgtgcttggcaatcttagtccatttgagttttgtttaatgaaattctagattatcatgttcttaaaccatttggttgtgcttgttatccacatttaaggccctatcatcatcataagcttgaatatagatctgaagagtatttgttccttgcatattctccaaaacacaaaggctatttgtgtgaaaatgcagttggaagaattttcatagccaggaatgttgtttttgatgagctatcattccctgcttctaaggtttcagcttcttcatccaaggtaatatctaaaaccacaacttgtcctactatgcatttctttactagttttcagcatgcctcacctgagtttgttgttgagccatttggtccaacatcagttgctcctgctataatttctagtgcaaatgaatctgctcataacacacctattgctgcaactaagagagctgattctgctattgttgatgttccagaagcaccaattacttcagctgcttcagcaacacatgttacaccgaaaaatgaaagagcaacttctgatgttgcagatgctccagaatcactttgctgcagctacaccagttacactaggtgataacttggatccagatattgcaacatctcacttatctgctacggctgttaaaaaaattttacaaattacccaacccgaataaacgacctaaaccaaactgaataaactgacaaaatacaacccgaataactttacagaaaattcaaactgcccaatgaatatattgggcggttgaatattctaacccgcccaaataacccgaacaaactgaataaacaaatttacatattttttactaaaattatctataatataatatataaattacgtttaattgttaaactattttacatttaaaatttgtattttatagtatttaatttgaaatttaaaatttaaaattgataattttgattgtatttgaatattgaagttgaaatttaaaatttacatataagtatatttttttttattctatttttaaaaaaaatgttgtttaatacttt

SEQ ID NO: 319955 - DNA, 1000 bp, Cannabis indica
ctattaaagacagtagcacaagcctttcctagctatgctatgtccgtctttctcttgcccttagaaacttggaaaacaagcgtggaggcttttaacagctcaatcctcgttggttacaaagatctataaggctcgatatttccccaatgataattttctcaatgcaaatgttgggaacaacccaagttttatatggaagagcatcattgaaactaaggacatcatcaaggcaggtgctaggattcgaattggtactggtgcaatcactaatatattgacagatccttggttacctgatctacagcagccgtatgtgacttcttttcatccaggtctggaagggaaaaccgtggccagtctgatgcaaattaaccatcgaagttgggatgtggacgtgctatccgatctgtttaatgagcgtgataaagatctgattgtaggcatacctctttctcaacatgaagcacctgactgctggttttggaatagagaagctgctggtttctactctgttaaaagctcttaccgacttcttcaaggtgaggaaagtggtgctcaaaccagtgacaatttctggaaaagtttttggcaaataaaagtacctcccaaggtccttcattttggttggagagccatttctggctgtcttccaactacaactcaattgcagaccaagcatgttaacgtacccattttgtgcaaattctgcaattcggagagggagaccattgcccatgtgttaattgattgcaactttgctagatcttgctggaacagatcagctattagttgcatttcaggcaatgtgacagatttcaagaactggtttgttaatgttactgctgctacgaataacagtgtggctgctgaagttttgatggttgcttggcagatttggaatgcaagaaacgacgttttgtggaaacaaaagataagttcagctgcgagtgtagtcctttcagcaagatcgaatctaatcaatggttatgtgctcaacaaa

SEQ ID NO: 319956 - DNA, 2184 bp, Cannabis indica
attacaaattaaaaaccgatccaatccaattagtaattgaattggattggattggatttttgaggtctaattggattggatcggatgatgatttttctaaatccaattactaattggattggatcggatgagaaaaaaaggttaaattggatcagatgcccacccctaatcatgtccattgcttttacttttttttttttctatcaaatcagagatatgttaaaagttctatttcgttggtgtcactagtgtgtacgtattttatttacaaaattcttttccattagattctcactttatggccacacacccaaacatgaatatatcaatatcaatgacagcaaagactataatgtatgctctaggacttaaatcacctcaaaacttagattaaatgcttatattaagactaaagaccataccttttttcaatagatcatcctgcttttgtagttgatgctttaataattggcaacgatccattttaattagtctgagaggcactctctcccaaattaagtcccacattaattctttatgataatgacacaacagtacagattttgcccttttctctttccataatcatattgtcacataaatattgttatgtgattttttcgactgacaactcactcaactttatatattgttggatatagatcatggaagctaccacgtgaggaatctcttgaattgtaatgtgattttctcaacttttagtcgatttctctattatattttaaggttttgacacaatattatattgagtcactacttatgagttcagctactggcaactggcctatatatgaacttggcctgcactgattcaagattttgtaattttacttatatatacatatttatataatattgtgatgaagatagtacagggcattgctagcaagttgcaaatttagtgccaaagagaaatgtcattcaatttgaaaacagctgagctgacatatattagtatattttgttctctgtcacattctttataagggttattaattacagaaaaatgttaaaggtacagtgcctaatacattactatgcaactaagtatcgtgtcttacataattaaatgtattagtttctgtggaatatcgttaactaatcgtaaaacattacttttaggtggtgttaaacgtcactagtaccttataacaatactcatatttaaagtgcattactattagacatcttaaagtgtccaacaccatattaatataatacgttataagtagttaataattttgctatatattccttagagaaatgttagaaagctacagacagcactagtggcatctagcactttttatgtgttataattgctattggtctaattaagtatcgagtctcatatagtttaatataataacttttagaaagtattactagccaatcgcaaagcgacatatctagaagtgttagacaccactaattcttaataacaatgctctattttttacttaatcaaaatatatggaccttttatataataaattgtatcatatatcattaccttcatttctcatgtatttaatgatgtgtaagtacttcaatcaatgagacttttaaaaaatattatcatcttgatacatgtaatataacatataatactctttcgggtaaatcctattttaaactctgtattttgtaaaagttatcaattggatcctatatattgttaaacgacaaaataaaccctataatattttctaaaatagtaaaaataggactctgagctcaatttttaacaattttatcttttaatatacaaattttaaaacaatttttaacacgaacggatacagaaaatataatcagttttgtcataacatctctagatcgaattattattaagttttattttgacaaaaaaaaaaaatcagtttagagtcctatttgtacaattttgaaaaatacaggatctattttatcatttaatataacagaaggtccaattagtaacttttgcaaaacacatagtctaaattagctagtatttactctactctttttatataaataaataagacttttttttgagaaaaaataaataagactttatgtaaagtattcgaatttggaaaggttttcttttaggagatctctttcttgaatattaatagggctttcttttatgtatatactaaaataataaaaatatta

SEQ ID NO: 319957 - DNA, 945 bp, Cannabis indica
acttctgtttctttattgatgttgaataaaatatattacattaaaatggagttttatttagggcataaaacctaacagcttaggccggctaactgaaagagacttgtaataaagtttgtaaatatttttttgggatcccaactgttgtaaagtttaaattattacaagttttattttcattccctttattgcaaaagtttaaattctgcgctattttgattagtaatcccgtttaggggattagagtttcgtaaataacttgggtagcatgtctaattatttagggcgttacatatacatttattacacataatattaatttattatatttagaaaaatgtactctataacaaaattcattttcataaaaaataatgaaattcacattaataacaatattgtttttgtttttaaattttacacaaaatatctaaaattgtttttatttttttgtcgatttttttttttgcaattttttttacttgtattaaggtgaaaaagaattttctgttttgagaataaattcttgttatacgtgtaaaagaaaatttaaatatatatgtatatatatattaaaaacaatttataaaaaattatttcttaattttttttataatatagtatgtacttataattttggataattttttataaagtgcaaataaaattttccaaaaaataataaaacgaaaatgactataatagaaattaaaactgttaataacattcaaaaaggcagctaagtgtaagatttgataaaaggaaatgatccaaacaaaaaattaacgaaattcttactataaaatgaaattttaatatatatatatactagtaaaaaactacgtgcgacgcacgtataataaattttatgctagttgttttctatgttatttataagtgatataattaaaaaattaaagaaaaaatattatttgttattaggtg

SEQ ID NO: 319958 - DNA, 1243 bp, Cannabis indica
gtactatttgctctcgaaatcaaagtttcgggctttggtttacttttggacccccttctcactcgtggctcctcacgtgtgtttataattcctccttatttccatgactaaaaagaaattttggactgagatcatggaaggtttggggatatatttgggtggccctttggttaatttttggccgacactaattttgtgttttaatgagtcagggagagaaggttctaaaggaaggaccatttccaattttcaaccctatcatttcgagcttggtgaattctcgagatctacttaatttgccaatccaaggagacaagttaacgtgtgataatcacaagtctggcaatgcacatgtaaagtcagcactcgatagggggcttattaataagtgttggaacttgttattcctgaaagcagtccttcgctcttttagactagtaactctgatcacaggcctatttgtttatattttggtgggattgaagctaaattcaaaaggggcttcaaatttaaagagcaagagaatgctcaatactagtccagcccagacgacacctttaaatttgagtttaaaatgcacatttatatttaaatttatttgtgattttgatgctaaataatttatatatgaattttgagcaagttgaagaaaattgatttttgaatttgcgaatatctttgtaaagaataatgatatttacatataatttacacataaatttaacatacttatgtgacaagtaattttagataatcaatttaatttaagataagttacatattaaaaataacttgtcacatggatgtacattaaatttatataatttaggagtacatatatcattactcagtcataaatattgtattagctttatatgaatttcgtgatatgtatacgcataatttacacataaatttaatatacttacctgaaagacaagtaattttaatcacttatttttttatttaaaataagtctcacttaactttaacttgttacatagatgtatatcaaatttatataatttatgagtacatatatcatttcataaatgttgtatttgtttgataatgggtttcgtccaaatctgtataaaaccaaatcaaactagtagttccaaatgaaactatcattaatcactagtaggtgacttcaatacatatttttttaactacaataatactactaattatattttaaaatattaactttaataatcttaatatatcaattttttttttt

SEQ ID NO: 319959 - DNA, 598 bp, Cannabis indica
tgacgtcgatttctctatttttattctatctcgccagaattaatgattgttttcgggtgttctcgtattgctggggtggttctgttcgtgagtgtggaagatagaagcctggtatgtaattttcggtgtctacagcataaaagaaaaaaaaggcaaggacagtataaatttaatttttgccgtgtgacagtataaatgtaaacattttactcaaaatctaatatttttttaaaaaattcttttaattaatagtagactataatttaatggggcaattatggttataagggtgcttacatgtggctcttatacatttagtgactattaaccatcctattacggttattgacaaatattgggatttttacaaatatacccatataaatttcataagttacaaaaacactgtggcaagggaaaaataactttgagaaattccacaatacacccccttaaaatggatacattgatgcacccttgtctgttttagcacccgaaataattttttagtcaaatttttttctcatggttatgtacgatcccacaaaattttaaaaattttggaaaagtttaacatgctgaaaactacgttcaaaca

SEQ ID NO: 319960 - DNA, 1015 bp, Cannabis indica
tttatatcattgataaggtacatttaagtgaattaatataaatacacagaatatgctcttactacattacatgtattcaaatttcaacttcaaataaaattacgagtattaatttgacttatataattttaaaaattcaacttcaaataaagtgatgatgattacacgtacatatataatctatatctgacattgaagcacgtgtatatatatatattgtcaatatatttaaattaataatatcaagtaataagttttccaatactattatatatataatcaaaagaattaataaggaagtaatatttttggtcagatctgaatatacatacaaaatttaatcaagtcaattataacaagcaagacatttcgttatgatattgatccatagtggaatgcatttcctagcttcaagattataattaaatactaattatccatgaaaaaagatttatgatttattaattaattaaatgatatgatattaaaaaagagtattgttattaggtattagtgattagggccagttttgaattgaaatgtgttataagcaaaaaaaaatggactcttactataaagataaataatatttttaaaaattattaaaaatatgttatatttttttaaaaaatattgttatatttgggcccttaaaataagttggccctagtcacggacctagtccgtcttagcctaggactggtcttgttagtaatgtacagtaccttttataggtagtgctctataattaattatcaatattctttaaaaattatttttttaaattatataaaacttaatatttaattatagtgtaatatgacaccaataaaagtattatatactagtaatactttttaaccattctcaataaaatgatgaaaaaacaaagaagaaattaaaaaaggaaattaaagtagggttggtaggcagagatgttgttgtgggttcacatgcattgtcagcaacgacgcagcttactataatgtcgtacgttctctttttttttcctttt

SEQ ID NO: 319961 - DNA, 1440 bp, Cannabis indica
aaatcaattcagggtcctatttgtactactacctcagctaagcttggatgaagaaggaaatttgtaactactatctcaaagtgtacttttttctatcaacttagctcagagggatgtaattgtatttaatttgatgagaaaaagtgttgaacaaagttttttttggtacttcatttaaattaatcaattacagctcatagacctgaaagcactctcaagtgctgagtaaatcttctgagttcgtcttgatataacttcgattgttcctttagttagtacaaaagtactgccacctatgaatcttcgaataagtggagagtgctcacacgtgtagcaccactcaagagttatgatcaagaaggctcatagggatttggtaaggcaagtgaccaatgaacacacttatttgatcacttagggggcacataggttatgttatggtgtactcagtagtctagtcgtactaatgtggtagcaattagttcatactttttgaaagcctagcatatatttgttgatatctcagtgtaactctatgtgcacttcaccaatatcctaatatgctaatctgatggttacttattttcctaacatatatatgttagtatctcggtacaactctatgtacacctcactgatcccctcatatgttatcctgatggcaactaacatgcacgctaaatatgtatacatatatgcaactattatactaatattacattaattgattccgaattcaagtgtgccagttattctgaatggaaactactgttcaacaatttaaaggccctaagtcacaatgtacgtaaaactggtaagtgacttgctaactcactttcggcttaaactcaaaattaaaaatttttcttatcaatagatagcgtggaaaaatcttaaatatcaataaaacgtaaaaacctaagctccagaatttaagaaaatcgatgagccaaaaccccgaacggttaactatttactgggactctgctaaaaaaatcggtccaccttttctgagaaaacagtgaaccatttttctctgcagttttcacaaaactttcccaaattcaaccaaactttctagaatacctaataaaggtataacgaacaaaacccaacaaacaaacgaaacaaaaactctctgaatcaaaatccaccactagagaccaagccttgagttttcaaaactcaaaactctattccaagcccaatagcaactaaaaccctctcaaatcaaccaagaactacataaaacaacttccacaactaattttaacctcaccaaactcagacggagctgaattctcaaaaatcaaataaaaactaactttaacttcaaaactagggctgtacaaaaaaatttgtaaaccgcctaaaccgaataacccgcccaaaccgaactgaaaaaaccgataaaaattacaaaccgaaataacccgaaaa

SEQ ID NO: 319962 - DNA, 803 bp, Cannabis indica
ttaaaattgaaaaagtgaaaatgcaactccaaaaatgatcaaatttattaatataataagcataatgatatgtgcacacaaaataatacatgcaccgacatgacaaaatgaaagtttaaagtaacctctcaatattaacaaaattgctaagtaataccaatttaattgttactatccttctctctcttaatttcaagaagacacagaataaaatttcttttaactcttaactctacaataattgaaaactatgatttgaatcataacatgggatctttgagttacaaggagcatcatataggttatcaatagaaattataattctctcaagaaattacacaatctagctagattgaaacaagtagactttattagtataaaaactacctatggtttgttacattgaggagcccaaacttgatgttttttcctatttctacctcattttcttctttgttgtgttgtatatgagaaatcttatcccaaaactcacctaattctcttttgcacctcatcaataacatgttacaattataaataaccagcagctaatatgaaataaattctttgaattaaggcttgccatataaagtcatcatcttcaccattaaacatgtctactattccctaacaatttgtaatcaaagagttgttgaagtgataagagatccagtcagggccggcccaagcattaggcagcttgggccattacacaaaaccctcattttttttaaggcccaactttttattttatttttttaaaagaaaagtacctaattttttttcttattatatatacataa

SEQ ID NO: 319963 - DNA, 656 bp, Cannabis indica
tactatttagaaaatacagggtctattttgtcatttaacaaaacacagggtctaatctgtaacttttgcaaaacacagagtccaaaatggtatttacccactttataataatcattaagtcttcatattgaatcgtataataatcattaagtcatcatattgaatcgtctctaaaaaaattaaataatatacactgtattatatatatttgtttttatatgaaaaaatcatattataaaaattggtaactttgtaatatatagtacaatgcaatttggcaaaaatataaatcgcaaccgcatccttaataacttcaaattagtacttcagctttagtattcatataaatataatatatataaacatatatataataggttattgttaggtgcaatgtagtatacttaattgtatttttaatattaatttttttttatatatctatatttaaaattttaagtaaaataaatataaaatttaagtaggatgaattgcggcataaatatctaatgtttttgaatttatacacttaaatacctaatgtttatttttggtggcaaaaatacctaatgttacaattctcttataccgttactaccacttccgttattaattcataaatatagacacgtggagggcccaaatgcattacattt

SEQ ID NO: 319964 - DNA, 596 bp, Cannabis indica
gcttacaaacataaaattttgggtacatgccactatttaccctaatatatataactatgatatttttttcaattgacgcaccacaaaaaaataagtcaccaattcacaattattgtatacaccgtttaatattgcccccttacaattttattctaactccgcctctgatctccttactcaatatttaccaatatccaagtgtaaaatgattttatttgaaaactaattaaataaaacaaaaagataatcaatgatgcttctgagctcaaacaaaatctgttatcaatcacatgaagatacaatataattgtaaatatgatgatggtggaaacacttctaaaaggtactaaatgcttatggacaaaaccaactattaacaagtcagagagcagggccactaaaattcccattgtagaccatgccatttgtctgcttactccatcttgctagcaactgacctcttaattagctttgtatttttcctttcaacgccttgtaataatttcaatacttgtcggagcaactgtcataatcacctaggcctcttctcctttgccagatacaaaaatgttgagattcgtgaatctcgatctcca

SEQ ID NO: 319965 - DNA, 1033 bp, Cannabis indica
ctcactgctccacagagatataatggtaaaagaaaaagtaaaatataatagtaaaaatgagtctcagttttggaggcaggcagctttggcaatcaattcatgtgtacagccactctgccatggacaacttttgaaacaaagattctttctctattctttttcactttcagattttaattactatgtaatgtggcagcaccacaacaacagtcacactcacactatttgtccttattttattttgcttcaaaaagttcttacttcttcttatattaacacaccataaaataaaatccctatacttaatatattctctcttagttagaccacttcaactcaaatcattactatgttcagtgacagtgagtatcccacttctcatgtcttttttcttttcaccttttcagattaaataattacatatatgtaaaagataaaagatgtgtacctctagccattaataaatgtaaatctcactaatatattcatttgatctttagtttgttaaaataagagagaaaacacattaatagggacttttcctaagttctctctagctctctttgatattaattttataaaaacaagatgagtaataagtttgggaatcaattacctatatttatataggtgagatgttatattaaattttttagtcacattaattgtcaagattctttaacaattaattgaaaaattaaaattaaacaattaattcaataataaccatcaatattaaaatatttaatgaaataatttctatgatttatcaaatcaaataaaattaaccagatataaaatattttaacttatcccacttctcatgtttttttttctttttaccttttcggaataaataattacatatataaacaatgtcccatcttttcatcaagtaaattatttatccataattagcttatatactttatgggtcttctatattaatcttattgtttattccttttagttgcctcatagaagaattagattgtatttgattggagctaatgaaatagaaaagaaataattt

SEQ ID NO: 319966 - DNA, 918 bp, Cannabis indica
gattaatcttcacttgtgtcaagtactgaaggaattcatctcagttttcaagaattttctcaataggtctaagagcctggggaaatggtacttttgcttaagcatttatcagtgcactgtcaggggcaacttttggatttgaagtaggagttatgatgtatggatcttctaaagttttaccacttcttgttgtgatgtcgttaatccccttaacaatgggatcattagaggtggaggactcaaccatgtgttgtccttgtgcattaaattaaggctgggaaggaagtctgctttctcataaatagccaaggatgcgatcaatttcgaaaattgacttttttatttcttggacatcttcctttaattggcgattgatattagcttgttcctcaatgaatgcattaatggtgatttcaagggagttcccttgttgttgagcattgtattgaggctcaggatatgcctttggaggttgagcttgattctaatttctccattgtcctttagatgtttgagcttagttggagttttctctccaactaaaatttgtgtggtttctccaaccaagattgtacgtatgagagaatgtcttgttatattgccctaaggcattgcattgctcctcatgaacccccctcattttcttgtaaactaagtagtccttagctaaatgctcattttctccacaaaagaaacagagtccgagtggtcttgtttgtgcttgggcaaccatgcgctctttttggctgctttagtcgtaaggattttaatttgcatttttgaagcttcgacttgggtctctaagctgtcctcttcccgaagttagtaaatcccagctggtcgatttttgttggtgctttcagcagcacttggaccagtctatgtgtgagatttttcagcaagctcaatgagaaactc

SEQ ID NO: 319967 - DNA, 977 bp, Cannabis indica
taagtaatgtttgatttttgtcaatatatataatagttcataactagatgtttagctgttaatatttattcttgtaacaagaatttgagactttaattatgtagtttcaattgtagacaagcatctgtccgaacctttaaaggattagtaacagacttagttagtgcatgaaccattcgcatcacgcaaaatggcacaacaagaaccaccaccaacaatcgctaaaagaaaaataatctcctcaacagttagcttattcataaaaatattattcggacaattaatctaaaaactaacaactgaagaatctgtttccacacgcaccatattaaaccccaacctgttagcccacagaagacccggtcggagagccagaagctcgtctccatgagagttttttgcttgcaagtaatataataattctagcacaattaataatctatattctaattctatatacacgtggaggggtgttccatgtcaagtcccaccaatacatttaaatatattatattatataagtgtacaagacctatacgtataaaaataccaataatacaatatatcaatatcaatatgctataatcattcatgaaatatctaatctcagcagtactttaacgggtaggattggtagactcctgcttctctcgccattcaagaatttctttttttttactttctcaataattatatagtttgtaattattttttgttattttaattattaaaattttaatgaaatcttcaaaaatttagcagaatctttatttaagaatactctattcaagaatagttatatatttttttaaatctcgtattaacaaaatatatctctatataagaataattacattttaataaatagtaaatggcgacaaaccccccaaaactttcattttagtttcacttaactcccaaaatctaaatttaggcggtaaaatccccaatactcgtgttctgttagcaatttaata

SEQ ID NO: 319968 - DNA, 1563 bp, Cannabis indica
ataaaataaaaaaatcgtaaaatatttaaaattttgtgaaatcgtatttttatattttttttattatttttatgtatttgtgaaataatccatatatttattgattatgaccaattataatcatatagttatatatatttaaaatttatatatagtgactttttttttgtacatactaatgcaaggagaccaatacaaaggtgactctaataagagagtcaatatgatgcatcatatatttgtacctttttttattattattgatttccatttttgataagtgaaagcaaatatgtttcttgttattcattatggccatttctaataatgctttgcatgtgctttgacaaaatttaatggatgctatagtaagagatagacctacaataatattttaggatgaatatttttataaattatgactagggggcataaatgaaaaataaaattgtaaagaaaactcaaataaaaaaaaaaataaaaaaatactaagacattataaaaaaacaaatatatatctatataaaattaaggcagatataattttgcaggtagacaattaccaacctcatgaacatataggttcatccttggctacaataataatattattttttttaagaaaattaaataataataataataataataaatgatatttgcggtaaaacctttttaacatatttataattgttacatatatgaccctaataaaaaatatagtaaaattatcttattttacgatttgttacagttgtattatttttttagtttgttaagtaccaattcagctcattaagtgccggcttaaaaaaacatgagaatatacttttttaacttatttaatacatatatagtacaataatatgttaacacgtatttctgagttgacatttaatagtccaaaaatggtacaactataacaaaattgtaagataagatacttttgccgtcactttcttttattaaggtcatatgtataacaattgtaaatatgaagtgaatttcgcctcaaatatctctaataataataataaaagctcgtagggacagccctagttgaacccattaaagaggaaagaaagcaactaaataggcatttgataccacacacaataacttgaaaagaaagcactgattcattccatatattaaaattctttttgtcaattttttgtttaaatgaaagaaaataaaataaaattaatttattaagagcataatatatcataatgggtttccaatttaagactagtaataataagttaataacatgaagaagttgaagaagaaataatagatatttgattatatttaaaataatataacaataaaaaaaaatataacaataaaaaatgaaaaattttaaaacaaatatttactcattttatgggtttttatatcttgttaaatatatatattatggaaaaaattcaaatcaaataaaatcaaatcaaaatatgagaaaaagtagagtaaccagttacttctttgaggtaactagttacctatactattttctctatatttttaatttttttttttaaaaacttaaaaaaaaaa

SEQ ID NO: 319969 - DNA, 902 bp, Cannabis indica
agatgccttactaaattggaaaatattagtttaattctttaaggataaatctattttggaccctgtattttgtaaaagttattaattagacttttttattttattaaatgaacaaaattaaatcttatattttttcaaaattgtacaaatagaatcttgaactgatttttttgtcaaaataaaacttaataataatatgatgatctagagatgttatgacaaacttgttacattttttgtatctgttcgtgttagaaattgtcttaaagttagttatattaaaaaataaaattattgaaaattgaactcaaagttctatttttatcattttaaaaaatataaggtcaattttgtcatctaataaaatagagtttaattaatatttttttacaaaacacaggaaacaaaataatatttacctattctttaattagtagagttatggtgggaaaacgatgaaatgtgacttgaattgaaggtactctaaaagagttcatcattcttgggtgtgagatttgggataagtttgttgaaattggtgttaattaaatcaattttaaacaagtgccattatctcccaacattagatcaaattaggtttttttttttcatctcaagatcgaacattctctcaaaattagagatataatgatgacaatgactttttatataccagcaactataagtgagatacaatgatgataacgactttatacatttttttttatttcaatttacaagctaaaatataattttcacatttgtccctcacatatataaattggaaaattttatttacatcccaaaattttcaaaaggcattctattttaataattttaatttaatataaaatttatatctctagttatattgaaattttttcaacttttttcttccaatt

SEQ ID NO: 319970 - DNA, 1038 bp, Cannabis indica
gatatgcgtttacaagagatagtgggttggttattgattttgttttggaactgggccaatgtgtggggttgatgctgatgggttatgaaagtgggtgggtttgccaagtgagattgagatggtttgtggtggtttttcttggtttaggaaatttctccatgtgagcttttgagtttgataccatttatttattactaaattatgtcttgtatttttcttttatatgaaaattatgtctcgtgtattgaaagttggataaaaattaatatgcaaggagatccatatggctttacaggttttttctttcaacctttctttctttaaaataattttttatttgttgatctggttttaaaataggcttgcattttcattattttaacattgatttattgttgctctatctatctccttcattttctcctccaaacatagtagtggacatgatcatcggaaaagttttgtttggacatgtccaaactttggcggcaagaaaagttggtgaaagttattttaattatattattttgttttattttttaaaacctcccatgaaaattgatctctaaaacattgtttgttgaagttcctttaactttttttttctaaattaatacatattttattttatcaatctctatgtttgaaattataacatatgcataatttcaattaaattcttatctatgccaaactttttaaaaaataatgaattaatgtatatatcttatattatatattattgctcataatttatttcaattaactagcctttttttttttttaactagcctttgaaaagtattaatttattcattatttatataataatatttattttaaattacttaatcatagtatatttatattttatattgttacatgaggtagtaattgttttattatttttattattaaacaattttaagttattagttatttgttataaagttattaacgttattgaagttataataattagatcttaaaaaaccgagtttttgcaaatgtcagttgtatataagaaaatataaaaac

SEQ ID NO: 319971 - DNA, 1834 bp, Cannabis indica
taatttaacaaatttctctaatttttcaatctgttactgtatttaaatttttttgataatttacaataaaaaaaaaaataaagtttagactattatttattatgtgtaaaaaaaaaaaatcacacatgtgtaataaaaaatataaattttatttttttggcatggtaaaactatttaaatttttttaaaaaatttacatgtaatcttaaataattacaacatacaaaattataaaaaaaataaattgattaaaaagttattttgagtgtcaaacaaataagggatacgaaatacccttttaggtgagtgtactgtagacttaccctataacttaaaattgcggtaaaagtgtctaaaaagttcagtttgatgcagataagttcctaacctaaaaaaatagcagtaatagtccccaagctcgagattcttgtaagtacgttgatcctcaacagattcgttagttgctccaaaatatcacgtgttgatattaaagtgcgatattagtctctaataaaaagtttattttgatgcagataagtctctaatctaaaaaaaatatgataatagcctcaagttcaagattctcgttagtccgtatgcatgtacccaatttaaatgttttgtttgttactcttaaaaatatcacgtgttgatattttattagtccgaatcataattttaattaaaaataaataaataaataattttcaaaactaattgattaactttatttatttttctttcttcttcttcactcccaacccaacctgtttaaaaaaatattctaagtaaactttgaactaggaaagcttaggtcaaagaattgaattgaccaccaaaattcactacctaccactacacatatctctctttatctaccgtatactctatttatatctctatttatatctctcgatttactagatacaaaaagaaacaaaaaagaacaaaaagttttatttctctccaacatcttgactccgatcatattttttcttttgtttaattggtattttaggatagtcggatgggacgaggaaaaatgtggagatgaaaggatagtagagtgaacaatctagatttaggaattcgtaaaatgttcattatttatattttttagaaaattggtagaattgacactagtgacaattatgagtagtgtatatagaccctttcaaaaaaaaaaagagtagaaaatgttgtcgttcactatatgttttatgtacattttataatatcaaatctctcatgtattttttttttttaattattattgaacgatgatgtgatgtgataccactttggataatattatttaaacaaaatgtaatagtcttgtaataattcattcattgctcattattttattgataattaatgattctctctctgttttattttataatagaaagttttattctttgaactaatacttataactattgaaaaaataagattacttttccctaaatcctaaaatactcctctcattattctcaatcatttctctctcttcctcctttctctctcaaatcaaacccaaaaccaacctatcaatccaagccgatccacagcgttccaccgttaaccaacctctcatctcatcttgctgcggtggaccgaacgaacgtggctcccacttcgcaccatcgcacgaactgaacagccaacgccacctccgaccgagacgccgacggaaagccaaccgaacccatagcagcccactccgaccgagacgccgacggagagccaactgaacccacagcagcccactccgaccgagacgccgacggagagccaactgaacccacagcagcccactccgaccgagacg

SEQ ID NO: 319972 - DNA, 1060 bp, Cannabis indica
aatatataaagatataacaataatttggtaatgattttacaaattatatggccaaaaaatatttatatattaataaataaaaaaattgggaccatatattataaataaatatatattatatgttggccaccttagctttatgagctgttaaatgttacaaacaataacactattcatatatatataccactacatatatatttgtatgtatgaatatgatctgtcgagaacatgcctctcttttgctttttaggccatgaaaatcttgctaggcatgcaagtgtacaacgtgccattttctctattacttagttttcgtatttattagattaatttttatatttaattatatatatttacataattattatgcactttggtgggggtgatagtgataatttttattcataataaaaataatgtataattaattcactttgaattgatattaattacgatcagtacatgatgtgtgtgtataccttaccaaattattaaataataataataataataataataattggttatataccctatggctatatagaagcataaatgtcatttcttattaatttgtggtattaatagtaatagagactacacttttcaacacgagaattataacttgattaatcgaattaaattatatttggattaaaaacataaccctacttaagaatttttattttgttgaggcttgaaaaacataataactaatagtctaatatattatctattttaaataaaaaaaaaattataattattttaaatatatataatgtttgagctaataaattattgtaaaggaaatatatattatatatgaatttctttttgttcatatttgttaaatatacttaataaataaataaaattataaaatacaaaattttaagtatttaattttcagtaggacttcatcactatattttccatatatgtgggtacaaaaatcataatttattatgattaaaattatagtagcaatttataattaaatattagactaattagcaattttttttcccgaactttgacatatatcaaatcatgcctc

SEQ ID NO: 319973 - DNA, 1905 bp, Cannabis indica
aacattgtaccaattttacccgtatcacttcaagatactctctacgtgagtctcttatgtcagggtattttgggtacaatacataaaaaaagaggtatgtttcaattaaatataaaactagaggtaaatttgattaattgattaataaaagtggtatttttcaacttacccctcaagtttatagctagcccattaaatagaagatcgtatccttttaaaaaaaagaaacaaaaatctctaagtcgagtttactctcaaataaagattctacttctaaaacttatttaaataaaaaatctcttacataaattcaagcaaaattctgtggaacacaacactacgtaaaaacgtaattattttattattgcaaaattctgtggaacaccacaagacgtaaaaacgtaattattttattattgtaaaaacaattacactaagatttgaatactttatcttgattacaatacacaccaagtactcactctttttatttactagacacttacacttaaaagtttacttgcacactatttgatgggacactctttagagttttgttgggacttagttgaacacacaaggacacacttcactttctagcaaattgtcaatttattatagcttaaaacattcttgaaaatgactattaattctttatgattctagaaaattctataatattaccaaaatgatataaaattctagatacttgtagaggaggtgttgatcgtttaacactccccttgatcaacaccaactcatcatattgagttgttttttgagtttttgaaatcttgtaatgttgagtcctttagtgaatatgtctgctacttagtcttcgctctttatttggagcattactagctcttcttggagtcttttctctctaagaaagtgataatgtacctccacatgctttgttcgtgcatgaaagactgaatttttagctagacgaataacaaactgattatcacaataaagcgacactacataatctgtaggctggtttagatccttcatgcatcaaccatgtactttcttgagatgctttttactacaccaagatactattgtagatccaagcatgaaaagatatccagttgttaatcatcttgtgtcatgatctccagcataatcagcattgcagtagccaacgatcttaacctcatcacttttcttataaaagagagtacctttcatgtacctcagtattcgtcgtactactcaaactccataggagatgtctggtcttgctaatgtaaggtggattaaactaccttgtcgatacattgctctatcttgcaagtcttgcccaacatgagcacaaaacttagcattagcttccataggtgttgatatgggcttgcactcgagcattccaaatctttgtagcaaatctatagcatactttcgctgacagagaaataaaccttcctcagttcgattaacttctaatccaagaaagtgttttaattctccaagctcattcatttggaagcgaactaacaaattctcctttgtttgacgaatctgcttcatcatggccaataatgatgaggtcatcgacatatactagaacaactacaatcttttcttcccttactttgaaaaataagcttgaatctggatgtaccatgacgtaaccactctccactaagaactcagcaatcttgatgtactatgctcttagagcctgcttcaaatcatagaacgcttttttcagtttacaaatataatttggataagctctatcctcaaatcttcttgattgcaccatgtaaatctcttgatctagttctccatatagaaagacgttcttcacattcattttccatagcttcctgtctttactggctgcaagtactaacagaactgttacgatattttgcacacgcaagtgtacgt

SEQ ID NO: 319974 - DNA, 1065 bp, Cannabis indica
ttcagccctaccaacactagtacgggactagtacttagtgtatgtggtacagaggttgtacttctgttaagaacgtttttgattcatctaaagccttgtaaatgcgtgtatggacgcctagatacaagtcagtaatatatttatatgttttatattttttttactgagtctaccgattagcaaatatgtttgcatgtttaggtaaaggaaaggcgaaggctgagcatcggtgagtccagagcttgagatgattgtacatatacttccaatactagtacagttgaggtatgaagtgcattggaacaatatatattgttaaggggtatgacacatcgttaccaacactagtacatgatgagtacggagtgcatgtgcaacaacactcagttgtactcgaggtgcgattcaaccctaccagcactagtacgggacaagtacttagtacatgtggtacagagatcatacttccgtttaaaaatattcttgattcatctgaagccttttaaatggggtatgggtgccaagatacaagtcagtaatatgtttatatattttatatttttcttattaagtctgtggactcacaaatatatttacatgtgtaggtaaaggaaagataaaagttgagcatcaatgagtttagagtttgaggatgattgtagatatcaggatggttagacttagaatgttcggtctcaggacgacatgatcttctattttgtaatcgttgggtggcacttttatgaaaaatgtattttatattcagttgtaaacttttaacgggattctagaaattatataaaattatgtatatgttaaagtcgaagtttaatttcaaagtttaatttgtcacgtttttcaaaaaaatcttttgattaacaaaagtgtgcacagtaattaaaatattactgtagcgtgcaagttaggcattacggttatcttcctattatgattcgttattgctcacccatttgttaataaataatcatgaagctaaattcatatacttaattttttgggaattttacaaaaatactgtttttggaccaaaactttacaattata

SEQ ID NO: 319975 - DNA, 703 bp, Cannabis indica
acaacaatgtaactgcaaattctcaagggaaggagagcccaacaacagtttatctaccacatcattatcaggaagatgaacactttccaatgacaatgatttcaaagatggaaaactaaatgagtaatgagaatccaacctcaccttactcaacttcaacatagtcaaatatgctgcattgactaatactgttttaggtaagcagtaccaaccattagtgaaatttatacttatctccttaaatttattctcaactgcgaaagctaaccatttatctatgcgatcatcttgactagtatcataccaatacatcttaagcttaaaactagtgatgagtgaatagctcattaaagacattcctcttttgtgatgtttcaaaaaattgtctacaaaattgcagaactttttagtgtctgataatgtaagatcagagaaagagagagtgaggactgaataccagatgagtttccaacgctttgaaaggagcattgttggaaccaaatccttactagtgggaagaaaagagaggatgtgtgtaatgattgcatcaggtagtttcgaaatcctgtcctcctcttgagtcaatttaactcttttttcagccatgaaagttggtaattatggattgaagactgtaacagcaaagagaagaacacaagaaaaaaaaaacagggaagtgaaagtgatcatctattaattaaaa

SEQ ID NO: 319976 - DNA, 1039 bp, Cannabis indica
aatagaagtctgatttgagaaattagatgagttaataagaacttaatttttgaaattaaagagaggaaaaggaagttgatttttctctcaatcgttcttactcgtgtgttgagcactcaagaacaaagcttatacactttatcctaataggccacaatattgcttgtgtgtggtggaacgattttgaagatactggtgtgagtccaattacatcatcctcatcatctagattaagggaaacgacatacaagaagtttcgaggataccctactaggcttcaagaggtatttattctaaactaactatttattgttttgatttaatgtacacacatctagagatcctttgggctatggtacaatgataatcaataatacgaaacccttttgatgcgtatctgatttagaaccattaaactaacattccagatgtcatgaaggtcgagtagtggctgacagtaattaagagaattttatactttatgggtgtcacaggtaatgaccaggtaacttgtgccacattttagttctaggaggacgccttcgtgtggtgggaaatattgtccctcactcgggacatcactacaataacctaggaagagttttgggatctattaaattccaaatgccataatgaggttatttgcagtgctaataggaaagagcttactgacttggttcagtataaaaatatgtcagtaatagagtatgcaacgaagtttgattgacaagccaagttggcttcgggtatagtgcccatagccttcggtaagaaggaaaaatacttagcgggtttaaatgccaagattagacacaatctggctattacaacaaatgagacaatctggctattacaacaaatgacacaataacttatgttgagatggttgataaggttcttcgagccaagggtgcagtggaatttcttcacgagccccaagggactccaagtgttggtcggaccaccacccttcctacttttggttatggtaaggatggtggtgcttccaatgttgatcaaaagaggaagactttcccga

SEQ ID NO: 319977 - DNA, 695 bp, Cannabis indica
ttttctaaaagttgagttgtaccttatttagtttttagttgtagtttttttataagttcttcaataaaccgttttttaattacttaccaaatacctttttatcacaattttttttttcttcaaaaaatagcttttaacttttctaaaagctgtaccaaataggcccatagattagtttaaggaattataataaagatcttcatgcctttttaaaagcggtgttgcttagtttatattttataaatagtaatttttttttggtggtaatatatttatctaatttactaaaaagaaaaaattgacacaaaattttcgtattagatttcaccaaattacaaaaataatttctaatattaattattaagaaaattaaaatcttaaaaaataaaggtgggctagaggttgaaattatttttaaaaaaattgttaaaagaaaaactttaattgaaaatataatgcatttatacacatacaatattttgttataaactaaaattttacatgtacaagttacaatttttaaatctctaaatatatattattctaaaaaaatatatatatctttatatataaaattagttatgtaacgatttttgttagtttagcaaaataattttttttgaataatgattaaattttattaaattaaatcatccaaaaccaaggatgcaaaaacaaaaggtaaggagtcccta

SEQ ID NO: 319978 - DNA, 1217 bp, Cannabis indica
gagagagagagagagggaacgtcagaaagagagagggaacgtctgagagagggaaagtttaatttaggggtattttaggaatcttttaaaattagaggaataaatttgtacaaattataaaagggtataaattttgatataggttatattattaagggcaaataatgaaatttcccttaatatttgggtagttgggggtcttgaacacgtgaagttgttatttacactcttctttgtatatatattaaaattattctttttaagaaaaaaacgatcatattaaaactttaagagtaaactcaataagagaaatttcaagagaaaaaagagtgtcacacaatatcatcaatcataagagtgtctgcaaagcaacaaaaatacaatcagggcgactacgccaccaaacataatgataattcaaagacagtgttaactttgctaaagtgtgagccacactattagcaatcctagaatagtacataaaagaaatatcaataaaatagttacaatgaacaagaatatctctgataatacaacttaagtaagactgatcaaccttactataaataatggcattgataaaagtaaggcaatcagattccaacaccactccctgaaagtcaagacaacaggcaagtaagaccctaaagtagatactcagagcctcagcaacgtcaggagagaaacaacaattctaattccaagtactagaagctaggacgaaaccattatcatcatgaaacactgccccatccccaaatttgtccaattcggaattcaactctgcatcacaattgattttcaccacccaagaggtttagactatttaacaattagttgagtctcagaaagattaccaagacgaggattacaactattgatagaagagtagcattgtagataatccatactccaattaaacaaaaggtcatcattcacacaaatttttttattcacccatttattatgtaaattctccaaagacagactatgaacttcttaaacaaagtaatagacataacatcttgacaaacataaatgaattcatagatatgcaaggatgtctcgggacccaacaaacaaaaagggtaggtagtagcaaaataaacaccacgatggctcagattatcataagcaaacaaccagttatgagagaccttctaaaaaaatatttgaggaataattacataagacatcattttttttaaaataattat

SEQ ID NO: 319979 - DNA, 1933 bp, Cannabis indica
cgtggatcggggggttgtgttatatggccataaaacttgcaaaagttcttctggccatacccccttacgctcttcgagttttcccttgatagtatgcttaattatcttgttgacgacttctgtttgcccattactctatggataagcaactactcaaaatgcctttttaattctcaactcatcgcacaattttcgcatttccttacaatcgaattgctttccattatccgagatgagtttgtcagggatgccaaattggcagatgatggaattatatacaaactcgcgtaatttggccgctgtaatagttgcaagtgcttttgcctcagcccatttggtgaagtagtcgactacaactatggtatatttgactccgccttttccgttgggtaattccccaattaggtcgatgccccaaaccgcaaagggccaaggactcgtgatggagtgcaagtggcttggaggttggttgacatacgtggctatccgttgacacttgttgcattttttagcaaagtttaaagcgtcttgtcgcagcgtcggctagtaatacccttgccgcatgatttttaaagtaagaattacccccggtatggttgccacagataccaccatgcacctcccggaggatataatcacactcgtctccgtcaatgcatttgagtaacggttggctgaagcttttgcgataaagtcttccatcatacatgacatatcgagtagctcgatactgcagttttcttgcttctattttatcttcaggtaggatctctttttccaagtagttcattataggagtcatccatgtgacttctctggcagtatctatttccattacttcatctcgactcagcgttgggtgagttaacacatccataggaattacatcgagtaattcaacttctcttgtggaggccaagcgggccaaagcgtttgcatgagagttgtgagcacgcggtactcgagagacaagcaccttcttgaatttctacagtaactcgcatattatggcgaggtacctagcccagcatctgcttctggccaggtattctccgtttacctggcatacaacaatttgggagtcgctgaaagcctgtaagtactcgatcttcatctctagagcgagttttaatcctgagatcaaagcctcctactcggcttcattgttagatacaaaaaatttaaatctaagtgcagcatgtaccttaaaattgctggggcttatgagtattatgccaccgccagagccttcactgttggaggccccatcaacgtataaagtccacccttcgccatttggtacaccaagatcgattttcttctctatgagtgccactttggtgctcgaaaattcaactatgaaatcttccagggcttgcccttggtcttcgcagattagcaccgagctaatagcatattcggacactgcaaggtaaatggacaaaacttctctgggcattggttttgacaggattgggggctgccccaaatgtgttttaagtgcttgaaaagcttcttcgcacttctcggtccattgaaacttcttattgccttttaaaatttgaaagaattctttgcatttattagaggaacgtgatataaaacgatttaaggcgatgaccttacccgtaagactttgaacttcttttggcttagtcagagatcacatttctactaatgctctaatcttcgcagggtttgcctcaattcctcactgattcaccataaactcgaggaatttccctgcgccgactccaaagacgcacttaagaggattgagccacattttatatcgtcgtagtatctcgaacatcgcttgtaaatggttgacatggtcttttgcatgttgagattttacgagcatatcgtcaacatacacttccatggtgtccccaattagatttgcgaacatcatatttaccagcctttgata

SEQ ID NO: 319980 - DNA, 1482 bp, Cannabis indica
aaaaaaaaataaatcaaaacaacccatactaatcaaagtccaacactttggttagtaactgacaaaattattataattcgtgtacaaactcagcaaggagacaaacataacccatactactctacttagattcttttggttatactagtccttagtgtggagtatttaaatttttaaaaatccttaaaacttttagaatatactattgtctaatatatggaaacaataaccttgaaaattaatctacaatactaacctcgtaatgttttgcttaacgcaaccattactatatgatttgttgacataataatggcccctacaccaaacatcttagattcctttaagacagttgcgtccatcagcaaaggggatccaatgattgtgaaaggatctatttaagaaggagagtagttagaaactccctcgtcactcatagccaaacttttctttactagttccttcgctaaattaatagagtcacagaaacttgagatccaaccaattatttgcttagggtgtttttgatgttcaccgtgagtcatcttatttatctctgtccatactgccgatgaaataataatcaatctttcaaaggaatttttctacacaatctcggatgcatagattattacttgcttaaaagataaatctttcttcgccttgtgaaggaaagggtaatctaataaagtccaaatttcttgagcccagggacaccgaaaaattgcatgtgaatttgaatcacccccataaccccaaataggacagttattatgaggaacaaccttacgtcgaaacaagccaccctcgagagtaaaatctcacggaaaccttgccatgaaaaatgaagaatttttggcagaatttttaaaccccagaatttcttccaccatattgacaacacctcactagaagaagaatgcaatccctcatctctggtcatggccagattataatcactttttactgaataattattttgttccgtgtaatgccaacactagttatccttgtgctccaagggacttaatgggatcaataggatgagttcgacatcctgtgaattaaaagtgctattcaccttacaatgtcctaatctcctagaggatcaataagttttgaaactgtgattacgggtgttcgtggtgcaggtggtgcggtttttgactattttttcaaaccaatccgcacatgcggtttttccaatttcctaaaccgcacccgcaccgcgaaactaaaaactcgcaaaaaccacactgcaaaaaatagtgcggtgcggtttttgtagtttatgcggtttggactatcactaaataattaaactatcacaaatacaacaaactttgaataaaacttgccaaaataccataaggcttgaaaataaatatgaaaaaaaattaagtgtcaacaatacaataattagtggactttgagttgaacatttatatattggacctaaataaatataaaaattagtatttttat

SEQ ID NO: 319981 - DNA, 1907 bp, Cannabis indica
tttgttcttggttggaggaaatgtctcccccgttaaatgtttttgtattatgactgttcattaatataaaatgcattttcatctacaaaaaaaaaaaaccccacagttatatatttatatcaataataaaattgtcatatcttaatactctattatttaatacattttatatatatgttaatattaatttatataatatttcttttaaaaaaaacaagactacggtacaagcaatctccaaacataagcgttggagctgccctaagtatccgagaatatatatagtaaagtgtaaacaaaaaaaaaaagaaattaaaaagcggtggtgtatgaactatgaggttctcctttaattaattcaattacataagaccaccacgtactcatcagtttgaaattcaaatatatgagaatgagaatacgatctaaaaggtcacactatgagtgtcacttttgtctctatttttagttttatttttttgaattataaattttattcaactagatcaattcgacctcaattataactaacattaaaaaaggaaattgaattctaaaaaagtacaatcagcatataaacgagacgctctaactataaaatgagcaacccgattagcagatcatcatgtgacaaaaagtaaagaaacatcatgaaaagaaaatagaagttgtttataatttttaacaataccaccaaaagtggatgacaaaacattcaaatttctaacaacttgtactgatactagacaattagattcgataacactaacacttgggaaatcacacttcaactatgaaagcactttctttgagagacacgtcttcagcaatctctggaagaactcgcccaacccgcagtcccaaaatccccgacacgacccgaccatggtgatctcaaacaacctcaccaaaaccatgccttccctcctcatcaaacaacacatcattagtattcaccttgagtagtttttcataacctggtttagaccatagctcaaatccaaaatataccaagtgtcaaatgaaggaaacaaacttctttcttgagtttttctccattgatcaagagtgatacgagctaaattgacaacgaactccacccaacatttcttacctttccataagaattgattatgtgcgaaccaaatcgctcaaaccaacatcactgcatgaacactttgttcttcacctagccatgagaacgagtgaaagaaccaacccccaaacgaccctgcatcaactagaaccataattaaacccgcgaccgccaataattttgtgaaaaatcataggaaactgaacgatgcaaaatagattcacctgctccatgacaaaccagacacaaatttacgtgtttagtcttcaattgaactctcgtcgaaagacacccactagctgccctctccatacataatttttttttttttgcctttggaggaatttttaactgtcaaaacttcttctaaaatgccacaatcttcttgtccacactaccatctcagtttatctataacaatttaaaagcactcttaagggtatactcgctagaagagtacaccccaatacaagtagtccttggaaactgaattagaaagaggaatacaaagaatattggctgccactttctctcaccaaacaagtctttgacaacattaacttcccaagttctctaacccaccacaaaaagactactaaccatttcactggccaaatctagatctaaactaactagactcggaattgaaccattcagaagccagaatcatcaaatagaaaagtctcctccccattaccaattcccttcctttcccccttacgaatcaactcttttacctcatcaagacttctccaaatataacttggattactgttacgaaaattctgtttatcacgcaagtgtacgtatc

SEQ ID NO: 319982 - DNA, 1557 bp, Cannabis indica
ccctatagaccaacaattattgtacaaaaaattaatattaaaaaaattatataaaaaaaatagattatataatagagaatttgtgagatattgttattagtgtaattttgtatcagatttcacatattttaatttaaagcattgatattaagcactattataaggtgactccttgcaaatagttaataagtattaaattaaaaaaatatgagaactgataattaattacagtttattatctcgtattaaggtgctattattattttttaatatttttttagtattattattgagaaatgctaaagggtattattggtgcctagcacccttctcggtatcatactactattgagaatagtttttagggaataactaatcgtggggtgctacctttaaagtgtgctaggtattactggtgcccaataataatgcgaatggctattaagtaccaatggtgcctaccagcttctagacgtgtcaccttacaattagttagcgatactccataaaaattattacattaaattatatgagactcaatcattaattatattaatagtgatattatcatgtagtaagatgctaaacactcttggtaccttttcatatttttcttttctttttttaatttaaaataaaatatatgagatctgttacttaaatataccaatctgataaggtaacttgagtatggtgtccaacacctctaataaggtgttatattattagtagtgtaataaataacaaaatttacttaattcaaattaagttggtttaaattaaaatatggaagacttgatatttatttacacttatacctatttttttttttataattattataataaggtagggtgtgaaatggcaagttgacctccttacataatgataactactaaaatttgattacataattaataatgactatctatagtacaataagaatggacaaccctcaccttccatcccataaatcttacaacaaaaacttaaaaaaaaaaaataacattaattaattaataatacattttgtactcttatattattattgctaaatatttcatttagaccttcaattaagagataattacaagaaatttcccaacaagttcatatttcaaaatattttcactaaaatgaaattaaaaaaaatatataaccaattttggtatattattttttttaatatataaaaccgaataaataaataattttttaattacttaacttgttttcattgataattaaatagtaatcattaaaagaattttttgctgtctttctaaaaaaataaaaacaatatttattttatgtgatatattgttttcatattatgtggcatccttatccatgtagaccacacatgaatatatatgatctaattttactaccaatttattgactttaattacaaaaacaaccacatggaatgtgtgctcccatatttattattcttctcatattattattattattattatttattattattatttattatttattagtatttgtatattattgtttacggtaaattactagtaggtatcttattgc

SEQ ID NO: 319983 - DNA, 562 bp, Cannabis indica
atcatgattatattccactgtgctgacaacactataatcaagaacaaatacatatgttctggactaaatagaatttatacattaaatataaacatgaaataaatcatatgaaccatgcaacataaaatgatttctaatctttattaattagtaaatctgattatattaaaatgagttttatttagggcacaaaattcaacactctttggctccttaaactcatgttgttgacttatccaatacgcacttttgaccaagaacttacccgacttcgcagccttccaaaataggatatcagaaccctcattcagaggtctgatccttagaatatcagcatcaatctccactgcaaaacacgaatcagcctttcattctagatacgagaaccatcttgaaacagatcattaaccttccaaggtgtgcttggatggagcgggtatcttgatcgctgatggatcgtgtgaaatatgggatagaccatggatcccatggaagggtttcgatgatatcaaagtaaaatttgtatttttaaaaaataaaaaagtgttctataactactttt

SEQ ID NO: 319984 - DNA, 1863 bp, Cannabis indica
ggattagacggtccaccgacatgggtttgttgggtgtgctcagccaaatgctattcagacccgttctgtggccccgtaaaaatactaacatcaatcaatagatgttggctggtgacctgataggctcttctgatctgtactatggcctacctagaacgattgtcaattactgcttgctaggctttcatgatttccatctctcgatccctctatgcttcgaactggcatctttgctcatcaaaagtaagatttatagttgttcatatatcttgttggtcatggtgaagagtgttattgtggactggcattagccccaatgcatctcgcaaattttgtagtttggtgccatctctgactggcctttgagaatttgtagtggacgggatcccagctccaggagaagtttgctcaattgcagtactggtatttccagtttcttgcatgcctagagtgaacccaccaagaggagtagtcaccccttgacctaccatttgtggacctgttggtggctgagaattaatctaggtgggggctatcctgggtggatctcttgggtttgtaggtgtctgcattctcggatctgtcaccattagatcggttgtatcagtttgattttcccttcatgtttgcacaaccatcctgtgtcttgacaaagacttaagacaaatacttgtgtgtctttgctttcaatgaaagtaccaaaatattgacctcgcttttaaccaatgacattgagtcaaattaaagcgattgagaataattacataacataaagtaaatagtttaaagtaaagaaaataccaaatatatagaggttcggtcccgtatagttggtaatagaccactctcctttttgttgtattgacttgtgagcaagaataacttattctctctagaaagcttttacactgatctttgagaaatttactcttagttcgaggtttctctctctgaatatttttgggtccctaaatagtgagataaaactactatttatagggattaattaattacatgaaattagtttttctaaatcaataagaaataaaatgggtaattagtttatttttacaatttcaatgaagaaaataggaaacttaagctgactgccttctctgaaggcatgaatctatcccacaaatatagagattgtatcatgacgtgcaagatatatgagatatatatcaaacatttctaacttgcatcaccaagtcggtgcatgcgagctacttgaatgatagaagttggttggatatgtatccatgatttgctcggatattctaccatctgtgtgtgactttaagcatcataacagtctgtatggcctaccaatagtggaatcatctgcccagattatgaaatatattacatgtcacctatatggatgccacgtcatactacaacaatttggataacacaaaggtatcataatttgcaagtcattctctgaagatagctgcaatatgttttttaacaaatgttttatgaccaacacatcctaatcgatccaccagagttttaatacgatgtaagagtcattaatggaaagagagcctttccttagattttgaagttgagtagtaaacatatcaatttttgtagaggtctgagtaacagtgtatacctcaataattttccaaacttgagcaaagatttctgtgcctacaattcgagtaagtttgacattagacatggaggagagaagccaagagtataagagttgctcttgaacttctcattctatgaatctcggactaacaacaccacgagcttcatcttgatcacgaaggaaacttcattgaggttgaatcgtatcagagatatagtcttgaagacgatgtccacagattgtagataggatct

SEQ ID NO: 319985 - DNA, 594 bp, Cannabis indica
tttttatttttatgttttgattttatttagtcgggtccagatttgggttagggccgaggttggagtctgagcttcaagggtcggaatataaaatattaattaaaaaaaatataaaaaaaattgacagtaatttatttgttttcaaaatttttaaaattttaattctcaattaaaaaattaaaaagtcaaaatagttttatataacatggttttaaaaaatattttaatttttttaattaaaaaaaattactaaatgcactttaatatttacaaactattagcaagggatcacgaaattcgccaataataactctattattagttcatgtccaattctgtcttttttctattattattatcttttatatattaaataagttatttttaaattgtataaaaaattgttagtgggccagacagatagcactacacgttgcctgcattaaagatggccttagaggcagagttcctccatcccctgtaatactaacatttcatttatgacatgcatgtttattatacagtattcagaatcagaataatttaatagagaaatgtaacagaataaatgtaaaataatcggaatcaatattt

SEQ ID NO: 319986 - DNA, 598 bp, Cannabis indica
taggccatagtagtgagtgatttaatttaacttagttttagtttggcataaatttattaaatgtgtggtgaaagccgccgcggctactcaatagttttgaagaaaagaagaaagaaatgttgactagtagagtagtatatagcatggtcaacacaaaacattatataatctttcttatatattatgaattatcaactggataaagtgggggctggctttatcaaaaccattcagcagttaataataagattgattataaaaataaaataaaaagtcatctcaatttatctacacttataattgtcccaatgtttattatataataataaaatctatggactgaaacttttatgtaatcaaacaaatagatagatcactagttatcatttataagattctattgaataaattgtctctgaaaaaaaaaattattgaataatgatctatgcctatttaataatatctatataaaattgaattataatataatattaaataaaaagagaaaaatatgtatatatataagaaatttgttagaaaatcgtctcacttttactattattgtaagaatggtttttttttttttttagttttggtt

SEQ ID NO: 319987 - DNA, 1449 bp, Cannabis indica
ccaaatacattcttgaaaaaattaatagtatttgcaagtctttttctttggaaaggtaatgttgatatttgagggccatgacatcttgcttggaattatagttgccaacctaaaagggaggacgatcttgactttagagacatagagcggcatgtgggtgctcttagcaaatatgtgtgggacattactactaaaaaagataatttttgggtttgttaggtgcactgtgtgtacattaaatacgttttaaataactataacgacgaccataaaaaattagactaaaaaattcactcagatgctaaaaacaaaaaataaatatattgactccttttaactaatatataacattctacaatttgtccatacattttttttataaaaaaaaatagaaaaatgacacacacaactgatgagtacaaataattatgcatgcaattcaatgaaccatattaatattaagtaagatgaaagaaaaggggcgagaaggatgatacgatcatcattaaattatggatattttggatgttcaagcaaaaaaaatatatatctttatatatgggaatattttatttatttcctcaaatgcttaaggataagctaacaaatatagacatatatatatatttccagggcggagctaggataaaaaattaggagggcaaactatattataaatttaggtaataaatattttaaaaagtctttattaaatgagatatttttggcaaaaattttttacatttgtatttgttacacatacggtcttaattaaaaaaaaataacgtaaaaaataatctcaaaagtactttatcttataattttgttaagctgtacctttcagtgtcaaataagcccattaagtactaacttaaaaacatgtggtaagatattattgtaccatttaataaataaaaaaaaacttttacatttttttctattttattatttatttaattaatgaaaaactggtttcatttttctattcaaatttgtttatttttaattaaaaataagataaataatagttatttaatacgtggtctaataatgttgctatgtgtttttgagttggcacttaataagggtaagtctgtaataaaatcttaagttaatatatttttaccgctatttttttattagggtcatatgtataacaactgtaaatgttaaagaagtttcagcgtaaatatctcttattaaatttataattaaaattaaaataaaaaatattttccttgcatatcaaaagtcatcaataagtgaatttatactaaaatttttgacaatctctttcaatatatactagtaaacaattatttaaaaattcattctcagagtgtaatttttactatattaatagttgaaaaagattattttgtgacaactttagcaactagaaggataatttatggtgaataatttatggtatttatattacacttagta

SEQ ID NO: 319988 - DNA, 1394 bp, Cannabis indica
aagtatacctatcgctgattatcatgccagtctaaatctagtgaattgataaatcagggaattaaacttttgaacatataatcatgattatattccactgtgttgacaaccttataatcatgaacaaatacatattttttggacttaatagtatttatacattaaatataatcataaaataaatcatgtcaaccatgcaacataaaatgatttttgatctttattacttagtaaatctgattatattaaaatgggttttatttagggcacaaaacccaacaattccaacgtccgaatgcttccatgcgaaaacatccagattttgtttgagaaaagtgacatgttttttctcaccattgaattgttagtttagaaacaattttaaaacttaattatgatcgcaaggatcgattggtaccttaattgtttcttctgcagcttgtgtagtgttggtgtaatagaggatcctcaaatccaaattgggcttttcaacatggagtatctcctcgattctaagaacttcgcttcgaggaggaggtgcttcaaaaaaatatataacatttattgatttcttcttttttacgagcttcaatgctgtattatagcactctcgtgagtttgattagactccttgcacagatcccacaacctggggggtagggaatttcatcctaagatgataaattgaggttattatcttcatttctttcaagattgcgtgacctattactgcgttgtaggcgaaatactggtcgattactgcaaaattggcaattcacttggcagtgacaaaggtggttcctagagtaattggtagtttgatcattcctttcagtgtgattgtatctccagtgaacccatagttactcaaggttacaggtttcaagtccttctcttacaatcccatttgcgtaaaagcttggaaattgagaagttaactgaactcccattgtccactaaaatttggtggacattatctcctcctatatttacgactatcacgagtgcgtcagcgtgtggatgatgaaccacctagtgtcaaagaacataacactcttgagatcgaacctaaccatatcaggattaagatcatttgatctaggatcaactaggtgatattgaattaaatagatattacggtaagattatcatatctaattcaaagttcaatatcggtcccttccgatgcatactccatgcatccaacccaagctttactttaaccaatgtcttggaaggacataacacttatccaaggtgcaagtaaactatgttgtagattgtcataatcaattaaaccctgtgttctgataaatctaggaatatatatataatcacaaatcttgattactttccaatgtgttgatgacacaataaacaagaatataaatgtg

SEQ ID NO: 319989 - DNA, 1263 bp, Cannabis indica
tagaatattcttattttgtttgaaatagtttcttttgatgttagtcaactcccatgggttcgaccttgcacttacatgaacactatattccgaaacgattcgtgcacttgcgagtataaatattaaaacactcacttttgaggacaacaaatttacttcttacttctctaagttactaaaataccccaaacaagaatacaatatctaaaagttaacttgtcatcaattaattctcctcaatctacatcaacatattcctccacacttctaaattcttatttttgaatgatagtcctttgccaagactaagaatgacaatataacccatagttataggcacaagactataccttaggtatttcaaaatttgagaagctacttcatgttctttatatgcttcatgcatggattgactaattacaataggtaaagatgatgactatagtgtgagaaagaggaatcagcctatgcacaagttaatgatatcttccttaaatgtaggagtataactgccttttctaccttgcttcatatttaaatccattagtgtgttaactgatttatactccaataatctcatttcatttaagagatccatggtgtacttttatgaaataattataccttctttatttctagtcacttccataccaagaaagtctcaaaatggtccaagattttttatttcaaaatcgactgtgattttcccttttaaccttgtcatctctattgtgtcattaactattgaaatgatatcattctaataggcaattagaatagtcatcttaccatcccagtgtttgtagaacaacatatgattagaataagcttgtaagtattcttggtttacaatcatctttttaatgtataacgaagctctatgagactattttaacctataaaaggatttcttcaggttgtacaattgttgtagttctttatcaaatttctcatcaaaagacggaagttccatatagacttctttagtatgttttctattaaggaaggtattctcaaaatacaattgttgtagttaccaatattagttttcttctaagcagaggaggatgctccctcaagctgaagaataaatgttaattatgcctatcttgttacagataatcaacccaaaactcattcaaagccatagtgaaaatagttcctaattgttctccgagcttcacatatcctatggagagatcaggccttgttgaattttctcacaaaaaaaatgataatcgatctcaatgtgcttagttcact

SEQ ID NO: 319990 - DNA, 875 bp, Cannabis indica
aataatagctatcaaagtaccatagtaatggctccctatgagctgctatatggcagaaaatatcgctccccaattcattgggacaaaacaggagaacaatagtacttgggccttaaactagttcagaggaaaatgaagcaatagataagatcaaagctcggatgcttgcttcgcagagcaggatgaaaagttatgcagatcccaagcaccgagacattatatttcagacaagagatcatgtcttcctgggagtatcaccattgaaaggatctaagcgctttgggagccctaggtttattggaccttttgaagtacttgaaaggattggacatgtagcataccgattagccttgcttccaacattgtcatctatgcacaatgtatttcgtgtctcaatgttgaggaagtacgtatctgatccagtgcatgtcttaagttatgaagcgttggaattacaaccagatctgtcttataatgagcaggcagtgcaaatccttgatagaaaggagaaattccttcgaaacaaaaccatagcattggataaggtactctggagaaatagcaaagtggaagaggccacttgggagttggagtttaatatgaggactcaatatccgaagctattcaggttagattttgaggacgaaatccttttaacggggggataattgtaaagaccgcctaagtttaatattttgggttgttaaataattagggtttaattatgaaatttaattattaattatgatttacacatttgtggagatttatttaaattcagtatgtaccaattatgctatatatgtgaattccttgtttcccgtttttatgtttggtgcagtggaacgcgatgtaggacctgttgggttttatgc

SEQ ID NO: 319991 - DNA, 2007 bp, Cannabis indica
gctcggccatcaacccctatagaaggaaaggggaaagccgtcctggaggagcaggaagactcgtcggatgacgatgccctatcagtacttgttcgggcaaattcccctgccaaagtgcagagtacatcattttatttttaactttcttaattatcacgctttcttatttcttatgctcttttttgaccatgtacttttatttcgtgcagacatgggttagaaaatgctcgaggctcgtgaagaagagagtgggaggaagctcgggcttatctcctccgtctaaaaagtctaagggtggtgagacaaccccgtccagagagaaggcaccaactgaagtggtcattaatctctttgaggaacaaactgttgtggaccctcctatctcaaaaatgactaagtctaaggattctcgaagaggtagctcggacaggccagagcaggcgaggggtagatctgagctaatcagaagcaggtccgagcagatcaaggcccctgctcaacctccagtactgcacacagagactaaaagaggtagagaaattctcacttactatgtgacgtggtcggttcctgaggtgaatgagcagctggctggggcagacaatgacctttctctggagctggttatgggaggagtcctgaaggagctttcgagggtaaatcttttctgagagtttgctattgtccttcttcaattagctcagattttattattctttctctgtacagaccggtctgaagatggcttatgcttattcctgagctaagttggctgctgctaagaacgctgccatttccaacattatgcggatggaagtggacttggctaggaaggacgccgaggaggcccgagttcagctttgggctatctggatagagctgggagaggtcaataagaagcttcttgctactgagaacaagatggcctaactaaccaaggatctacaagccatgccatccaccgaacagcttgaagctgacattgcctccttatctaaggaagtgaccagccttcaagaagagagagaggttctccagactctttttcgcaggttggaagaaaagaagaaaactaaggaggaggagcttagagctgaggttgagaagtataagtcagaggccatgcagcacaaatccgaagtggagaggctcggagggaaagtgaatgccctagagacagttggtctcaagattttatatgattttttaaggccaatcccaaggcaaattttgagtacttgggcaattccaaaggcatgtttctcaaatactgcactactcaggcggcatacggggacttcgaggcgaccacttccacctctccaattgatcaaagtgttgaagtgccccctgctcagacaaatgatcctccagctccagctgacccagttgacccgtacaaagagcctgggactccagctgtttgaattgctttcttttttctatctcttttttatctgttcggccataagaccttttttaagacacagtgatcgaccaatcggtctttaaacttagaattcatttttcattttttggacaactagctgactgggcagcctttaatctcgggttttcatgcttttgttatctttaatgaatttcattctctgtttataatcatcgcgcaattgtgtttgttttattttttaccaaatgctttgtacaagtataagtgccccccaagtgaccgagcagacttataactcttggtcacgttttcatttatctttacaagtacactttcttgtttgttcggggttttgttcggggttttgggttcgaccaaaccttttgtaagcactggatggtaaattaatatcatgataatggattcaactcaattttaattttgaaataaatatctttattcatttattgatcataaatatgtatgttaccgtagaaacttacatcaaagctattatgctgatctgatttgatatttagcttaacatgaaataaaacaaattgcagaaattaaaaatcgtactttaaatggtggtc

SEQ ID NO: 319992 - DNA, 1876 bp, Cannabis indica
agcaatgcattgtagtgagtttagatggccttatatgggagagagaaagtgaatgaaaggaagaggagagagaatgggagaagttgaaatgagaagggtatttttgagtttaggtggaataataatatatttttgttatgtgtttaatgggtggattaatttaggtccatgctttacatttaagcatggtaacccaaattgtccttttaaaagtgacaacaaaaaaattcattatcctccttttttattttttgattcttacattagaaattttaatttttcacatgaattactatctttacagagaaagcgaattgaaagattttattttaatatttagtttattgatattttttttttttgaaagtaatggtttatgtatttgaaaaaaaaaagagggttttactctctggaaccttcgagcgaagttgggtttcattttcttctagtcttcgatctagccttgttcttgctgatcgtggtggtttttgtctttccttttcaatattactctgtgatattaattattgtctaaaagtttgagtttgcttttattagggttaggtgctcttttattttagttttctttggttcttaattttctgttttgagtttatagttgatcttccctctctttgttttgtttactgagtcttttcctttgagatctttggtcttttttcttttcttcacactacttttcaagctttctaggggccagaggtgagggagtctgcttcctccataacagtttccaatggaattttcttgcttacattcttttgggtattcaccatggctaaattgatagaacgactagtaaactttccttagctctcaatgaaagcaccaaaatatttacggagatttttgaaaattgcttaatcagagtttaagaaagatataaaatgttaaataataggcaagtaatttttacgtagttcgggcgttaataatccctagtctgcgagtccattgtattagccttgctggcgagtgtttgaatatttcaagtgttaacagtaagaatattaactctctcgtttctcttggatgagaagaaagcttagtaggaattttagcaaaggttctgtaagtataaaaatattttttctttgcacatgaaaaatagaagtatttatagacacgtagggcatacccttcacccacctaggatgtcatactcagcacaacacaatagctggcatttacaacatcgcgatctgaccgttgttagatagggaacctcctcatcgtgtggttcccggctgatgccatccaacttgtaaggttaacacacgtgttgcccaaaggtttcaccttccaaaattggtgtttggaccaaccgatggacaaaaaggaactgcagagcacgtacacgcattatcacggtctgatgtaggggacaatatctaatttggtgtcagaagttatgcaaccgtcgcatttagctccggataggacacacctgagtgagttccaagatcatttggctaaggctttgccagactagactagcctactaccttcctaatgcactcatgactgggggtgttcattgggccacatttaatatttttaggcctattcatgtccgatctaattatatattggatgttaaattttaccatccaattcgatccaattaatttcagccatccaatcgatccaacatccattgaatgttggattagatcggttctatccattgaatgtatttcatatatatttattagtttaatttgggtttaatattttagatatatcatttttaggattggatcaaatccatccaatattttaggtccagtatgtattggattggactggatcaatctaattcaagaaaaaaagagtaaattttaatgttaatttt

SEQ ID NO: 319993 - DNA, 909 bp, Cannabis indica
aacccttttatttgctattctctctctcactctaataaacctggggtgtaacacatttaaaagttttctttaatattcttctcacaagttgaagattgctctaaatgtgcatatattttatttatcttttagctttgtattgtttgggtagaatgggaaatgctctaatggtactaatataatattgtttggccatgcttgtattttcttgtcaagaatcatgagtccctgatgctgatttcactttgcttgtgttttctaggtcttacggctaaagtaattgatagaacgaatacaatggctgatgtctacggcgctttctatgatttctcatgtatcatgaagtccaaggtacgattcttgtatatgtagaaaccatgataatggctgcaccctatggaagatttagaagtatactttaccccaggctcgaagagagtttagctctaataatcgataacttacaaattataccaatgaaaaatgagtataattaaaaagcctaacatttcccttaaccatgaaaaaggcataatcttatgtgattaagagtgtgttttggagagaattgtgattatttggtaggaaggagctagaccaaggatttcaaatcctcaaatttgatatagtttgcaatcattggagtaattcccattctacagttaaaatctcctatttacttctaattccccctccaaggctccaaccaattaaaagagagaatgtttggtcttctctcattcatttagagaagtgctctatcatttatccccttggaaatatacctctcatttccttatcatcaaatatgtgtatgaccaaaaaactttcttggggtttggattataattgtgagccttgtttgtaatggtgattttgattaatatgcaaatctcttctttctttttt

SEQ ID NO: 319994 - DNA, 1492 bp, Cannabis indica
caattaataattttatataaccattttcatactggataatgtttatataaatatggatagccaatcattgtaacataaaaaaaaatgatagtacaatggttactagtaactagtatcacatcagtaacaaaatgtaaaaaaatgaatatgtgattactgtaaatagaaataaccaattactgcagtatataataaataatttttagcaataattggttatcgcattagtacataaaatgtgtaaaaatgagtaccaattactttaaatttgcataactaattactgtaatataataatattaaaatataattaatagtgataactaattatcacatcaataaaaatatttaaaaacaagtaaatgattacaataaatattagtaagtagttaaattatttgtaattaattattatgctttttttattttattttaagtttgttgcatattgtatgctgatatttttggaaactcattataaaataaacaagcttagtaaagaaataatttattttaagtttgttgcatattgtatactgataattttagaaactgtttataaaataaacaagcttaataaagaagtaactaaagaaaaagagattaagatttttacgagatttgactattaatgaattctagtccatgagtcaatagtattgagctaaaaaggcttcaaagaattttttacaattgtttatgccctatagttgaagaaccctaattctaagttcttctcccaagaatttaatttctaaccctttgagattttgggcccttattactataaagataaatggtattattaaaaattattaaaaaatatgtttattttttaaaaggaattttttatatttggacccctaaaatgagtgggccctaggcgcaggcttacccgaggaaattacactatataccatttttatattgtcattttttatttttatcctcttttttaaagtctatcatttttacctctttttttaaatattgtaccaattttgtccctgtcacttcaagatactctccatgtgactctcttatgtcagggtattttgggtacaatacatataaaaagaagtatgtttcaattaaatataaaattagaggtaaatttgattaattgattaataaagtggtattttcaacttaccccaaattaccccgcctatgtctagggccggtcttgaaatagggtatgggcatacccgaacccgttagggtgtttgggatcaagtaggccctttaatggggtaaaatagaatagttattaactttaagccacttgagtgaggcccaattcaccagatgagacttgtccgtacaatgataggtacgcttgaagatgccaggtgtcgtgcgtaactaagtccatacaaagaatgtcaaagatatgtcattagacaaaaatataatctttttttggtagcctacgcattccgccatgtaggggcaggttttggtgaaactgaatgtagatatgacatgatta

SEQ ID NO: 319995 - DNA, 611 bp, Cannabis indica
ttactatgtttaatgttaataatgtgcatgtattcattttttttaaagaaagttgtaacttcattagatcacatacaagttctcttacaacattacatttctaaaatgttacattgcagattctctctttatcaaccctactacattcttagatacattatgtgtcatattatttacattcttatttacataataaagagaagcattagggaaaaataataaagtaaacttaatacattcaataatatcaaaaagaggtgaataattcttacaatatatattaattctatttgccacaccttttgtgtctgtttcaacataagcaattggcacatttacaccagtccagagaatgcttcaacgtcaatgctccagcaatgtaggaattatagacatcaggaatatgaatatcatagttagcaataatgtttccttgataatattaaccacaactcctactccaatttttttatttcctttcaacaatagagaccggtcaatgttataagttaggtaaacgtgcatgtggggattacttagttattttttgggttttaataacctattaggtggtgtttggttgggaggaataaaaatataggaataggaat

SEQ ID NO: 319996 - DNA, 835 bp, Cannabis indica
cgatcacaacattatattagattgatttttaattggactttgaaagtttcttctaataaccctaatataattatcttaaaaaaaaagcttgtctctgctttgccataatgtcatatgcccggtaatacaaacataatgaaagtaattaagaataatgagaataaaattattgggcttcaaataaaatcttaatattataacaatagtaaaatagtgtagcaacactattattgtaaatgaaaataaacataaaaaaaataaaaatataacaaataaaacactaaaacaaacgtaatttgcagtggaattattagcggcagataaaatctgccgctaatactaccattattagcgacagatcctaatatccgccgctaatgggtggattatttttttaaaaaaaatactattagcggcaggcagtccaccgctattgcccgccgctaataagtggggggattttgttagaatattattaacagtctattagattgatggtcggttattctgttaagttacacttgacagttaagtttcttaactgtctattttgacaccaaacgacaaagctataaatagctttgtccaattcatttgtaactagttaattggttagacacacattgtaaatacattagtattgattcaataaaagagcactacaactcacggtttttctaagtgttcaaattggtttgtaattgttcttagatcagtgtgttggattgcataggaatcgactcattccttacaaactagtatcagagcaggacgggttcttgagtcttgaagagacaagctcagcgtgatagaacgtgaagaacatccagggcaa

SEQ ID NO: 319997 - DNA, 1202 bp, Cannabis indica
aattaatattaggaaaataatcatattaggccatattcaatagaaacaattgaaatcgaagccctagtttttattaactttcaattttcttgaatcattgcttcttactagttttcttatttttcattcttttctattcttttatttaaccaaatagaagtaaaagtttaattttaacgtacttaactacactccctgtgggatcgacctcactcctggtgagtttactacttataacgatacgtacacttgcgtgtgcaaaatatcgcaacaataatcataaaaataacatacttgtttacaagtacaaatttgtgaacactatttccaagctgcaaatccaaaacttgatccaaaaattattaaaccccctttaacaatctgaaaaacaataaaataaaccataaataaattataacatcattgctcaaaaaaataaataaataatactacacccacactgtcttgtgcttaaaaatgagacgccctaaacaagcaagcaaaatcatttttaaaaaatatatattgaatattatatttataatatgtacatatataaataaatataccagtactgtgggccgctcaaaatgaatggccacagcggagatggccggttctgcttggggacgaatgcgaactgtgaaggggatcatgtgagacctaggacgagcgacgaacaatctgaaatgccctgaagggtggttggaggtgagcggaggaagtatcgtcgtcgtggttgaagagaatgaggtatcgaagagaagaagaggagaagagaaaaaatgaggagagacattttttagggtttatatatataactattagcagcggggcctgccgctaatgctcgaccgctaatactccgccgctaatagtattaatagtaataaaatatatatatatatatttttaaatattttagtaattaaaaaatattattagcggcagaatttgccgctaataattctaaatttaaatgggcgggaactttattcacagttgtttttgagattattattagcgggtgacattagcagcgggtcctgccgttaataatggaaaatattatatttaaaattttgaactttattactggcgaaccccattttccgccaccagactagcagcaaagaccatcttccgctaataatttcgccactaatagcttttattgttgtagtgattgattgtgttcatct

SEQ ID NO: 319998 - DNA, 602 bp, Cannabis indica
ccctaacccctttccattcaaaatttttaatttttcttccccaaatcatcaaatcttctcatctattaactaatttctcaatccataccatccaaaatccaaatttcatcatcaatcattaatttctcatcaaaaaccatacccaaaaatatcaatattaccccaaatccaaaaataccattgttcttcatcttcaacctcaagctttcaaggatattcaacaatggatcatatttaggaatttgattgattatttataaattttgggtggtaatagtgaatgttgtgggaaaattgttgttgatattgggttgttaaaaattatattgtggtattgagttgttagtgatattaattgcattgtttttggtgattgtaaatttttgggaagcagaaaattaaggggatgtgctgcccaatttttcttagaattatttttttttttaaaaaaaagagaaaaaaaagaaaataaaaaaaaagaattatttctaagataatgggccaaaaagaactaggcacgtggaagaaggttcgtcatcaaatccgccagctacgggtttcaatagaacccggtttgtcaatgaggaggctcagaatcgttt

SEQ ID NO: 319999 - DNA, 1828 bp, Cannabis indica
ggtaagggcaaggctacggctgaaggaccgtgagagcgagccagtgaagattgtacatgtcggggaagtttggcctggagcgtacgatcctcgggacagcaaggcgatttttgtaattagtcgctaggcgacaagtattttgtatagtcagtgaacgtttgtaaaatgttttgtaatcgggatcccgagtattttgtataaatattttataagtttaattaaaaagcaaaaattttaattaatcacgatttccataaacctcgttgattagcaacgagctgcacagtatgtttaaaaatcatgtaatacgcctatgctagttagggtgttatagagggagtcaccaaggaagacatagtagccagaagtggaccttcgagtgtcactgcatgaggcccaatcagcatctgaaaaaatcgttagatgaaagtctgaattagacatgttagtttcagcagaagcagacaatttaacggaggaggcagattgaaagaaaagcccttggccagaagagcctttgagatatcgtaaaattctatgagatgcatcaagatggggagctcctgggtttgataaaaattgatttagttgtttacagcaacggaaatatcacgacgagtaatggttaggtaaatgagtttacctatgatgttgcaaaatatttttggattttctattggttccccattatcggatgagagtgaatattaggttccattggtgtaaaagcaggagaagctcctaattaataacctgtgtcagttaaaagttgtaaggggaaaggtctttgggacacaaaattgaccgatttccaagcccaaaaaaaacgtaaagggccaagatccttaagttgaaacacagaattaagttgatgcttaaacgaaagaacagcattgtcattatttgaggtaaccactatgtcatccacatatattaaaagagcaagaaacatgcctttgtgatttttaatgaataatgtgagatctgaaaaggattgagtaaatctagtggataaaaggtaattgctaagttttgtaaaccattgtctaaaggcttgtttcaagccatggagacttttgtttagtttacaaacaataattggaggaatatcttttttaggtttatatcccttagggagtgtcatgtcgacagtttcatgtaaatctccacgaagaaaggcgtcattgatattaagtttgtacaaagaccaattgttaatggatgtaatagcaagcagtaattttaatgtattaaactttaatacgggagcaaaagtgtgaaagtaatcaataccttctttttggttgtagcctttagctactaagcgagctttgagtctttcaacagtgccatcatcattgtttttaattttgtatacccatttgcaactaatggcatgatgtctgtcaagaagagtgacaacaatccaagtgtcattggcttcgagagcatctgtttcgttgtccatggcttttttccattttaggtctttagttgccattttgtagctagtgggtttagccatggagtgtgcagcgaggattgatgtacgaaagtgttttgttaaactattataagacaaatattttttaatagggtaggtagtggacggagtagcagtggtattgcaaatgtaatttgaaagacgtttaggtttggataaagttcatcctatttttgaagtgacaggggaatgaattattgactcactaagtgtggatggtacttcatcacgaggtgggacatgtgtgtgttgggttttatgccctaaataaaattctatttcaatgtaatctaatttattcaacatcaataaagaaacagaagt

SEQ ID NO: 320000 - DNA, 2312 bp, Cannabis indica
atgctctgcgacagaaaggaatcaagggctagagatcttaaacggaaggagtcattatattccgctgcaatcaatgtaaggttttcttaaacccttatgtgtatatttcattattttagggaattcatatttaggatgttaattcaacatacttgttagtaaatctagatcctggtaaaataatcccaacatgaagtgcatgtgcctggtgtcgtcttcagtaaaagtcattggctaattcatcatccttggacgctgggtaggtgattgtaccatgtggcaagcttcaccttgattcaactcattcatgtacgcttctgtgcattttgagtgctccaagcaatatgaagtccacttgaaatagttgctacctgaccatctacgactggtaatgcagctcctgaagggtacagatttctgggactgggggctacaactactgccactattggagcgttttgtgccccctaaagggcttgtacaattggagcttgtattccaggaacttgtggatgacctactccctgaggaggacttatagctccctattgtcctggaatgaaaagttgtccatgtgcaactgcctgtcccggatagatgattgggattattacctaattggttagtgtccattccgtactaacccctcaatttcatctcttatgtagtcctattcattggtggtgtgaccactatcaccatgatattcatactttttgttcagatcacttctttgttttctgcctttatacattggtggaggcttcctgtagtgaaccatggtccagatttccttgtatacattctcccaagtatctatgagacttgtgtactcggtgtatcttgattcttgggtttttcccttcttcgcagactcacttcgatttggacccttcgtactccttttaattcatgagtgggttatattggactctggaacttctgttttttggtttgtttgtctgggagcggcattgtattacgtttgtgtagctcgaacccaaaaaactagcttgtgcagctggctgcacggaagtacttagtccatatatcgtttgagtagtaaaagtagttggcagagggtaaatggatggagttgtcatttgcgaaggctggtcatttattactttggtggaaggcactgggagtactccatatgcttgagcataagcatcatctagatttataaatccttgagttcttgttaagaactcactctatgtatctacccttttgcgctgaagatctccccacagtaaagatccagttgtaagtcttgatgtttgagccaccattttcatgtcatcagtgactttggttttaacagccacatccatcatgctttgaataaacttcttaaggctttctccttgttgttgcttaatgctggtcaaggagttggcttccaaatcatagtcattgactgctataaactactttctgaacattacttgtaggcctctccagttgtggatcgatcccggagataacctcttccactagtcctccgcagactttcttcgcgtcaatgaaaaacatagacattttgcatcatcactggccttggcgacttgcatgatgcagttgtatttggacaaatggtccctagggtccgtacatccatacagctccatctggggcattttgaaacgctttggcaatggtgcatcaatgattttcttcacacaaggctctgtatcttcttcctcagagtcagataccgcaccactttgttttctagaaatcttttccatgatcttcatcaaatcctcaaccttacgttccaggcgttgggttttatcacttgaggattctcttatgtgaacgcaatcgttgatgtggttttataaatctttcctgcgggatcttgcttttttagttttggttatttccttcttggtgttcaatcttcttcggagatcatttgtggaaaggcttccaccattgttatctgatacttgcagtactttatcaacatcctcatcgtggttactggaatcattgggaggaagcttttcccttcgagactctggcttccaaactccggcatcagtcttatttctctacgtgactctgcctctagaattggtctggtcaccgtgccatgaggtgtggtttcctttcctcttctattgaggttggtcagaagctttagactttttaggctattttgtggaaggagtcttctctagttcttcaacagcaattcctttgcctttatctttgcggacgcctaaagttccaagattttttggatctgcttttgataactctaagatttagagttattttcatatctttaagcttgaatt

SEQ ID NO: 320001 - DNA, 593 bp, Cannabis indica
acaatatacaattgatcgtatttttttatttctctcaaagattcttcgtccctttttctgtgcgatctgcctttatttataggaatagaagttggcagttatttacatttaaattcaaaatatataaccgtttgatgaaacgtggttaattcttaactgcagaactacctattatctacaacataatttggttattgagatataatcattcttcggaccgattagcctaacgtattttaagaaagttaaacaattgttttgatccaaaggtagaacatgaaaaagaagcaaagatatgttggaacaattaagttttcactttttcaacaaaattaaaaggaaatttacaaaaattgatgaaaacagggtattagaatatatatatataaataaactatttatgtataattataattaattattatgatttgttgttcgtttttctttttgggtttcgttcaatttggttgagtgtcacgaatttggttaaaattagagaaaccttaaatttgtttagttgcttattttatctttattctcattttttcactactagaaaaccccctttagagaggcggtttttaagccctttc

SEQ ID NO: 320002 - DNA, 868 bp, Cannabis indica
aaagggaaaaagagaatgaaaagaagagaaagaaaaacatttgcaatgtttccataacacctacacttgtcgttttctaagtgtgtcgttttttcattttttccaattttgcccttcattatataaaatgccaccattctctttgttttaccattttacccctatcttcaattagaatttcagatttgcccccttcgtctttttttttctcttacaattttaattataaactaattatgcttaaattggtagtaactaactatatgatgttatgaataattagtattttttataataattaataaataaaaatatttaattataattataataatatgacattttataataataatgaactagataaatacaataaacatttcaattactttagtatgagaaaagaaagttcttaattaatttaaagagtatgcaataattaacacactaattacttttattattgtttttgtttataggaatattattcttctttttttttttcttgaagggaataattacttttgttacttactacaaaatagatagatatattttaggttaattattgctaaagtttattatactctacaaggttatgatttttttcccataatgataatatttttcttacaaaattattaattatcactttctaattttcattctctttttactaattaaaacataaaatttagtaacaattacaaaattcatttcaataaaggtgtattatttatgtatatgacaatgacataaaggtcattatctatacatatatttatggcattaaagggtttgtaaagttgtaatgaaattatgtatttatttattataataaaaataaataaatacatatatacatatt

SEQ ID NO: 320003 - DNA, 1158 bp, Cannabis indica
gcccaagatgtggtagcagcttcttccactaaaggaacaggttgtgtgtcaaccaaactagaaacccaactagaaaattctactaaacacaggttatgagaagccacaacactgagattccaacaagaaacagcaaaagagcagttaaccaacacatgggagatggattcctcagcaacatcaaaaaacacacattttattcccaccggcacatgtttctggtgcagctgagtgcgagtggggaggcaaccagttaacaccttccaaaggaagtgaagaattttaggggaaatcgtcaatgtccaaaactttctccaccaatttgaattatgagaagaaacaacatgatgtttttgtgattgcaaaaagtgatacacactcttaatagagtagaaacccaaattctccatagacctaaaccaatgatccatggtagcagaatcactcagaggaatttgaaaaatcagctcctggttacgctcaatgaataagtcttgaacaacctccaagtcccaatctcttcttccaatctgcattaaactatcaatagtgaagttgtcaaggccaggtaaatctgtcatgaaaaaaggaaaagtgtcatgtggaagccaaggatctcccacaatactaactgaagtgctagcccctatactaacacgagccccagccgaaatcaactccttaatctcatgaatgctttgccaaataaagcttggattgttaccaagatcggcagacaggaagctaccatgggagaaatacctagctttatacacccgactaacaagagagttgtcattcgtcaatagtcgccaatcttgtttaccaagtaaagcgagattataatcatggagtttccgaaagcaaagcccaccattttccttactaacacagagacaattccaactcatccaacttacccctcgagaattcttagaattagaattccactagtacttagccatcatcttttccaagtcatcacaagtttcaagaaaaaaggaaaacaatagttaactttttgaccataagcttcctcaaacagtctaagtaagggaatgacattcgaagcttccctcttattagcccgacaataaatataactatcatcagcaaacaacatgtgggagatagtaggaactgttggaaattatttta

SEQ ID NO: 320004 - DNA, 475 bp, Cannabis indica
aaaataatttccaacataataagcatcgataatttagtacaattagggtaaatgggttgttcaacatcttctaaaaaaattggaatttttcgggatcaacattagattcaaactgtacatcatcaatcaattctgcaaggttataatcttcttcataatccccattaacaaacttatccttcctagagggtacctcacccaaatttcttattttttctctgtggtgataccaaaccttataactcctatatatattgttcttaaataaatgtttccttatctaaacaagtttcatacactccatgttaccacattgaagatatgggcaatgaactaaatcaaaattatccgcattcttcgcagagaagtctaaaaaaaatcaacacaaccttcgggagaaggtttttcaaagctttcgggagattgcttttcaagtcttgcatcaggaggattcaagcactcttcaaggtgatcg

SEQ ID NO: 320005 - DNA, 821 bp, Cannabis indica
attaaaaaaaaaaaaaattgttacctgagatggaggagcacgcagcgcctaagatgatggagcaccggtctccgcctgagagggaggagctctgcgctggcctgacatgaagaagaaaaaaaactaaatatttataaaaagaaactaaacaaaatataaaacaattacacttacctcctttgacctttggaagatagtctttgatcttggagggtatcgccggtagcaggaacaaattttttttgggtctgagtggctggtatcgtgtgggagcagtggcctggtatggtggtgctgtgtttttaggggagaagcaagcatattgggacgatataataaggatgaaataaaatgggattagggctaatatgtatttggcctttttttttttttaaataaaatggtagacggtgacgtgcaaagggtgtgagcaaccatgtttccccacgttttttgcacgtcactaaagccacatggctttagtgacgcgcagaaaatgtggggaaacacatttgctgacacgcgttgcgtgtctccataggccttggtttttttttttaatttaatttttataaaattatatattttaagttttagtatttagtgacactccatatttttagtgacacacatttcgcgtaataaacactgaacatttagagtcgaatcttgtgtgtcactaaaagccactcttaattttttagtgacccacacttttatgagtgtcactatatggtgtcactaaaagcctaatttctagtagtgaaaggcattaaacgttttggtgagaaagggaagcttagcccgaggttcattggacc

SEQ ID NO: 320006 - DNA, 763 bp, Cannabis indica
cgtatgatctttgggacatcaagtccttttgctgtgtagtcgctatgcgacaaaacttttgtttatgaattggaaacttttgtaaatgtatattgtaataggatcccgggattctataaaggtattactttatatttctaatgaaataagaaaattttaattaatcacatttttcattagtctcgttgattaggaacgagctacacagtatgttaaaaatcacgctaacacgcctaaattagttagggtgttacaagagataggtcaatgaaatcaagaatgagtaattggtgtttgctccataaccactaaagaaagccaaaacatgagaacctccaattgtattctcagaggaagatacgaaacaagtgaggtatccacacgtcgaacctcttgtcattatagttcaactcgccaacaagagggtaaaaagagtgttggtggataatcgaagctcagtaaacatcctacacaaagatacgttaaagaaaatggggctacacaatgcaaagttagaaccttgtatggtgagcttatgcctatttaccggtgatagtgttgcaagttatggcatcattgaactctcattaacaataggtgagccatcattatctacaacattaatgcaagacttcttagttgtttatctaccgtcattttaaaacatattgatggggtgctctgcattgaattgcgtaggggtagtcagttcaatgaaacacctatctttaaaattccaaacaccagcaggagtaggtgtagt

SEQ ID NO: 320007 - DNA, 577 bp, Cannabis indica
ttttttttttagtttttatttcttcttccttcttcttccagtcacaaatggtcaccaccaccacatccatagccacctaaaaactacccatcacttttaaaatcacccatcacaacctattttcaaattcaaataacacaaaaaacataaacaaaagtcaaactaaatttaaacaaatctaaatcccaaaaacacaaacacacatatatatacaaaaatttctccttcttctcttcttccagtcatattgttaccaccatcaccatccatagtcacggtaaacaccacccactactaccgaaaccaccaccacaacttattttcaaatctaaataaaaaaaataagaaaacaaaactcaaactaattcagataaattcatatccaataaataaataaatacacacacgtatatatataatctcaaccccaaaactaatatttgaaaaccctaaatttattttcccacaactatttaaaagccaaaatatagtgagaaagagaggagattggtaaaaatagagagacagagggagagacaaaggtgatcaatattgggagagagagagagagaggaga

SEQ ID NO: 320008 - DNA, 808 bp, Cannabis indica
tagtcacatatcactgtaaaaaatctcaaaattgtcggctgtctaaaaccgtctcttatacaaacatcgcgaatattggatagaatgagcgacgattgaaaatagtcgatactataggccacagtttaaaaccatctgctatactatagccaacagttttaaaccatgacctatggtatagccgacagttttaaaaccatctgctatactatagtggatttttttttaaaaaaaaaatcatcatctccatcctctttgaaaccaaaatatgggttttgtttggcattaagagccccaaagagttgagatatgggccacagttttgccaagatcacaacctcaagatcttcgacgatctgtgaaatacaaaaatctcaaaaatacataaatctcaaaataaaaataataacaaagaagttacgagaaatagtggacgagagagaagactgtccggtgctcgtggccgcccgtctatcttcggacaagagagagagagagagacgagtgacggtggtgctcgtggtggagctcgtggccgcgaccaaccgtggtggagcttgaacagactttcatctatggtggagcttgtgtaagtgaaggcaggaaagagagaacgagagacgagagacaagtggtggagcttgaacagactttcatctatggtggagcttgtgtaagagaaggcaggaaagagagaacgagagacgagagacaagtggtggagctcgtggaccatcgtttatgagaaagagagaggatggcagggagcagaggtcgaagcgagggagaacgagagagagagagagag

SEQ ID NO: 320009 - DNA, 702 bp, Cannabis indica
tgtataaaaagatttgttgatgtataaattgtttaggctccaaatggggtgctaataggttgtaaataccgttttgtgcaatataatatcctaatttatcaaataaaaaaaaacctggtgtctagtactcatatgaatgtaatattactattaatgcaatttattatcatatcctatttatttttaatttaataaaaattataaaaaaacttaaaaccaattataagacataaaatcatagagttactaggtagtgacaataataaccgcaaacaaagaaatgctaatatatatggtgaatttaccatatttacgaagtgtgatcatcttccaccgaaaaaataaaaaggaaaatctcatcctatatagttcatacgtctaaaatatatttcactcaaaaaaaaaatacgtctaaaatatatgtaactaaatttactattacaccaattaattataaaactacgtcaattcatacgtccaaattatctcttattacatcgattagctggctaatagttttaattgaaattactatatttagaataactgtattttgattttaaaaaaaaaaggaaagaaaatatagctacaatataatatagaagggaaatttgattttctatgcttagaaaatcaaaaaatttgatttttaaaccaaaaatttaaaacctaaaaaaactattccttttttttcaaaacccc

SEQ ID NO: 320010 - DNA, 1339 bp, Cannabis indica
ttaactaacaactcaaagaacacaaataacactcttgagatcgaacctaaccatgttaagatctcttgatctaagatcaaccagtgatattgacttagaaagatacaacggtaggattataatatctttgctaagatcaatatcggtcccaatctaacatacatccgatactaacatactttgccaatgttttggaaagaacataacacttatccaaagtgtaagtaagctttatcgctgactatcacatcagtgtaaattcagtgcactgatgaatcaatggacattattttttgaaacatataatcacaattaccttccactgtgctgacatgactgtaattgtgaataactatatgttctggacttaacagaaattgtacacattaaaccataaacatgaaaactacatgtaaacataaatgacttctaatcttcttttgataacaaatcagattgtattgaaatgggttttatttatggcataaaatcccaacagcctcaataaaaggagtattgattctttaacattcaaagtgggttctaagtgccacagatacaacgtaaggggttgagcgtagactaagaggtcacaagctcccccaatacaatttaaatctagaaaaaggttgagaacaacctaaggggccataagatcccctatatccaacgaataatcgataagaggacgagaatgctctcaaaggtaatactcactcaacgaagaggttacaccataaaagaggttacaaaaagaaaggccaaagtgttaaaaagctccctcaaacaagatgagtagctgagaaaaggtcgagaccgctccaagagttggtactccctcaatggaaaggttacataagttaagaggtcgagaaaggctaggtggcaaagggctccctcaacaaaatgatgaaaactcataggagaggttgagaaagctcaatgagctaacactccctcattgttatgagtactaatcccaaaatgggtcaagataactcataaagcttacactcctcgtgaagggtaacaaaaagtaaaagagaagaaaaattaagtcgtaagaatgagctcaccaaacttagtctacaagaatccttcaaagaattcttatagactagtgccacattatgagcatgagatgtagtgggagaaataccataggaatatatgataaatgataagtacattaggttgccctccatcagcctgttatccctcagctggccctccgtcagctagtcacctatcatctggtcgtcccttagctggccctccatcaactggtcatccctaagttaattgtccctcaccaggtcgttgttgggttttatgccct

SEQ ID NO: 320011 - DNA, 1515 bp, Cannabis indica
aaaaactagaacaatatttctatgtacgtggctctagatgaattcaaatttttttcattattcgtcaatgtgatatgaataaatccaccattgaaaatctagaaaaaaaaaaaaaacgttaatgcaacaggagaaacattagctactgtatcaatatatttttttggtttatacctgatttggattgatcaagaactccggatctacagtttatgaatctaaaaattgatgctaggaggattagttttcttcgattttaattgtaatttagggttgaattttggtttcgaatcagttttttggcccaattttgcataaatctgaaattttgtgtgtttggatttcttacggtcttcttctcaggtgaagtcgccagaatttatggtaattctccatctggcttgatttctttacggttggcctgctattttggttcctggaagctattgttgttgaagaaggtagttcgagcgactgaatggttagagcaagagatatgtttataaatttttattattgggctatatatatttataaggccaacccaatatatttgtgtaatatttttgttattttagtatatacatgaaaaaaagctctaatgtaatagctctattctattttctgtttatgtgacaaaagcagagtcaaagagttgattaggttaagagcaataatattatatttataaagtaacactagggtaagatttaggattaaaatggattaaaaaaagataaaatgacttaataaaaccctcgtggccgaaatattatatgaggccacatgagttttaattttgtcattttattaaaactcatatttttctcaaaaataccattcttttattctaattattcaaatgctaattttatttatttaataattataattaattatccaataaaatcaccatttaacttatttattaattagattttctaaagtctctcaatcaataaatgaactcaaaatttttttcttctcaaatttgcccttccttagtaaaatttataaataagacatcttacttagaattttaattgattaattaaaccaattgattgagtctacaagacaatattatctcaggtagtattgggaccatgagactatataatcaaactcccaataagtagttctataatttatcgattaaattctctcttattaattcctcctaagttcactatatattcgaaattacacttttgattacataaaatactctgttcaccaagaatatatactagggttgtacaaaaaaaattataaactgcccaaactgaataactcgcccaaaccaaaccgaaaaaactgataaaaattacaaaccgaaataacccgacaaaattacaacccgcccaatctgttaattgggcgggttgaaaataggtccaacccgtccaattaaaccgaataacccgaccaacccgactttggctttttttttttacttttagtttttattatatataacataaatgttaaatatataataatataaattatata

SEQ ID NO: 320012 - DNA, 1144 bp, Cannabis indica
cagtatttttgtaaaattccctatatatttatacctaagtatatgtgtgattctgtatatatatattatgaccatatagcttgggttagcttgaaggaggagtaaacataaaatgataagttggcaccgcccaagcgtagggaggccatgtatgtatattattaatatttaaccttgtattttttagggttctattcgagtcaatatttggcacctatttttggctttttaataatgacattttactataaattatttcacaaaatacgtaaatataacaataaaaaattacaaaatacacagtttcacgaaattttaaatatttttacaatttttttaattttatttacagaaaatacggccttttatgttgtactcttgttgattttttgttatatgtatattatgttttattgttattttgttttcgtgttgtttctttgaaataccgtaaaaatatatataaaaaaattttaaacgtaaaaatataactttttttacaaaaattagtgttatgtaattatcccaaaaatttatcatgtataacaatgtatgtataggtgtgcacaaatattgacatatatatgactcgtacataatataatttttcttttacaaaatttgtgatatcattaaatttatgttatatatcaataaaaattagtccatgtattttttttaaaggaaagatttcaatttgggacctcttttctgtgaagatatgagtaaaattattagactatatctatgatctccataataaaatgtattagttacaaaaattataatttaacttgatattaaatgattaccgaggtgaaatgtattttttttggagggattcgaacaagagactttttttttttgtgagaagagtgtgaaattactagaatatgcctatatgattactctgtattgaaatgtattacttacaaaaattataatttagcgtgattaaatatgtttttaagtcttaattaatacttgttatggttaaaattaataatttgtacacatattttatgattaaaatatttagtcatcacaatcaatctatattaagatataggaagattttttaatggatattaccggttactaactaaatttaactataaatattaattttaaaatattaaatcat

SEQ ID NO: 320013 - DNA, 1382 bp, Cannabis indica
taaaataaataagcttaagaaagaaataaattaaaggatgagaaataaggatttttacgtggtcagagcgttaatgagccttagtctacgagtcaatgttatttagctagaaaagatttgaagtatttttacacaagagtgttcttgctaaagtttaagaatcctaattcttagcccttgatttcaaaaatgatttgccaaccctttgcatgaaagaataatgttctatttataggctagagtcgggtatgggtgaacccagacctggtaagatttaaagatgtcaactataggtccactgatggggtaaaatataatatatattgactttgggccagttaggcaatgcctaatttacaagatattggtcattcgtacgtgtggagaccgtttggtggtgacagatgtcgtgtgtagccacactggtacaaagaatatgatattggacaaaaatgttgtttccttttggtggtgtgcgtactctttaggtcttacgcaagggacaaacctttaccttggtgagaccctgtgtctggaaacatccacataggatggtttctggatgttttcggatgtcccttcagttttccaatttggattaccccgtgagcgtatctggatacgtcctgatggacctttcatcatataggcaagatagcctttcccagactgaagcgctccgaccttatcgcacctgtaagttggatttacatctgaactccgagtcgtaacctgactccattgtgggctaatccattaacttgattgggcacagggatgggcccatcttggctattttgggccttgaaaatacacatatcattaatccagaaactcgaataataattggtatatatactttttgttgtatagtatataagttttattctgtaatacatcatttattttaggtcatgtttagtttctattttattatatataaaggtggtttataattttgtgggcgtagtataattattttaataatggtatataattttgtaagtgtgctatatacatttttttcaatgatattattttatattatttttaaatattttgggtatatattatttgttgtatgatatatatttttcgttgtatatagtatattatttatttaagatgataatttattttattttcttatatatatatataagaaatttttacactaaaaatctgttttgcacattttattactgttttacccctacacgcctacatcaacatttttacttatcatctttcttttattacactaataccacttacacatcattcccatgcacatacacgtgtgccatccccatcacacatcaatcaactcccactctcttccctctcttttttccttttcttttcatttgattttcgatttt

SEQ ID NO: 320014 - DNA, 604 bp, Cannabis indica
atatttatcataactttaataatttttcccatattttttaaaattgccctaaaaaaaagtaaaccaacatatggtccctcatctacaatgtgctacgtcactaaaattgcaccaaacaactagtagtgaatgcctttcttgaaatagagggttttgagcttgaaatagagggttttgagaatggactggcaccaaaaattcatatttaaagttccatagatttattaaatacttcttattagagtgagttacccatgttccaacccatgacctcttgtcactcgaaagcaaacattaccactaaacagggtcggccatagggcgaggctatgtcggcctaggccccaagtcccacaattttaaaggcccaaaaatattaaaatttatataatatatgtttatatatataataaaatataatgtatagagtttagtttaatatattgtatataaaatttgtatcacaagtggttagttagaacttgaaatgtataataatgatgaggtaatcgcttcgattctcactattaataatttatagaggttattagtgttcaattttttttttatttatttaagataagaatataatattttaaaatat

SEQ ID NO: 320015 - DNA, 661 bp, Cannabis indica
ttgttgttgttgttattattgttattattatgactagtttagtttctactactacaatggagtttagcttaattataacccaaaaataatcacttgaaaaagttcagagaaaatggagtggtagtaggctgagaatgatgacatttctacagtgtttgatgtacagtttagatccataaatgggaagaaaaaaaaagtaatataggtaaaaaaaaatggagaaaaagagagaaacttttttttttttaaatatatattttatttaatgtaattttggacaagaagaagaaagccaatatttttgggtactttttttggaccagttactgaatcaatgaatgaatctgcctatctttcctgacttttttttttaatattaatgtcaaataattcattggtttttaatactgttttttttttattactttgtgctactatggttttatctaaaatttgatagaatttattttgttgtcactaacaaaagtgttcataatgattttgaaacacattgaattgaacacagtagtgtttcagttttgtttttgttttttttaataaatgagatataacctgacattaataacacattgttatagctattacctaattgtgacatcaagtggggtatatatattgctatatatatatatatatagta

SEQ ID NO: 320016 - DNA, 1894 bp, Cannabis indica
agttaaaaggggtaatctaagtttaaagtgactgtatcgaagttgaacaacagcatctgggtatgtctcatttgaaaaaacatacgatatacatgatgggttgctttgctttaagtctttaaccaattctcctctactgtgaaagaaaaaaaaaagcaaaagtaaaagacctaatatttggccatgcttctttcattgatctttgtaacaaagaaatattacagttggtaaaaaaaaaataaagaagatctacgtacggcgtccttagaatcatcgcatactcatcggagaagatttggtcaagacacgaatcatgaatgaatgcttattttaaaaaaaaaaaaaaagccatgaacttctgcagtaggtagtacttagtagatagatcatcttggtcttctttcgattaataactattggactgtaaataatttagtcttgttattccgaattaaaaaataaaactggaacgaattaccgaatgaaaattctgggtgagttgcgaactatgtcgctttctttaagacgttttgcgactctgccttaagtgtgcacgacaatctagaaaccgcaacatccccaagataatatagtctctggacgaatcattctcaaccgaacgatatcgctctattacaccccaacaaattgctctaagaaattcgatagaagttttgaagagaataaattttttctgtgttgaagagatatgttcttccgttgttttgatacgacttatatatacttccaaagaagtgttcctatcccatgtaggactcaaagcactatcacacactccactctcatttttttttatataaaattttaactaacttacaacaatcccctcgaaattttaaaaaaaaaaattctcgagtaatatcaaaaaactataagatagtgcttgaataaagatatatttcaatttgaatatttgcatagtaaattacaatttagattttactagagtgactcgaaatcttgaattctatctaacatcgtactacacaccaatctttcaaggatgtatttaaaaaagctcgtgcattaatggtcatgcatgtctattccagtataatgaacgctctagaaattttgtcccaattccataggaagcggctctaattttacattcacatatgtgagtctatcaagagtactcctgtaaatcggtattgcactccacatagagtatagatctcattaagagtttctattaactcatcctcttatcgcttcaagacctcatgcttctcatttaaaaatagcatgatctacacatatcaactcataacttgttattgttggcagttgttttacaaggatctggatttactagcatgtatgtttgattattaactataatctaacaccttaaatatgaatttcctaatacgatgaaataaacacatataaagtttaaaaaaatttacattaatgacagctgaataataatgactcattccattcatatttctaggccttgatcctttctatagcaaagcattatcaagatcggactcggatcttctctttttcagtttggttagattcttcacaatcttctacactatgattgagtacttgacttgatatgagtgcggatgatactctatcactaaaggcttcaaatttgatcaagaagaagaaggaaatcaaaatacaaaggaaggaggctctcaattttctaatggtctaacaaagaatttatttttgagttggatgagaatgagagccatcttattccatttatagtatttcaactatggtttaggatttaaattagggttaatttcacaaatgcacaaaaacaataaaaatacggttttatggaattttaaatatttttacgatttttttattttatttacataaaatacggtcttttatgttg

SEQ ID NO: 320017 - DNA, 1292 bp, Cannabis indica
ccagtctaatccaatacatattaaacaaggctatggcatcagaggtttattcatgtcagtgagaaaggaatgacaaaactagaaaaggaatttcgaaagagaaactcggtggtcaacttggttatcgtgaacaatgtgtatttggtgaaagttgcaagatcaagttcaacacaagtatacatactctagtgaactgagcatcatagatgactactcaagaaaggtgtggatttttctactcgacagtaaagatgaggcactcaaaactttcaacaattgaaaaaagtgactgagaattaaataagcaagaaggtcagaaactaaggactgataatggtcataaatacttctcaaacgaatttggaatgtactgcacaaaggaaggtattgcaaggcacaaaataattatgaaaaattcttaacataatggtcttgcagaaagaatgaataggactcttcttgaaagagtaaggtgcatgctgaatgaatctagtttagagagacatttttttgggtgaagttggcactacaacttgttatttggttaataggtatccatctgcagccattggattcctaacacctcaagaaaaatggacagggtagtcaccaaactgtgatcatttgaaagtgtttggttgcaatgcctatgcgaacatcaaacaagacaaacttcaaccaagggctctcaaatgcatcctctttggttatcttgatggtgagaagggctacaagctatggtgcttagaaccaggatacaaaatgtgcataataagtatggatgtaatattcaatgaagaataaatgcctatgaaagtcaactcgagaacatgcacaattcagacaaggaattcaaatagtatgaaatttgaggtggaaaaggtaacacttcagaaagtggtatcattgtcatcaatagaagttgagtacatggttgctactgtaaccattaaaaattctctattgttaaaagggttgacaaaggaactaggcttaaattcagaaagcgtcagtctattgtgacaatcaaagtttcctgcacctaatcaagaactttatgttccatgaaagatctaaacatattgacatcaagcttcactccatcggagacattatcaatgaaaatgaagtcgaaatgaaaaaaatcaacaccaaagaaaacatgcacacatgtaggggtgttcgcggtgcgggtagtgtgatttttgactattttttcaaaccaatccgcacatgcggtttttttaatttccaaatcgcacccgcaccgcaaaactaaaaaactgcaaaaa

SEQ ID NO: 320018 - DNA, 914 bp, Cannabis indica
tatccaaatcacacaaaattggtgagatctcaaatcacccaaaacacccaaaaacctaatcaaacccattagttttataaactcaaattccaaactcaaaaattccaaaaacaatatcattatatccctaacgggtcagatctccctcagttttacaaaaattcaaattcattaacttctactcttacaaatctcaagaacccacaatccatttcccaaaaaaaaaaaaaaagatccctcagattctgacgaagaacaaacccagacccatttctttagatatcctttcattctttgaaagatgaacaatgtccttgtatcctctcctaaaatccaagagaaggtcgctccaagcaatggtgaaacttttcaactgttctttcaggctctcatctagagcctcctccaatttgtcattttgaggctcatcagtggaggggacgaactcggtcgatatcgtttatgcatcaaacgacgacgttgagagaaggataagatcaatggcgtaccgtactccggtcagagtcgtctttaatattttggaggccctattctaattctaaaaatcaggctcctacaaaaaaagtacaatttataaataatattttacatattattatacgattatatattttacaaaataccaaaacctccaatttattttattaaaattgttattgattggaatacaacaaaaaaaataatagaaaaaaaaaatatgaaaagtttgagaaaactaattaggctaattaggaattttgccccctgaactttgacatgtaccaaatcatgccccttaaactttaaggtcgttaaaaatgcccctgaactatagcgattattggatttaaggactttgtccaattttagtaaaatatctaacatggatgaaagttcaggggcatgatttagta

SEQ ID NO: 320019 - DNA, 1052 bp, Cannabis indica
atcaaaaaattaaaatgaaaataccaaaaatcaggggcccatcgggcttgcaatcgagcccatcagccctaccaaaaattgaaagaacaacttacctgagacaagaccatcggaccccaaatcggtccaagcatcggaaccatcgggccctgctttttgaaaccgatattagggaccatcagacccatatcggtccgagcatcgggcccatcgagcctttgctttttgaaaccgaatttagggaccatcggacccatatcggacatgcatcggacccatcaggccttcttcttcctcaagaaaaattttaccaatttcatagatcgagataatttaacaaaatttccctaaatctaacaaaatcctaagtttcacaaacacaatcacaaacaaactcaatctttaacactttctcacaaaaaaaattaaaaattaaaacacaccttcaacattgtgggttcggttcgtggatccggtcaatgtggagtcggtaccgtgcgggtcttggtcgaaatagtgtcggtcggagtaattctgtgggtctcggtcggaggaattgtgtgatgtggtcggaggggatgttgggtccgattcgggcgaagggggcagagagagtttgagggtttggggaaggagagagaaagggtttgggattttgagaggggtattttgtggatttatgtaaaatggtcctattttaaaaattacccatattttttgttctcctaaccaattataccttaaaatatgcataaaaatttaaagtggttatagccaagtactatgaaataatctatcatcattatctcatattgtatatcatattaaaaacttattatcttctttccctgctattatatattatatacgtactttttttttgtgactagacgagccaatgttatggctcatgcctcataataatgctaagaaaggtaagagggtattaaagtagaatgtaattaatgagtaattacattagttacacgcacctaaatgtgagtgaggggatggaatattgggatagataataatgtgttacaactttagta

SEQ ID NO: 320020 - DNA, 1145 bp, Cannabis indica
cttgggatgttgaattctcaatatatgtttgaagagagagatataaatttgattagaagtatacaacttagtcattctcggactatggatggttggtattggaacatgaagtcttcaggattttactcggtcaaaagtgcctacaagtttcttcaatcttcaagaggaaattggttgtttatgcaagatgaaagctgctggaagaaattatggaagctgcccattccgcccaaagttcatcattttctatggaaagcttgttcaggttgcctcccaaccaaggtacaacttcaatctaaacatgttaatattgatctcttgtgtcctttgtgtaatatgcatgtggagacaatattccatgtgctgttggattgctccttctcacggtcctgctaggcgttttctactgtcaaccaaccgactgctggtgtagatgccgagtttagcagctggttttttgacctttttactggctgccgtgaggatgtggtaaccgaagctgctatggtttgttggagtatttggaaaactcgaaatgaagtgcaatggcagaaaaaatttcggtttctttggaggtggtaaagtcggcaaaacatgtccttggccaatggaaaattacaaagtttgagtcccctagtgctttatttgctacaggagacatttcaaatagtaattgttggcgtaaacctgatgcttttacggtcaaggtgaatgttgatggtgctacttttgaggctcgccaaaaatttggttttggttgtgttgcacgtaacaatcatggcaagctccttgaagctatttctgaaagtagatggggctgtgtttcgtcagaaatagctgaggttattggcatcaaggaggcgctgagttggataaagcgtaaaggttgggatacggtatttttctgatgctttagttgtggtccaagcaattaatagctcaattcatatgtcatcccaatttggcttgttggtagaggactgtcgcattattttatctagtttgaataatgtctttgtttcttttgttaatcgatctgcaaataaggctgtccattgtgttgctagggagtcttatttatcgtcaggttgtacgtataatgagctaaatgctccgttcttttttgtgtgacattgttaaggctg

SEQ ID NO: 320021 - DNA, 893 bp, Cannabis indica
taaaatacttctgcaaaaggctgttttgaagaaatgcacatcatgattactcttggggttgatttcaatctaattaatgtgtgttatactaagttaccaactttttgaatgtttagtattattttattacatagttaaggagcacaaaaaaattagtgatcgtattgcattaggattggtactagctgtgttcatcaaatcgtatacaaactccttatattgtaccacatcgtataaaaaatatagtttaaaattttttacggtacagttattgtttatatttttgccaaatcacgccattgtacgttacagttttaaatttaataattgtaatttaaactgcacattttttattattattgttaaaactttactagattgatttaaatttttattataatatttgctaatgatgatagtataaatcgctcaaattatactgcaccgtaccacattttcacagtgtaatttttgtgattttaagatgtcgcgatgctgttgcaaattgaaaaattacataaaccacatatacattttggtttaataaaaggttacaatccgtaccacccgcaccacaaacactcttaattggtattcctagatgttactaattggcacttttttcataacaatgattttttttttttctttttgatattgcagaacaataatttcttttttcttcttcttatttctttatttttagagaatgatactattgacgaggctaattttgctggtacagtagaacctctatttaagaatactctattcaagaatatcctctaatttgttataaaaaaatcaagtcccgatttgggccagttataaataagaataacctctaattgtaattagttatacattttctaagtcccgtattaacaaagtat

SEQ ID NO: 320022 - DNA, 755 bp, Cannabis indica
ttttaatattttttaatatttttttcaataatatgagtagaggcttcataaagaaaattaataaacaattacttttaattaatttatctattataaatatgttattatactatctcaaaaatatatatattattatattattattgttattatattatctcaaaaatatatatacatatatattatactatcttaaaaatatatctccaaaaatatatatattattatatattattttttaacatattgtggttatcgttgtatcttatttgtagttgatactgcattaaaaatagctattaccataagattttaaaattattattattattgtatctcacttgtagtcgctattatatttaaagttattgtcatcattgtatctcacttatagtcaccactatcattttcgagagctttattaaatatactaattattagtattaaattttgaaaaaaaaaaaaaacaaaaaaataaagaaatccgcataattaactattttaccaaaatatatattcttgtaactttatgtttcatatcattttttttttactatatatatagtatatattgtagaatttgtaaatttgaaatatataaaaacaaatactactaaaattcacaaatgtagattcaaattaaaagaaaaaaaattaaactaaacacgttactgataataaaactaaactatatgtttctaaaatatttagagcatgtttggtattgttttcttgtttttgttttaaaaattatt

SEQ ID NO: 320023 - DNA, 717 bp, Cannabis indica
ttgttttaatttttacttctattttcatattttttaaaatgtacctacttttatagataatgtcatcattaaactccttaagttattgtaaattataagctaggcttaagtagagattaaaagtatattagacaacccactcaaaaaaatatataatataaaagtatttttgatcaatgaatatccttttttttaaattacttcgtaaatacccaaaagtcataatattgatttttatggattattttttttattgtcaatctgataatatttatccaaaaatataatagtatatttatttttttccaccatttttgatatttttacttttaaaaatactgtaataatataacacctttcaagaatgctataattataatctctcacattattatttaatatattatttattttaattataaatattgtcacactattttacctttaatggcatcaacataattttctatgatagtactaatttatctccaataacatagcatccttatattttgctaaataaataatctagtaagcatttcttaaatataaatcattagtggagatgctcttatttgtttctccaattgatgggctccattttctaggcacgtagctcagaggctctttaataaggggtaagttgaaaaatacccattttattaatcaattaatcaaatttgcctctaattttatatttatttgaaacatacctct

SEQ ID NO: 320024 - DNA, 860 bp, Cannabis indica
aataattttttttaaaaaagaaatcgtatctttacatataaaaatataaaaaactcataaaatttataaagtgtgaatataaaatagtatttggggggtcatagaaagtaaaaaataaaaattgtagagcttcatttattgggattggtttggagggttgtgatgggattaaggctagggttagggggcatggcatgaaagtgagtacatatatgtggtgtataaaaactttgtgggacccactaaaccaatatcatacattaatttttgcttcttctacatctttcacacgtgtcatgttacaacctatgtgatgacatgagatgaccactttcacttatacttcttactatatccaaaaatgtataatgataataataaaaaaatgtgagtaattattatactacatatttggtgtatttgttattcttttagtagtggatgttgggtagatttttcaaaaataacattttttgaaaataaaattattgaaaaaattaaaatttataaatacatttttttttcatctaaaaaattatctctttaaagattgttagactttttatttaagcttacattaaattttattgattttattaaaacgtaagttaattggatagttctttgatgtgttaggtcatattgttagtgatcaatagttaatagatttagcatctgtgtgtaaagtttaggtgaaacataagtgtgagtttttctagttaattgaagtctttgattagcaggctcatacatattgtcgcatcacaattgtatacttttgataatcaaataaataaattgattctaatttagagatttaaagagaaagacttacttgatagtattgcactatcaaattg

SEQ ID NO: 320025 - DNA, 762 bp, Cannabis indica
cccattttcatctgttatgaaggactaaatagacagctcttgtgcctgtctctgtccccaattcaaaatacaaataacttgagttgagagaatacacatcctctattctcttacccaaccaattacaaaataattatatatatatatatatatataaaaaaaaccaattcagcaataatatatatttttaatttaattttttcaaagatatttaatagcatcagccgctactaagttctaacccaaatatatcatcaattatggagggagctcacaaaaggttttcgtttactgaaaacagtagaaataaaattaaagacacttgtctctgttttctctttatcctatctttttccaattaaagtccacataaatttttaaaatttggataaataacataaactaaatgtttatttttagaagtacaaatacttaatgtttataaaattgtaattttcttctcatttcatcgggacaaattctgttttggatttattaaaagaatatttgaaaataattaatactacacgcttctctttaaattcaatgatctaaattttagatcttatctgtgtctgtttaagacaataacagagtttatattgagtttataacacttacaaacttaaaacctaaatactttcttttcacacatatttttctcaaaattaaatacaaaactatcattagtaaaatatttttttttttaaacgtcattaataaataaataactataaaaaaaaggtaaatatcattttagac

SEQ ID NO: 320026 - DNA, 1181 bp, Cannabis indica
actaacattaggtagagaggataaaaaagatttacaatcatgggtaatcaaaaccaaaaacagaagtcatctgttgttgactgaaaactgcttggacagtgagtaagctatcagttttcaacctctacccgtgctccaacccttgtctttgagccagcttagtgcttccttaacccctaaggcctcaacaacctcagcagggaaggacccatggaagtattgagccacaaaatcaatgacattaccttccgagtcacatgccacaataccatacccatatgcgttttcagtctcaaatgtagccccatcaacattgatcttgatcgtattatcaacgggtttagtccaatgctcaaagttgttaccaacatctagcgtagaaggtgataacaaactcattttatcttgagctttaatccagtccaagctgaggagacaatctgagacggagaagacatgtggtacaactaaataagagataagcataagagtcatttggttaggctattgaaattagaagcaatctattttacttgcgctacaactggagtcttttttacttgtttaacattttcttttagtaaaatagaggccagctagatgaagagtgtggaatatgatatgattaaagaaaaactattgaattatttatttgtaatagccatcataatttgattccttcaaataagaagataatataataatatctacacatatttatattttaaaaaagtgtaatttgtaacataaatatttttttttttgaataatatagcataaatatttaagtttaactcttgttgtaaataaatatttaagtttaatttttagtggtaataatatttaaattataattttagaatttctgtaagtataataggtcattaatttttttttttaaaaataatttaaatatacaaataaaaaaaatgacacgtgaataatgattaggtacctacggagttttagaattataatttagatattccgctaaaaattaaacctaggtatttaggtacctatgattaggtacacgtgaatactgtaaattactcttagaataattagtaattttgctcttgaatttttgacaccacgtgatcattccttctaaaatacgacttgttaaaaattctctttgaacttttgcatttacaaaaatttagttcttttgttaggtt

SEQ ID NO: 320027 - DNA, 1300 bp, Cannabis indica
attttgaatgggggcttgttatttctacatttacatgaattttacaaagagaaaaaaaaatatttactgttcaagatcagtttataaaattagggttttcaaggtcgaacagacaacgaacctaagaaataatattactgcagaaagactgattagttgagaaaagcatggaatccactcacccatttcttaaacaaaacgaaagcatttactcttcctatgatctgaaaagtagtgaacatataatcatattaatccatctattatacaaaaatatatctacatggctattaattaagaagagaaacaaatgatcagaagcatagactaaaacaagtaccttaatctctttgagtgagtgttaagagcacagtggtaccgaccactcaacaaaaatataaatgtaaaagcattcctagctagtaggtgattaaatataatatatatatagagagagaggggaatgaagagaatttatagaagagaaaaaagaaaaaatttgtggataggatcatgcatatatggtggaagatgatcatatctgctacttttcccacgtgactacaattgactgacagttgactagcaggtgatatatatgtatagctgaaaaaatgatatgtactttcacacaccttcacactcacctggtaagtcattttttattagtgagattaatctatattttaatatatatatatatatatatatattacatacaaatttaataatacaaaatatgaccattttttaaaagcagtagtgaaaaaggaaatttaaagactaattttaaaagcccttcaaaagttttaaggactctcttctgcccttcctaaaaagagaagtccttaaagccaaagaattaaggactataaatgttagtctttataaattatttttaaggacactcttttcgattctttaaaatttcttgtaaggattcgcatctctagtcctcaaaaaattataaggtcacttaatgattgtccttaaaagtaagctcttttcttaaattacacattttaatttattaaagaaaattacattatattttaatattaactagtttattattaatcaataatatgtatacatttctaaaatgtttatcattagttttttaaagaaaaaaagtctaagaaataaaatgtacagtgtattgaataaagaaagtgtaataggtaaaatatattcattgttttataaaaatacaaatcaataaaaatgtatccaatgtattctaaaagtagggtgactattcaatggtgacatttttattataaccatcatggttacattt

SEQ ID NO: 320028 - DNA, 1531 bp, Cannabis indica
gttggagatctcaatgaaattttttccaatgaacataaaaatagaggacctttacaaaatgaatctcatatgagggggtttcgttctaccatagaccattttttttttttgaatgaactaccatatattggagatgattttacttgggcaaaaaataggaaaaacacatcagctcttaaagaaaggtttgattagtgctttgtgaacaatatatggatggacctacttcaaaaacaaacaattacacacttagactattatggttctgatcatagagccattttagtggatgttaattttacaaacgagcttcatagaactaaattggagaaaagaagatcacgatttcgttttgaacagatatggcttaaagaggctaaatgctctgagatcatttcttcaagctggcaaattgataatggtagggatccaactcaatgtctggttagttgtttggatcaatgtgctgctaatctccaacagtggcacaataggaagtttggccgaatgaaataagacattaaacgtgcataaaagaaagtatctttgttgaataatacaaatgcaccaggcccaactcattcccaagatgttttaactgctgaagttatattggatgaactattgtctaatgaagagcaatattggaagcagtgatcaaggatagattggcttaaatctagtgatcgaaacactaaattttttcatgccaaagcttcggctaggaagtccaataatcagatcaaaaaattgcaagatgaacatgataacattgtgtctttcaaggatggaatatgtgatatagtcgcaacatattttcaagatctttttacagccctcagaagatgatcattggactatatctcatgtcctatccacaataccaaccacaataacttcagatcataatgaataccttcaaaaagagttcagcaatgatgaggtttttcatgctttgaagactatgggaagtgataaaagtcctaggattgatggaatgttcgcaatgttctatcaacataattggcatattgtgggagatttggttataaaggttttgtaaatgtgttgaataatggtgccacacctgctgcttttaacaagaccttgatcactttaatccctaagattaagaaaccaaagacaatgtaatattttagaccaataagcttgtgtaatatcatctacaaattgatttccaagatgttggctcttcgtctcaaagaagtactccctcatgtcatttctgaaacacaaagtgcttttctcccaaacaggaaaatcacagataatattcttgttgcttttgagctcattcacagaattaaacataaaaagcgaggttccaaaggatttgctacttttaaattagatatgaacaaggcatttgatagtggttatgttgggttttgtgccctaaataaaacccatttcaatataattagatttacttattaataaagatcagaaataacattttatgttgcatggttcacatgatttatttcatgattatatataatgtatgaat

SEQ ID NO: 320029 - DNA, 1410 bp, Cannabis indica
ggcataaaacccaacagtttagcggtatgaatgacctgaacctcctcctgagggcaatgtacctctctagccaacgctagttgcaggcaagctagagatcatgattggaggtcctatcatagctagaaattcaaggaagaccttaaaaatgtatgctagatcacttcgacataaaccaagagccaaagtcctagaggtagttaaatatcctccaaagtatcaacgctacggatgtgaacctatcacctttagagaatcaaactcctatcatgtaagctaccctcacaacaatcctctagttgttgaggtacaaatagctaatatgatggtggccagggtaatgatcgatgacaaagtgtcttcaaacatcctattcaagcaagccctactcaaactggatttaactttagaagacctggaaccatacgaacaactcatgtacggtttcagtggagccgacattcctccatgtggcaagatcaaactgccctaaagtagacgaccatcatggcaacattcatagtggtggacatgaagtctccatataatgtgatgctcagaaggcctattctatatgaccttcaagccatctcctcagaataccatttgtctatcaaatctcaacgatagctggtatcggttgtctccttggtaatcaaggggctgtctgtgagtgttataacgcttcattatcactcgccaagaagatctcctctactgctatggcttcaaaagagacgaacaagacctcccatgttgttatggcaccaggggaggagcagggcctctcccacaaaagcctgagagatgatgaagacctccagagatcaaactatggaaaagattgagacgaaacctaaagtcacttgaaggtgcgcccaagacggggatgatattgactcctattttggggaaaatgactcgggagttagtttaattgagaaactcaaagaacttcccctcaacatagtggacccgactaaggttgtcaagattggaacaaacctagcagaggtcttgagtgagataaaaattatatacatccaaaataatatgattagaattatcattattattgttattgtggaggcttgaactcccaacaagaaccaacacaacaccaagaataacacacacagatcaagaacacattcaacataaaaccagcaacataaaatagaacttaaaccagtaaaacaacttaatgaaagcagtaaaagacaattagaacttacatggttgggctacacaatcaatgtgatcatgagcttaatttacgggagaaagcagccttaatcatggttgtggtgatgagttttattgatctgaacataggtacaaaacagggataaaacccttgaaaaaaaaatggagttggagtttgcttcttacaaagtgtctctcaaatga

SEQ ID NO: 320030 - DNA, 777 bp, Cannabis indica
tattactattaaaaaaaaaaaaattaactaaaaccctcatctgtacaaatgctaaaatagatagaaaatttattaaagcatccctttaagtagaagtactgtagaattatccaaaaattaataatgactagtattttaatacattgattattaaaattaagattggcttttcacatttgtatggggctttggcttttcacttctttttaggggttggcttttctattaattatgaactctatcatagtaatatcattcttttcactgccatgtgcttggattagtggtggtcctataactttgtatatgggatatataggttcaatccaaactcaaattaacttttacatatttgtttagggatatttgctgtagaaatatacttaaattattacattttttttcgacaaatgtacccggaattctgtttatcatttttatttttgccaaaaagtacctaaaattatttcatttgtagcacctagctaggtacctaaaaagaaactctccaattctttttttttttttttttgaaaagaaacgttcattcattcataatacattagacctcgcggtcattacagcacaacaaatgttcttaggaatagttgtaatgtcaatacaaccatacaaattatgggtaaaagcccagttagccatattatgggccataaaattacaggatctagccgaaaaacaaaataagtaagaagcaaaggaagaagcgaatcttttacaaaataaagagtagttctcaatttcccatcggggatccaa

SEQ ID NO: 320031 - DNA, 578 bp, Cannabis indica
atttttttaattgttatgtgtgcaaatattaacaaaattaatcttagaaaattttatttgcacccaaaaaatttataagtataccccaatatttaaaattattaaacttacaataatttttaaaaattagttttaatattttctaattttttttttctctcacattaatttgtattaattttaatacctattttaattttatttttaaaatttttcttttaaatcatgtataatttttttctaataaaattttacataattttttattttaattttttttgttataatatttaagaaaaatgtatttttatttgataggtatctttctaaaaatatgaattgaatgaaagaaattaaaaagaaattaatataattcaagatatacattttatgtaaaataaaaaatattaatttaaggtgtatttataaatttttgctgtacaaataaaactacccttaatcttatatgtcggactaatttaaaatggtagtaatatctttatatattaaaagtacctatctaacggcatttcttggtttaacagaatatactttaaaaataaaagaatattctgtta

SEQ ID NO: 320032 - DNA, 1062 bp, Cannabis indica
acatctcttgagatgtatagtctgccagattgatccaaacacttgtagcccttatggcttatgcttaaggctataacctatgaaaacgcaaagagaggatctgaacttaagtttgtgtttgttgtaaggcctaatgttgggaaaacaagtgcagccaaacacttttagcttagagtaatctagggtaatattgaataatacttcaataggtgacttaaaggatagaataggtgtgggaagtttgttgtgaagatagacaactgttctaaaagcctcatcccagtattttaagggtagattggcttgagctagaagtgtgagactattttctaaaatgtgtctatattttctttcagctatgccattttgttcatgggtagttggacatgattttctttgcaatatgccagcagcttgtaaggtgtctgtgaaagacctatattcccctccctaatcagattgaaacaacttaattttagtgcctagttgtaactcaacttcaactttaaaagtatgaaaggttttgatagcttcagatttgtttttaagcaaatagagccatgtgaactaaagtaggcatctacaaagtgaatgtagtatttatacccattgtgaaatggtgtaaatgagggaccccataggtctaagtgaataagttgtaatggtgcagtgtaactggtttcagagaatttagggaagggtagtttatgaattttgcctaaactataagcagtgcaaacaaaatgtgtcattttattgatattagagatgttacaatgagagagtacagttttaacaaccctttttagaagggtgaccaagtctattatgccacaactcatactcattgacagattgattacaattgacacagacagatggactagaaggctgttgagaggaggcagcgactatgttgacacaagggtgcttagtgaaactggatgttgtacatggggatggagaggcagaaaactggagttggctagagtcaaaagtatataggccattgtgatgtctcccagtcaggaatgaaatcgctcacctgatccttgacataac

SEQ ID NO: 320033 - DNA, 1080 bp, Cannabis indica
gaatactcttctgaggaccatatttcccacaaaacatttccttgccctcacttgcttgttgaaatatcgagctacattttgctgatgagccactagctttaggtttgttgttgctcgtttctcttcaatcttgtcaagtgtttctgccaggtgggaatgattagctccttggtcttagcttaatcttctgtgggatggaggctctaattcaacaggcagcatggcttcataaccaaaggccatagcaaagggtgtttgcccagttgttgttttctctgttgttcggtatgaccacaatacttctggtagttcctccagccagttccctttagctttcaagttgtttttcatggtatctttgagtgtcttgttgactgcctcgacctgaccatttgattgatgttgtgctactgcgaagaaacttttaatgattcaacgtgtcacagaagacaatcttgtgcggaagtctaaactgacatattatgttcttcaccacaaagtccagtacttttttagatgtgattgttgctaaaggctcgacctctgtttactttgtaaaattttctactgcaaccactgcatattgtaccccgcccttgcccttgggcaattatctgatcagatctattacccaaatgggtaaaggccaggactttgcatctgtattagctcgttgggcagtgtatgggggatctttgaaaatctctatgatttttcacatttctttatacaggcctttgaatcttccatcattgtcggccaaaaatatcatcgccttagtattttctttgataggctttttcctgctgcataattaccacaaaatctatcatgtacttcggacaagagtcatgtagcttcttcttttgttacacttttgagtaatggcatagagaagcctcttctatacatcacaccttctattatgatgtaccgtgtagctttcctcatcattttctatgcttcattcgtgtcattcggtagtactctagtgttaaggtaggctgctatggatattatccagtttggtgctgtgtctatcattttgacttcttctgcacaattgatactgggttcttc

SEQ ID NO: 320034 - DNA, 917 bp, Cannabis indica
attattataaataatataaaaatatattagaaaattacttttattaataaaaatatgagagctagggaaaattttaaacaggaaaaataggagtgaaaatgtaaatcatttcactaatctcaaagggttgtataataaatagagtacaataaatccatagttaactaacaaattggaggaaattacattgtatgctacttttactttacttattttaatttttacattcattttcatattctgtaagatatgctaactcttataaatgatatcctcattagatcccttaagttaatataaattatatatgctagctttaagtagagaatgagggtatattgggtaactcacacataaaagtgggtatatttgttacacccgaaattcgactttcatctcagtggaggaaacgtgtcaagataaagagaatatggatcgatgcaatttcttttatggaataactcatcaattacgtaagtatcagagtatatttataacttgctgactgtaaggtcttaggcgaggattcaatagacaaactggcagttagttaattagcgagtaaccatatgttgctgaatgcgaatagtgaggcttcaaggacagcgacacatatcaactgcgaaagtccttagtctataatgcacaaagtaagtgtaacagtcggatcgactcgagaccaagtaagcgaggtgcccgtctcgctatcggaaggcttcctataattgcatccagttacgtcagcgaggcttacaaccttggcgaatcataagctgacattcaaatgagcttcgaaggactctttataaatatgaactgcgattgtcacaagacacgcatcgtcgacctcggaaggaaaaagggccccaactcgctattgagatcactggaacaaagtttctatcaagacatctcta

SEQ ID NO: 320035 - DNA, 905 bp, Cannabis indica
gcctagggcccacctagcccagagacccaaattttttttcccttttaaaattatatctttttttttactgattttgaaaaataccacattttttctaacataaagcccaaaaatatttttttttcttgtggcccattttatttcaggtattaataactcttttatacaagttattgatagtatatagcattattgttattttgtatttttcaatatattactattttgaattaattatttgttttgtgataaattttaatttaagggttaaaatgtaaaattaatttttaaaataaattaaaataagagagaatgcaaaaaaaaaaaaaaatcaccaaattagtgtagactcaaaattcaacattattaatagtgcagaatttagtatacaccaatttagtgtataatttggtgtgtcattaaagtgaaatagtatgaagatttcacaccaatttgataaaatgatgtactattggagatactcttactgacaagcatcaatttaaatacggaaaatatacattaactactatttttttttttcaactttatatttatattttgacaagaaatttttttcatctatatttttcttacttattatttttttctttttattgttttttatttattaaggcttcaattttattttctcttctattattttttttagtcaactttagcttttttttttaagtgtcactgttctttttctttctttctctatttctctttgtaattttttttttgtctttgtatatatatatttataataagtatacatttttcatatctcgtttttaacaatttttctctcttataacaaactaagaagactcctaaatttttcaatcttttacatgattaataaaagtaatatatttttttggttgttttgtagttta

SEQ ID NO: 320036 - DNA, 661 bp, Cannabis indica
gctttttctctaaagcactcatttgctcaacaacaatcttcttctacattggagcatttacagtatattatttgaaataatgacatttgacacattggtggtgaaagtgataaaagaagatgaggtttttgagttagagacaacaagagacattagatatttgacacacgatcgtttccttacttaatagctatgggaagattagattcaggactaaggttagaaggaatagaagaattacctgtttcattttctagtcttggttcagattctcggcgtggccagtcagtggtgacttcaattctttgatgaggaagccttcgtgtataaacatgaccaaacttgatcccattatgctcattgcatactgtttgtaattgagatttattttgtaaaccattttctccctcccaaacattctgttcagcattttcacaactttcttgttcagtatttctggaattatttattgcccgactttccctactgctactactatcaatctcttcaatttgcctttcattatgtcctaaatcgttacctaaaaaatccaggtctaatgtatgatcattaaaattatttttggcaatatttttaagattgtaatttttttttgaaaaaggagaagagatccttatgtcattgacaggatcctccccga

SEQ ID NO: 320037 - DNA, 837 bp, Cannabis indica
aaaaaaaaaaaaaactaagtaaacgaccagaaaaattgaagtcaaagaattgtccaccaaaacccaccattggccatatttctcttctctaccgcatactccatccatatctctcagtttcctaaaaatatatattaaaaaaaaagtttaatctctctctaagattacgatcctgatctcgatctcatctcttcatttttcttttgcttaattagtttgctcagatagtgggatgggacgaggaagaatgtggagatgaatggatggcactagttgacactaagtctccaccaccaagaagggtgcgtcgcgaaacacaaaaaagtaacaaagagactataactgttgggacggggcaacctggcaaatggtagatgtttgttaatttttttatttgtttatatataatattttttaatctttaataaaagaaaataaagaaaggttattaaagtttttaataatttgtttcattatttaaattttttatgatggggatcaataaaattttaatatatagtaattttaaaaattctaaatggagctattaaattgggtacctagtgatagactaactagaattttgagctttggaacttttattataattttttgagattatggagttatctacgtcaaagtaaattttttagggactcatacaacaatttaatatttactaatatgcggcatttgagagcaactaaggaatatgttaaaatgaggatcaatagacaatgaggttagcgacttagtgctatttttcgtggtttggagtgaactttttgagaacttctaatgcaattttctctttaaaaaaaagggcattttacaaaa

SEQ ID NO: 320038 - DNA, 875 bp, Cannabis indica
ttttgttttttttttttcttttctttgctttatatagtagtttcaattttggtatagactgggttttgatttggtcgatagtctcttcttggttttttctagttttgtgaataatattttttccaacttgtcttaatattgttttgttgtttggtgtttagttttttttaggtagtattattacttttcaaattgaaacttttgcttttttgactaattaaattaggtttatttgtctaaaattctcttagaaatggttaaatctgattttcttttaatagtaatagttattaataatagaaatgtatttactaataagataatgtgttgttagaagatgacataactttaaattttgaaagacaaatttatcttaggtgtcctgtagagataatattagtcgataatttggttaaacatgcattaggttacattacacaataaattagactggtttgaagaggtcccagccccaattattgaagtcattctcgaaaatatcttaatccaaatcatattttccaaaagaagtaatgaatcctccagctgtatacaaatatgttttatacggaaatgtctatctaattttccaagcttattcatcaatcaatcaatcgattcatttgtatgtggtgggcagtgatcaatcaaggaatgccatgtaaatttttatttgagtttggacattgtttttttttttaaaaaaaaagttaccaattgtacaattttttttttttttattttttttaaaaatagaattttaagcttaatttttaattaattttattttttaatataactaattaaacaatttctaacacaaaaaatataaaaaaaaataattacttttgtcataacatctttagatcatatta

SEQ ID NO: 320039 - DNA, 1028 bp, Cannabis indica
agtacttaccattcatgaatttacaacactcataaaaccaaacatagaatacatgaggacagccgatcaaagtacaaaatacactcaacttcttttccaaactcttcgccttttttacactttcaacataactgtcaagcttacccttcaaggatgaatgcacaattcaaatgaactccgtccccaagcaaactcatcatacctaccactgtctacaatatctaaaatggaccgatgaacgtttttatgcttagtaccactaagaaaaaaccattcaacaaaataaagaactaccaacataacaacatcctcatcagaatcaccccacctctttgttgtgaaacattccctaacaaattcttatgtaataaaggtagaggtcggccaatatttcaagcaaagactgctaacatcttgcttaaaatccaacacagtacagtcaccttcacaatctaaaccccttatcaatgcaaactccttaatgctaaacctaagcctaacaccacgaatcataatccaaaattcagcatcgttaggctgctgaacctctctcaacaacaacctgtgaaaaacttggggttgcactttgaaatcaagaagcttaataaaatgtccaaaataggtttttgaaaatattttaagctgcttagaaggaagacaagacttaatatcatgaataacctattaggaagcagtggagacagccttttgcaagaaacaaatttttcggtcatatatataatcccattcctgcaacagttggaacaaaaatatcacaaaataataaataaactataaaacaactatacattaaaaaaagcaaataactactccaataacaaaaacaaaaatatactaggaaaaaacagaaacaaaaaataaacattagaaggattttttttttttttgaaatatcaaaatcttttaacttatctgaactcttagaacgaacctgaaaaaaagcacaacataaaacctcaaaaaacaattcaacaaagtaaatataaagttatatataaatatatata

SEQ ID NO: 320040 - DNA, 531 bp, Cannabis indica
gctgcaaagcatgttcaaaaaaatcatgtaatacgcctatgttagttagggtgttacatattcacatatagttagttatgagtctcatatactatgtttgtcattctccataaattaacgaatatttacatttatttttaaacattcgaccaaagtagttagatagtatttttgagacttgtaattagtaatatcacaatttttgataaagaagaaatgaaacaactacatctactaatactaattcaagaacacataaatttgtttgctccactaatattaatagaaaatgtacaaatggatttttacttttaaattaaacgagacatatacttttcaaccacttaacttttcttattaattcaaatgagaagtatgagtacaacataattatacattcatacattatagggtaaataatattttggactctatgttttgtaaaagttaataatacctcttgttttgttaaatgataaaacggactctgtattttttaaaatggtacaaatagaaccctaaattaatttt

SEQ ID NO: 320041 - DNA, 519 bp, Cannabis indica
acttttaatatataaagatattgcatttaacattgcttatataattgagtctaattaaaaaaaaaattatacgtaaattgtacataacatcaagttagtgtatatatatataaaatttttttacaaagaaaaaatactatacaagattaatatttttcctaaaaaagattgagaaaaagattaaaagttttgccaaaatatttgtttaggtgaaattaagtactatatataccctaattatcagttaaattaattattaggccgttttgatggaatacaattatactgtggatttgtaggtacaattaattaaccattaagggggcgtttggtacgaggtgttcaaaataattcgattatagggaatgttatgaaggagaatatgattatagggaaatgtgtaaactgtgtttagttgtgtagggtaatatgtaatattaattaaattaaactgtttggttgagtacatgaatcttatatattatttaaaaaataagaataaaaatattttttatatat

SEQ ID NO: 320042 - DNA, 1239 bp, Cannabis indica
ctctctctctctctctatcttttcaaggagaattggtgtttttccaatttcagggtacagtgtctcatgagttgagtacacactgtagcaaaaaaagtcattcatcctgtttaatctataagcccactctcatcctgagtgttgaggctgatctggaagatcttatgtgaattcatcatcaagcccattactggattggatgattaatatattatacgaaaagattcaaggaaatcctgatagtcaacaagaggtaattttttaatctaactagttagatttggcttacgtaatattgtgttgagattcaggatttaaggttcatatcaaattcaacaaaatatatttttttaaactcaatcctatttctactttcattgtaactctaatatgaaccctaaaaaccaacaccctaacccttgaccctgtgatttcaatgtgtttgttgatgtcgcaatgtgtggtgatgaggcgttccttgctattttggtgttagatagtcaaggtgagcttacgtgaagttcttactgtgaaagccaaggtgtcttctctccttgaggcagagactcttgctcttcaccacgccatttccttgtgctctagtcaatgggtgaagatccactaattttttagcgattgtcgttagttggttttggctattgaggctaaagttcctccagtttggcaactcacactaatgtttttattttcttgttctctttattaggagattgctttttctaacaatgtgttttgaattcctcgaacctctaactttgctgctcatgatattgtagcttgagcatcttcctgcaatttggcatgttttctttcttttggggagattgccctttgtgacttctatgagattgtctttgtaaaatttgtttgtttggttagttttttgtttaataaatttgctttgctatatatataaagtaatatagaacatattttattttttaaaaataaaaaattctaccttcattttgtaattaaaaaaatttaaaattaaaactatgaccaaacaccatcaaaggtaataattttgttctttaatgtatttttttttttttattatttgttagtcactcactcactcactctctctgatgtaatatttatttgagggaattatattatatacccactttatttattttaatttttacctttattttcatattatttaagatatacctacttttatagataatgtcttcattataccccttaagt

SEQ ID NO: 320043 - DNA, 520 bp, Cannabis indica
tctggacttaatagaatttacacattaaacaatcatgaaataaatcatgtgaaccatgcaacataaaatgttaaatctgatctttattaactagtaatctgattatattgaaatgggtctttatttagggcacaaaacccaacacctgtaacaaatagacattcaatgaaaacaagagcaaaatcagggatttttaaaccaaaagtgtatctggctcaccaagaacccactagtgtgaaattggctctgcaagatgaaacatggaataatgccatgtctgatgagatgggagctctaaggaaaaatgttacctggaattatgtgccattaacagatggaagaacacctattgggtgccagtggatgtataagatgaaactgaatgcacatggtacaatcaacaaattcaaagctaaattggttgcaaaaagcttccaccagcaaccaggatttgatttcactaagacttttagtcctgtggttaaacctgtgacaacaagaattgttttgtccttagctc

SEQ ID NO: 320044 - DNA, 636 bp, Cannabis indica
  modified_base (550)..(550): a, c, t, g, unknown or other
aaatagtaaaattaagaagtttttcactttttttaaaaccaattttttgaaaaacattgtgaagctctattcggagtcctattgaaatggtttcttattttaggaatgttatttttgattgtaaagctctattaaaagagttaagtggtgtttcggttctttttgttaaacggtctgcgaatagtgtagctcatttcttggctagagcttcctattctgttgctgatcgtatcttcagaagttgtgatgtttcttctgaattccaaagtgtaatcttacatgattgcaattaataaattgataatttcttttcaaaaaaaaaaaacattgtgaagtggaaatgatctaactagtaaataaaccaaataaatattattaaaaaaatataaataattactttaaaagaaaaatagacacttattatttttttttaattaaaggtaaagtaataattgtatatgattttgttagtgttactgtagacaaaatacattttattttcttcaaattttactttgagttttgtaaaggagccaccatgtaataattnttaaaaaaagttcaaattacaatatactaaattttaagacttagaattacataatcatattacatatatgctaagaggccaattac

SEQ ID NO: 320045 - DNA, 696 bp, Cannabis indica
ttttttttttttttatttctttgcttttcagtatcaaaagtacattccatatttatgtataaataaaagggcaaatagcggtataagtacttaatatttattttcagaagcataactacttaatatttgtaacagaacatttggaagtaattgaaattacatgtttcttagaatttgagctttatatgcgccttgtttaagacaataataaagtcttactgacgaagttagagaaaaattacagttttataaacattgggtacttatggcgttaaaaataaatattagatttatgacatttataagtttaaaattttgggtgcttatgtcgctatttatcctaaataaaatagggattttcaaataaattgtcattttacacttttttatgttggttaagtttcagtttttatttttaccaattttttcaaaccaatacacgattattatttaaatgttttgtactttatatggtatgttgatgtaatcaatgtaaaccgattacatgttttcttctattgtttccaatcaatcactattaggggtgttcatctgatccaatccgtatttttttggtcaaacaacatccaatccgcactaagtgcagatttcatattttggatccaatccgatccgcataagagtttaaatccaatccaatccaatccgcaatagtgcggattggatcggttattt

SEQ ID NO: 320046 - DNA, 2278 bp, Cannabis indica
ttttttttgttaattttttttcagccaatcgaacaacctcagcctctataatgtaaaaatgagatattttcctaattagataggaaaattaggcataaaaactcaattttttttaatactacccattcataagtaatatccattagggtaaataccattttggatcttgtattttgtaaaagttaccagttagaccctttattttgttaaatgacaaaatagaccctgtattttctaaaattgtacaaataagaccctgaactgattttttatcaaaataaaacttaataataatccaatctagagatattatgataaaactggttacattttctgtatctgttcatgttagaaattatcttaaagttggttatattaaaaagtaaaattgttgaaaaattgagctcaatgtcctatttttaccattttagaaaatatagggtccattttcgcgagtatccagctggactgcgagaatccctcgtttgttcctctcagcaagtaaagtacattcaaaggacggtacgggagaagtaatgagagatgacgtgtcactcaaggaccaagacattgtatatgcattaaatgcggtatggggaagaacatcagatgtcttactctgacaagcgtgtttaagggtttaagcccattattttctaattttattacgtgccggcatgcatcaatcaacgatctcataaatgagtcgtcaagtcataaataaaggataaattacatcccaccaaacacctacaaacaaggcaattgtttcctaaatcagatttgagaaattgtgctaagtaccccaattgaacacgacaatggtggccttttactaccattatgagcctataaatactccaatgatgaataaaaatagggatcggccaagaaaaagctcaaataaatactctcataaatatagtgactcgtggactaaaatttattaatgctccaaccacgtaaaaatcttctcttctaactttgactaaatacttcatataactttaattattgattgccaaaaaccttgatcaacaatttaaaatatatatatacatatataaaaattaatattaaaattttattttttttaacaatctaatgcaataaatattagatctaaaaaatttgatggatctgatccaatagaaaaatattaagtctaaattattagataaatttgaataaatagatatacatcaaatagatagaatcgatccagatcgatcaaatgattgaaattaattgaatcggattataaagtaaattttaatatctaatgtataattggatcagatttaaatagatttaaaaatattaaatttagtctaataaacacatctacaataatcatactggccatacaacaccaagacatgataagaatatagtaaagaacaagtatttttcgtttctaaaccataccacaatctaataaagataagtaacattttcttaaaaatatatttgagataaaacaaagaattatgagtataatttaaatacatattgaagatgatatatatgggtgcacttttaaagattatacacaagtattattaggaaaatttaagtttttatgtttaattttactttctaattaaaaataattctctcatttttatatgggttggggttgttcaattggctaagagaaattaaaaaaaaaaattaaatttgagttaaatatctttaatataatataaaaagataattttttttaattaaatagataaattaagtataaaaactcaaattttcttttaattattggtcattaatagtttagtatttttaaaattgatatttataatagttagatctatctatattcaaagtataataatatatattgttccaaaaacaaagtataataatatataagacaatcaaatgaggtatgcatgtttgtgtgtgtcaaagacttgatacaagtgtttagtgtatataattatttgagaaaaaagaagggacaactatatatgggaatgataaggatttatcaagagaactttctaatgagaggttaacaaaagaagaagaccccaacggctctaagtagctatgatttatttatttattattttatttcttaaactcatttataaaagggaattttacaagtttatccgaaattatatattttatttacaaaaatacgattagacatatatttaaacttttatacagtttatgttttatttttttcatttttactgtaacatttggagaaagtaagaagaaggagaagagataaataagagagagagagaga

SEQ ID NO: 320047 - DNA, 1195 bp, Cannabis indica
attaaatttaatgtcaaaaactatttctgttttcaatcacaatacaaatattagactaaaaatatatttcttaatattatattaatttttaattagtaaaatatattatattaattaattaatatcacaacaattattatacctcaatatcacaacaattattatatctcaataataatttaaataaacctaataattagtttaaaaataataatactgtaatttttttttaaaaattttgcatgtcttaaataacaataatttacacgattataaaaaaaatatactaaaaaagtttctagaatgtcaacacaggtaaaagtacatcaatgcgctaccttttaaagaggtattatttttggcgtgttaattttttttttttcaatttcataaaattttacaagagatctgagtgttgaaacagataaaagtacatcaaatacatcactttttaaaaaatacattgtaaaatttcccaaaattaaattcttaatttcttaaatacatctaagaatataaatatatataaatatcatattagtatatctattaacatcaaaatagtgtgtccttgaagaacccacgacatatatataatttgccgtccctttaaagttgtaaacaacaaatcttagggataaaaacattagttgtataataaggggtgtttagtacgaggtgttcaaaataatttaattttagggaatattatgaaggagaatatgattatagggaaatgtataaactatgtttgactgtgtagggtaatatgtaatcatattcctgttaattaaattacattatttggttcagtacaagaatcttatatattattttaaaaaattaaaataaaaatattttttattatatttatttaatgctaaatatatataaaaataaaataattatttattaaacaatatgtttattaattagtaaatattaaattttattgtattttttattaattaaaatgaatatttctatatatttgatcactatgttatttatttttgttcgctatgtcatttatgtacaccatacgcataaaatttatgtataataaatatatatacgttattgctaatagtataaaaataactcggttaaaaaaaatcgatctccagactaaatataaatcgtaatactttatttaggctaattaggatttttgctccttgaactttgacatgta

SEQ ID NO: 320048 - DNA, 671 bp, Cannabis indica
atatagttttttttgatgatgaaatatatatttattaaacaatttgaatttatagtctactaatactccaaagggcctaaatatcaaacattttatttatcatttataaactcataatctattctctaactattagggacaacctttttagtgtgtgagtatgtattctacttctaacctcaaactcattacatttgttctaggaacactttgatgccaaaaagctaaatttctgctactccaaatatggtatatagttgctactgtaacaatggcataaacttgttttttgcctcttaaaaatttacctttccttatacatttcagcaaccgatgtatggtttgtgctgaagttcttcaataaagccaatttttaagccccttaaagcaagtgttgttgttggtggcgttatggtgggtgtggtgcgataagaatgcatgtttgtttggtggtgctcaatcaaggttgggtgtttcggttcctcttgcccaaaatgctttgaatgaatataagggctgccgggatagggggttgggtagtggtgttgatggtggtggttggggtggtaagtggagcgggattttgggtggtggctgttagaatattttatgtggactgacataattaagtgttgctcactcagtgtcgtattagcatataatgataacta

SEQ ID NO: 320049 - DNA, 1838 bp, Cannabis indica
gaaaaatttataaaaggtaaaaaagtttaaaaaaccgtgtaatgccaaaaaagtaaaaaaatgatgaaatatgacatcaggtgtaaaaatctccccgattaaattatagatttatcaaatatgaatatgtcgagccacaaactataactaagttttggtttttgtctacttattaatgaataattaattactaaattaattcctaatatatatgtttaaatatatatttgtaaaaattatgaaaactatcaaattaataattaatttctttttccagttcgaaataatccaatttgattaaagtgtttaaaatttatcggaggaaatttaattaggtctacatatatatttttagtaaatataataattatcataaggcagacatcttgattagatctgtgactctactagcactgcatgaacgtttctttcgtaaggcagtgcatgacatgggaaaaatggtaaggggcaccgggccaattaaacaccataaaagtgacatattaaattattactattaagtattagttgtatttagtaccatctaataataacatcttgcgatttactagttatattttataaaattattatattaaattatatgaaatttgattattttttttttaataaatcaactattttattaatagcagtcgattaaaataatagtgtgcaatctaatttagacatctcccctgttgaagacacgaccaagattaaaattacaaaaatatgtcaaataatcagctgctgaattcccagatcatttgacaaaaaaccaaaaataaaatcagataaaaaaattgcagcatcacatttaaccttaaaaacacctatattaagtttcatatactacttagaagacacaaaagtaaaattgttatagcatgttcattgaacctcatagcttcaacactcaactattgtgtaaggtacgtaactgtactactaacaactctttcagtcacagagatcttgttattctcaaccattaacatggatttgatgacgagccatcgaagaacaaagaagaaccaataacgaaataatacaaataaaattatgtcacagaaacaagactggaactatgtcacgatcgacaagactaataaaacactcaaaatcatgtcactaatacaagactaatcacattaataaaaatcgaatcacaataataaaacatagcctagccgcgaaaataaaagacaacctcctatataaagaacctcttactaactactcctttttttatctatgtatacgtttaaaatcacacaaaaaatatattttttaaatattttaacatataatttaagtaatgaagagtgaagtttctaactaaaagaaaacttcaaaggaaaaagatgatgcaactcattgtttcagtaaaattttgagccatcttcactctccctattcgaaaccttctctctctttctctcttcaaaaccgaagccctaaagtgaaaagagtgagtgcccacacacatcaagtggtactcaatcatagtgtgtaaggttgtgaagaatccagtttcaagagaaggagattcagactcagatctttgtgatactctgctacagaaaggatacaagggttagagatctgagtggaaggacacattatattccgctacaaccactgtaaggtttttgaaactttatatgtgttattccaacaactagcctcagagccatggtaattgatttactttcaagaaatttggaattaaaacgatatatgtgtgatttggatgtgattcatgttgatctatgtgtttttgatgattgtttgatgtttgcaaattttttacgaaaaataattagaattttttt

SEQ ID NO: 320050 - DNA, 1536 bp, Cannabis indica
gcgcaacaaaatgggagatcagtggttgaatggcagtttgacagtatatctcgaaaaggatgtattcaatgctattgacaacaagcttatcattcattgtttttaaaacatgaaaactcatcgaggacaactctaaagatatgagctcaaaaattgatatattttgctaaaattttaggatattgagtatgttatatatttgaacatcgtttaagattgctttttttttttttctattggaagatttttagtgtttgatatttaatatctttttaattgggaattgaaatattgaattgtgtttttctttatatttacttgttttttttagaatatttttatacatgaaaaaaatttacgcctttcctccaattaaattctgggtccgttactggctaaaagctataccaaattaggcacaaaatgtaacatgggccaaattttacattacaatatatattatttctttatttactcttttgccactcattaatgcaattaataattttaaagggacccaatggtcagctttcattttgcatgtaatttaccctattaatgggctttgagcaggaaccctaggcgggtcatgggcatgttcatacccacccttagcctataaatactcttttatttctacaaagggggggggggggtcgacaacttaaataaccaaagctttgccaatattgctctgagtctttgtctttttcaagagaaactaagagtacatagttagggtttcctgctaaatattgtaaacacatcaaatacatcattaaagtctaatagactaactcgtggactaaggttaattaacacccgaactacgtaaaaaatctccatccctttaattgctgtattttaatatttctttagttctccaatatttagttttcaaaaatctcagagaaattatttaaacttttattttgacactataaattattcaaaattctaaaaatttacaaatgatcctaaaataatataacttctgcgatcataaaaaaaattagactataaaaatctcttaaataccaaaatagataggagttaggagatgcaccaaaatagccttttctttctatcaaaaaggaatgatattcttcattaatcacaatctctttacaaccaacaaaccaaagacccagcagccacaggcggctacttacatatcctctctatatacactttctcataatcttttaatttcctatttttcaagtattataatctgtatattatagctttatgcacttcattaacaatagctctagctgtaaaagagtaagaattgtatatgcatctatttctattgatccaaaggctataaatcacagcagcaagaacaactacatttaccctttgtttcctgttctttgactgtcaagccaaccagcttctccagccttcaaagtcagacggccacactctgctgccaatccaattctgcaccagcaagctcacttctctcgacaaacaatgttggatttgtgccctaaataaaacccatttcaatataataagatttactta

SEQ ID NO: 320051 - DNA, 1853 bp, Cannabis indica
agagagagagagaggcagttgacagggtttgtaattgaagcctaaaatttttatatgcatactaggtttccttactaatgggcctactgtgatgggtcaaagtttttttttaatatccacttgtgtcagttaggaactgacacaaaagagattttgtcgagttttaaccgacgcaacctagcatcagtttcaaattgatgagagttttcatgtgtaatttcttgtgtcaattttggttgttgaccaatgtgttgaccaatgaacaatgaaatttttgtagtagcaggcactcactggatcaatagagctacattttttgtaccatatattacttgtagagaggaacaacaattggttcaatttttaatggctctgtgtagtgattttaagggacttcatggttctatattgaattattaacatatgaaatttatctcaagagtcagggaaagacactcttttagtaagccaatcttttgttttagtattccctccaactactgttcactgggctattattttttgcattctttggtatatttggggtattattttttagagcctactactaccttccacttctcctctcgagttgtgagcttactatgatgcagatcatgcttgtgatctcatagatcgaaaatttatcattggtttctgtttctttttggatgattcctttatttcttggaaagcaagaaatagtctattgtttctcaatcttctgccacgacatctactactaaagagattgtttagctaagatggttacttgaagatatgggtgtcactcactcttgccctgcaattaatgtgtcattcagatcgctcataatttagtttcttatgaacgcaccaagcatattgagattgattgccattttattatatagtcaccatctgaagttagacactattactttgcattttgttccttcttcattctagctgactgacttttttactaagttgcacacgatttcttgttttcgttctattttaggcaaactctcatcagtgtttcttgcagcagtatcatgagtttgaaggatggtgctaaataattatttagggttattttagtcttttatgttagctgcctatttaaagttttcttattgattgtattattttaatttttattttacaattgaatgaaactctaatctttctatttttctctgcatctctttattttttattagttattcttctcaaataattatcatcaagcatcattagaagtggcatactactattggtgtattttaatatcggatccccatattttaatttaataaatgatataaaagatcgttaaatagttatatgatgtcacatcggtgtgatgttgagcatattaaagtgtctaatagcaatattatacatatattagaaagatagtaaaaagtgtagaattagtgtattttatttttgttgaataacccatgcatgtaattaatattttattgtaatctatcacgatgagtacatatttcttagtttttttttattttattttcttattattttgaactctttattttgcaaaagatattgatcaaactttctattttactttttgttaataataaattggacccaataatttttataatagtagaaaatagtactttgaattcaattttagtcactttaattttttaataaaccaacttaaaaataatttctagcacgaacaaataaaaaaaaaatgtaatacgttgctcatagaacctcaaaatcaaattattattaagtgttatttttacaaaaaaaaagttaagggtattatttttggagtttattgaaaaatacatcttttatttctcaattaaccaaatctacctcta

SEQ ID NO: 320052 - DNA, 1008 bp, Cannabis indica
aacaacatatcactatatgttgctaatgatttcaacttccaattctagcttaactgagattgacggtatcaaaaaaagttgcaaatatgtcgagaaatagtgcaacaatatttaattcctaacctaaggttgatgatatcgatagacgtcgataatatatcgataaacatcaataaattgacaaaaaaaaaaatctagggaaacccagaattcaaacctgatcaaaaaactacaccataatatcaaaaaaaatctctaaaactcataaaaatataaaaaccttaccaaaagtagggattaatctgtgtgggattctcgggacttctaatgtacatcaaatcccttttaaattttggattgctaggtttcggtggtgagtcggatttgacatgggtttcaaatgaagaaaaagaaagaaggagtgacaggggcatgggtttcaatagaagaatgggtttcggtggtgagtgggttcgatggtgtttgatgttatggatggtggtgggtgcggtggttgatggtggtgggtgaagtggttgatggtaaaggttcagtggtatggtgagtgagagagagagagcaggagagagtgagagttaggtgagtgagtttgaatgggagaggtattttgggagttaagtaaaattaaggtgtatttagagaatattttgtaaagtggaatattaagagtccttaatcccattttaagcatggattgtcaaatttctatattatttctatcattcttgctccattaaatatattatatggtttatgaaaatttaagggtatagcaattctttgcaataaatcttacatattggttaatcttttagttttctattcatcactaaattataattcatctatccatttgtcaattgattatatccttaaataattgagtttgaatttaaagtaccgaaagtgtagggtattttaaataaatatgtaatattccgataagcctaatggtaaataattagagtttatatttatactatgggt

SEQ ID NO: 320053 - DNA, 780 bp, Cannabis indica
ctaattttatataggtgatgattcgtgtacgtattcgtgtcatattcgtatacatatttaaaggatcaattctaatttgatccatatatatttttgtgttaaaaaatttcaattctaacctgccatattggcacatcgacttattatgtttacatataaactatataatttatatattttaactctttattataataaaaaataatttaaatttaaattataatatagtatgatgtaaaatttgtttattttgtatttattattatgcaattttaatattttattattttttttgagataaattttaatattttattattaaattttagttaatatgttcatttgcattaaataatttatattattattattattattattttattattgaattttatctttaccttttgtcattagactaatgctaaaaatatattaatggtgctaattagcactctcttcggtatcatatcactattattgtaattaaatatcgagtctcatataatttgatataataatttttagtaaatatcgctagccaaataaatttcttatatttatctaaattgtatctatattaaaataacagttaagttctactttataatattaagagcattaagttattgaacattattggtgctcaacaccttttataggtgacgctctatgagtggttagctattttttgtaaaagttaatatggagaattgctaaaaggcattactgtgcctagcaccctccttggtatcataccgctattggtgtaattaagta

SEQ ID NO: 320054 - DNA, 963 bp, Cannabis indica
accattctagcaaccttttaattaaaatgatagttagagcttgaaaactactttttttctcaacgtgtccaataaaaaaataatgcacaacggtcatgacttcgattaaaatgacttatgcctatttcttaatatgttatcaataaataatgactcaagttgcatcctctcaacaaattgtaaagattaacatgtgccaatttgtattaaatatatgatatatgtatataatactgtgtcatcttatattagttaaatcatcatgcaaagtcaccaagatgatgtatttgttatgtgtctcgtattgtataataatatgtgagacatatgtttacagattcttcttgcattgataataaaattttaaataattcaagctcttcaaattggattgtttatgcttcttaaattgaactttttatgactaacaaagtttcttgtcttatttttcttatactttcaagatggttgttattgatcttgctagtctacaagtgccagctattatttgactcatatctttggtcatctaaagaaagacttctttttatcatcatgactagtactttttgaggagatataaataacatatttaaatttttaatattcgagttggttcattttttttaactcttgtacatagtgatcatattattgttcgaaatatagatacaaaaatagccaaatcacttacaaaaagataattaaggttaggatcaattgtataataaaaatttaattatttaattaggtatattctcataaaaacaaaaatatttaaatggacagaaaaataaaattagatatataattaacgttgtacgcttatattaatatacatatatatatatactagtaaaaaactacgttcgaagcacgtatactaaattttatgctaagttttttctatgttatttgaaagtgagattattattgaatactgaatgcaatatattagtgttt

SEQ ID NO: 320055 - DNA, 898 bp, Cannabis indica
tatgatcaaatacaaagaacgctaataacaaaacaaatataaagatgctaaccctatggccctttaaaacatcttttgatgaaacaacatttgaagaggttgtataatcactccaactcccactgagttcggcagaagaatttggtgcagcagtatccttccttctcactgtttctttgttggatttacgagaagcacgtttttctgcacttcttctctctggcacagacacttgaggcgcatcaacagctgaacgatcaattgtagcagagataccattgctaattgaggaataaattatattttctggagcttcggtatccaccatagtctgctcaatgttgtacccaacatacgaagaattcatggcatcattaggtaagaacctctcatacatagaatcttcaactgaagaggtcataagaggtgagcctgagttggtgcttttcatttgctggcattcttgcttgtggacttccctccagtgaataatctgacacttcccagaactggaaggaatatataaatgaaacacgtgtatttttcagatgagaaattaaaaaaaaaattattaagtaaaagaaacatggaatgaagcaaaggactagggatcctccacctagcaacaataaaaccaaacagaaacttaaatcgaattgtttaaacatagaaacacaagaaagaatggaatttcaattagacattcaacacaagctgtaacgggataaagtgggatatccagcaaccgataacaatcaattggagggggcatggaacatacttattgctagctgttaatgttatcattcataaaatgattttttttttttttgcttcagattgttatgatggttcaccccttaagttcagccaaaagactgagagattcaaaaaagta

SEQ ID NO: 320056 - DNA, 628 bp, Cannabis indica
atatatatatatatatatgatatgcatatcttactgagtctgtcgactcatcagtttgctaccttgtgtaggtaaaggaaaagctaagttggaggagaagtcagttggagcttggcagtgattgtacatatcgcggcagtgcaactttgagggtttcgatctttcaatattttgggttgtattttgttaatgcctgttggttaaaaaaaaatataatactttacggttttgtaatagtaattgtaacttcaactatgttttaaattcgggatcccaacccttaagtctatataaatattttataataagataaatttatggtttagcaagtttttaaatacgggcgttacactgctagtcttaaaattttgggaccttgaagtcatttgtagattgttccctactgagaagggcgcaagcctttaaattgttctcattcagtgaaaaatcagctgctcacaacccctatggaaggccaaggagaatctggtgccatttctcgatctcaggagttaagatgggtctcctagtgatcgctgttaacacaacaaagaacaaaatttgtaaagtataaaaaaatatatattaaactaaaaatcaaaacccagaatttagttttcacttacgt

SEQ ID NO: 320057 - DNA, 2020 bp, Cannabis indica
actacaaaatataagcccatgtcatcctaaagaaccgaacactccatgcttaaccatcctgatatgtacaattacccgtaagctatggactcactgctgcttagccttcgccttttctttacctacacatgaaaccatatctgtaaattgacagactcattaagaaaagcataaaacatataaatatattactgacttgcaactaggcgcccatacacctacctataaggcttagcaaatgaatcaagaatgttcttaacggaagtacgacctctataccatatgcaccaaatatctttctaatactcttgttggtagggtttcttcgtacgtcgagtacaagtgatcgttataccacatacactccatacttgtcccgtactagtgttggtaatatataaatcatataattcaacatgtatagcacatgcacacacacacacatatatatatattttatactaatcttatctcgtttccagatttaagtgtgtcggtgaaactgaatggaaatatcacttactgaatggaggccctatgtcacatttacgcaaaataggtaagtgttactctaaacactttcaggacttaaactcaaaattagaaatttttctattgataaatagcgtggaaataccctaagtattaagaaaatgtaaaaaatcaaggctcctaaaactgcccaaactaatgaatcaaatttctaaaacggtggattgttttctgggaatcctacttgggaaaatgattcaatgtttttggaaaaatagtggatcgtttatttgtaaaaatcgcaaagaattttgattctcaactcaattctgccacaaactttgtataactctccaaaacacctaataacatcctaacaaaacatatttcaagcaatcgcagcaactgaaacacaagaaatcaaaaaatcaccattgttgagccaagtttgagttctcaaactcaaacttgctcaacaccttctctagccaacacaaaccagccaaagcaagcgcaaacaactctaatctaactcaaaaagtaacccataaacatctagggttcgaattgaacctattctcaatgattgatgctcaaactattattttctatccaaaatcaaagacaaaaaaagttctagggtttacctcaggtttagctttccaattttccttctattcatgctgaatttcaaagaaaattgatgttgaaatggcctgcttcttctggttttccttagggccaaaaagagagaggtttgggaaagagagaaagagaaaattgattttctatttttaatacaaaatgaataaactttaattaaaccctattctattcctttaattaaatcagctagaagatccaaaactaatcctttaggaaaaattctaattttactcttacttcatgcttaagctaacttaaggcttaagggtaaaattgtcaaataccacaaccccacctaaactcgatattccaaatatcaaatatacttgtcccaataaataaaaggttttaagccaaactcatgtgactttaatggccaaaccatcgcatttccatcgttatcgaacaataatcataaaaatattaatttctacatatatcacatataatacacctagagtttaataaaatttccaaaattaaaaaattataatcctaatgcctatttctttaaaatagaacccacaatataaaataatcacatataatcatatagtttatctaacgtccccgcttcaagctccattgggcccttacacccacggaatatggctcttatacacgagtacaccactctggctgcttcctgaattgatgactgaccctatagaccaacacaaatgtttccagcatgctttgtcctcactcgcacgcttcctggaaaaattaattcccaggtggtcacccatcctgcaattgccccaggtcaagcacgcttaaccgtggagttctttcgtgatgggctaccaaaaacagatgcaccttgttgatataggtagtaccaatcaatccatttaagctc

SEQ ID NO: 320058 - DNA, 551 bp, Cannabis indica
aaaatctataatccaatagtattatttatttatactatagaaaagtacacttttatcattttcccaaagaaatctggttgctccactcacaaggaacagaaaaaataatagcgtgtctttgattttatttggagtctttataatgggaaaaaaatagtatgctctaaaagaaaaggtaagggtgatgtatgaaagttgatttgttctttgtttttctatgctaaattttcagttcggattaactcttcacttaagacttttctttcaaatcaagtttgtgtattctcttactcgggaagttgcatattataaagctattttattaagagtaatttacggtataaataactaagtttaattctcagttgcatataaatacttaagtttatataatttttggcggtaataatacctaagtttaaattctgaaacttttgtaaacacctgctgttatgtgttaaataaattgcaacgtggcaaattctaattggtccaagtcatgaaagttttatttttttaaaaaaaaataatttaaatgtaccaataagaaa

SEQ ID NO: 320059 - DNA, 2243 bp, Cannabis indica
gattgtgcaaggttagagtgtgaagagtttaaattagagagagaaagtttattttgtaatctcagtaataggttgaaaggattattgtaaaccttgaaaacagaaatatcaataaagacatggttgttgttgttccaaccgagatgtaaagcattgcacaaggctcgaactcgttaaatttggtgttacctggtctctattttactatttaatccattatatggttcttatgaatcatttagagtattgttcttgattgagtgtttgttggtccagtataattgcatcgtaagtcatttattgattcccaacaaacttgtatcagagcttggctcataatgatgactgctgcaaaatacgatgtggaaaaatttactaatacgaatgactttggattgttgagaatgaagatgaagactctgttggttcaccaaggattgtatgaggctctgcttaaagaaaaatctcttcctgattctatgtgtgagaaagacaagaacgagattcttgcaaaggctcatagtgcaatcatattgaatcttggagataaggttttgaggaaggttacaaaagaagccacgaccgccgacatttggctaaagcttgaaactctatatatgactaaatcatttggtcattttaaagatacaatgttataagaaagagaatcaattacactctatgatgttcaatcagccttgaattgaaaaaagttgatgttatcacagaaacttttcctggtgatgtggacatcaatatttgacatgtggcatgaatgatgatgtcacggagttaagtaaactcgattcatagtaattgacctaggggggtccctagccctacgcccaggttgacttcgggaggtccgggagctccaggatgaaagtttggacttcaataacttgaatccaactcactatatttcagtattatgtataatgaatacatggagcaacctaagccaagccccatgagctaaaatgacacgaacctacaactcagaagccaacctgggcactaggttcactcgatgcctaagttaacatttctcactatggtttcagtttctgggattgtcttagtgcaaaagggtgaaaacttgcattaggacattaactagacataccataaacatatttgatccatcataatcaattttagagaaagtttatttttgagcacgcaacgcctaggttagcaatctatcaatctgggcaccttctaagtattagatcagagatttgacttttgcatcttcttcatcttcatcaaaaatggggaaacttttgtggaagaaacgacacttcttgggtgccaaaagtaaggcccagcgcccaggttgacacttggggctgaacatgtgcccaggttgacattttgtctacttacgccattttcagtggaattttccaagaacacttccaagcatcttctttgttttcagaaaatattaagattcaactatttttgggaaccaaacagaatttctagagggccagaacttggaccaagtgcctaggttgacatattgtcaacttgggttgtttccgatcaagttcaacaaaaagtgttttttgtcataagaaatgttgacctcagatttggccaaccgatagcagattcaaatttaatgttgatgcttgccacatgttacacaattagaataataaattaaataaacacatgattttatagaagttcggccaccttagttaacgggtaatgacttacactaaacaagaagtaaaagaggctttgttttcaattcctggtatcaaggctccaggtccagatgggtatggtagttctttttatcaggacaactgggacattgtgggttctgacttcacagaggctattctttcctttctcactactgggaaaattctgaaagaaatcaaccacaccactattactctcattcccaaaatagcttgtcccaaaaatgtggcggatttcagaccaatctcatgttgtaacgtgctatacaagacagctaccaaggttctttgcaatagactgaggaaggtattgccagatcttattgcggaaaaccaagggggatttgttcatggacgatatattgctcataatgtccttgtttgtcaggatatggtgagattgtatgggaggaacaactgcaaaccaagctgtatgattaaaatagatttgaggaaggcatatgacaccattgaatggagtttccttgaggaaatgcttgatggttttgggtttccgattca

SEQ ID NO: 320060 - DNA, 348 bp, Cannabis indica
tatttcattacatccaaccaaacgtcaccttatttattttcaatgtaccctctgaaatataacatttaatagtaatttggtcttttaggtataatttgttttattttaccgtgatgtagccgtgcacataattgattgacaaatatatgcaactataaaacaaccaaaaatgatttattaattttactaaaaatatatttttgtaaaaaaaaagtttaaatggtaaaaatgatttgtgtgtgtgttttttttttttttttttgctgggaagaaaaagaatttctttaggttaggagtcgggccgataatgaagaagcgggccagagcccaagctattggcgttgagtt

SEQ ID NO: 320061 - DNA, 749 bp, Cannabis indica
ctagctagatagttatatattgagaataaaaaatccatcttttttttttctttttgaaatgttaaaaatccatctttcaatattaataaataataattgtcagcagcaaattcacaaaaaatggtggtggtggtttggcatagtttttatgggacttattactatttataattctcttgaataaatattatttttttgaaaggaatgaataaatccatgtatagtatttatttgataaacatgatcttgaataaatattattattattaaaaaaatcatctttacttatacaatacatataatatatataatggtctcgttaaatttcttgattaaaatattacatcgttaaattttttaggaaaaagaaagatctttcatgtttttaataatttatattttaccaatactaagacaattcatggactggtttaatcataaattttgtgattaaaagtaaactttttttttgtaataattacaaattgtacgaatagaattcttcttattagactttaaaattaaataaagttttttttgtaatgtttttgtagacttggaataaatgtgtgatatctccatcagaataattagtcctaataagatttttgctctacaacttttaaagaacgctatatataaaaaaggggtgattctacaatgcacccccttaaaagagatgtactgatacacccttaatttgttttgcatctaactttttttcatattcatgtacgttataggtattt

SEQ ID NO: 320062 - DNA, 2144 bp, Cannabis indica
agccagtaatataccgctgatattaattagtttgtgtagtgtttgaagttttgtgtttacaattgtttgaaggtgattcttgaattcaagattttggtgatcaatcaggagagatggagaatgaccaaattcgatttaaaaaaatttgatagtgtttacccaaattttaacgacgatgacgtgtcaagagtagcaacacgtgacacaaaaatatccgagactaaattaataaaaaatatgtaaagtcatgatcgttaatcatgaagagtggtctgaccgtagaatgaaagtcagacagtcacccttacccctagcttgagtaaggtgggggtctccgagaagtaaaaatgacggaataacacctttgtaagcggaatgaataatcaccacgcacccacatgccaagttagtctagcgggtatattctactaccccttacctcctaaagggttggcctaggggtataccctcaccctctacaccctaatgatacaagtcatgcattttagatatgccattctcagaggtatatggggacatccacattataccataactattgataatggacgagaggtccacccaacgaaggtggtggtcacccccctcaagttgggtcccgaggggttaccccatgatggtggttgtcaccccttcccctcaagttgtatcctgggaggatcacccaacgatggtaattgtcaccccccctaaagttgggtgggggggggcacccaacgaggatggttatcactcccctcaacaagaatctcgggggtgttgcccccgagtatggatttcatcactaaaggtggttgacaaccatgtcacacccataagggactctcattgtcagtagctccttcaaaagttcaaatcccacaaaaggctaaaagtcagttgtcaatccacaaaaattgcgagatattatcataaaaatcagacttcaactacctctaaaaatcaaggagacggttgaggtagctccgcgttggtcgcatctcctaaagcgagaagcaccaacccccctcctctatataaggggtcatccatgacctaggagggggatccgcaatcttgaacacttagaaaaataaacacttctcattctttgcaatcaagagcctgttcttgacttttggaactcggatcaataagacacaagggtaataggctattaccgacatccggggccaaatctctttaaatttcactgcattttattaacatttattgcaaattctagtattattaactgcatttattattgtgattttagtttaaatctcatttattacgactccgcgtcggttggctaaaaatccagtcaatattttagtgttttcattgagagcttttgccaaaatctcgaagtttttcaccagaaaaaatggtgttaaccagaagatctcaagaccaacctgacgaagagatggaaagtgcccaccaagttccatcagcaagcaatctcgtcgggaacaatggagaacgaccaccgcattaggagaacgacgacacagccaccaccgctcaaattgctggccatggagcaattggccaaaatgcagccactggacagacaactattgggcgtaccaataacgccactaccgcaggttgcggcgctactgatggcaccaccagaagaggtaatactggaaattttgtcccacctactgatggtgcgggccaagctcaaactggtcgtggccctggcatcttcatgtcgcggaatgaaccccatgtggacattgagggaattgaccccaagatggatcaactgcgagatgtgataggccagatgcaaggctagttccaaactgtgcaccaagagcaaaatcaagctcgagtggccttgactgaaaatctcgctaaccaaaggagagaattccaatcttggttggaagatcatgcttgtgagatgaggaggcaccaagacgactaagatcgtcgcaccaaagaggctgccgacttaatacggaggtacttcaaccaaaacactcaagggaagggtactgatgcccataatcaacagataccccaaacctatcctcaggaggtccctatcgcgaggaactagagggagagggtggtctatggacctaagagcgtccaaggaaccaagagaggactaggagtcaccc

SEQ ID NO: 320063 - DNA, 2608 bp, Cannabis indica
aaaaaaaaaaaaaaaacttctcagatttgggagactttggaactttgctctaactcaaaatcagagtcggagttctccaacacaaatcgatggtattttgatttagtgctcttcgaagtaccaacacctagttttcttttagcaggaactagggaagtagggctagtaggattatctttcaaactcttcttgtccattgatgctcgtgttttatttttctgaggttgttttggggactttttggcaacaagggaggaagatcgggtaacaaccattgttaatgaggaaaaccaatatttatagaagaattccaacaaaaaaagtagaaaatgtatagggaagtttaagatgaaaaataaaaaatcaatatatcaatataaaggagaagtatatgtcggtgacatggcgcttcaaaatctttctaattagttttatttgctctctccttaattctctcgttgttttaattttttattaactataaataaatattcattaattaaatcatatacaaattaaaaactcaatatttatatacaatatttagttattaagtttacgtaatataaaaagtttaagtttacgtaataaagtttaagtgtacctaatatagcttttttttcttctctctctttttttttttcttctaaatgcatattaattttcatttattagtataaatatctacttaataatttatttaaatttcttaaactacaaaatcttaaacctaattatttttcatgcaatgtttctctcaactctctaacaatacacaagtccattattaatctttttatattattattcctcaatttttttatagtcacctttctctttctaattttatactttatactaattttgtttagttatccgtagatttatatgttcattgttatttttttttcttttaaaaaattattaatattattaattttgattgataatgatcatgaaaaggtcaatgttaagtgtattagtagtattatgtgattagtccctttctattttaattttgtctattatgatatatgaataaatattgcattatattatttacaaattattattgttgttattgtagtacttactacttagtatcatgctattagtctattggaagggatagtgatgactataagtgaaataggataatgagaacatctttgaatatgatcaagtaacaactataagtgagatacggtgatgatagcggttttgaatcaaataattttctaaatttatcaattatttttttctatatagatctctattttgtgagatgattctttaatttctaatattttattcactataacatttgataaataacttaatatctaaaacgtactattagaatttaaatttaattagttacaattcttttttttttctcattattaattaatagattttatttggtatatttcttctataaaatttttttaaattcatttatgtataaaagtgagtagttaattcattgctgtttgatttgttttgtatacacaaaaaatatgttgggaatgatagttaactacaagagagatatgacgatatacaacaatacccttgaatgttatatgttgcctagaagtgagatacggtgatgagatagattttaaaatcatatgatgagttttctataaatttatgtattcttatgacaattcaccttcaaaataagagtcaagcctagcatattattataattaataggattaaaatttgataaaatttattagttagttatcattaaataaaatttatgatttattttataatatattaaaaaaaaaaattaaaatatccgtcgcgactagtgactagtgagtgtattatattgtttgatcagagagaagtgagttatataataagtatgatatatatatgtgataaaataaaaatatattatattatatgctataaaaaatccgagataatatttacattttaataaatatcataatatttatcagtcgatattataaggtatataataagatattagagaacttattattaaggatgaaaattaataaattatcactccaataattgatattctctctcatatttgaggtctattgatagatatgatttatgaaagtgacagtctttcaaatctttaatttttgtacttgaattatatatgtaggacttaaaataataattttactaattgaagtaaatatatttaatatttgatatgtacatatgtaaaccactcaatgctagctcaagtggttatagaggggatgcgtgtgtattggaggtcctagttcgagtcccagattatgctgatgtaatatataaacgcttaaatcaaaaaaaaaaaaaatatgtacatatgtaaaatttaattaattattacattttgtagactggtaaatattttaatcattgattttgtttaataattatgaagtacttttggtaagaaataaaagcttaaaagggaatatatatatttttgaacaaatcatgaattggtaattcattattaataataatagcatgctattcaattgggacatttcttcatatacgaccaaaaatttagaaatttgtagaaacgagctaaataatcattcgtctaattctc

SEQ ID NO: 320064 - DNA, 734 bp, Cannabis indica
ttattattatgtgtagttatttatattaattttgttgtgttgtttatcatggatttagttcaaaattaatagattacttgaagaagaagatggaagaatcatcaccggatcacaaaagaataaataattttttgaagaagttgcatcatcaaaatttatattacttgaagaagaaggtagaaggatcatcacatgaattacctaagtttgttttacagtattaagaatttaaattaatttattatttcttctttctgatcgattttctttttgacccagagtaaaaaaatagttgggctctctattaatttattttttttagtttcatttcgtttccattagttcttttatttcttaaataaaatggaaattcaagtattattagttaatcattcacaaatagaatgaattaaaaaaaattgcttaacacctaaaaatgtgcagttgctccatttgagaggcgattatgataaaaaaaacattagtaaaaaattaaaccaagagtttgtgatttttgtttaacgaagtttatatagtggaataaagaaaataaaaacaagagaaatgtttcaagaattatttgcttagatattttgtagttttgatttttaaagttgttacagttacattcaagttcattatatattttgagtataaggtttttaaaataaaataaataattaattttatgtagaacttaaaaataatattgcgcacaataaacaataaaaatg

SEQ ID NO: 320065 - DNA, 1268 bp, Cannabis indica
aaaaattagtacacttatcaccatccctaatcacattacaaatcgattattaatgtctttttgtgaatgtattgtgactaagatcactttgtaaaatgtctttaaggtatagtgttgtgattagagtaaaaataatttttgacattaaattaataatagtgtgacgctaaatttagtatgtttttttaagatactctaactaattattatggcagtgtattatagatttttctaaaaatattaaactatttattttgaactgcaaaatatagccacaatccacttaaatttgtttttatctaggagatatatatgaagactatgacaaacatttcataatgagcaaaacaatttcatttatgtgagtacaaaatttcttattttaatttattggttgcgatatttgtcaatagtgaagacaaatgtgatattataacaagtcgacatcaattagattaatggacataataaactatccaatatggtatgaaaaaactcaaactaaaaaagaaactcaatacttaaatcaatcactaatgaaacttaataataaattcacatacgcaatcataacattactaacaacaaggtgtaaggaatgtgtgtcatttaaaacttttttttcttctgaaatggcatttaaaactgttttaaaaaatgggaatgacaactaggtccatgtgaagtgtgaactcaaaaattataataaaataaagaaattaagctttgaaaattgtaggttaagtaaacccacaaacattggacacgtaggtaaacatgggatttaatatgagttgtgttttgagggaaattaggggtgtttagacagcgagtgatttgcaaaattttatgggacggacaataacaaattaacaactacacacgtcttgcgctttggacgcggttgggttccatatctcactgaagtttttttttttttaaaaaaaaagaaaaaaattattttattatcacatcatttaccataataccctatcaattgttatttatatagatatgtaacatatgttactattcaaaaaaaaaaacatttaaaatgaattgaccaatatgccatataactacaaaagagaaaaaaaaaaataatgtaattctattaatgacaataagtaaaataatagtttgcaaccatttaattgggacatctttttatgggagatatgtttagaattaatatttattaatataagttaaataattagccgtctaacttttagagacaaaaaaattaaaataaaatcagatgaaaa

SEQ ID NO: 320066 - DNA, 2114 bp, Cannabis indica
tagtaaaataattccaacaatagcctcttaacctcatcttgaagcccttgggcgcgctctttgcctagcaacctcctcttttgttgaacatgttggatgtttggaataaagttgagtgcatgagtcatcacggaggggtcaatcctgaccatgtctccatgtgaccatgcaaaaagttttaggtttgcccttacaaatcttatcaatattgatttaattttttggcttaaagcctttcccaatcttcagtcttcttgttgggaaagtgggatcaacctccacttcttccaactcttctacaggtctgaagcttcctatagggtggccaaagtgaggacttatgcatgtctccccactttgggctagacttcattgctttttgttgggctattcttcagagctcttggtgagcatcctctccttcttggctttagagaggaccaagttgtgacagtgacgggcagactgttggtttcccctcacacatcctatccgatgccttgttaggaatttaaggcataagttgtagatggatgttattgccttcacgtcattgagggctagtcagcttatcatggcgttgaaggccgatgtaatgttgattacgatgaactgagccatcaaagtttttggtggttggattttctccaactatgaagggtaatctgatataaccgataggtgcgatgccttggccaaagaagccatacatcacttgattatagggtgtcaggtcggtgagttggagccccatattttaatatgttgacttaaaaagaatgttggatgaggctccatcatttaccatgcatcttgtatggtcatgttctcgatttgtgcagtaatgatgaggtggtcattgtgcgagaaactgacctaagcagcatcttcttttgtgaaagagattgtgggcgctataaactttggtttcttagagctcctgtcttcagtagtcaaggtatttcttttaagctcatgatagagtgtccgagcgtagcgatccctagcttttttggtctaacctacaatgtggggtccaccaatgatgacccctagatgtcctgccactagtggtgacattggatctccgttctgggcaccttgtgcatgagtttggtcgttctgcacataataatgcatgtgcagattatgtcaccttatgaggtgttcaatctccctcttcaaattccgaaaatcattggtgtcatggccgaagtcgttgtgatactagaagaactttgacatgtccctcttgctcaactcccttttaatggaaaaaggctttcggtaggggaccattccctgagtggccatgaagatggcctcaagtttctttgtcaagagggggaagtaggtatacttgtcttttttcttttgtggtgtggaacaagtattatacttcctctttttgtcactgtttcttccagagctattggtgttgcacttgtttctagtgtttctgccactagaggtctgggcaaagttgttggtgtctgtttgcgcacttggtaggtcatgggattgtaggatgtcttgtgactgcctgttgttgacatgccttgcctgggcctaatgtatgcttttcgagttcgataaagccattagctctatcaaggaactccttcatgttgttggttcagatccttcggatggctttccagaagtcactgaataggagtatgccccccaatatgaccgtatagtggccttcttttgtaaggcctttgacttttgtagtctcggccatgaacctctagatgtaatccttcaagggttctccttgttcttatttgacttcgacaaggtcttctaggtgtgatagtacaagcctcaaggatgagaattttgtgtataattctcgagagaactcagcccaagagttgcatcttcctaggtgagtttaaagtaccattgttgagctgttttcgacaaagtggctaggaatatgcgacatcgcacatcaccagtaaacctcaggagattgagctacatctcaaagtattttatgtgagccaacgtgtcttctcatctggtatgaaagtacaactagtagattttaatgattcaagttaccaagttgtacatctttagattgatcgatttcaagatatgag

SEQ ID NO: 320067 - DNA, 1001 bp, Cannabis indica
atgtttaataaatttttattaaaaatataaaataataattttattatataaaacactaaaaattaaatgtaaatatttataatttaatgcaatagatttatcaataaaaaagatatttacagtataaattatatttttaatttcatacttatataggatatgttttgttttacggattaaatattacatattacatttttgttgtagacgttactataaattttattaagtattaatttagcttagtaaaagattacacgtcaatatatttgtattccgactttatttttatttctaaaaaaacattaaataattttaaaataaataacaacagatgttgaaatatcatgaaaaagaaccatagaaatatgtatttatttatttagttttttttcaattttaaaattatttaataaattttttattgaaaatgaacaactagtcaattgacacatattagttaatttagtcatatttaataaggtttaacgaaactaagattaaaagctgcaaaccattcagagatcactaatactagtgagtctgagatcaagatatggaaaattgcatggaagcttcatgtccctcccaaagtgcaccaactcatgtggcgtgctttatctggttgtttggctactaaggttcaacttactaccaaacatatccctctagaccaagtttgtcctatgtgtaaccaggtgcctgagaccatttaccatttgttggtgcaatgttcttttgcacggtcttgttggcatctttcagttctaaattggagtcatacgcctatggagtctttttgggattggtttagccacattctgctacaacactcatccacggcccaggaagaattgctcatggttctttgggcgatttggtatgcccgaaatgaggtggtttggcgggacaaatcaatgtcagcggcggaggttattctattggcaagagtagtccttaatcaatggagaaatgctcaacaaaggagaatggggtcttta

SEQ ID NO: 320068 - DNA, 935 bp, Cannabis indica
cactaaaacttgaatgtgaaaatggtggtagtggtgatgccgatatgatgacagatatatgtatctatatatatttatgagaggatgattgtgatagttataagaggaagttgatggtggaaggtgctaacaatgttaagagggtgatggtggcatcgtgatcatggagcttttatggagcaagagatgggatggagagtaatgagtttgatctagagatatattgcaaagaggaacagagggtaagagctttcattagcttgtgtatgagtgagaaaaatgaagcattaaagctctatatatataggcttacaaagtaaccacctaaagctatcttcccctatcacactccttcttaatagccgtatatatcctactagtatgattcaaattttaaataacataacaactcttctaactataccgctcatgatcccacttaatagcacatgtgtcaaatacttaaggaataaaaattttttttttatcttcaaagttacatatatgtaggcttgaaggaaatggttttcaaagactaacaaaaatgagagctaatctctcaatggaagctacgttatcaaccttctccaaaattcttaatttcccacacacacatctccacctaaattgaaaaagtctattatattccatgcattgctcaaactaactatcagcccacgtctagatctctaattcaaatcatgaacacttaaatcatgcacccacataaatgactaactatactaatattaataatgaaaaaaataattatattaatcccttacaatatgtatgtaaatgtctaggcccgggatgaacttgtatattctaataataacatagtacataataccaacataatttttcttaaattcctagccaaaaatataaggcccaacaaagtaagaacactttctactttaattaaataaaaa

SEQ ID NO: 320069 - DNA, 930 bp, Cannabis indica
accagcactaggaattgatgtcgaaccgacatccttagccgtctgcttttgatttgttgttcaacatcctcggtaatcaattctctctaccactttcttatacaaagtgtcgtgattagtggtaatcttcaagtcctgactaatcatgatatctaacctagtaacataattctgttttcaagtaaaatccattagtaccaagtcactagaaaatttagataggtgatcaaactcaagcatataatcagccattgtcttatcaccttaaaccaatttcaaaaaatcctccatgtgagttgtacagatgctaatgttgtacagctttttttcaaaaaaattcttaaactcttcccaagaaacaataataaggtcttgagattgacctaccaaatcccactaggtgcgggcatgcttttgaaacatgaaagcgacacaattaacccgctcatttccaactattcccatattatctaagatatgagtaatagtatttatccactactatgccttgataatatcagtaccactcaagaatgttgaaggtttaagcttgacaaaccatttgaaaactgaatatttatgtggttgtagagctaatacagggttagctaccattggaacaaaatttggaggaaccacttgttctactagagctgcctaaatgggatgcctgatccgacacaattcttcttcttgacaaagtatgatggtttacatttcagtaaatatttgctgccaatcgacaggagaattagcattgttcatccctacagtattcccaaaattttacggaggtactagtagtgtcaatggattggttgcactaatatcctgctctacattgtcgccttgtgatctagttgattttgtagggtccattcttttaaataaccctaaaatcaacaatcacagcgagtgagatactaattc

SEQ ID NO: 320070 - DNA, 785 bp, Cannabis indica
gtgggaaatggcatcgagggatccacccccccctgagttagctggccgcgtgggcgaccctgaaggagcaaggggttgggtcgaggtggtggcaacggaggcaaaactgatattagttcccacttgagacatgttcgggggagggccgaagggcatagaactctgggcccagggctgactctttcctctatgtcaaaatgatgccctgaggacgagctgaccgaaggccgcccaccaacgttctttttaaggaaattattagtcttggtgagcaaacctcaggcgagggtttggggaaaaatggctccagctgatgtaccaccggcgcgaccaacttctcacctaagggacgacctcccgacgatttattcgcagcgcgtgactgctaatggccctcggtaacctctttcgcggcattcgccactacttcctccgctatcgcgtctccttcctatgcctgcgaggaagtggcatcagaccttgcgttgttcccagcctcctctcccatctagcttggtggaagggtcaaagaatatagcttgtcccccttcagcttatcactcgaccgaatcaacctgcttttcttgaggcggggtaaggacagaagataatggcagagcttcttgtcgtagtctgccctgaataattttagctagcaggaggcatactccttttacgtaagggcggggagaggttgtgccgctgcataaaaaaaggcattttagggggttcaagcttatgccattaatgaggatacaagtcaaggaatcacttacgaggcatcg

SEQ ID NO: 320071 - DNA, 2797 bp, Cannabis indica
agcattttatctcaaaaaaaaatctgtcatattcttttagttaatgtaatatttatgatatttgataaatatatttttttttgcttgattgagaaattagaagaaaggtattatactctttggtttgattaatgtattatttgtatttgtgtgtatgtgtgatttatgtaacttgtagtcttttaagtgttttggtattttttggtctcttagactgtgttgttgttattttttattttggttctaataaaaaatttctttgattgttgtcaatttataattataataatattcttgttttatgcttatttattttaaataacttgaaattttttctattttgaattttggcaataaacaggacaaagaaataccaaagaccaaaggtgaagaaggccattgaaaatcataattgatgattatgtaaatactagattttatttacaaatttgtaatcactatctagttggtagtacttttattggatgactgtaaatttttaatgtgtagagctttgaattactttaactatgtttaaattttttatgttcagttcaggtatgaacttgagatcatttttcgatttaaaatttataattgtgaaaaataagggttggaacccaacccaacccaacccgacccatacaacatgggttgggttggtttgggttgtacataaaatataatatgaatgggttataattttgaaaccgatttaattgggttggcccattaaaatactctcaacccggccaacccaacccatgatcagccctaggttgagttgagtttgagtttatgaacccaaacttaactcaaaaatggcacttttgattctaaggctttaatgatgcaatttttcttgaattatgttcatatttgtgttattaggaattctagaaggttttgtgaagtttgggttggaattgagttaaagaactcgagttttagttttttttgctaggaaacggttaactaggaaatggttaaccatttcctgttgaaacagcaaaccgtttagcctagcaggacccccaataaacgattcgtcgtttagggatctggtttactggttgggtgtttttcgagtgcctagatttttgtatttcttcgatatttagaatatttccacgatatttatcaatagaaaaacttctgaatctcaatttaagttcctaaaagtgagttagcaggtcgcttacctattttgcattattgtgacttagagtcccagaattattgagcaatacttccactcggattgtttggtatacctgattacggaagtgaggtaagattagcataaaggatgcacatatatatacatgttgtatgcatgcattatgaaatataagatagttctaccaacattagtacgttagaggaactaagtgcatgtggtatagagactcaagctagttctaccaacactagtacgttattggtactgagtgcatgtggtatagtgactcgaactaaccataccgacactagtacattagaggtaatgagtgcatatggtaaagaggttaggaggttcaaacaaaccctactaacattattacgttagaggtactaagtgcatgtggtacagagataaatggagattcaagggggtatggactatttgtactcttgtcaagaacgttcgagacttgtatgcgttggacgcatgataattactcggtataaggtgtataggcgcctaagatataaaggcaagttgtatcttatattatgattttcgtactgagtctgttaactcataaatatgtgcttcatgtgtatgtaaaggcaaggcaaagactaaataagcgatgagtttggagctcgatgaagattgtatatatcgagatgattagacttggagggttcagatcttcgggacatcatgggctcgattatattatttcttgggtgacaacttttgaactattgtattttgtaaatgtttgaaaaatgtatacatatcctaaagtttgtaaactttatattttgtttatatggtaaagttatgtttattataaaaaaatttgttaatcatgtttttcaataaactctttgattcgtaaattgcacagtagctgagaagaacattgtagcgcgcctagactagtaaagtgttacaaataatatgtgtaatatttacttatttgaatatatatatatatatatataaatataaaacctgtctttatctttaattttaccctgtcaaaaattcaagacaaatttgaaccgttaactattaattgtaaattcatgaacaatttgtgaatttgaatctaaaattgtgtttctcttatgatataaaaaaattcaaatggatacataactattttttttctgtcgataaaaaaatatttatcaatttgaattataacaacgattatgggtatatgtaaatcccataacataacttattcgatatatttgatcatgccctctaaaatatacgaattgttaaaaattcttcctgaacttttacatttacaaaaatttaatctttttgcaaggtttcgtcaaattatttcgtttaaatgctgaagtgtctatgtaaatttacaactttatctcttaaactttgacaactatcaaattgtgcctcttccaaataaaaatgagaaagaatcatctttttttataaatcttaaaaaattaatttagatcttaaaaaaaaattattttgaatgattaataaatttttttaaaaaatcaacattttaaaactaattaagcaaaatacaaaaaaaaaaaaaaacaatttaacatatatatataaaaaaaaaaaaagtaa

SEQ ID NO: 320072 - DNA, 2427 bp, Cannabis indica
ggtctccacttgtaggtgatatttcaacagctattcttaatgtgacagaaagagacgacatgaagaacattgaaaacaaatggtttgagccgatggacaagagttgtttagactctaaccctaaaatctcatcaaacaggcttagtcttggtagcttttggggcctattcataatagccggagtctcttcattatttgcactcataatctttatcgttatgttccttcataagaacagacaagtcttgttagattctaatgattcgatcgagaaaagaattaaggtttttttaaaaatttttgaccaaaaagacctcaacttccatcattttagaaagagtaatagcaacaacaacaacaacaataataatcaacttaacaatgatggatatggtggtacaaacatggtggagttatcaaataataatactgagtgtccttcgagcccatcagactcaaactcgtcgacagactcaatggtagaacaaaaatcaactatagtgccggccattgatgaacttcttgttcaaattaacgaagatcactagcttacccagaatactagaaaaaataattcaaaatcatattttttatgtatgtgtaaaaattatatttcttttttttttactctatgttattggacagacgtatattcaaaaaaacaaaagaaaaagaaaaaagaaggtgatacgattattttttttggatgtattgcaacatcaattcctttacatcctaataacactctataaaagagcctttggatcaattggatgactgaagatcagatggtaaaatctaacaataattggatcaaatttggatacacctgaatacattggatgtggtccgataaacacctctacaactagaacccctacagattcatatccatatgcaatatcaacttctccttggttcttgttcttgttcttcccttgagtgttatctctattcaatttagcctttaatgcttgacattcatcttggaagtgtctatctttcttgcagtaataacacatctttccagttggtgtttttgaatttgaccttggcttgtacccattcttgagtttcttgaattctttcttttatgttcttccatgaacaaacagaccatcaccacttgattcaggtctttcataaactttcttttgaatttctttcaaatcgaaggctgctttaacctcaaacatagttaatgtatcttttcaataaagtatagtatcgacaaagtgttcatataccttagggagtgaactaagtagaagtattgcttagccttcttctttaattctgacctaaatattattcagtagaattaacttgttgaaatcatatagatgccttcgaagctcattagtttcatccatgttcattgtgtaatatcttttcttcaagtggagcttattggccaatgatttctacatgtaaattgatccaagcttgttccataatcccaggacagattcttcatcagcaacttctctaaggacttcatctcctaaacttaaaagaatagcactacgtgttttcacattgatctcttgagaaaccttcttgacatcttcttcttccttagaactggtcaccatgattgcatacgcaagtccttgatgaacaaagaatgcttttatcttaatcctccatatctcaaagtcattaaaacctaaaaaacttgtctttttcatatctggtagtagccattctaaatgagtacttcttgaatcttgatgacttcttgaaacttcaaaacttgactcttgaatcctcgaactagctgtgacgctctgatactatttgtggtgaattaacacctatcaagaatgaatataaaacaagaactgaagaactagaatggatgaatcaaacaatgacaaaagccagaaataaatatggaataaactaaatgaaataaacaagatataatgaggttcatcaccatttttgtggtgactcttaattcccggaaggaactgccctttggccaagctttatttgatcttcactaatagaggaatacagaggagaatacaagagttgagctcatcaacaatggtgtcttgcaccttacaaatcaactcacttgagggagatgtgatcaaacatcctctttaaccctcctcacttagcataaatataattatcatctaaatttctctctagatcgtcacctaaagaagtagtacacgaagccttatataggtaactcaaaataaggggtacctgagttagttataactaaaaaaaaaactaaactcaggagctaactggacaaacttgcaacatctaacaaatctaacaggtcattagaagagactaatagtagcagtaccaccaagttactaaaatcttccacaccaaaagagagtgatatacatttataaagacattaaggtggtgtttggttaggagaaatgaaaatat

SEQ ID NO: 320073 - DNA, 1143 bp, Cannabis indica
gaaaagaaggagacagaaatcagggatgggatcgagctggctaggaatggcgatgatgtttggctgactggctggctggcacaaaaagacaaaacagatctttcttttacaacccaaaaaaaaaaaaaaacagggaattggaattacgggattataaagcagggaatagggaaagaaggaatgaatgaaaacgaaaaaggcgtaatgatcttcagcacgaatctggaatcttaaaattgaagccttttcaagtttcagactcagaggtggccaagtaagaaggagaggtccaaatctactacttatgaatcattctcaattctgtggagagatgaaaaaccagactgccttttaaataaattcattttttataattcattatttttttgactcatatgtttagatttttctgtctttttagatttaattattattattattaacaataatattaatataataataataaaatatgtgatggggagcatatcttgggaatattatttttcacttttagctttttgctaggctgcttttttttttcttaattattattattattttaatgtaatataatatttttatttttataatttggtattaccggtggcacttgtggaaagttgagcgtattttgctaatcacaattttttaatttaattaatgttcggtttgttccaaaattttataatagtgatatgttcaaatgcttttagggtaaaattataatttttttttataaaaatgtgtaaaaattaacaaaagtattaaattttaactgaatatatataaaaacattattaaatatataaaatgtaaaaattgttaattatactaataagtaataaatgataaaagagtatataaataaaaaaaagtgatatttattgtgtaaaattttatttatattatattatgtgttaaattttatacaatttttagcatatattaaatttggattactagtttaaacattattattggaattcactataaaagatggactcaaatatgtatatgcatcacacttgtactttgtttgaaattttaaatataactttgtattgtattaaaatttagaattatttacaccacatactgaaatttttaacttttttattttttttactgtgggatagaatt

SEQ ID NO: 320074 - DNA, 590 bp, Cannabis indica
ataaaataaaataaaaaatcacaacgtaattttactttagagtagaaaaagtagtaattatatttttcatcatttttatttttttgatagaatattttcatcaaatttaaatatctatggataatactaataattaatgtcatgttatacgatataatgtgataaatgaagattggagaatgatggtactttggaacagtatggtgacgaataaggcaatagcaataataaagatgtagtagtcaagtgctacactcaaaagataaggatcatgaaaacgaaacttcttacatccacttttttttttttccttgaaatcttctttacttatagctgaacatttatcaaaatatacctaaaatcttccccctcttttttattttcaagtttatatatgggtaaatactattttggatcttctgttttacaaaagttaccaattggatcctgtattttgttaaatgacaaaataaaccctgtattttctaaaatagtataaataggaccctgaattgattttttgtcaaataaagtttaattataatctgatctaaaagtgctatgacaaaactgtttacattttttgtatc

SEQ ID NO: 320075 - DNA, 4521 bp, Cannabis indica
tgatcttgagcctgagaagaaattcttgatgaagcatacactaccccttactcattgcatctgagtaccaccaagatgtatcaagatttgaagcccgatttctggttgtacagaatgaaaagggatgtggtggataacatgtctaaatgcttaacctgccagcaaatcaaagtagaccatcagcgatcggcccgattacttcagctattaacacttccaaaatggaagtgggaagacattgcaatagattttgttgttggattgcccaagaccacaaggatgtacgactcattgctttacaaggtcagcactattttttcctgtgaaagtaacatatagagtggatcaatatgctgacttgtacgtgaaagaaatcattcgtcttcatggagtcccaaagtttattatttctgataaagatccaaaattcacatcaatgttctggtgagcttatagaaggccataggtactagcttgaagttcagcaaagcctttcatcctcaaatggatgaccggtctgaacaaactatacaaatatttgaggatttgtaacaagcttgtgtcatggactttggaggttcatggtgtaagtatttacctctgattgaattctcctataatagcagttatcaaagtaccataagaatgctccctatgagctgctatattgcagaaaaagccgttccccaattcattaggacgaaataggagaatgaaaatatttgggccgtgagttagtccaaaaaacaaagaaggcagtagacaagattaaagctcggatgctagcttcacagagtaggcaaaaaagttatgcggatcccaagtgctaggacattacatttcagataggaaatcatgttttcctacgtgtatcaccaatgaagggtatcaggcgcttcagaaagaaatgcaaactaagtccaaggtttattggaccttttgaggtacttgaaaaggttggataaattgaataccggttagctttgcctccagctttgtcaacggtacacaatgtgtttcatgtctcaatgatgagaaagtacgtatctaatccaatgcatgtcttgagttatgaagcattggagttacatctggatctgtcttatgatgaacaactagtgcaagttctagatagaaaggagaaagtccttcgaaacaagaccataacatttgttaaagtgctctggagaaatagtaaagtggaagaggccacttgggggttagagtctgatatgacgactcaatatccagagctattcaggttagatttcgaggatgaaattcttttaacttggggataattgtaaagaccacctatgttgatatgttagattatcaaataattagggtttaattatgggattgaattattagttatgatttgtgtatttgtggagatttattcaacttcagaatgtattaattatgctatttatgtgaatttctcattttttccgtatttgtgttcggtagtagtggaacgcgacgttgggtcattagagagtcacatttttatatggttttgaattttgttaccgaggaattattgttaggtataggaagtattaggaatttttggggtttggaaaatgaccaaattacccctttttgcgcaattagtatttgttttcttgtcaagggcaatgtggtcatttttgtatgggttcttgtcactttgtggggttattatttgctgtaggttttattttaattaagttaaaatatgagtaactggattaacttgatgaaacatagaagaaaacccttctttctcttcaactctctttgtctctttcgattgtgctagaaggcacctagggtttggatttttctccttgtttttgagaattctagaaggaattgagagctttggttcaaggtatagaattcttaccattattcttttaaatgttttatagtataagttgggttttggtgttgagttgaggatttaagttgctttatgaattggggtgtggtttcatttcgaattctcaagataggttgtgattatttaggttattctaagctgagttggttgagttttgtgatgattgggtgaagttagagtttggaagctcaagctttgatctctaatgatgttttcattttttgagctatttattatgttttattacttgaattaagcttgttggagtataagcaggtattcatgagatttttagagagtttgaggttgaattgtgctgaggggagcatttttgggttcccagcactgaaacggtcgacccgtttagggagatctgtagcaaccaatcgaccggttggtcctcaagaaccaaaattctggttggggaaccggtttgccggttgggacaattaatgaaccctagtttttccagttgttgttatttttaaggtatttccatgttattcattgatagggatatttctagttttgattttaagttcccaaagtgtgttttaacgtgtccctcactagaattgcaaatgttgtgatttaaggccctgtaaaacgtcgacctgtaattccactcaggctgactggcacacctgagtgcaaaaataaggtaagatagcataaagtatatatatgtgaatgttgtatgttattatttgtttacactactggcactattaaaatgtagttttaagggtgctagtataatagagttttagggtagttacagtgttacaaccacgagtatcggagggtacggtgtgcatgtggtataacccgcagtaactcccggaagcacaatgattgtcctatcaacacgagtacggagtcagtactgtagtgcatatggtacagtgatcgtacttccgttgagaatgctcttaaccatttagtgagcttggtagttgggctcaggacgactttagcataaagctggtatcgcattggttatatatatattatgcatatcaaactgggtcttttgactcatcagcttgctaccttgtgcaaataagggtaaagctaagctggaggagcagtgagctgagccttggcaaggattgtacatatcacaacagtgcaacctgcagggtttcaatcatactgcattttgaattaaattttgatgctgcctgttgttttttaaaaaaatatattgtgtgtaattatatataatacatgtagtttcaacagtagttttgaactcgggatcccgacctacgagttttataaatataattaaagtagtttatatatttgaattagtaaattttcaaatacgggcattactcttgtttaatgactatttgaagtcatacttttcttattatgccatgtgtttcattatccgaatacgtggataacatttaacccccaagctctcggaactttgcaagttgtgggaacttgcaatcctcatttggaactctgaggtgcttgtatgacacgtgaatgattgttgggaacatgaatgtgttcttcttgttgagctttcatcgattgaaagatcaagaattaagatgacactggagtggcacacatgccatgtatttagtgaacttgttgtcaatacgcacgtgtagggggcacgttgtccagggaaagtgtaacgccctaaatgattaggcacgctacccaagatacttatgaaaccctaatcccctaattgggattactaataaaattagcgcggaaattaaactttaattataaacggaattaaaataaaacttgtaataatttaaactttacaatctaaaagttacagaagttgggatcccaaaaccatttacaaaatattattacaagtccattttctttcagccgacctaagcggcaaaacagagtctcaaaaaatacaacactagtagaccccaacccgtttagtctgatatggctcgaacatgtacattcttcgtccagctcctgcactcatggctgatcagcaatagtcttaccctttcctgcacagtagagcacccgtgagccaagccaagcaagacagtataaaacatatcaataatatgctcatcatataatataaacaacaatgccattcaaatctgtctgtgtgacacagacctgcatgttgcgctcacatgcctatttatgtttacgtggcgtaaacctacgtgttgctctcacacgtctatttacaataaggccttagaatggttcttctcggttctgattaccgagtccaacctgattatgccttgatcgcataatccttaaatctcaatataatcatacacttagcatggcatagcatttattcaacttatatcactagggtaataaccctaggctattaaccgctcatattagggtaataaccctaatcccggttacaattactcacatatatcaatctcaatataagcgccaccgcgcatactctacgtgctaactactgtcttacctgttgtcccgcaaaggcagagattccaaatccccgggtgctcctgaccaggtgccggtaatcctagtcacacaatccgggattttcacaaatagggttaacccctgatttcacattcataaaatatattcatggaatttaaaatacagataatcac

SEQ ID NO: 320076 - DNA, 1203 bp, Cannabis indica
gctaatattgggcctacctatgactaaatgatagaaaaagcccatgttgatgtatgccaatctagacaaccccataaacatcatgagcccacccatttcccttggcctatttatgcagaggaaattgggttggctgaggaacttatgggcccagcaccaatagacaaatttgagcccattcctactctctttcatgatccaattgatgtttccacccttgtccatcactgtccacaacccaaaaaaaggaaagcaagcctaactttgatcccttatgtgcaacgaacagaggaaaatacaatggagtttagtttggatgccccggatctccctgaattttctccagcaccggactctcattttaaaataggatcaagtgcatctacatcctctttgaagaatgataaaataagaagaaaggggtcccgttctaaatcatctaactcttcgaaaggcaagaacaaaacagttactctggcagtgatgatgttacaaagaaaaaactcttaattgaatccttgaatttggttgaagttcaagtcaaaagttcacaatctctttcaatgggcgaggaggccgacccttatcaacgccccccgcagccccatgaagtgtctttcgtggaactgtcggggcctcgcgagagacccgacatcccaagctatgtagcttgggttaggaagtacaaggtggattgtattttcttgttggaaactaaagttagtaagaataaaatggaggatctagctcgtttgctgggattttcaaaagtggtttgtgttggtgcaaatggtttggcgggaggttcttgtttaatgtggaatattaatgttaatttagtagtaaattactttgacgatggatttttcgatgctacagtttgggatttcccaactcaaatgcattggaaattgtttgcggtttacggcacaccttattcttgtcacaaggaggttttttggaaaagtttggagagtgaatattctcactgtcatcttccgtgggttgttattggagatctaaattgcatctgcagtcaagaagagaaggttgggggccggcttgtttctgataatgatacgaggtggttgaaggacttcatgatgaattcgggttgtgttgaccttcaatttattggaaacaagtatacttggcaaaataagagatttagtggtggtcctatccgggaaagacttgatagag

SEQ ID NO: 320077 - DNA, 645 bp, Cannabis indica
gctaattgcctttactaatccacattactagagcggtcattacagcttatctgctctcattgctcaaaagaccttgaactccgcttgcgtactcaaggccttggcctcaaaattgctcgtacttcttcgatcatatctcatcttttctttgcggatgacaaccttcttttcagccatgcatctccttcggctgctgcaacaataaaagaggtattacgggattacagccttgcctcaggccagatggtcaattttaacaaatcctccctctactttttgcctaataccactgaggatattaagaaccaaataacctccctcttgagcattcctattcgcgactcaattgagaaatacctaggccttccccaaacctttgggagatcgaagaaagatgctttcaattacctcactgattgagtctggtcacatttgaacaaatggaatgctcaaaatttctccaaaggaggaaaacaagttcttttaaaatctgtggttcaggctattcctgttggaattattttaccaggatctagatttactaccaagtatgtttgattaacatcctaatatgaattctaaaacaatgaaattaaacactgttgcccctgattttgcctattatatgtggaccaaccagacaag

SEQ ID NO: 320078 - DNA, 499 bp, Cannabis indica
caactgatttatgacctattttttaaaattttttttggtaatggagatagagaagcaaagccacatgtaatagccattgtatagacgaaatgaaagatataaaaaaatgataaaggaggcagttggaaagggttttgaacgtgggtttcgaaagggtaatggctggaaggtagttttgaaatgaaaagctgagaaagaaaaggaaaaagaaactgaatgctaaatttgaaaataaaaaatgaaagaaaaaagaaaaaaaaggttgatatttgggccgaaataaatggatatgtgtaagtagtattttggtaagtaaaagctcattaaagacaaaattattgcccacgccttataaatgtatttttgtaaataaagtttaatttgtatttttcttgtaaaaatttctctgaaatataattccaaaaattggcatagagtttgaaactgaagacgaagctcataatttttacaatgcttatgcttataaagttagttttgg

SEQ ID NO: 320079 - DNA, 999 bp, Cannabis indica
aaaagaaaattgaagctgaagaaaccagatggtgattggctgtggactaatttcaaatatgaattcattcccacattttgttttatatgtgacattattggtcattctgagagattttgttctcgtatctatgatactcctttggaattaattgaaaagccatatggactatggattaaagctcaacctcagaggaagaacaagctgatcggagaaaggtggcttcgaacgggcacagctgctgactctcaattttttgatggtggtgagaatgcaattaatgttcctgtcattacccccacgagaaatcagggattgaaggaaaaaaccattgttgcaggagctgactttgtgatggattgcatggatcaggggatcggtttaaacaaagaaagtgcctttgatcaagggattgatgtattaaatgctcataacgtgataattgaagataatttccaatctgaatctatgactgttgttgattctaaacgaagaaggacatgacagaatggaaaagaagtaatggaggaagatgaggtggaagtaattaatcataattttgctggaccaaaaacggggctattgtgggttctggttcccaggcccaccaaggattacgagtgttcttagttagaattgctgtgggcttgggaaccctcgggccttacaattcctgcaggaccttgttgtccaaaagaggcccaattttgtattgatgtgtgagactttatgcaaaaaagagaaggttgatagacttcgtgtctgttgcccctgattttgcccaaaatacgtggaccaaccggacgatgacaatggatggaaaggggttaacatttaaataaaacagccaagtctccttaaagcgcaggattaccttagacatgcctcccggagaaggcatgtaagtctcgtatgctcccggagagcaagattgcaacaaggcatctccgggtggtgtcagattctaccggaacagtcatctcgtatttaatgccgcat

SEQ ID NO: 320080 - DNA, 718 bp, Cannabis indica
tttttaaggcagaacaaatagctttcattcagtctcaatttgagttttgtccttattcaaattactttttcggcaaaaatatcctgttacagtaactattgaaatatgttccttaataaaaaaactattgaaatgtgtcctttatgatgcttattgttctttttttctttttaagtgtgattatatttttaccccataatcgtgaagacaacctattcattaacaaatactaactgaatttattattttttttttaaaacagaattcattcattcaaataaaaattacaattgattaggcgagtctagcttgaatttattatttaaaagttattcttaaaacttttttcagttttgtttttttgcaaattattaattaattttaagcatattttacatatttttattatataattttttaaaaaataataagtaattttaattatttttaacatgtaagtttttctttatttttatttaaatccatatgtatttttcaaaatgatagaaagaatatgagtgcactcttaatgtgtattacccataaataggtaatattaaaaaaatttgagtttttatgattaatttgtctacttaattagaaaaatttctcatttttatattatatgggctaagattggtccatcagctaaaaagataaaaaaattaaaaagtttttcggtgaaaaatgataaaaaagttaaatttaacttaaatat

SEQ ID NO: 320081 - DNA, 525 bp, Cannabis indica
gcagtgggcaagtggcatatgcatagtagttttaagcagtttaaattctctgtattcgtatcaacattatgctttattattgtgtgtacttattcagtgtagtattttttttttctttttttttttcataggggttttgttttagagaagggagaagcaagttctttcatcaagaaaatcccatctactagtttggtctataaatatcaaaacttcatgtaacattgtataatacacgtcctttaattatgataagttaaatcttaatgtttaattatctttttagtttagaattatcttcttctagctttttattcttttattttttactaaaaatcatacttttttttatgttaatttaatatggccaatacatgtgttagaatattctttaaaccactaagttactgataatgagagtatatgctaatcctttgacgagaatattttgaaaatatatatattttttattgaggatattttgtgagtagaggtatgattaaatttcttctcattggtcaaggc

SEQ ID NO: 320082 - DNA, 2059 bp, Cannabis indica
catttgtattgagattcatgttaatagtgagatgttttgttgatttatgttttcctctacgatcacataaaattaagtcaagtatcatactacaagaaatattatttttgttggtattttttttgtcggcaaaagcaggcataacatgctagcaaaagttttaataaattttaattataaattagatttaaaagaaacgtaataaaataagaacagtattcatatttataattaaataatattccaattgaactaatataaaaattttattcctcgcctaaaatcttacagtcagcgggttacagatatactctgatacttacgcaattaatgagttattttagaaaagatatggcaccgattcccattccctttatcttgacacgtgtgctccagccaaattttgggtataacacctagcgaatatacaaaataagccccgatgtcccaaatatcgtacactccaagcctaaccgcctcgacatgtacaatctccatctgctcgctctcacggctgctaagccttagcctcgcctttacctacacatggaaataacgattgtgagtcaataagctcaataagaaaagcataaggaataacatagtaagcatccagattataatgaggcggccatacacccaaccataaccctatccttgtgtcccacacgctattgagtctagaacgttcatacgataatactatccaccataatatcaacctatgctcaataatctagtcatactctagccacattgatgtgatagcatcaatcagtatttaagctaaacatacgttcatcagtatccggtacaactctatgtctactaatactgctatcaatgtactctaacaagcatacacaacatgtacgctaaatatgtaaatacatatgcataacatttcactaatattaccttgtttctgaattcaggtgtgccaaccaacctgagtggaacaactactcagcgaattacaggcccctaaatcacatcgttcataacacgggtaagtgacacgctaaatcacatctggggacttaggttttaaaccaaaagttttcctactgaaagttaacatggaaataccctaaactgacaaggaattaaccaaccaaagctctgaaactaacacgaaaagttcgggaacccagctgttgatctggttaaccagttttacagggcctgtaaaactagttaaccagttttacaccaggtaaaccaaacaattcaaatccaaaccttaccaaaccttccagacctgcttaatataccccaataaacataactcaagcaacagaacaacataacatgctcaaaatcaaaattcaccattaaagatccaagcttgagttcttaagctcaaagcttgctcaaaccttacaacagccaccaaaactagctcaatacaacataaataatcataatcaaacttcagaacacatccacaaacaacaacagcaactacagaaccctaaactcacaattcatgaaaaattctcaacttaaagcttaagaaaactaaagagggagtttctaggaacttaccttgacttgacatcactaagaacttaaagtaaatcctctaaattaggtagaaaaaacaccaaccctagctgggttctatggtgttcgaaagagagagagaactgagagagagtgtttctttttttttttctttgtaatttttgatttttaataaaatgaaataaaactaaggctttatctaatatattcagcataaaataaaaatcagatttcatatctaaaatcaatccactaaagacaaaactttaattgggcaaaaagaccattttgcccctcacatagccaaaaagtcataaaatcacataggggtaatttggtcatttataaaatctcgactattcctgacattcccaatgtctaactatattgccccactatactaaaaatactaagatgtgattcaaatagccaaacaccgcgttctaatgttcccgggcacataacgtacaaaaatatgaaactccacatatgacatataaaatgcattttgaattcaaataaatcttcgtaa

SEQ ID NO: 320083 - DNA, 892 bp, Cannabis indica
ttgtggctttccaaacgcaccttaaatttaaaattttatgtatttaaaattaaggctctttttattagtaattttaaaaaaaaaaatacacaaataaaacacaaaatattatctttcttatattaaactagaaaataagttgtgctttacttacggttatattttatttagtgataattatgtcataaaattatattatattttaaattttttcgtattttttatatatatttattttgttagtataagtaactatttgactaatttttcaaattgattagagatcctcatacaaaatagaagttttttttaattgataaatccatataaaaaataattatcatatgatttcaaaagtgttgtcatcaccaacttacttatatatgtcattacattcaaagtcgttattaccaccgtatctctcttgtaatcaccactacattcagaataattgttaatgtttttattgaatagttgaataattgttaattggtagttatttgtagagattttttgaaaatgaattatttaatataagaactaaggaaaacagtcaaaagaatcaaatcagaatagcactcagagtttttacgtagttggggcgttaaacagccttttattatttgttaggctagaaaagctaagggattacaatgagtatattctctctattcccttcttaagcttgagagttaagatgtgacagtcaatagttcaataatctgtaaggagaaataccagttaagctgtgaaatctcacaccgcctggggaaggtcaagtgcgacgattttgagactttgtaggtatgaaactacacagttgaagatggcgtaaatgagttgattggtactatctatatcaacaaggtgcatctgttttctagtagcccat

SEQ ID NO: 320084 - DNA, 631 bp, Cannabis indica
tatagagagatcaatataaaataggcataaaatacgtataacaataaaatttattcttatatatatatatatatattataatcacatctaaagagtaaactaatgtagccacaatagctaaaaagaatttttaaagatcaaaatcacaaaccctatttcaaaaattaaaaaataaaattacattacctaattaaaaaaaattgaacataatgttgagttttgtgacctaaataaaatccattttaatataatcagatttactgattaataaagatcagaaattgttggctgtgctggttgtcaggtaaatatgctggtataataattcttgtagttgctgccacagtttatatgatttggaagaatagaaaccattatgtctataatgatagttgttatactgtgttgaaaactgtaaaggaaattaaagatatagttcattacaggttgtatagtttgaaggatagaaaagttgtgcttgctgaaaaaggcttgtttttgcgccttctttagtagtaggttattttttgctgcttttggccggctgtagggggtttttctgagctgtttaggggctggttgttgaagccttgttgtatttggttggttttgattaatgaaattttctctt

SEQ ID NO: 320085 - DNA, 1322 bp, Cannabis indica
aataaacattgttcaataacaaaaaattattttaaattttcaattcactttgccaacactcttggtagacacttgtgctccattccccaagcacatagtcacctccccattggccagctcccttgacgattcaagtatctacatagaagaaaaaatatgattagtagctccagaatcaacaatccataaggaattatcatcctccactaagttagcttcaagaaaaaataaattgcatttacctttattaagctcgaaaataagatacttgttacagtttctcttcaagtatcccattacgccacaatagaaacacttgcctcttgcctttttgtcatttgacttgggactggctttgttcttcttggcattgggtaaattcttgcctttgggcttgccactgctattgtccttactgttccacttccttttcttgtaagaagaagacggagagttagattttgcttcaacaatgtttcattcactttccttggacttatccttattaaggttttcaaacacggtcaactcgttcaacaactgagtcatgttgaaccctagattgttcatcacatagtttgtggtgaaagctttaaagcaaggagatagcgactcaaggatcatacttacttgagtcctttcataaatgatagcgccatgtgtctctgccttatgcattagctcaatcatgtgcaatatatgagttaaaataatgataccattcttcatcttataattcttgtagctatgagtagcatcatatcttatttgattagatttctaccaaaacattacctgtagagaattcataatttaagatgcattctccatatcttcatgtgtcttacgcaaaatatcgtccatgcttacaagcatgaaatatttggccttgttgttggattggatctaagcatcatatttatctcaaacattttgcaaggcattggtagtaggctgctcaggttactcctatgttaggataaatttctgattctcataaaactatcattaaattaagatttaatttccatttataaaaatgatcaccatttagtttttcaagtgctagtaaagtagtaaggggatttagcatggtagacatgactgaaataaataaagtcacataatgattacacttgaataataaatattattttggaattattgtaaatgtgatgcatgagcgcatacaagtaaaacacataaaagcttatttaaattattccacaataaaactctgacaattgatcgccgccttagggtcggtatcaagtcaatttcattgagcttacgagacaattctcatctttattattttgaaa

SEQ ID NO: 320086 - DNA, 1312 bp, Cannabis indica
aaacaatgttcaaacagtctattttgcacgcgtataaaataaaatagtcacgcgtgcaacacactgtttgaacgtattttttggcgtattaaacttttctaaatttcttaaaattttacaggatatcttaaataactataacgtacataaccatgagaaaaaatttgactaaaaaattatttcgaatgctaaaataaataaaggtgcatcattgtatccattttaaaggggtgcattgtagaattttcctatcttattttaacatatgcctttgtttttcttttggaccaaataagtacgtagttcttaattattagaggccctcacaaaaattttgattcataaatgtttactaattttctcgtatacaattaatatttatggtatagtttatttatggtccgtttattaagcaactataacattaataatagagaatactattttagtgtcttatttatatatatgtgctaaatacatttactttttattttctaaaaaaaaacgtggcattttgaaaactgtgattattacgtgttgtctgtcatctttttcctttaaataaaaacatttttttaaaaaatgtttaccatttaatgatttttttcttttgaaatatgtttaaatttaatgattaacatatgctctactctatattttgctacggaaaatatcattgtaaactaatttattttttaatctaaaagtaaaataataatattaattatagtggtaataggctaggcataatctcccctcccatcccaaatgtctaaaaaatatatattaataataaatcacttttataaaaataaaaattagacttacacttatattttattaaaattcacttcatttaattaatatattatactttttcttttaatatctagaattttactttttaatattaaataaattttatatatattaaaaaaaagaagaatttttactaaaaaattaaactttttaatttatgttatcttcctttgtatttataattaaacatgtttttttttttggttgcagataatttattgaaaaatggtaatttcgaagaggaccatacgtgttaccgaaaacatcatctggtgtcctaatcccaccaaagatcgaagatgaccacagcccattaccaggctggatgatcgaatctcttaaggcagtcaaatacgttaactccgaccacttcgccgtgccggtggggaaacgcgacgtcgagttagtcggcggaaaagagagtgccttgactcaagttgtccgtacaatcataagcaagacttacgtattgagtttcgcagtgggagatgcc

SEQ ID NO: 320087 - DNA, 1603 bp, Cannabis indica
agaattaactgtcttggttatcacgggataatggagattggaattttcatcagaagaatttttagttagtgtccagtgttgctagctccttgaatttggtgactcgccttccaagtcaccattctaatctgcttgtttggaaacaagcaacagatggtgaattctcccctaagggggtctaccaggctgtccttaagcatcgtacaggatctaacgatccaatttggagccaaattcagaagttaaatcttactgaaagattgaaacacttcttgtggaaactaggatgggatattcttctattcaggaataagctccaacgtttattcgacaatactgtgagatgtgctatttgtggagctttagaagattctttcgaaaacataaactgacattgtccactggcaaaatcgattggatttacaagtcaatggggtattgatagtgaaaatatgagctttaatagccctcagatgctagcgactctcctttacaaggtttggcgtgtgcttgtgcgatgaacgttgaacttctaggaatcgttctttccatgatcaggtcactctaactgccccaagagttcaaggaagaattaatgaagcagtaaggttgcttgtggctgcgggagagacttcattcattgcagcaacaaccaatgctcctttgatgatcaggttcttaataatggaaactttgttgtttactctgatgttgcctataaaggattagttgctactgatcttacatgtgcttttgtggaggccatgctagttacgattgatgtcagtgacctgttggaagcagagacttgggccttattgcatgctgctcaattatgcagactccatggctggatcagtttgactctagcttcatatttccaacaactagtacatgggattttggctcataaagctcctgattggaggtctgcaactgtttttgaggctctgaacgagttaatggtggggctcataaattttattgtggtttggttttctcaattgagtgtttttaatataattggcagttaataacaaaaataagaaacaagaaaataaaatagtcaaactttgttcggataatgaaatagaattaataggtgcaaaataattaacttgtgttatattaaaataataaaaatattatattcaattgttttgttggaatatagaatgagtttcttattatttcttattaatggatgattattttattttattttgaaagaaaaatcataaaaaaaataataaattaattaatgatttatgttatgtataattatatcttttttttattatttttcttctcgtactcttatttctttgtttgttttttcagtttttatttggtaaatataggatgcttctacggagcaccctaaaaatatagataagcactctccttcatgtttagatattgtaattatttaagatgcaaaacttttaaaaaatttaaaataagttaaaatataaaaagtacagctcgaatatatagatgttagatattttaaatatataaatacaaatgaagtgtattagagcatctccaatggtaatattttggagaatgctttatgaggtggaaagcttatgtggcaaaa

SEQ ID NO: 320088 - DNA, 541 bp, Cannabis indica
cttattactgttctggaaatttatgataaatgttattgagtttaattacttgaattcccaacccaccacatcattatagagtgtgaataaactctcctaaaatattagtattaagtaagacctctctgtaatcaaattgttagatcacatattggttataacttaaatagaattatagaattatgtgtataaaatgttagaaatatacatattaaagtctaaattaacttatataatttaatataaaaatatttatttattttttgaaagaaagacataactcattaagacaaatttattgctgtaaaagtacttaataatcgtgaacaagcatatgtctaaacacaaacccttaaattagtaaaagagattgccaatgtgtgagcaacaccatttgccgatcatggaatggcgctacaaaaattaccaccaccaacaactaataaagaaaagatatataataaaattgaaaaaaaactaaaattcaagtgaagcttattaatccaaccaattaccactgtagaatcactattaataatgg

SEQ ID NO: 320089 - DNA, 1174 bp, Cannabis indica
tggttaatctcatctcaagataccaaacacaacattaatattaagtctttggacaatattattaattgtaagcggtactcttgttgtagtgatcaaacattgacaataaattatgtcaaataatatgcaatctttagactaacatattattcacaccaaataccttataattgtcacacatttatcaccacaaacatgcatgaaattcaactaaatattaactcacctttgggttagttaataaatttatgaattacatacacacaattatcataatatttttattaaattaatctacacaaaagagatcactttagtaatattttgtttcaatttatttaactaaaatattatatattcttaataaattctaaaccaaaatttaaattaattgttactgaattattattattacttaaaagtattatattttaataataaaaataataataataatgaacaaaaaaactcaaaattctcacaacagagcacgaaagagaaagaaaaataatatattaatcaatcaacttttgtctcatgtgagacttattataatatacgaaatagttttcgtattcagtaaagacgaaactacaatatcatctttcaaagcaaaattttgaatgatgtatacatccacaataatattcaatacatatcaaataaattattctttatataacagacgattgtaaaacatttgtattcatagaacaaacgaaattatactgtatatgcagaaagtcaatcgtagttggatacccaaaaaaaatatatatgaatttatcaaaaacatatataaagaacaaaacataatagaagatcataacaatactacattaaatcctcaagaattaatttaggaatgctctgataccacatgttatgaatactgtaaatctaaatataagcctaattaattcatgagaattaaataataacattataaattagtggaagtataccggtgtccatagttacgacctttgattggtatgattccaatttgcatcaaaacctttctgtgaaactttttctcttggcgatgggggatacaagagtcaaaagatacgatgcaaataggaatcattacctgttatattaccgacagacaaacctgttgctaatatttattgactatttctatttggcccttcatcaaaatagaaattgt

SEQ ID NO: 320090 - DNA, 733 bp, Cannabis indica
ctaaccctagcaaacatatacacttaacacaagaggaaattacactatgtaccttttttatattgtcctcttttatttttactctcttttttaaagtctatcgtttttatctcttttttttaaacattgtaccaattttgcccctgtcacttcaaaatactctccgtgtgactctcttatgtcagggtattttaggtacaatacatataaaaagaggtatgtttcaatattaaatataaaattagaagtcaatttgattaattgattaataaaagtggtatttttcaacttaccccctaacacaatgcagtagacaaacatacaaatgagaatgacagtctctctctaatagttgccctaaccctaaccctaacacgataccgcctcccttttcctagtctctgcccacctttctttctctcattcttgactcgactgacatacactacaacaaactaggtcaccgcctcttggttgggaaaactcacacaagggcgttaaaaaggtaactcatctttcctcatctgtacttatttttttggattcttttcttggaaagagactcattctcaatctcaatctcacttatttcttttctgttttttttttcttggaaaattctaagttacgtcgccacaccggagttccctctttccacgaactcctttgtttgtcgcaccacctggggcaatacaagccaccaacatgctcacgcacgataggaaaggtattt

SEQ ID NO: 320091 - DNA, 959 bp, Cannabis indica
aaaattaaaaaaacaaaagtgttaccaacacattttattttagacgcaaaagttatatattattaaataataaaataggtcttatattttttaaaatagtaaaaaataggacgttgaaattaatttttgataacttataatcaacttgaagacaaatacagaaaatataaagagttttgtcataatatctttatatcagattattattaaattttattttgacaaaaaatcagttcaggatcttatttgtaccattttaaaaaatacagagttcattttgtcatttaacaaaaagattcaattgatatttttttgcaaaatacaagatctaaaatagtatttatccattaatttataggatgttactttatgaaatgaaggtgcttcctacaataattctttttagcaattttgtaaaatataagacatgttctaacataaaatgaaatggtaattatatataaattttagtaatttgtaattaaataaaaaatttattaattaatatttagaatagattttttttagtaattattcaattcttaagagagaccataagagcatttttaattatactctctaattaactaaaataggaagtgagatttaaaaaaatgaactctaatagtagactttcaaattttttacttttgtagtatatttttttaatagtattttaattgaaaacattattatttttttattattttataaaattaatttatatttcataaatttaaattataaaatattgattatagtagaaaaagagcaataataataaaatagctttttattttaattttttagctattttagtaaaagaaaatagaaaatactattaaaaatatgctcataactaacgactgtaattagaatcacttaattactttcatttgcataattatataattacattatcaggtaaacatgttaaattgtataattatctctaatta

SEQ ID NO: 320092 - DNA, 2263 bp, Cannabis indica
ttttttgtttagattttttttctccttcatccaatagtccaaggaattcaattttttattgtttttggatttaattaaaggtaaatttgagaaatgtgtatttaaacaaaataaaataaaactttaattttataaaatttagataaaattagcaaaaattttaagaaaccattttctctcatcttaactgatcttttcctctcacaaaattttgctaaaataaaattcaagatccaaactagataaacaatttttcataataaccatgttatattcatctcttggggtaatttaattaatttaacaaactctttttgtaattactagtaatagaaaattgacttcatctataaaaatataaaaataaaaatttaatcttttaaatttgaagttataattaggtacattttctcttttatgctacattaattttattaatatagtaaaataataaaagatttagtaatgtacttttcagtatcaagaagggctttttcatcggaaagtaatagtaagaataaggacccagaaaaaggtgtggatttagaattcttcgataaagaaatgccagtttttgacttggatgatttgctaagatcttcggcacaagtattaggtaagggtactctgggaacaacctatcaaacaacactagaaacaggtcaaagacttgccgtgaagagactaaacgacaccaacaacgaattgggcaagaaagaatttgtccaacaaatgcaatttttgggaaagacaaggcatttaaaccttgtgcaaattgtgtctttctattactccaaagatgagaagcttgttatctatgagtttgttcctcatggcactttgtttgaacttttacatggtaagtattactactcgatcaatacacttttgatttgattaacttaattaagatttttttaattaattttgatgatgaattaagggttaaaaattacataatttgcattgactattaattatgagtttaagagcatgtccacttctcttactcatatcctcaattaatgaactttagacaaatgaaataaattgacatcttatatattttaatttgagttgtcttattttattgtttgaggatatggggttacaaaatttcaaatgcacattatgttataaatatttaaattaaattaattatgttaatattttaaattataatagttgagacttgatgttctattagtttagtggtgttcctttttctctttaaatatatttatatatatataacattaggtattacttatgtagtgaaataatatgtttttttttttgttttttgttaagcgatatgctaataatattggttgtttggctcggacatcttattctatttctgatcgaaagtgttgttccttgtaaaattaaagttacattgttaactgatttggtttaatgaagtttctcatttttctaaaaaaaaacatttatagaatatgttgacaaaatgtttaaattcataagattcataataatatttaaatgcatgttattattattaatgatattattattaaatttatttagtgatacttttgtatgatggcagaaaatagaggaattggaagagtaccactaaattggacaacaaggctttccataataaaggacatagctaaaggcctcacattccttcaccaatttctactccattacaaactccctcatggaaatctcaagtccacaaatgttctcatacaacatgatcctcaaaacaacttattccattcaaagctcacggatttcggatactctctttgtttggctcccgaaagccctctctgatcatcaaaacctagcagcctcaagggcaccagagtatgctcaaggaaagaagctctcacggaaagctgatgtatattgtttcggtgtaatcattttagagatcataacaggaaaaattccaggagagatatcaccatttagtgacgatgaaacaacaacggaagatctctctgattgggtacgagcagtggtgaataaggattggtcgacagacattttggatgtcgaaataatttcggctagagaaggccatgatgagatgttgaaattgactgaagttgcacttgagtgtacgaatgaggtgcctgaaaacaggcctacgatgagtgaagtcttactaaaaattgaggaaattgaacatagagaataactaaagctactcttttctttaatttttaattttttttcttttatttttattaaaatattaaaatgagaaagagttatatatata

SEQ ID NO: 320093 - DNA, 504 bp, Cannabis indica
atttttattgttttagaaattcatattaggacgttaaataacatacatggtagtaaatctaaatcctggtaaaataattctaacaggttgcaccctttgctgctgaactcgttgatcaaggggctagtaatgcttccaagtttcccctagagacatgggcaacttgtagcagtaccgacgcttcacccttgcccatgctgccaaccagcaagtagtgggggtaaactttgatctttacattcccattcttgttgtcgtgtattgtttttgttttctcacatttcattcttgtgccaagcatttggttttgcgtcagaacttagatgtgatgcatattgagaaaaatgtctctgatagcctgactaatacagtgtttagtattcctggtcggagtaaggatggaattaaatcccgtctagatttaaaaaagttagggattagagcaaatttacacccaaaggttgttggtgaatgaacttttttaccaccggcgtgttatgccct

SEQ ID NO: 320094 - DNA, 958 bp, Cannabis indica
tataaatatttttaaccatatttttaactttattattatttaatttatatttgaaattaaaattgttgaaataagaaattcattgctttctgttatagttatggtaaaccgacaccatattctttgtaaagtttgggaataaaaaatctttatatcaaatgtacgaaatccaacctatatatataaacacacttaaatttattggttatgtgagttttggttgataatatagcaaattataatatatgcattattaaatacgttacttaatacaaaaaaaaaaaaaaacgtatatatataatcacattcaaatgacacaccaatataacaatagttaaaaaaatttcttaaagatcaaaacctcaaactccatttcaaaaaaaaaaaaaaaacaacacaaaaaaaaaaaaatattaaatatacatatattgcacttaacatcacttaattgaatctaattaaaaagaaaattaattatgcgtacattatacgtaatatgaacttagtatatatatgagtatcacaattactcattatttcccgtacattacaactatattatttgttttgtgtagtgatgtataattttggtatcggaatctcccataaattgtaaaatatcataataattcaaatgcaaaaattaatattcaaataatttattgtattcacttataaatagtgaaacaacaaacaagcatacatgcaataagctctttgaattcaacaacctaattaaatttttcatagtttttgaaaaatttcgcgaggtccttataacttgcgtgtagcaaaaaaaaaaaaataataattcaaattattatttaattacataatttgtactacaaaagatcacacttttagtcacaataaatcttgtgattagaagtgaaaaagttgtgactaattataaataatagttcttatgttataactaaaaagtttgtgactaaatgta

SEQ ID NO: 320095 - DNA, 2112 bp, Cannabis indica
cattgttgtatgttttctaaaattatttggacttgtaattttgtgatctataatatggtttggtaggcatatctatgaatatcctccatatctatgaatattttatgtaacgaccttaagtttaatttttgttattaatttaagaatgttttattttttttattaaaagaaattaaaaatatatgagtttttttcccctaaattaaaaagttaattattttttgaatggagttatatcaaacacgatcttggtattatttgttttttttttccctaaattgcaaaatattagcttaaacataagcttaacgccatctaggagaaatgttattacgaatcgaggtgacgttttgtaaataattagtaatatttaataataattattaaattaagatatatgtaatttaatatttaattacactaattttcccaacattattggtcgcaataaaaacgcagtgcttggcttcatcaagagcaaaatcactgctcgaatacatagttgggatggtaagtttctatcacaagcagggaaagaaattatcttaaaaatagtcattcaatcgctgcctacttatgcaatgagtgtattccttctacccctcggtacttgtaacgaacttgagaaacttatgggttttttggtggaagacaaaaacaattataggccgcgacattatctggatgtcatgggattgtttagcaactcctaaagatcaaggtggaatggactttagacatctccatgattttaatcttgacatgcttgctaaacaaggttgcgtctgttgtgtaacacagaatctcttgtgagccgtgtttataaagcgaaatactttcccaacggtgattatctttcaacgaaacttggtaataatccaagctttgtgtagtgtagcatttgggatgcccaagacgtggttcgtttaggtgcttcacgtgttattggaaatgggacaaataccaacatacttagtactccgtggctggcaaatcctgataataaatatgtcaccaacacccatcctgcattgtataatcaaaaggtcagctctcttctgaaaatcgatagtcgtgcttgggattcgaaggtgattatgatgccaacttgattctcgaaattccattgggaaataatgttgagacagatttctagtcttggacagctgagcacaagggcctttttaatgttcgaattgcttattccttgctgcagcagataaaaccagcaacaccagcatcaaacaactttggtttttggcgaattctttggcatttaaagattccacccaaagttataaatttcttgtggcgtgcaatctctggaactcttcctacttgtgtcaatctcgtctccaagcatgtttaaatttcagctcaatgtcctgtgtgcaagtctcaccccgaaaccatacaacatgccctgatttcgtgtgagtttgtcaaaagttgttgggttgtcttcggtctgcctatcaatttagttgctgctgcatcttttggcaaatggtttgatgatttgcaaaggaagtctgatgcaacatttacttgccgtgctgctatgctatgctgggcagtgtggaaagctcgcaacaatgtcgtttggaataaaaagttgtctatggtaaatgatgttttattttcggcctctattacttttgaccataggagaaaagctcaggataaaaaacgcgatgggagaaaaagctgtcatttgaaaataatggcgatggggcagagctttggtctaaatcaattttaaatcacgttaaaattaatatagatgctgcactattttcatcgcgagattgcttatggctttggtattgttgcaagaaatagcctaggccgtcttattgaggtaaagacaacctacaagggggaatataccccgctgaggttattgaggcccttgggattaaggaagcccttagttggatcaagaacatgggatggaacaatgtagagcttcagacagacaacttgttaactgtccaagccattcaaagtgatcaacatatgtcttctactttttggcttaagcatctaggattgtcaaagtttgctatcttccttacatggtgtgcagttacgttttatcaaacgatcagc

SEQ ID NO: 320096 - DNA, 1012 bp, Cannabis indica
aaaaatgccatatttttctaactttgttatgaaatcccatatttcatgtaattttcacaaataataattggtaaggtaaaaaagataatctatgtaggtttgacaattttttaatcaatctatgtaggtaagtggtaagccctaaatatttatgtactttattctagccgacctatttaagattattttattatactaacttgaatttggtatacacttttctaccttatcttttgttcattacaaggttataaatcatatgtatttcttatagtttcttgaaaattatctttattaatcaaacgtgttacaaaaatttaaaatataactcgcatttaaaatctctaatctttattttaatttataatacagttctcaaaatcatcatactttttaagtcaacaaaatattttcccagaaattaaaaataaagaaagttgaaaatgtactgattcaaaggttcaaagttcaaattattatgtccctttcactaggaattttcttgacttaattgaaaggttcaaagttcaaattattatgtccctttcactaggaattttcttggcttaattcaatatatctcttggaattgaataattggaataatatttttcttatctctgaaattacaaagaaaagagaaaccaatcacttaagaaaatgaaatgtaaatgatttaatttttagagtcaagaatgtgacatcttcaatttattttcttatataagagaatgaaaataataacccagttttatacccatcaagctttacaaaataattaatcagtcatcaccatgaatagtgttcttgtttttgttcttcttcatatttttgtgttgtctttggttccattgaagattgattcttcaccaagaacacaagcagaggctctaataagatggaagatgagcttggagttgaaaccatcttctcttgattcatggtccaacaacaacatcattaatctttgcaattggactaatgttgtatgtgatggttccaatggagaaat

SEQ ID NO: 320097 - DNA, 903 bp, Cannabis indica
aaactctagagatagtatgccatgcttctctttctactttatatattttgccaaaggtgtgtattgtagttttgtaactaaatatgctctaatctcataatcatagctgattattattattattattattattattattattattattattattattattattattattattattattatttatcttttctcaacaatcatcttcacttttactcatttcatgttcttatcaactaattaattaatacagtatatatcatgtgggaatatatctcttatagaattttacataaaaatcaacatactgcatccaaaatcaccattaatttaaagtatggtgctaacaaaaattttattgcaatattctcatacattaatataattaatttttgttacttttttatcaatttattcttaattttattttctatataaacctaataaaagatacacatattatattctcataaattaatataattatttttttatcaatttattcttaactttattttctacataaacctaataaaagagagacatattttccattattgttacatactttttagtttcaattttatattattttattatgtatagatatttaatgtgattttttaatttttggttagttatattttttaataaaaaagtgttttaaatttttaatagttagttagctatatgttctaataaaaaatattaatattaatattataaatcttaatttaatcatgcctttaatcattagttatatttcataatttgagaagtttagtctgttgtatatgcattgccaatattttattacagttataatatattctttaaatgaacttgagaattgagtttttacttcagatttttagaatccgtgagcagttattattattattatta

SEQ ID NO: 320098 - DNA, 2217 bp, Cannabis indica
ttttatccttctaattatctattgattctttatgtacgattaattcaatgtgaacagttaatatataacttattatatatttagatccaactgttagcactcccagatcgttaacactataagggaactaatatttgatccataaggaaagcttggattctactattgtataacatattcccagccactcatgttattaagctcccaaaatagaagttgtaagaatcatcttttctgagaaactttaacgagtaaatcaaagaactcaatgaacacaaacatgagttcatgtatactcaggatttaggctgatctactaatgatcatcattgtgataagataaactattttcatggtaaacaacaagttaatgaaagatgtttattacatatcggcccagtcatgcataatgtaattatacacagtatctttactacatgtccatctacacatgtgatccgaattaaaatcacacatactagtagtatagtgtatagtaaactgtacttagcaattccatattaaagattctcaatactttaatacactaccggcttgttttattcatatcgtataatcttaattctcttgtacattcttacaagattatacattctccatatgaataaggaatttttagatatttaataattatattctctaatatattatccattaattacttacttttagggtataaatcccaacagaactatcctaggttatgccttagctaccaagggttatagaatatgcatttccaagaagggtagaccaaaagtagtaattgctagaaatgtggttttcaatgaattagaatatcccccttgacagtcgaaaaaggtagtgtatcttcatgtgatgtaggaaagcctggaaataagaacactacacgcatggaaatggaatccgaaacgaaacatcaaaaagagagtttgcagcaagaatctatgaggaactagaagatggtgcacagacgaaagctggtggagagccgaaagataacgaagaccaaatagatgtttctgaaggatctggacaggtaggtctggaaggttatcaattgacgcttgatggaacgtgaatagagattcaccctccaaaaagatttgttgaggtaagtggtacaacaaactgaaatcgaagagttcagaagttacgaagaggcaatttcaagtggaaataagtctaaatggctccagaccatggatgaggagatggtttcactctgaaagaataagacttgggtagttgtgtcgaagccagagaaaaaaaattatggagtgtaaatggattatcaaggtgaaagaggaaatcaataagaatgaaccaggacgattcaaagtctggttggtggctaagggtttccctcaagtagaaggaattgactacactgaaatcttctcacctatggtaaaatacgagatgataagattgatgttgtctttggcaactcaaatggagtttgaagttgaacaacttaatgttaaaactacctttctgggtggatttccagatgaagagatatacatgaagcaaccacctgggtttcaagtggaagagaaaggtgttgaattagtatgcaagctcaataggtccttatatgtgtaatgccctgacccatagggacaccacgtgtgtgcttttacaaattaatttatagttaatctattagcttaagaaaagtgcggtataatttaaaacttttagattaaactaaaaacatagcttttatacaaaatactgctaaatacgaggatcccatgtttataaacttttacaacttaattcaaaaccgaatttacaaaatagagttatatttcaaaaatataatcaaaaggatagataatctccactagaagtcgagacattgtggttgatatgtacatcgccggtagacctctaactcatgcctggccctttttctttctcttttacctgcaccacgaagcacccgtgagtcacaaagactcagcaagaaaagcaaatgaaatacaaacaacacataacactagaaatcacaacattgcataaccaacaaacttatcatccattataaacatttatgcaatgcgtattcaaacattacataaacaaatatttatcttataagacaaatcgactttgatgctgtaacgtcaccgcttcaagcctttattgggcccttacacccacggactaatggctcttatacacgagttcgccactctggctgct

SEQ ID NO: 320099 - DNA, 1474 bp, Cannabis indica
tagctaaataaataaatatacaacttaaataaaaaaaattacacaaataccacttaaacacaccttcaacccaggatccatgcttcctaggtaaccatcgcgcagccacgcagcaacccaatgtaattgaagcaaaaaattcaaccagaaagagaaccaccattaattcaggcgacttcccatgagaagtcgaccagaataattcaaaacagggacttttttgaattttataaacaaaaaagtgtagaaaaactactacaaaactaaaattcaaccgaaaatctattttaatttgcataaaactaattttctaacttcaattttcagatccataaaatgcagatctcaaaaagttgaactagatttcccaaacaatccaacataagtataatccaaaaacacttacatcaatattataataaaatgtttatcctggtgtattttctttaattttcaattgtaatagtgaatttgttcatattaaatcatgaagagacatgtagatagagttacatatgtggaaacactattttgatttttgatgtatcataacagttccattacagtttcatgaatattttgctaacagttatttcgtctgattgaaaccttcgtctgatgcaaccttcagccaaccagccaccttcgtctgatgcaaccttcagccaattaccacccagctactatcgtctgattatgtaagtaatagtatcagaggtattaatttttataataaaaatatataaaaggtataaatattgtccacaccttatagaaatattttttgtatataaataaagtatcaatttatatttctatgcaataattccaatattcttttagcatttgctaacctaagtactcaaatatttaagttgggtattcaaattataacatttaaatattcacatattattagatttattttatgtcgtaaaattattagatttaggaattttttgtgttgtacaatacatgttatacatttttttttgtaacatattattagactttgatttttttttggtattgtaacattcttattctaattttttttatgttgatatacttgtccatttatttaaatctacttctatgaaaatattaatgtgtattacaatataattgaataaatatatatatatataaattaaattcaataaatttagatctataaatataatttttttcaaaataaaaaaaaaaaaataagacttaatgttttggttattatggaaataacccaaggcgaaaatccactttgccttcaattattaaaatatttttctctttaactggaacatcttcggtttcgagtttctttagaaagacaagacattccagtaagaaacccaaagataaaagtttataagaatatttttattttaggaaatatatttctatttaaggaaataaatttctatttaaggaaataaaattaatatttgattttctgataaatgaatattttata

SEQ ID NO: 320100 - DNA, 810 bp, Cannabis indica
catttttgtttttatttagtcctttcgtacataataatttaattaaacttggaaagaaagaatcatgtatagatatattataattatatgtagttcatcaattaaaaatgatgaattttttcatacataatgactaggcatgttaactattcagaaacaaacttttagtcactcactcgagattagctcaagtgattatagaaaaatacgtgtgtattaaagttttaaattcgagtctcaaattatgtattataatatataaacaagaaaaactattcaaaaaaaaatcaacaaagttttattatcacatagaagttaaaactcaaatgtgacaataaattgatgaagacaagattagtttgggtgctacttttagaaacaccatttgggtggggcttaggctctggctatgaccttttgtggcgaagcttaaagccaaattatcttatcacatttattttgtttaaggatatgtttggtacattgtgctttgttgtattgtattatattgtaatgtatagtattgtgttggattgaattgtataatattatttagagtttttttgcgggtaaacactctcaattatcattttatttgtacttaacccttcaaatttcaattttagtagtaaaattcttcagactactgaactgttaataaatttaaagtgtcatctattttcacaatttaatgccaatatgaaatgtttatatgtatactcttatacacatcacacatttatattagtacacataatattattatttaaaaaaagtttataatattttttatttttaaatattttattt

SEQ ID NO: 320101 - DNA, 1881 bp, Cannabis indica
acacattcttagggaaccatccttctttttcacaaacagaattggagctccccagggcgatacactgggtcgaataaaccctaaatcaagcatcccctaaagctgtagttttagctccttgagttcctctagagccattctatatggtgctttcgaaacaggtacaacaccaggtgccaagtcaatcacaaaatctatttcttgttatggcgataatcccggcaactcctcaggaaatacgtcgagaatttctttaacaatcctaactacttcaggcccaaatgtttcaggtctgctggagtcgtctgctggagtcaatcaaaaccgctaaaaatcctacacatccactgtgtagtaaatctctagcccttaaaactgaaataatcgggattcgagacccctgaatagatctaacatagacaaacggatcttcttcctctgcctgaaaagttaccattttccccttacaattaatgttggccgaatacttcgacataaaatccattccatatatgatatcaaattctgttaattccagctccactaggtcagcactcaactcccaatctttgatcctaactggcatagacctaattctcctattggagataaccacttccctgttaggcaatagggttccaaaccctcttttgataaaatcacaaggtctacctaatagattaattacccgtgctgccacatatgagtgtgtagctctcatgtcaaataacatagtaaaataggactttttgataagaagctgacctatcatcacagatggactagctgcagcattagcttgagtgatagcgaacacccgagcagttacgggttttgcctccggcttttgctcttctttctttgcctgagggcaatctttcttgaaatgcccaaccatgacgcactgaaagcatgtctttcggttgcactcttctggatgatgtttcttacaatgtgggcactcaaggtaagaataaccttggcatccacctctgctttggttcccacggaatcgcttgctttgtcccgaaccaccagatgctggggtaacctttcttttctgcttagtggttgaatcaccactatccctaccgtaaataggagtaggaagagtgagggtcccaccaacacttggagtcacacggggctcttgaagaaatttcacagcaccttcggctcgtagagccttttcaaccatctctgcatatgatgttgcctcattcgtagtataatcaccaggttgtgtctaattttcacatttagacttgccagatatttctccttcttgctgaagtccgtaggcacaatacccgaagctaacttggccagacgatcaaatttttttgtatattctgttactgacacaccctcactctgcactagctcggtaaattctttccgcttagcactgcggactgcctcattataatacttggcattgaatagatctcgaaactcttcccaggtcataacagtgacgtcttgagtgagggacaccaattctcaccacaagagggcgtcttcctggaactgaaaagtagcacaagtcacccgatcatttccaacgacccccataaaatttagaattctttctatcactttaagccattgctcaaccctacattacatctggacctcccaggaaaattggaggtgcctgcttgcgaaacctctcgtacagtggctccatacggttgttagtaacaggttgttctgctggcataacaggaactaaagcggcctgagcttgcggttgaggcactgcaggaggaccatgctgccttaatctaagaatttcttcatcctgctggtggaatacgatcttgcatttcagtgaatctctgctcccaatctggaggagcttgaggtggtttcacatgt

SEQ ID NO: 320102 - DNA, 862 bp, Cannabis indica
gtttgactttgaaaagtcaataatttggcttaggagaagttacagtagctgtgtttgactttgaaaagtcaataacctttactaatttagtagaaactagaaactagtgttggtaatgctaatatatatctctctctgtttttgtttgatcttctcggttgaaatttttcttattaagacaattcatagattatctgtcgttttttttttttttttgcaaagtggaattttgttcaaagggcactaacctaccacaaagtggaattcatacatatatgatattaatttaaattttttttgtgttttaaaaaataatcctaatttgtgtttgaattttatttattgaatataaatatatatattataagtataattttatgttaatccgaaaaaaatttctagtgatgtagacatcaatgtttgacacatgacaagaatgatgatgtcacgaaattgagtagacccgagtcatagcagtccacctaagggactttagccctgcatgcattcaggttgacttttgggagctctggaatggaagttcaaacttcaataagtatcaaaacgagatcccatgacctcaagaatgagtacccaatacacaagctgacaaattgtctggtgcgctgggttttgcttatccgattctaattctgtttcaaccgtccgtctagttttttacaataactaagacccatgcagttagagaagtcaaattcacaatttcgcattcctcaatttccccaacaatgggaaacttaccttaaaagtgagtgagtttcgagtctctcatttcggcaaaacaataatatctccgagaactagtgaccaacttcatcagaacatagaaaatagactaagt

SEQ ID NO: 320103 - DNA, 2788 bp, Cannabis indica
ggggaggaaccaactggaggacacataggcggagttatacaggaggatgggtacgggaggatcggaacccatctgggatcggcctaaaaaatgactaaggttggaaaaataaaaacttttggcgttataaccccatcatgaatgcggcattcaaaatttatgcaacgagtcatcaaattccattggcctagagctagagtaatcttgagcagaaggaatgtgatgaatagtcaatgaagacttacaagttttggaagtgatgacatccagagccccagcgttaggaaccaggaaagggaatttaggccgggaggtcacctgttctttcctcgcttctgctctgaggatcctccctaaatcggcttgggcgttgatgtaggccaactcttgttccttcctgaataggtagttcttgtatttgtcttccgcggaggtgatgaagtcctctcaaagtgacttctcgatctcatggttacagatgttagggcaaagaactttggataagttgaaatcttatactgactggccttcagaaatcaacttagctctcttacatttggaagtcgtgaccaagtcccttacattcaacccaaccttatcatgattggcgaaaatttcacatgttgaaggaatagttaggtaggggcggtacgatgcaaaggaggggccctaacccactcagtgaacaactctagacgctcgacgactttgaagccgaaggagaagaagaatcactgacggtactccttcacgttcttctggaagttgtagggcacgggaccctcgttggaagagtgggtctggatcttgaaaaatccatattgtcccccttcttggggacagataaaagttcgtaaaaatacaaaattttagctagactgggcagggcccaagtcctggtaacataaaaaatatacaggcttgaaagcaggcggtaagcttagggaataagttgatacggtgcgaggccaataaaaactaaaaaatctataaagtagtcttgacgcggtagcatggctctggacatcaaatgggtctggctctacgccctaaaaccgccgtagttgaggttgggcgtttcttcttcgctcgggaggcgatgaaaaaccccagctgcggaaggcttgatcccgtcaacagtaactatcttctccagttggtgagcacaggtcaaggtcgagtgtagcttgtctccctcccagccagtggaccggcaggtgtatttctcgtggaccaccgagcccttcatcacttcctcaaaggtggccaatttcttgggacccttgtttgaagattttgctccagttgaattaggggaagacattgtctgggtttgataaagttctaaaatctcttggttaaagcagaagaatctgtgatcgtgaaggtcgcgaagaacctcactcatctgaaaaaggaatctgcagttagcccccaaaccaaaccctaaaacaaacgaggcgaatgggggttccctaaccgctggaaggaggccctctccggatgtctgccaaagataagaaatccagagattctcctaagcaaacatcaggtgcaaatatccaaaaggcaataaaaaagagaaacgaaaaaagggaggaaaaagacaagagtatgaaagtcacttcacactcttgacgatccttaagtaatgaaattgttttctaactccaaaaggaaaacggcagtaggcacacaaaaaactacgacatatgacggtctttgccatggctgtcttacagtagaaatcaagtacgattaaaacgaagatgctattctaagttttaccctaacatgcagatgaactgtaaaataaagtgtacccagattcttacacaatggtgatggccgagaagttgatgtcatccgacggtaaaactgggactggaagcgacagaggaatagcaataagaagttgatgatttatagaattttttccaatgtgctatctaagtcgaaatggcggagtggtgaaagtaaccaacccaagagaaagtgctgacttttataggccaaagagggtgcaaggcatctatgaccaggcaccatcatacattgggaatttgtatcgattcacattctatgatccaacgaatggggtgaatgggtgaaacgaagagaaaggacggttgaaacgttcgagcacctctatgacactagcattaaacgcgtaggtctatcaatagataggaagcgaattgttgcctgcaaaaagaaataaatatcaatgatgacggtcgtaaatgccacccacgcgcctagggcacgtgccagtgtatttatatagagaccagaggccgcgtacaagcctcatttaccatttactaaatcagacttggggggtaaatgttgcctcaaatttttcccaaaatacgtggcagcggctacgtgtgacacgtggatttcaagaacgcctcacccataaacattggctaagtcacgtatgggtaggaagtgcatctcagggagtgagcccctggagaggagcgtgaagcatgccttgactctccgagagatagaaatataacaacaccatctccgagaggagaaggacccgttcgaacaatcatttcacatttaatgcggcatgggggaaacgtatcagaaccccaataaaaggatttgacaatggcgtaagcctcttttacggcgattaaacgataatcaacaagtctagtgacgactccattatgaagaatcacatcaatcaaggaaggataaagattactttgacctaatccctaagatacctacggcataggtgttggaagttattttaccaggaact

SEQ ID NO: 320104 - DNA, 2090 bp, Cannabis indica
ttccaaaataattaaataaaaatataagagattaaaaaaaatccttacattgatggcagtggaatataatgactccttccatttagatctctagcccttgattcttgtcagtagcatatcattatcaagatctgaacctgaatcttctctccttcgatttggttagacacggtcttcttcattatgcgaggtattactttcacatgagtgggcacactctcaatttaccacaggtttcaattttaccatttatttaacaacttatttttctttcaaaaataccatattttagttctaactctataaatattaattttatctatttaataattataattaattatcaataaaattttcatttaacttatttattaataagaccttacaaagtctcttaattaacaaataaaccctaaatcctctttattttttttctaaaaaaagcccttgcttagtgaaaaattcacaaataattatttagaattctaattgattaatcaaaactaattagttgagactacaaaataatattatcccaattagtgtggggaccatgaccctatgtaactaagctcccaataagtagatccaaaatttaccaagtaaattttctaacttattaattcctcttgactccactatagattcagaattgcactcttgattacatagaacactctatacatcaaaaatagatgcactttgaattacccattgtttcaacctaaataatcaaagatcctctatagatgatctacatcgagtagggacaattttaccattctacccttcaatgtatttaatctttaaaatactttagctacttgtaaatgatatttcagtaaactaatataattactacaatgagctctcaatcatttattgcgttaagccaagctcgaagaaaattatcattttacttctaatagttatagaagctatagattccatatctatgattagcactcccactcaattgtactaccatgttcccaaaatgtaagtattaggaagatccacttggttaactttaacgaacaattcaaagaccatgaataatacagttaagccagaacctaaccatttcaagattaagatttattgacctaagatcaactaagtgatattgacttagaaatatataacgataagtttatgatatcttatctaatatcaatatcggtccaattcgatgtatactccatatacatccaatactagcatactttgtcaatgccttgaaaaggacataccacatatcaatgtgtaagtaaactttatcgttgattatcacgtcagtagaaatttaatgtgctgacaaatcatgggacttaactttgaaatatataatcatgattatttcccactttatagacaacactataattatgaataactatatattatggatttaatataatctatacattaaacatataatcatgtgaactatgcaacataaaataatttctgatattttattaactaataaatatgattatattgaaatgagttttatttagagcataaaatcctaatatgaataagatttttctcattagtttattccaatagggtgaacctctatttatataaaaatataacaaaaaaatgagaaactaaatcaatataataataataaaaaaatacaatcaaatattaatagtaataattaatttagtgatttagatatttatatataatatttcataataattttactattttaggttctagtaagacaaatatttggctttatatcttagttttgtgttttttataatttgtgtttagttactatgcatttactagtttttataggaagttctaaaaatagaaaactttcattgttaattatttatttattttgtattttgctaaaatataataacagtaatagtgtcatctatgatattatacgtattgtcatacgaagttatttaaaaaaaatgaatttaatgttttagttatgtttttattaattagaatttcaattttttaatagagaaatttataactttatctacgttatagtacttaattatattatatgtacataaaatttatttacaatttatcatacattttat

SEQ ID NO: 320105 - DNA, 2045 bp, Cannabis indica
caattttaactcttattataatatattattatgcctataattatctttctctctgtatgagatgttggtttgccaacttgcctagaggaatatcgttttgctcgaaattttgtcgacaacttgagacagatggaaatgaatgaaccagggagagtccagaatgtaacaatggaaggaaatgaagataggggagcagccgttaacgaggacctctcaccccaaaacgaatcacttgctgaaacctttgctgctcacgagcctcttgcagaggtcgatggggtccaggaagaacagacagtggagggtggccaaggagggattacggggcaggaggtggaatctatgagacaacaatttcttgactcaatgacccttgagctggaggcagaccttgagttgaatgaggaggttaccagtaaaggagtccttgcaaaactttttggaagacgaaatctttccagaggacgggtcaaagaaattctggcaggcatttggactttgaagggtagatggaggatgaagactatgaaaacgggagtctggggtatcttctttgatgaagaagaggataaacaaatgattctcacaagacgaccgtggctcgtaagtggtgtgctcctgaacattagagattggccagctgatggagattgggcgaagaccaatatggaggtggctagattctgggttgaggctcacggtcttcccactccttacttaacgtgggaaaacactgatgtgattgcaaggaaggtggggcagtatatcgactttgacagagcaccacgactaactatagccagaagggggttcctaaagtttatggttgatttaagagtagaccagagatttgttgcagggttttatctaaatatctcaagagatcggaaggaatgggtgcagttcaaataccataaacttccggctttgtgtttcaactgtggctatcttgcgcactcgtacaataaatgcaacaggcccaaagaatatgcataccctcctgttggaagagcggtacccatgtatggagcctggctgaaggtaggggtgcctatccgtaactgttttgatccgagtatcccgagactaatcatcaaccggctggcgaaggagagtgccccgagtgggaagccggaaaaggacaagggcaaacaggtaattacaatagatgaaaacgacgcttccaaaggatcagacaattctgcaggcaaaagaagttggggaagggtgcaggcagatggctgcaaattcatctattgggaaatctcagaaagttcagtcgggtgcaaaacttggaagcgctggaaaatcacctattttggcaaaggagggttcccgcgtggatattcaaaagagtacaaaggcttttcctcatccaatggcccagataaataataaggaaaaagacaaaggaattattataagcctcatgcccgatattgggcccactagtgaccagattgtggatattccacatgttgatatttgtaagtcaagaaccccacattattttcctgaacccactgtggtaaattggcccagcaatactagcctacccgaagtggtccaaggattagtggaaccggcccaagaaggagatgtagcggcccaaagaagtatttattgtgataacattgaattggagaggattgggccagtcatttcaggttcaaaaaaaaaagaaaagctagtttatgtattatccccgtggcaaagaactctggggcttctgcacactccccaggaaatagagaagacactgtactgcctacggtggaagttaacgtgatcaaaccagggcaatcggcactggttcatggggaggcttcttcgtccaagttgagaaatgagaagagaagaaagggaagtgcagttagatgctccaagaggaagtccccttcaggccaagctttaccacgcagactacttggagactatgaatcgattgaagacaagaaggaaggtgattcgagggatggaagtctggtggaaattacgatacaggaagtgcaaaattttcatttgggcgaggaggcggcccttat

SEQ ID NO: 320106 - DNA, 1747 bp, Cannabis indica
tagcaccaggtcaacctaggcacggggtcccagttttggctcccagatggcttcgtttgtttccaaaaagcacccatatcttagttgttgatgaaaatagagaatattcccgaaagactttgttagaactgttgttgaaaatggctcaggttgacaatatgtcaacctgggcactaggacctatcacgaggtcaacctgggccctgggtcctaattttggccttcaagtcgatctgtttctttcctgaaagcacttgtttcttcattttggatgaagacaaagaaaatgctcaagatacatctttagttttgtgggtggaagtgccacaagttgataacatgtcaacttgggtgttgggtgcatcatcgagtgaccctggcatcgggtgtctagatgctccaaacgggaagtgctccaactctgattttggtgcctctaacatgtccgtgacaggtcttattcatgtttaggtacaatgtttgagtcgtttgcactaaggcagacccaaaaactaaaatcgtagtagggtgtcaacctaagagctgggcacctaggttgaatttcaagaggctattttgactcttttaagttcctaggctttgaacttggattcttaatgacttcttggttcaaaagactgaaagatggtgagttcgaaacaatgtggtaggatccaaacacccatttcagagttcccaatgtcgacctgggcacatggctagggacccttcccaggtcaactgctatgatctggggctactcaattccataattttccttcttgccacatactagcatctagaacttgggcaagggcaaggcatttatgtatgtcgagaatggtgatccccttgaccgatctaattcaagatctgaaggctttggaccagttatgccttgagccatgtccctaagttggtccaactatgcttgcacaaaaggatctattgttgttgggacttgactgaccggccctccttggaggggttatggatttttgtgcgaccgggtctggttgaccatactttgagagtgtgtatggtggaggtcagccagacctgtgttaaattgcagaccctggccggcaactcccaggtatgggtgttggctttggcccgccatgcctacacttggttgatgtccatggctgggcagacctacattgggcatggtttagttgcccatcaccccttcatggccaggcaaacctacaaagggcaaggtctggccatctgtgatgcctccattgccgaatagacatgcaaaaggcagggtctggccatccacaactcctaggttgactgatgttggttgtgtgttgacaggcaatagatcacaacaattgcttgagtttggtggttctaggtgtgtgaattgatgagtttcacttctcgaataaccgttttgggtgtttccacctgctctcgatccttttcggttgaagattgacctctgggtgccttgctcccctcgaggtaggagtgctcccctttggctggccaaggatactccagcagaaggctggccaactaaaggctgcataatgggggatgctgttaagctatagatccctagccaacccccatgacgctggttgccaggatctacctattctcactattagacctttgaggcaaggcttgtcctccctatagcaagggaagatctgtcctagttcctgaggaactaggttggtcagcttgtcgataaacccttcctgatctatcaatgagtcttccttgaagt

SEQ ID NO: 320107 - DNA, 807 bp, Cannabis indica
ggtaagttttaaatcctaatgtgcattaaaactcaaatatgtgcctcgtattttttataactcgaagagtccagaatcataacgaaagccaaaattgaatccttttataaaaaaaatcacacattgcacattccaaaactgtcatgaggatcaatatatcaaagagattacaaactaacatgaatcaaaaagtttctaaaagcttaaaaagcttgaaacttgttaatggcatgtacaaatatgagatccccaagaagagaagatgagacatatatagggagaggatgaaagatccaaaagcaggccatgcaaaaagcctgcacttggctagataaggttgtacaacagagactacttccaaatgaaacaagagctagaaagtctctatctacctgacgtccgcacaaggacatggaaggcaaatgttatcctaaattttatccacctgacctggaatgtccacgtaagccaaagatagagtacaatcccaccaatagcagaacagagcctccatgcaagatatagcaaaactgtcaagtatcaattgaagggagtgaagcgaggccacgaggagttgtaccaacatccttggccaggcaagaggagcctataggctagctagggtgagcctataggccagccagcatctgtgcacaagctggctggccaagaagtgactttcggacccaaggagcctctgttcgactaagggaacctgaccactgttgggttttatgccctaaataaaactcatttcaaaataatcagatttacttattaatatagatcaaaaataacatttaatgt

SEQ ID NO: 320108 - DNA, 1235 bp, Cannabis indica
gtttcttttattattatagtagatttacttatatataagtgaaagttggcgaaataaataatgtattatttgattttgaaaaatagctagctatagtagataatattcatttgaccatttaaatattgccaaatgcaacaagatcgacaaacaaattaaatgaagatgatatgatgatgagatcaaattaataaccgttaaaaacaatttgaaaaactagcttggaaatagtggatattttcattaatgaaaattaataactgcctagtttcactagatttattattaaggaactagcttatctctagatatataaatatattgtttttctttaaatttgtaccgcgccaaaaaaaaaaaaactattactatcacaacaaataacaaatttatataaaggcaactactacataaataaatattactacatagttttttttttatcaacaatattactacttagtgaatttgtataaataattgtatatatacacataaaatatacatatatatatatatgtgtgtgtgcagacttaagtactgtaaagagtggggttactttggtttgaaaagggacgttacatgggacggaatagacaaaatctgaaatgagtgacagagccccacagctactgtttcccctactaataatatatacactctactacactcctccctacctactcctatgctgctcctgcaatcgctgcctctgcctctcctctctgcttacatatatatacatatctatggcttcatctgtactagtactaccactgcttgttcatagtacacatatacccccaactcaaaacccaatattaatatcgattttccatttatgtgtagacaagtgattatttcatgcatctaaatctagtactctattctatgaagtaatatggcctagcctctaaataattaagtgaacgagacagtgcttaactactaatatgtggtcaaattatatgaaaactaatatttttatatggcatgtgtttaatactctaattaaagcaagtcccccatataaatgtcaaaacaggatttatataaaatagggcaaatatgattgactgtttattttgtaaaaattaatgattagaatttttattttttataaatgataaattaaatcctgtatttttaaaatagtacgaaatagtactcaaactgactttgtctaaacaaaatttaggctaattagtaatttttcccctgaactttgacatgta

SEQ ID NO: 320109 - DNA, 2077 bp, Cannabis indica
tggcattttatttgtgttttaacagagttaattagaccaacggacttacaaaaaatgtgattttaggaattattaccgctaatttttgaggttggagattaatctacatcaaccctaaatttttggggacttttgccgcaattataccatatagtaattaatagtgaaacgtagggaggtggtacaaaacggtacaataatgtgtgtatttggggtgatagtggtagtaataagttgaacatgaaagagtgaattgtttatatataatagaaggtcagtcaaagctgtatgagagtcgacaatcgacatgtacaaggtggtcactgcccagtggtcccatcccatgcacttctgcagaagaagaatatattgttttcattttttgtgttgtgtgtgaatatcaacttagactaattaacaccaccagcacgagctcacattaattgaacttaagagaaatgctaaggctggcatacaaaaattttgttagttgtaatattattattggcgtaatttaatattaaatttaacttattttaatttaatcaatattataaaaaatcgttaactaataagaggtaaaattaaataattataagaggtaacattataaaaatactaggcgtccactttgataaaaattttttatattaattattaaattaaaatatataaaattaatatttaattacatcaacaacatttattttttaatatttctataatcaattaattttttgaaaaatcaacttttgaatttgacatttgactatatttaacaatggacacacatatacattgtataagactataagagcactttgaataatttttttattcttatatttaaaataaaggattttatgtagaacatcgcttggtgttataaccagttattacacccaaaattatatcgttttttgttgagaaaaatactgatatttagttaatttaatttaattttaaaattatgtatatagtcaggggtatttatgtaaatttattttattattgagttgtattttttcttaattagttatgttacatttttgaaaggagatgtaagaactagaactattaagtcttttaccatattggctactgttggtggcaatggacgattttgcagaatgagatggatcggctacagaaaataaaacttttaggaacacatataaataggtgaggtttcatttcgcatcttccattaattattgtgcacatatggagcttaaggttggctattttaagattatgaattggaaattagactataaatttgcattatgatagtcctttgttgcttaagttaatttgtgtgttagtcagaatgaaaacactttcactaattgttttctctagtagaaagacattgttgctacctagtaaggaggaaggtgaaagtctaccaaatattgtcaaattatttgaacttaaagagtaatgctaaggggctatcatgctagcataaaagattttgttcggtatattgttgttggtgtaattttatattgaatttaacttgtttcaatttaataaatattataaaaaatcgttaattaattatgaaaaataatgtcaaccaattataagaaataatattataaaaatactaagcaccttgataaattttttatattaattattaaactaatatatataattaatatttaattacatcaacaatatttatataatcaattaattttttgaaaaatcaatttttgaatttgacatttgactatatacattatataagactataagagcatctccaatagtagcattttttaagatgttaaaaatctctacatcatccaaaaatataatattttattttatatcttttccttactatttttggcactcttacttctaaaatcactcttcaaaaatactataattatgatctcacacattattatttaattttttaacaacaataattttttagttttaattatttattaaaaaaataataatggcatcaatactgctatatagcattcacacatattcctagaatatcattctttttcctctaatagtatagtatctcaatatttcgccacttcat

SEQ ID NO: 320110 - DNA, 866 bp, Cannabis indica
ctttatcgtcatatagccggacattgagttgcttatcaaagaggcgccagtataatggcggacttggcttggtcaatttgacctccaaagtagagcttcaatcgttgtccattaactttgaaagtttctcgaatttcgccttcatgttcaacaactccatatggaaacagcgtgacaaccttgaatggtctagaccatcttgacttcaatttaccaggaaatagtttgaacctaaaattaaaaagtaagacttgctatccgggttgaaattccttcctgactaagtttttgtcatgccacttctttgtcctttctttatagatctttgcattttcataagcttcgtttctaaattcttccaactcatctaattatagcagtcttttctctcctgcagccgctaaatccatgtttagggtcttcatagcccaataggccttatgccctaattccaccgacaaatgacaggctttttcatacaccaacctatacggtgacattcgtataggtgttttaaatgattttctgtaagcccacaatgcatcatctaactttcgtgaccaatcctttctcgatctttgcactgttttctccaatattatcttaatttctcggttggaaatttcggcttggccattgctttgtggatggtaaggtagagcagtcctatggcggactccatatcaggatagcaaagctccaaaatgattattgcaaaaatgactcctttcatcactaatgattgctcggggagttccaaactgagtgaatatgtacttttgaaagaaagacataactgtttttgtaatatcccagaaaataaataatatttaaatggacatattttattaaatatgtaattactt

SEQ ID NO: 320111 - DNA, 1802 bp, Cannabis indica
attttttaaacaatttttttttcttaatcaatattttgaacttcgatcagacccggacccaaatgagaaaattgtattatatacccactttagtttatatgttataatttttatcttcatttctatatttttaaaaatatacccacttttatagatgatgtccccattatacccttagattaatacaaattgtgtgttagacttaagtagaaggtgaggatgtattgggcaacccactcataaaagtgggtatattttaatgaaatataatttgagagtattttttattaatggatacaaaaaagaagtatttatcaacttatcccgacccaaatcccacagtcctggcgctgaacccggcctctgatttgaacccaaatctattcccgaacctagacccgacgtaaataaaatcaaaaaataaaaataaaaataaacttatcagaacacatttttgtattctgtttttaaaattgaaaaacaaaagtggttacagaacacatttttatttttcaaaagcaatttttttaaaaacaaaaattttactttcattttgtggttaaaaagttaaaagacaaaagtattaccaaacaacacattagattatcaaatccttttttctaatcatgcatccaaataaaaaaaaaaaattaacgacaaccatgcatctaaatacaatgatcaagaaattatcaaactcaattttctcattatccacaaacttaaattgaagtaaatcataaaagataaaaattattttgtacatcaacataaatcataactaaaatatatataatatattttgtgcttagatattttcttctctagagtcaacgtccatgtgtggatttgaagttgctgccttcgtcgaaccattaagaaacagctataggagccccgtcttcctctcaacactcatccagtcgttgtcttagccacactcgggatgcaaaccagtgccgcctgtaagagaaacacgaagccaatgaaagaaagtgagaaaaagaagagactaggttagaacctgtccaaacaccatgacgtttgcaccattggagccgagacgaatagagtttgaaggatctcaacctagatttgatcgacccaatccaaattcgaccgacttcatctcaaattcaattgactcttgtccaaattcgaccaccgtctacatgaagaagaagaaaatgatgaagaagaataagtaaaataaaactataaaatggttagcaattgcttgagaaaaaataaaaaataaaaaataaaaaaaaaacaaaaagtttaagatttagaggagagatgctatttacgggaaagagagatatttttcaaaaatatttttttagtttaatttttagtattttttttttgtatttcttataatatagaaatatgtataattatgaggactaatatgaacacaatacttgtatatttaattacatatgagataatttatagggttatttgcggcaaaaccccctaaagtagggaggtttttgcaactaacccccaattctaaaatttttgcggtaaaactccataaactcaagttctattagcacttagcccttttcgtccatttttagctgttaaatgccatggtggaatgtccatgtgtacacagtgtacacatggcattatattatgttgggttttatgccctaaataaaactccatttcaatgtaatccattttattcagcatcaataaagaaacaaaactatttttcattcatttgtgtatgttttggttaatcttatcaattgcttgtctatttgatgtataaattcatctgaaac

SEQ ID NO: 320112 - DNA, 1093 bp, Cannabis indica
ttcaattgtaatttactatttgattactatgtattttgttttacagtaataataatgaaaagggtacgtaagaagaaatctacttgttagttatctaggtaattagtttatgtgagttaatttttaatttaattattttacgtaactggtttctttatatcaaagttttgataagttatttgatgtagaaagtttttgttatttagtttataagtcattgttaaacattcttttttgatatttttttaagtaactaatttttgtaattaatatatcttttttattactttaggcgttatatttttgtttacttttagttattgtcatacaaaattggtttttgtatttattgctttggttattacacataaatgattctaatatttaattttttatttggttaatctatataattagtttctcgatcttatattttaattagctaataaatattattgatttttctttgttaaattgcaaggttcaactccgacaacaactccaacgtccaacactagtgataacttcaatatctaacgactatgaattttcggtagcgacgacttttccaatgaagatagttttctgttgaatattctcattctattttctatttttttttgtagctatttttttatttttattttagtggatagtgattgttttctgtagtgactttgatggtcgagtcttggaacttttcggaaatttgtaactagtttttttggtcttgttttgttttagttttagtagtaggttagtggtaaagtcttaaagcttctaataagcaagtaaattttatatgagttttagtatttgtaattgtttttaagttaagaaactctttttcaaaaatatagagttaaatagtttatgagtttattattttaataaaattatttcatattgtatctttgtacaaaaaaaagtttactgtagattaaaaaaaaaaacaagcttcagtttttgtaaaaaacaaaaagacaacttctacgtgagagcctttttttatttattattacagtgtctattttttcaaaaaataaaaaggaaaagaaatacaattttgttataaaataatataaagtagatg

SEQ ID NO: 320113 - DNA, 2225 bp, Cannabis indica
ttctaggcttttttttttttttgaaaaaaggcgttttataaattaaaaaattagacctcacggtcattacaaaagatagaaaccgttatggacatcatatccaccttaccgaaaatagagttaacataagctcacctggccacattataggccataggccaaatagttaccaacaattctaggcttgatccaatagaatattagtatgtgaataactattattcaaccccctattacgatcttctaatcaatctttacgttcgaaatcacatggtaaaatatatttttttcatagcgatcagggccgaaatataatggaccatagaaaaatagttttgaactcttatttagaaaaaaaaaatagtgatatttttcaaaattaataaaatatgcgtaattttaaagagaaatttttttgggttctaggcacatgcttaaagagaaattttactcttaatatattgaagactactataaaattttagtcaaatactcatttttttaagatttacctccaattatgaataatccattgaagatggtcttcatctattttatttccttgtatagttcaatggatggtttataaaatgtgtttgcatttattattattagaactgaggatattaaaattgtgaaaattaaggttttttttcgttaatattttgcaaaaatatggcctttttaaaataaacttgtttcatagttttattctttagaatctttaactttataccacttttagcattactttaaattatttccaataatttgctcatatgtaaaacccataacttttaaaattccccattttaattggagaggatatgttgttgggctgggtgtggatggtgacccaaagcccaatccagtaaataatgggccttactattatagtatcgtgaagatgaaaagagtgaaagcatggacaaacaaggaggaaatgaaattacatagtatatctattttattttatttgtattaacttttatttttatttttatattctttaaaatatgtccacttttattattcatgttcctattatactccttagactaatataaattatgtactacacttaagtgataataaaagtatattggacaacctacttacaaaagtaaatactttagtaaaatataatataaagatatttttttattaataaataaaaaaaaatatttctcaacttatctcaaaatatttcgatattttaaggatggccatcaattttacttcaccggctctcaagaaactaattaaagctagctatgtccattaagccgcctcctcatgactcctcatatatatatttatccctttcaaaaaatgaaaaaaaaaattacaaaaataccaatttatagttttataaaaatagagacagttgttttcaatactatgttgctttttggttgttttatatttgtattatgttgtttttatgaagttcttttaaaatgtaattaaagaataaaatcctaaaaaaataataataatttaggtattttctataaaattttattttttattttaggtatagacctataagcttagttgctattgtaattagggtcagccttcaggtgagacgaaagaggtggccaccttagtccccaaccgctcaagcatccatttcgaaaaaaataattaaaatataattagtaataaaataaataataatacttgtattgtagcttagtgataatttgattagttattaagaggtttagagtttaaatctcaacaaccttactttttaatggcccaaattagcataagacgttttttatgggatttttataaaaatattgaatttttggcaaaaatttataattttactgttacacaatattttttactaaaatactgtcttttataaaacaaccataaaacaacaaaacagaacaattaaaacaataatggaacaactaaaaaataatcgtagaataatagtgaaaacttaacacagtacacaatataaaacttacacagcatttttgaaaaaaattctgcctcatagtaaaaatataaaaataattaaaaaaattattatgtggtgtaaaaaccctaatatttatttatttatttttgatatatgaaaaaaaaatgactttttttttaatatgaaatagtaagtacatattttgtgaatttttaaaaaaatcttaataatttattattgttataaaataatataaagtagatgagaagaaagaagaaga

SEQ ID NO: 320114 - DNA, 922 bp, Cannabis indica
acgttatcaacacgagcctctaattaaggtatgataatattttttttatatgtgatctcgaattgcttcaaagtcataatacactaaatatatatgtatggaataatttttaatatatatatatatcatataaataaatgaagactctgttccctttaatgtagtttttttcttttggtttttagcaacattgagtatacttttgtttattgctttgctactagtgctttatgtataatattgtttattgctactactattatttttagtatttgttttattattgtttattaattttattattttattttgtctttggtttcgaattattgtttgactctagatatgttggtctataaataggatttgttacctgttctttgacttggccgagtctctcgaattatttgatttgccttttgactcaattcaaggcatgcagttgtctaaaccatatgataggcatttccttaacacgtgaagagaagtttataataagaggtgtccaaaaaaagttcataataaaaagataataataaataaaataaaaaaataaaatgaaaaagataaggaaggaaattgtctacaatatacatgcttaattagagaaaatattttggaattttataatcataaattctttttttgtagtacatttataatcataaatttaaaagttaaattcgatcactgtgtcttcactttatatcacgtgcttttgtatttaaaaagtatataataatttgttaaaaaaatatatagatagtagtacataatccttacaaaaaaaaaaaagtaagaataattgttgcagagataaaaaaatacgagaataatttctttaaatggataatttctttaaataatacagtagaacctctatttaagaatactttattcaagaataacctctaatttgtta

SEQ ID NO: 320115 - DNA, 1029 bp, Cannabis indica
cggaagacgttcataacggaatccacccaaaattcatctttgatattgggaagagaaatcattttccctcgcagcagaggtttggtaatatccattcgaactctaaaacgaaggaagggaccccatccttcaaagcaagagtcctgataaacttccatgaattctccaataaggttccctaaagccttagcaagagattgagttttactaaggaaagggagacgataggcctgaacccaaaagggtgagaaaatcatttgttgtggagtgattgaatgcaatgcagatggttgaagcagaacaatatggtgaccttggaaatgccacggttccttgtctaaggcccgaattttgtcaccaatgcagccaaaagtgattaaaaataaatcagaatgatgttccgagatgacagccttgaatcgtccatcccagtgttgagacatctggttttgtaaggttgaaagccagactttcttaggagaaagaattcgaacaaccagcactaagtcaagtctctcgttcaatgcagaggcaccatcatcagcaatggctaccaccaatttttcatcatcagttaaagagacagtagacttcatacgatcaataaaaggatccatgatgcagaattcaaaggtgagagatacaaatcaaacccagaaaagcaaacccagtagagtaactggcgaaagaaacaggagggaaagaaaaacctcaaaaaatttaaataataactaccaaaacgaaaccaactgccacagagcacaaagtgggcagacctctcaatccagaatcaataaccttttcaaataaatatttaagtttaaattttaataataataatatttaatttatatttttatgtaaatatctcatatatttaaacataatttatatttttatgtagtttactttaacactttatatatttatacaaggggcagtcaccctttaaagttacgtaataattaacatatatgctgcaaacacaatatacaaaaaaaaatatgaaagaaagaagagtccattatt

SEQ ID NO: 320116 - DNA, 1025 bp, Cannabis indica
ttctttttctttctttttttgaaaggggcccattggtgggcttctaatacaatgaaagtagtatgtttcttaacattgtagtgatctaattgttatttgttgtgcaacattgtcaccaattttaaactattgatttttcttattgttcttcttattatgatagaattgatcattgaaaaaaaaatctcacattaatttgatcgcactaaaagacacatctttcattgtacgcatttaatcttgattcatactgctctaaaattattaaattttatttttttattaaattaaatatataagtttatgtaaaattgaccaagtttttctagagtaattgaatggaaggcatagagaagggggcaaaggaagaggactcctctttacccatcaattttatttgagctgttcttcaccgaaatacactcgcgatgaaatcagcctctcactcagcgatgcatatggaaatcaggtaaaatattttcatttgaaatacaaaattggattgggcgattaattaattgattgcctaattttggcgatggaattgaaaaaggtgtatgctccttgactagacgatccacgatcgaagacattcaagcgttgcttgattgatacatatgagatatcagggtcttgtacttattagatctgatatctctacctgtattgtaccagagtggttatgatagttggaaaccagagaagcatctctgtggtagagaagttcaaggtaaaatctaatttacatgagatattgtttttgttttctatttctttaatctaatctgattaaaacaatatattgtgtttggatgtagaatcttcatgattcttaaatataatctaattttcaataatattgtatttttttcgcatttgaatatgaaattaaatatttgttacgattatgattaagggaaatttttgttaaaattaatcttcttttcttttcttttctcgaaattttaaatttttattttgtgggttttgaaatttgagctaatctgagttgaaatagaagttgg

SEQ ID NO: 320117 - DNA, 1278 bp, Cannabis indica
ttagaccttgtgtttttcaaaattagaggtgttcgtggtgcaagtggtatgagtttaggctattttttcaaaccaaactgtatatgcaatttttacaatttctcaaacagcaaccgcaccgcaagaccttaaaatcgtaaaaactacactacaaaaatgtggtgcgatgcagtacagtttaaacggtttacactatcatcattatcaaacactaaaataaaaatcaaaagattagtctaatcaagtttcaacaattaaacaagaaaaaaaaaactatcttatcaaaattttcacgtcataacatagatactaatcaagttattatattaaattgtctttaaaaaattatataatatacatatatattatatattatatatcaataataatacgttaacaataaaattttgggaaaaaaaggagaataattaatatgaatgttccttaaatttaattgtatgacttggactttataaccatatgagttgctcatgtatgaaatagaaattataatgttaaacttagtatttttgtaatatataatacggtgcagtttgaaccgcaactattaaattcaaaactacaaatcgtgcggttcggcaaaaatgcagactgcaaccacaccgcaaatgatttcaaaccatattttttgtgcaatgtggtgtggtgcggccaatttgtgtgatgtgggcagtttaatgaacacccctatccaaaatggtacaaaatagtaccatgagttgactttttatcaaaataaaacttaataataatttgagctagaggtgttacgacaagattggttacattttttacactattcatgctagaaattatcttcaagttggttacgtcaaaaaaattatcgaaaattgagctcatagtactatgtagtactattttataaaatacaagatctaatttatcatttaataaaataaagaatctgatcggtaacttttctaaaatacagggtccaaaatagtattaaccctattaattaattattataattaattaacctattcatttataatatttgtatttaagctatatttgtaatatattatcttttaacttgctttttaaaacataaaccctaataaaactaagatgctagaccattcatgtgaagttctctacatttatcctttaaaacacataatcaaaattagggttgggcaatattcaatccaatttaattgaactaaaccaatccaattcaatctaattacaaaaaattagatatctaatcacaattggattagattggatgct

SEQ ID NO: 320118 - DNA, 960 bp, Cannabis indica
gagcttccagcaaactggtcattcgaacttccagtagtaggagtatcagtatctttgctggtttcagcattggtagaacaaatctctctttgtctttcttcttgtataacggaagcataagctttgttgatcacaggaagtggttcttgcattagaatctgagatcttacattgctgtaggactcatttaatcctatcaaaactcaagaactttgtcttcctcttgatatccttgtatgatcttcatagcaccacaatgacaaggaggcagtggtctatattcttgaattaagtcccatagggcttttcgtcgagtgaaataggtagtaacatccatagcaccttgattcagcagctgcatcgatcttttagcttggaaaatccttggagcgttcctctgtctgaacctttcttgaagatcatcccaaatgtcagctgcaacatccatatacatgatactttcacagatttcttgtcaaattgaatgaagtaaccacgagacaacaaggcagttgcatcgattccgggcatcatagtcttcatcatcttcatcaggttgactgagttttcgattcacaaattgcatcttgttccttgcaagcaatgcaacagtcatggtacgcttccatgagtgataattatcacttccagtaaggattttagggacaagaatgactctaggatgatcgctgttagaaagataagacggatcacgattaggatcgttgtgagatctagaattaggttcaagaacagaaaaaggattcgaatcctcagaagtagtcccttgagtggtctagcttcgagcattaatctttcctcgcaccatggacaatcagcaataagagatttacgagaaaaaccagtaatcataaaccaatcgaataacagagcaccatgattaacatggctctattaccattttaggaagaagaagaagaaaacagagagagagagaga

SEQ ID NO: 320119 - DNA, 947 bp, Cannabis indica
aaatataaacttgtgaacaatggagaatattcagaatagatacacagactgcattttcattttctgtaatgggagttttctttttatcttcttagaactccatccttgatggtactacactaatcttataaaagtataccttccaacattgattttcttggtgtttgaatacattttcagctattttcatttcatatgcttaattgggtcattgaacaatgtgatctagcctcatcagctcactaactcataaatgattgtcttagggttttagaaaatgttcttcttcttgaaacttacactcaggaatcaataccagctctacataaaataaggtaataactggtgacactccttctagtgaatctgttgtattttttacccaaagttaatattctgtcatatttactgattaccaggaaatatcttgttgaggctacagaagaagcttctattgcatacaacaaagcggtatgcttttcaatcatgattgtaaactaagttttctcttttggttgtgaacttttcatctttttaaagcatttttttttaaaattataataatatgaggcataatagtgagaatcactttgacaatacaaggaaatagcaattacataatactctgtcaaatctttaataagataggagataacaataacaataataataatagtaaggaatattgatagcaaaaccacctgaattttatattttttatattttttaacatttaatcacaaaaactgaaaactgattttttgacggcaaatacctaaattgcatatctgttttggtcattacccttccgcccaaaaatcagtttttgtgattaatgaaaataattttaaatatttagaaatttaaagaattagaaaaattaaatatttaaaaatttaaagaataaaaaaaaattaaaaaatatttaaaaattaagagcatgtttg

SEQ ID NO: 320120 - DNA, 740 bp, Cannabis indica
cctacacagtctcagaatcatcccacttgaccttccccaggcggtgtgggattacacagcttacccggtatatccccttacggatcacgggactactgactgtcacattattgcttttagttgttctcttactttaattgttcaaaaaatgtatttttgtatttaaaactttacaagcatattttcataaaaaaaaatattaggccgtaaaattataaataaaatttaagaaaatatatttttgaaaattctctttttttcttcaaagttcaattatattgtgttgctacctatttagtgagattgtttaaaaactaattgattatctgtaaaagctaaagaaattaatcaaagataaagaaaataacatgaatttttacgtgtattaatgagtcttagtccacgagtcaatattattattttaaagctagaaaagccttataagatttacaagaatatgtgaaatattttgcctgagcaattgaggaataagtttctaacctttgcatgaagggttctttgaatatttatagtgtctagggttcatacttgttaccattttcctactgatggggtgttacaaataacatattgactttatgcttatttgctgaagcccgatcatccatgaggcgcatgacacatgctgatgtggatgccacactacaaaaaaaaaaaaatacctttaataataatcttttagtcacaacataaaaatttatgagtaaatgtgactttta

SEQ ID NO: 320121 - DNA, 938 bp, Cannabis indica
ttttttatttaaaaagaaaaaaaaaactcttacctaaagtgtatttttgatcaataaatatattattgttgatttagatgagaaacttgcatttttattttttatacttaagtgaagaaattcggtaagtaatatataaatatgaaaacgtttaaatctaattgttgaagtaaatataaaattttaggaaaaaaattaaatatacttagaaatgtttttggatttttaatactactaataaaaaataataattaatacaaaattaattttaaaaaaaattataaaaatgggcataagtaagcagattgtttgaaccttgtttccggcatgttaaattattctaatttattaaaaatttgtaaaatatttttagaaaaactaaaatttacattgtcatataaaaaaattaaaattaaaactatctggatatcgaaaatacgaaatgagtgtttggtacacttaattttagagagtggaacatagaattttcttaaattaattatattgtttaaattaattatattgttgttttattattattttttattatttatagttgtatgtttatttattttttttaataagtttattttgtggctttaattataaatttaatagaatgagaatataatgttaaattttttcatttaagtaataattatttttcaattagtagtattattatagtagaaaagtaatcttgttaaaaaataaataaacatgttttatattttttttataaatagattacttagaaaaaaaaatcttaaatatataatatatatgatgagagagaaatactttaactccctcaaaattgtgagggacttttttgtaaattaattgttagaggactaaaatttttgagacttttattatagttatatatatataataaaattaatatttataattaaatttatttagtacccatcaat

SEQ ID NO: 320122 - DNA, 1160 bp, Cannabis indica
aaaaaaaaaaaaaaattatgtccttactatccttactataacttttatttattaaaaaaaatgtgattttgaactaaaaactttaaaaattggatgttttttgaagattgtattattaaaaaaataaaccataaaaaataaatattttaaaagttcttatttatttcattaattattaaagagtgtatttagaaaattatggtgtaattgaatttggaagtaattaaaggtaattatataatttaatatgtttacacaataatagctcgtttcgtttggtaagctatataagaatcgtagtatattaaataagaagaaacactatgttaggataaaactttatattttattatttattaccatcataaattttaatataatataaatcatattattaattcataagaaatgattcatattatcttgtattataatacttataaatggtctaagactggagtccgagattagggttaggtccgaggtcaggtgatgggcctgaggttcgggtcagggtctaaacctgggtttgggtcgaggtcgaaatctaacatccaagtccgagcccatggcggggatttggcgtccggggtcgtgactaaagtctgtggcaagtgtctgtgtcgaccgggtccaagatcaggctagggtcaatatcaaggttcgagtctatgtttagcgcccagagctaaggtcgaggatatgcgagttcgagtttatggcatatttacacaacttattaatataagtcaatactaaacataatattgtattaaaagtaattaagggctaattctcatggcctcgtgaaaattaagagtaattacaactttccattttaagtattattcaaaaaaaaaaattatttttcaagtgtaattactaactattttcaaataaaatattaagaatttatatgtaattactaattactcttgataattaaactatttactaattagacggttactttcaaatacaccctaattattctaaaacaaggtggcataactaatgatttactttctcgagtttcattacaaagaaaggatagaggggttcgaattctcatacccttaattttaaattaggaaataatacataaaacaataacagtgcctaacactaaggtggcatttggttagaaggaatgaaaacat

SEQ ID NO: 320123 - DNA, 1294 bp, Cannabis indica
aaataaaaagtcacacccataaatttctcataaaccaagaattcaattatataggtacactttatatagaatagatagtgttgacattgcactcacatcgatctcttatatatattatttattttattgttttaattgtaaccttttcttgatttcttaattttttttatatgtttttgagttataatcttatttaatcattattattgttcttgtattattatttcataaaattattttttgtgagtttattaattattaattatgttgtaccttgagttttacaagtactcttttctccggtaattttgcaactcattcaacaaatcaatatttattttctctcttttctttttcctctgttttcacatcatgtttagatattatatgtttagaataattaatattatttgtgtgtaaattgaaaaatatcacatccatgcattatatatatattaattacttcttgattttatgaaatgctagaaaaaccagaagaccagctgtggatcttttgggatcacaaacttggaggtggctttccaatattaaatatatatgaattgatatgtaggaccatttaattatattgagagatatccgacatggcattcctccatcataactgtcatcacccaatttttagtggtttatgtaattgggtatatattcttcttgcgtcttcgacttttcctataaggatgagagagagaaagaaattttgtaggaaatttatagcttatatgaataatacctaaataatttataaacaatgtaggaaatttagttataatgtatttgaggaagaaattttgtgcataatttttttgcgcagttttttttcaaacaaaatagcaaaattttacaaaaaaaattttaaaaattgaatgaaaaaaatgtaagatgctatgtttatgctttcttttataatatagagatttttacaccaggtaccaaatttaattacttttttacatttttaatgcttatcaatttattaaacatttttacaaaactacttttacttttttaaatctcaaaaagtattataattacaaaaatactacattcaccatttagtttctctcattttcgttcttcttctttgtctccgactattgatgaagggtggtggttcggcaattgagtttccaagtcggagaagtcgagctctaatcgccgcttccaactacacaaagccaactcgttcatggagtccttccctcaagaacacattgcaccgactccgttgtcgcaactcactcaccccatcactcgttgcccgagtcatcga

SEQ ID NO: 320124 - DNA, 1054 bp, Cannabis indica
atttggtagatgatatcaaagttcagggagcatgatttagtccaaaattgaatgaaattggataaaatccttaaatctaacaatctcaatagttcagggggaatttttaacggccaaaaaaattaagggggcatgatttggtatattttaaaagttcaaagggcaaaaattctaattagcattttgttaatgatatacatagttgattcttaataaataaataaacaactatgaatatgtatatgtcatattatttgtttattcattaatataatatatattaaatatattatacaacaaaataaataattaaatgtaacatattaggtggagttacatgtattttctaactttcacaatattactaattaagtgtgcaaagaatgtcgtacaacttaatcttttgaaattcaaagctacaataaaattatagatgttgggaatttatttttataatttataatgtgtataatgttggaaatttatttttataatttataatgtgtataagtgatataaaataaagtgaaaataatttaaaatattttggagagttatttacaaaagttgaaaaatcttgtaactagtaactagttactttttttttcatctttaattattgtatgaatgtttttgaatgttggggatgctttttaatagctcccataacctccacatcatatttaagcctatttacatcaaattaagtgatggtaatagtcatgaggtgtaggatgttgaattttaaagtatgatcccaaacactataaataggtgcttaatatatgttcatttagataatagaacttttgatcaacaagcactttctaaaaagtataaggcttgacaattctaaaagttattttcatgaaagttcccttagtattcagagatagaaaaaataataagcatttgaacaaatgtgtatacattgttcaagtcatgatgatactacaagaaatgtcacttttgccagcacatttttgtgctggcaaaagtttggtattctgctggtaaaatggaatttactctgatgtgttggcaaaaggagttg

SEQ ID NO: 320125 - DNA, 513 bp, Cannabis indica
aatcacctttaagtgactacaaaattgaatgtgatatttgaaagtatagcacaaggtcaaatcaaaaaatttgtaggtgtacacattaagaaatttgtaatttttttttaaaataggtcaaaaactttaacactaaaaactgatacacattgacccaaagattctaaatagaggtcaaaaagtgaagatagctataattttttaattattcatgttaaaattcaaattaaggtgtatgatattttatctcaaaactaattaagaatcacataaataactcattcatcttatatataagagactatttttaatatagaaagagagactactaaatttattaaatgattggaaagagggaaactaaaacctctcaacttacattatcttttatttaaagggcaacgaatatgaaggattatgcacaaacatgagataaagagtactaagggtatttcaatctgataggaataaaaatataggaataggaatgggaatggaaataggaataggaat

SEQ ID NO: 320126 - DNA, 555 bp, Cannabis indica
tttttttttttttgaattggttcctaaaaatatataaatttgagcaagttcctccatgaactttgttttaaagcaaattagtctctaaggtcataatatataatatttggtttattttaatagtaatcgtaatgaaatgagaatttaccattacaatatttggtttgttttaaaaagtgatgtaatggagttacaatataatgatgattacattatataagagaatctccattgcatttaaaaatctatgtaacgaggattagatgacaaatgactaaataaagtaaaatgatgtaaatttttcttccaagtatttatatatatttatatacatcagacataggtaaaaattacaaattcttcaaaaacacatatccgagcctaaaaacctcaaaaattactaaaaaacacaaacttaacattaaatcaaattgactttaaccttaaatcaatgaaaagaattacagttaaaaaactcatgaaaaaaacttagacattatctttgacgaagacattatcggtgtcaggtggtggtcgcggtggtctgtgggtcgt

SEQ ID NO: 320127 - DNA, 497 bp, Cannabis indica
attggggtaattaagagtatgtgggatttgacttaacgccctcgaagtatagatttcgtagtggctaagaaatgataagataattatgaataataaaatttatattaaattattaataatcttatattaaattattaatattattattaatgtatcagcatataatatataatatctcataagtttatgacagtaaaaagtaacgaacgaactctcgtcctcccccttcgacaaaacccttttcactttatatctattttcttcgatttttaacccaaaacctagcgatctaagctccaatgctagcagaacagcaattcttggtaaaggaaaagcttaaggtaagggttagttctattttaagtctaaaacaattggtttcgtataggggttttgtaaattagaatagttatgaagtttcagaccttatagaattgttctcgggtagtcatgagactagttctgatgtttacttattgaatttgaggtgattttga

SEQ ID NO: 320128 - DNA, 979 bp, Cannabis indica
aaagaaaactagaatcatattattttgtttacataattaggaaaggtaatcagaatgcttcaatttaacaaaattgccattattagaacatgtaattatttttttttatagatttttaaagagcatatgtatcttttttatttttaattaataaaattaaaattaaaataaattaaattaggaaagggaaaggtattcctataaaaatggggagaacctttccttttattttctccctaatttgtgtgggtctcactactttgtccctttccaaaatttagtaaccaattgtatgagaatcaatatcataccattcattctcacttcctataagtaaatatgtcataactccaaccaaacgccacctcaattattaagtttactggtatattggtccatattactgtgttgtcattagtatactgttattagttgttagcttattgtatagagctagttagtttataagtcgatttgtgttttcagttataactgttttctgttaaaacggttgtctcctcttttcttgggtctgttttgtactgaagtccaagctatatataagcttgcctctcctctgtttagattaatcaaattcatttttctctttgcaagattacgattcccttttctcaacatgatattagagcgagaaagataagctttcttgtccaatcctcccagctgtcgtgtcttcctctctggcgtagctgcatttttctcgatcttcttcttctctgatctggtgatctcctttctctctctctgtacattgattccgcgcaatggctacagatgaggatcaaaccagaattcctgctactgttgtcgatcttggcaactcgtctactcaaactaatcaaagtcttcaagttgctgcaaccaagaatccattggaagatccagctagtctgttcttccttcaccatggagataatcctggaaataccttggcgtctcaacctctcacaggacaaga

SEQ ID NO: 320129 - DNA, 2045 bp, Cannabis indica
aaaattagtattttaataaataaaatagggtaagcttagtcttgggattgttggaataggttaatactagtacgggattagtaacgtgaaatattatcttacttattttgagagtttaaccttgaaatgttattcacttagtaaaataactacccttatggaagctaatgttgataccttaaaaaaaaagttgaaattaaattatttccttctaatatattaatttaaataacatttttttttgaaaatttttcactattattaaatcaaagatcatttacaacaacagagaaaataggatgtaaaattttccccatccaacagacatcttcatccaaccctagagcatactttgctaagccatgagcagcttgattagcattcctacgaacatgagcaagagtaatttcaggaaaaaaggacaaaagacaacgtacatcatcaattaaatttgaaaaacaagataagtctttgtgtgaagagatcaaagcagaagacactcttaaagcatcggtttcaacctgcgctatcgagatttgttgttgattttcccaattaagactatgaaatagtgccttagcttctatttcatcgcttctaaaacagccttgtactggtttggattatgcagccacaactccccttttgtaatttctaatgacagctccaattcctaatactttttctttatcattcactgccgcatctacattcattttaaaataatttatatttggcggctgccatggagtcctatttgttggtctggtgttgtaacctgcaacaacatgttgctgtatggagtgtttgattgcagggtgagtttgctaatgcaactcagaaattgttgtttgctgttggtgaataaatcctggaaatgacatgctctactggtatgaagagagttgcacaacttggtgtgtttgattatgctggtccaagacaattctcttcattggctgctggtgcataacatcaggtgttgtattgtgttgctggtgtgacaaagaaatattgtgattgtctttacctttttgttttattgatctataattatccaaataattgataaattgtgttgcaagagcagagggagcacgttttgctccaccatgaagtactttatttctttcattccaaatgctccacattaggcaaattaggagttcaacatcagccttgtccatagttttcgagagatgagtgaaataatctccattaaacataccatgagcacaatagaaatcaatgttaaattttgtttgcttccaaaccgatttggcatgcttacacatgaataaagcatgccctattgactccgaagcactcttacaccttgtgcaaatagttgaatcaataactttccttttgtgcaaggaagtggcaataggcaatgcttgttgaatgaccttccaagcaaataatttaaccttttgatgtatttgtaaagcccaaaagaacttccacaatctttggtaattattagatgttgattcttcattggtctctgagatggaagttgctaaatgaaagtcagactttactaagtagatccctttagtgttatgatgtcatataagttgatcttgagattggtagtaacttaatggaatagtaacaattctatcaatgtcaatctgtgtgaaatgctcttatagaagaggtatattccattccataaaatcacatataaaggtggacataggaaggtttggttgccctgtgtagctaatcggcttaaaatctgtatgtcctgggatctaagggtccaaatcacttccaacataaaacccattaccaatattgtatcttagaacttttagaagtaattctcttccttaatggattccttgccaagttaaagagggtgaatgtccaaggtgagcttctaaaaacgaatttcttgaaaaatacttatgcttcaaaagtcgactttacaaggagttcaccatctcaaatattctccatgcttgttttgctagcattgcttggttgaaatcaacaaaagaacgaaagcccacccctccttcaaatttcgacttgca

SEQ ID NO: 320130 - DNA, 763 bp, Cannabis indica
aaaaaacaaaattgattaactgagcaaaatttctcctcagacgataattctcatataaatcccaatcaaacaagcacaaataacacagcaagatcccaaattcccaaactgaaacccaattcaaatcaaaacgatcaataatccaatagcacaggagaaaaaataaaataaaataaaaagactaaccttaggcctcagatccgagccataatcgaatttccaatccttatagtacggaaacgagggagaatctttcggcctcaaaggatcaacacaattagaacctgaagaatgcgaattcctagacactgattccgacgattccataccgggaaactggagttggtcaggagaccatcgggtgaccggatcgttgaggcctccacgccattggaggacgaaggcgaagcaagcgagagtgaagggaagaacagttaagagcaagagaatacgagaagcgaatgattgggaagatgatgaaaatgaagaaagggaagaagatgatgatgatgatgatgatgaggaaggtctggtcgatgaatgcagacccgccattggagaagcttggttaagcagatacagagaagctggtgcatatatatatgtatatgtatatttatagagagagaaagttgttgtgaaggtgaagagagagaaccagggagccgttttatatcgttacaaaatctttgttcttgccggctttgccttaattattttttttttaactttttactttaatattttattcttattttcgtta

SEQ ID NO: 320131 - DNA, 566 bp, Cannabis indica
taactaacataactgtcaaaaacagttatgacagttagtgtcctagatatagggaagagtattagtaggcacactagagttaacattatgcatatttgtcaatagaaagaaaacatttataatcacgcacaaataatataacaaaaaatgtataaagaaaataaattcctaaataaataaataaatttggaagcatgtcaatagttattattattgtttcttttaagagtgtcaatagtttttagtgttacattttttttttactattaccgaaattaatacaaagaaatttttttattggacaaaatgtgaagttctcacacattaataaaaataaaaaatactatttatattgtatgatgttttaactctacttaaaatataatatgtgtattgatcatatccatattgatataattacattcaaaaatatataaatatatcatatatatatatatatatatatatccattatatatgatctttagagaaaaaaaatagataaatcaaaactcttacaaaaatacaattactaccatgtataataatataataaaatagatata

SEQ ID NO: 320132 - DNA, 1462 bp, Cannabis indica
gaaagaaataaagaaagaaagaaaaagaaaaaaaataaaaaaaagaaaaataaaataaatttaaaattaatttttaaaatttaatatcattaatataaggtagacaaataaaaattttccaaagtgtatatttttgtacacagtgttagtctactttgacacttaatcgaccaaagtggacggaaggagtacaaagcaaaacacttctgtagagtggggagctcagacccctaaaatttttacgtttagggttgatcttgtctaaactttaaagttcaaggagtttgatcgcaaattatccttttttaagtctttaaaattagtttagtcattttaataaattcagagtataaattttttttttgataatagtatactcatttattctatacacattaaattgatcacaacatggtctaatgtgcaaaataacttttctaatagccatgtagagcataaagtaaaagaagggtcataactcaattacaaaaatattttgaggaaatatttagtattagtaatagtttaaagatacgtattttttcgatataaaccaagtgaaaaaaaaaagtagttgttctatttattcttataataatttaagttgtatcataactataaattaatcataaatttaaatattaaatatataaaatttaaactgaaaaatatatatttttgactatatgcaattctcaatcaatataaaaaccgcatgaagcgtagtatcgtttcctagtgtaaaatatataatggagttatttcttcattactcttctaaaataaaatattaatacctaatataaattattaaaaaattctacaaatcacctcctaaaagggtgcaccgatgcatccctatttgtttcagtattttggaaaattttataatatattttttataatcatgtacgttgtgattatttaagatataatcagcaaaaatttgagaaatttagaaatatttaacacattgaaaataaggtttaaacaatctgttgcatgtgtgagtttttattatatacgtgtgtgaaataaactgtttgaacattagtttttatattgtaatttatttcaaaatttttaaaattttacaaaatatcttaaataactataatatacacaactatgaaaaaagttggactaattcttttaaatggataccgaaataaatagtgtgcactgtaaaaacaccttttgtactagtaatatattaaaagataaagtaaactgtagcaaaacctccaataattttactttgagagcaattaactcctaaaactcaaatttcggtagcaaaaccccccaaaattgctataacattagaaatttacagttttcatccaaattgaactgttaagtgccgtattggacttcatatgtacacactatatgttgggttttgtgccctaaataaaacccatttcaatctgattagttatcaatttaagaaatttgaagt

SEQ ID NO: 320133 - DNA, 2504 bp, Cannabis indica
agtggaacaactgctcggtgaattaaaggctcttaaatcacatcgataataacacgaataagtgactcgctaaatcacacccgagacgtaggtttaaagccaaaaccctatctacttcaacttaaaatgacaataccctaaattagtagggaattaatcaactagaaacctgaaactgacgtgaaacaacaagctgaatttttgggtttctctactgtaaaattcgggtaaccggttttacccagaaaaaccgaaaagcaccaaaccctaatcaaatcgtttccaaacccaaccaaactttccagacctgcataatacaccccaataaatattttccaagtgataaaataactacccatactgagaatcgaatttcaccattaaagcttcgagtttgagttctaaaactcaaagcttgtttaaatctacaaacaattactaattcatgcttaaatcaacataataaatcatattttaactacagaaatcaacatctaacaactacagcaaccacagcagcaaaacaccattttatgcaaaaaattctaatttcttacaactcaagaaactcaagaagaagttacaagaagcttacctagaactttagaccaccaaattcttgctgaaactagcttgaatttcgagagagagaaggagagagggttggaagagagtattttcttagttctttcttattttcgagtaaatgacataaaacttagttttattataatccatttcagctaaaataactaataaaatcagatcactaataataaattcaattcactaaagacaaaaagctaatggggcaaaatgatcattttgcccctcccacactaaaaggcataaaaggacactaaggggtaatttgggaaattcttaaattctaactattcccgacattctcaatgtctaaattattgtcccgctatactaaaaatactaggatgtgaatctaatagccaaacactgcgttctaatgttgccggcacaaatcaagcaaaattatgaaatttctatatatgacatataaaggcattctgaattcaaatatatcatcataaataattaattcaatactaataaataattttcataattaaaccctaattatctgctaattccaaattaaagctaggcgttctttacagctaagaaaactttcttcctaagctttgacatcttacttcttgagatccatcttagaagcttttttaatgaatatgtacttgtcctccatcgtagccaccctttaagctgatcaaggcatttcctgctaaaattacattcaaagaacatgtgttccacctatttagggctatcaccacagaggaagcatgttttttcattaaaaattttataactcatcaatctatcttttgtttggagacaattctgaacaacaagccaagtaatgaaactgtgtttttgaacattatatctgctccaaatctctcggctccacaccactttgatcgaatcttccgacaaaactttgtagcatttttggatactataatcctggttcataagtagctggaatttagggatgtttatatttttctttgattctaacaatctgtttcttatagcagctacttgagattgaggcattatagctcaccagttttccttcttcaagtagacactatgtgtccaacacacccaaagattttttttttgatgctatagctcatatatgcttcccaataactgttgtgttccaaagaaaagtattcctaaagcccaaccctccttccgatttttgtttacagaggtggtcccatgccacataaccaggacaagatgtttctgtaatgcctttccataaaaaagctcgacatatcgaattaatcttcttcaggacagttttccataactaggacaagttttttttttttcctataagataagataaatgctaaaaggtactgctggtgtctagtaccttttttagtatcataccgttattgatgtaattaagtattgaatcccatataactaaaaacaataatttttagaaaatatagctaacctattgtatggcaccacctatagaaggtgttgggcattagggccaatccaagcatatagcagcaattgtacaagatcccaatattaaaaagtttttttttttcatcatccatttatatataatataatataataaatatttttttttataacatgtagtatacataataaatattcataaaagtaaatatacacttacaagaagaaaaaaaaattgataaaacattatggtctcaatagacataattctaaaattcttgcctattttagaattcataaagtgtttttttttttaaatcaatatatatctattctatataaaatatgtctatataaccgaataattggtttatgagaaattcatgcatgaatttttatttatattaaaaataaaatagtttttgagaaattcatgagtcactttttatttatatataataaaataaattccattaaatccaaaaaaa

SEQ ID NO: 320134 - DNA, 541 bp, Cannabis indica
tattattttaaaaatattaagatgccatttgtttttactaaatagtgaagaaaacagaggaaagatcacttgagttgagctttcaattatattttttcttgctacaataatatatgcatgagctctacagctcgtaataatatttacttgacttgatagaagaattcaaaatgaagtttcatgtacaagaaaagaaaacattttggtggtaagtgagttatggattgtaaaataggatgtggaagcatatattagattagatcaagttgatggaaaatgattgcgtgtaaaaggggatacataatataataattgggaagatattaataaagcttatctaaaaggaaggaatatgatatatgtgaagtggcccaagtggctaagcaaacccaaaaaaccaaaccaaacctaaataactccatcatatatatggtcatggactgtggacacgggcatggtgggataacagtactacatcatttgcccatattcttccaaaaatttcaaatttcactactaaataattaatatcgtttttttt

SEQ ID NO: 320135 - DNA, 750 bp, Cannabis indica
tcttgattttcttccattgttataaaatctctaacagttagagatatgacttaactacgtaaccctaattagattgggtttattcatcaaaagtttcagttaactagaaaatgtcacattttttctttaactaatttttacacacaaaaatattaaacatgttaaaaattaatcactaacaatacgagttaactcaccataaaactctctaatcaactgatattttattaaaattaataaaaattaatgtaagatcaagtaaaaagtctaagcaatggtcagctaagctttctaatgagaatgctagggagctttatagttatggttggcctttaaacactaatgatcttcatgtttagtactccctaagttgttttttttttttttttttttctaatttctctattaatgattttttttatacgaaatcacattaaatataacacttatttaattattaaaagcctataatgagattatgacttagtagctactttattaacaattttttgagagttgattatagaccattttcattcatggcttgcctaacttgggttctcgttaagttttttaatatataaattatagacaatgtgtataatttgtgtggttatgggccacttgtatctccaataaattagacttttacataattaggtatttaatcttgagaaatataagtaaatgaccctatttctaactttatagatagttaatgttcctttttaaaataataaatcaaatgtc

SEQ ID NO: 320136 - DNA, 608 bp, Cannabis indica
gttaaattaataattattttaattcctttttttttttgaaaaaaaacttgtgcttcattggataagcgattgagtacaaagcaagcaagttacaaagaagatagagaaccattctaaataactcatcatctaattcaagacctaacttagcaactttatgagccaacatattagactctctatgaacatgagctatagttaagtttggactgaaagataacaaattcttaacactaattaaaatgtcatttaatatactattattttaattacaagaggtatgtttatcaactatagatttacagtcggttataaagcacatccacatgaagtatttgagcccactggatagcttgaaaaatggccttagcttctgctaggggtgttcatcaaaccgcccgcaccacaccgcactgcaaaaaaaatgcagtttaaaattctttgcggtgcagtcgcggtttgtaatttttcctaaactgcgcggtacggtgcggtttgcggttttgaattgttaatatgcggttcaaaccgcaccgcaccgcacattataaaaataccaacttttatatttatttagtccaatatgtaaatgtccaacctaaaactca

SEQ ID NO: 320137 - DNA, 857 bp, Cannabis indica
aaaatgatagacttaaaaaaaaagataaaaataaaagaagacaatataaaaagggtatagaatctactttcctcttcattttggtgttatacatttatctttatttgttttagggattttacaccacatattaaaatttttaacttttttacttttttataagagggcggaattttttttcaaaaatattgtataagttttactgtatactgtgttaagtttttacaattgttctacggttatatttgagttgttttactgttattttaattgttctattttattattttacggttattttataaaaaaattatttttgtaaaaaattccgtgtcaatagtttaattataaatttttatccaaaattcaatatttttataaaaaattctttttttcatatagaaaatacttttgattctcatctaaccgattaccaattgaaaatttttgaatttgtttttctttacaaataaatatatatttatgttttgggaataaaagactaaaactttttttattattagaatgcttgcacttcgaaatccaaaaataaaaaatgaattggtaaaaacattacaaaccgtccattcaatattttaatatattagcttcgaaggtcaaaaccaaattattataaattgatacctaatatatcctatactatataataactaagtaattaaataatttcaaaattgacaggaatcgaataaaccttttattgttcgagtactacccttttttttttctttttcaaaatagagtgtactactttgttagtctaacaaatcttatttagttatttatatggttaaaaggaataaaaaaacatatttattttcctttgtaagtaagaa

SEQ ID NO: 320138 - DNA, 573 bp, Cannabis indica
tttatacttgtttaatggggtagtttagaacatattttagtagtttttttatattttattgttcgagtttacgcttgttttcttcttattccaagttttaatggtcaagtatatcatatgggttgaaatgagagaaaaatatgaatatcgttgatttatcatggattttggggggttttatgaaatattgaatgaaaaattcaagttttagatgctcaacacgctccatttgtattatgaaatcaagtatgaagttttaagctaattttttattatgattctttcactttcaggaaaaaaacattgtgaataaaagctctatatctctctttcagttttttgaaacatcttgaatcgtccaattctaagcaatatcgagagagttatgaccaaaataccatcagccgttgcagtaggaaaattctaagaaaaagataaaatgattacgaaaaaaaatatagcattttcaagtgtagatgcagctaaacacaatttttatcttttttaagtttaaattttaaatctttttagtatcttttaggtaactctgttagcctatataaacacactatt

SEQ ID NO: 320139 - DNA, 1515 bp, Cannabis indica
actcatgattatttatgtaactcttattttcttataatataagtctattttcattgctacctacaagcctaaattaatttttctcgtcctttgtatttcagttggtattttagtggggccacctaatcatagcaataaagttcactcttggaaagtgctacacatagtcggctccaatgtccacaacttccccttggcttataatgggtgtattttattgactatttaaatactaaaagataaaaatgggggggacacatcacgtgctccttctactcaatttcgaaattttcttgactcttttgccctccatgctatcaattttactggcaaccctttcacttggacaaataaaaaaaatcagcgatcacatactcaagagcaaattgactgggggatttcaaacactgactgggattctttgtttccaaagcatcatcttctccatggtagttactttggctccaatcatcgccccctaattttgaaccttcatcacacaacaactcttcataatcctaacccccgcttcttttttgataaactctggatgtttgaaccagattttgatgattgtcttcgtcatgcttggacttcgggccaaaacagcaataatagtgacccaattgtaaatataactgggaaacttaagcattgttccttgcaccttgcgaaatggaagaagtcacttgggtcttccatatcttccaaaactcgggatatccaatctaatcttaagaatgtgcaaagttgcactcatccgactgattatcatcttcagcttgggagacaacttgaaaacgagcttgataggcttttgtacaaagaagaagaatatttgaagcagagatctcgtgtaaactggcttaggctgtgggacaaaaatacgagatattttcaccaattcgcttcctcacggcgagcgaaaaaccaaataatctctctcttgcgtcctgatggctctatggccacagacactgatgcctttgtgagcactattgagaaatattttgatcaactttttgcaagcaagaatcctgatgaggagctcattgaccgcattctttctggcatcactgaccgaatatccgagtctgaagttgaatcccccaattgcccctatactgacaatgaaataaaaagagctgctatccaacttgccaatgataaagcccctgggtctgatggctttaatgacactttcttccaaaaaactggcatataattgggcatggcgttctcttggctgcaaaaggttttttgaatggggatgcaaacattggtgccataaactacactgtcatagtgctcatacctaaacattctcacccccaacaagtcactgactatcgtcccatcagtctctatacaactctgtacaaaatcatctctagagtactggtgaaccggcttaagcctataactcaaccgcattaaatcccctgctcaaagtgcatttctgttggaaatattttaccaggatctagatttactaccaagtatgtttcattaaca

SEQ ID NO: 320140 - DNA, 1062 bp, Cannabis indica
attaaataatacattttggtgttgcgaaattcactcgacaacagcgggttgcgctcaaatttttgtaacccgatctttacaatgggttaaataaactgtggtataaaccgaccaaaccgatcgatgtacacccctacttccaattatcgttttacttgcacttaacccttttaagctcaaattttggtggtaaatcttccaaactactaaactattagtaaatttaaggggtcatctaattaactgctacatagagtgcttatgtgtacactcttgtacatatgacgtgtttataatactacacctaatattattattctaaaattagataaaatatttaaaaataaaaaatattataaattttgaaataattttgaactaatatttaaataataatcttaggtgtactaatgtaaaagtgcaacgtgttgaagaaaatatacacataagcagtctatattggtagttaactgtaaaaaatagatgacactttaaatttgtcaatagtttagtagtttggaagttcttactattaaaatttgaaattacagaattaagtacaattaaaatgataattgaaaggatttagcttaaaaaaaacttttaactcttttacgatgaagagtaatcatatacgcaatttttttacacaatcacatacgtaattttaaattacctggaattattaatttaccaatgaagaattttttagtctagttttttctcatattcaggtacgttatagctatttaaaatatcgtacaaatttttgaaaaatttggaataatttacaatatagaaaataatgttcaaaccgtctatttttcgaatttataaaatttttgcaggatgtcttaaataactataacgtacttgaatatgagaaaaaatttaactaaaaaataatttcgaatactaaaattaatagaaatgtatagatacatcccttttaagagttgatggtagaatttttcaatacaatgcacccccttaaaaaggatgtaccggtgcaccctctatttgtttcgccatatagaaaaaaaatttaagtctatttttttt

SEQ ID NO: 320141 - DNA, 1324 bp, Cannabis indica
gaaaataatcaaaatccatagcgcccgcactggaaaatgctcttactttacatatagtttcagaactttttttttgaaaaagaacttcagttcagaaattagattaaaacattaggattgacaggggcaatccctccccaatacaatttgagtctaggacccttgtctcgcagagataaccaaaacattaacagcagaaatcaagtctcgcatagagaagaaaacaccagtgaggcgaaagtttgagaggtgcttcttctccaaagccaaaacaaccaccaaatagtcagaacaaacaataatagaatcccatcctttctctgcagcccaactcaaagccaagtagattgctttcatttctgcctctaaggcagagtcaccattttcttgaccagacttactcccaaaagacattactgcaatcaatagccataatagccaaatcgcaccaagagtctttgaaagctcgatcagtcactaaaaacagtcactaaaaacgataccttcaatctaggctcatcccttgaaggggacaacgaggatactactagaacatcaatgcttgaaaactctgcaaatcttttatgaatattctcatgcagcatcctcaaatccttacctttacctccatgcaaaatggaatttctctggttccataagacatcaaaaatcagagctgaacacacaagaaatcgtgtcaattcatcacccttaagctccaaacacagagcaaaactggccacaaaaacatcctactcatataagcattcagtttttaaaggaatcggagcactaaaccgaagagttctagccaacggacatccaaaaaacaattggctcagggtttcaacatcacaatgacacagaacacatcctctttccccatcacatgaatacttatttctagtcaaaagagttccacaacaaactctccaaagcatcagactcaatctcgggtggatatttttggacttaatgaacttccaacgcggaagagctagaccaaactgatgctcctgatccaaccaataagttgccttaacactgaatttcccattaacagatcctttccataccatcgtgtcctttttcaactcgttgacaatatcgatcaagacaattctctctcttagatcctctccaaataagtgtcgaacatatctggagttccgctatttatgagatctgtaacattcccacttcaagctgttattgggcccttacaccccacggaatgatggctcttatatacgagtacgtcactttggctgcttcttggaatgatgactgaccctacaaaccaacacgagtgtttccagcatgc

SEQ ID NO: 320142 - DNA, 914 bp, Cannabis indica
tattcttttattttttatttttaagtatattctgttaaaccaagaatgttaaaccaagaaatgccgttagataggcacttttaatatataaagatataatctaattttacaatacactcctctaaaaaaaagtacatcgtatttttatgtatttcgatatttagtagaattttttaatttaattatttttatagtcgtatacattatagttatttaaaacctcttgtaaaatttgaaaaatttgaaataacttataatatagaaatcaatatttaaacagtatatttcacatgcgtataaaataaaataaaaaatatgcgtgcaacagattgtttgaactatgttttcagtgttaaagttttgcaggatgttttaaataattacaagaaacacgaccatgaaaaaaatttggactacaaaatttttttgaatattgtatagataaggatatatcaatacatcctttataggaggtatattgtaaaaattttcattatagtacgtgagtttgactcactacattttaatttagattttagattatataaaattgtataagaggagcactagtgtacttctatctattttgacattcaaaagagttttttagtttaatttttttgtatgcttgtgtacattgtagttatataaaacatcttacaaaattttgagaaattagaaaaaattaaaaacatcgaaaacatagttgaaacagtttattgcacgtgtaactcttttagtgtacatatgtgggaaataaattgtttgaatattgcttttattaaagttagtctcacattactaatgtgtgtaaataaaatatcatatgcctaaattatgaaaatataatgacgatagtggattgatgatcattgtggattacatgtgtaaaagatattttcttctcgattctt

SEQ ID NO: 320143 - DNA, 841 bp, Cannabis indica
atatatttctaatttcaatactattacttacacatatcaaaatactatatattaaattaatcactcaacaagtacaatatatgtatatataataaaaaattataaaagttcaacaacaccctgagttccctagttaaaaatatagtagtttgaaaatataattggatattttttcttactaaaatgttaaatgtagtatctcacaaaataaattaggtattttttttttaaaaaaaaaaaaaaagtaaaatttggaataaataatagtaaaaatataaaatatagtattttaaaaaaataaatttaaagcctttttattaaaggattttttgggccttggtgggggccttcccaccttgaatcggccctgctagcttagaaacacactaaaacaaaaacaagctacttacagcaacctcaaaaaaaaatggacaacctttacctcatacacatcaatcgaataactaatctttgcttttgtacatttaaatttctgtaatttacattgtaagaattatcttgatttctttcactgtgtacaatatgagtgagagaaactgtcaaaataaatacatctattcttgtttatccacaaggtgatctagctgctgaaatctaaaggccaagctctgaatcccaataagttgaataacaagccgaccactctttgagataaatgtacatttaatgaaaatataaatatgactctcatctaggataccacaaattggacagattatagaattaatagggatgcaggatcgagaagaagatccgtactgtaacgtccctgcttcaagcctccattgggtccttacacccacggaatgaatggctctta

SEQ ID NO: 320144 - DNA, 1154 bp, Cannabis indica
atcttaaatatttatccatattaattaatatatgtggtaaattccaaattgaacaatttaatgtatatatagaggtttcaataataacaatatataattatttttttaggttatagaatgttatttcgtaccattgtttttaattatgttttatgaagttttggattttaagcaatcatcatatatttgacacgtctctttatgggaattatggtagttccaattacaataactctaaaaacattgtatttctttaggggagccactatacaatggctttcaataagtcatcatgaattcccttataagtattttaagtagtaacttttataggtattttaagaataaaaaaaaaaaactttaataattgttattgttattaatctaaatccttatcttttggcaggattcaacactttcattactacaaaattaatatttttggttggtttaaaattttcttattatctatatatttttgtcggttcaaaaacttatttgctatatgaacgccatgaaaatacaaaatttcaaataacaatttataacccgacaaaaaataccactttaaatgacaattaggcataaatttattggggtatcgatctaactttgagtcaatatttaatcaacatccacttttaagcataactatccaaatttacatcttaattaatgatccatactaattaatatggggtagtgatatcaaatcacacactacaaaaaataaatactttttgtaacaatttttcagtcataacataaactttttgtaactaaatatgaattttagtcacaacgaaaaagttataaaacataatatttagattaaattatcactaatatagttttagtcacaataaatatagtgactaaaaacatatttaattacaacaagttgtaattttgtgactgatacaatttaatcacagaccttttagtcataacataagatgatggatatttatatattagtcacaatcattttacttttaatcaatcacaattttattaaaactaaaattaatttggtaatgttatttatttattaaaactataatcacctatataaacgctttaatttataaaaaaatacttatatatttatttatttttgggcttatataggtaatgttatttggtatcgtttt

SEQ ID NO: 320145 - DNA, 783 bp, Cannabis indica
aaaattaaaaattagtaaaaatagtaaaaatagtacaattacttaaaaaatgtgaataattataaattctacttaaattgtggtttcgaaccaaaccaaactgttcctaatcgtttggtttagtttgagaaatttattggtctagtttggcttccaatatttaaaaagctgttatattggtttagttcaaaaaaatatgaaagtccggaccaaacaaattcgtacatccttaattaggctaagtttggcaggaaagaagaatggttggagagtttagaaaataaaaatgatgaaaaggataattgttttcctttgtgttgtttggtaataggagtaaagattattggagaacattgtcccacatggattaaatataaaagtattgagtcatatataagagcatgagctactctactcatcaccaattaattttgagatggaattgattttcaacaaagatgaaaagttagagagtacaaaaaatattaaaattactattttaactttttcttgacataataagatataatttttaaatggtagaaaataaattttatacttatgtatatatttatctttttctcatatttccccaattttaaataattgaaaccctcttcctcagggaaaccctcttcctcagggaaaccctcttcctccatgaccatcataatcattttggggccttaagtaaaaattaaaatttgctaaatacatagtttattctttatattattttttaaaatatctttatatattaaaagtgtctatctaacggcattt

SEQ ID NO: 320146 - DNA, 581 bp, Cannabis indica
ttcttatatacaactgacatttgcaaaaacacagtttgtcagtttcttacgtatttttttaaatgcactaattcttgttttaaagtaagaaattcaacacatttctcatgtcttctaaaaagccatcaaccattttaaaattctgcctcctttaattggtctaagaccatgtcatgtgaggtcttattgaagtacttggatgaaatatgcaatgcaagacctttgagtctttggcgctaccccaactccaaatgcataacttcaaggtggcccgcactgtgcccattatctctcatcttttgttcgctgacgataactttctcttttgtcaggcctccattcattcctgcaatatcatcaaagatgttcttgctctttatgagaaagctacggggcaacaagtgaactttcagaaatcgtctctctatttctccccgaatgtagctctaagggatcaaacccttatctcggagttcatgtagatgttggaaatattttaccaggatctagatttactaccaagtatgtttgattaatatcctaatatgaattctaaaacaatgaaataaacacataagagt

SEQ ID NO: 320147 - DNA, 500 bp, Cannabis indica
tatataccctttttatttttatttttgagaaattaaccttatcctttaattttaaatgacaacttaataaaacaaaacatgtcggcagcaatggtaaatttgattaatcattttgtagttttggaaatctaatgcacgcatcataaattcttaattagtgataaaaattaggtagataataaatggagaatacattctttaactttgtttttgctctctatttacacccttatcgttgccctagttccgattactcgacgaaaaattcgaggagaattctcattgcaaatagagacacatgaaaattaaataataataataataataataataaaataatgtaatataatttaaaataaaaataaaaagggtttttgaattaaataatattctatataagagatattacttatatttttacattctataaattataaaagataaataaattaaaaacataactagctacattgtaacgccctaatgctaaggcacgctac

SEQ ID NO: 320148 - DNA, 1266 bp, Cannabis indica
actaccaagatcgtagtcattttcaattttcatttcagtttttaattcctagttgctattagattttgattctctttttgatacctgtttgaagctattaatttaataaacagtgtttaacgttttgtttaatttgtctttttatatgatatgattattataatgcttattttttgtccatttagtaatgttgtgagtaatttgagttcattttaacattgggtactgattattttcaaaggcatctcgtgggcaaccaaggacaaagtgcaacaggccaactactttggctctctgaccccaagcatggtccattcgtgttgggtctttcaatggagaagaaatttatgcgccatttaagagcctacttcccatggtatactaaataattaagtatcctccattttgccactgtgtatggaacagaaggtccatctcttgcttccacttcgtacctcttcaaatcagccatgaatcgttcaatttgttggtctgttgacatgacatttggtggaagaaaccctctcagactaattaccaaccaaaataataaattatttcataccggctatacagaacagagcaaggtcaaggtatagaaaaggaatccattaatggtgcctgctgcttctgctttggatcttgtatcttgacctaaaaccgacagagatgagagatgtgacggaaggccatctaattaaggcatgaactccggcgagaaaacaaaatcaggtggctgagctgtacccgctgcaaagggtgttcctggtttgggagtcgtcgttattgggttcttcccaaaaatctctttggggaataaaacctctgaaatcccaaaaatggcgactgagatttgatcaaaaactgtttgggtcacagatacttgaacgatgcatgtgttgattgccactcatccattaactctataaatgttgagcttgaagcttcctgcgcccatgtcttcccatatttattattttttaaattagtttaatataatataaatggaagtaatgaaaaaacttaaaagtatgggatttttatctttctttataaaaatataaaatatgagttaaaaaagtccatctaaacatatctcattaactttatttaatttatgccaaaaaaagtaaatactaaaaaattcccataatttatgtaatttcaactaaataaaaagaagtgaaaattacaccaaatatgggattctacaaaaaagtttgaaaaatatggcttttttaagtttaccacccttatatggcattt

SEQ ID NO: 320149 - DNA, 1017 bp, Cannabis indica
ctctctctctctctctctattgagtgtggtattttctctcatctcagattacagtttctcatgagttgagtaaacactatagcaaaaaaaattgttcatcatactaaatatataagcctactcttatacttagtgttgagactgatctgaaaaatgtggtgtgaactcttcaacaagtccattacttctttgggtttgatgatcgaatttatatacaaaaagaaacaaggatcccctaataggcatcaagaggtaaaattatttttcatgtatttatatttaatttatgctaattgttttgagatcttggagtttatggtttatataaaactcaacataattttattaatcataattctaatttatgctttcacggcgattctgatatgaaccctaaaaaccaacgagccacgatcccataggctgcaactgtgagtcatgagtctcaaactcacgtacgtgctagggccatgcaaggccatgcatgatagccaaagacgaaggaagctaggagttgtttaggtccctttgtttatcaagtagccaccatagggacagccgtcccgtcccgtggctcaagctgttggattttgtgccctaaataaaacccatttcaatataagtagatttactaattaataaagatcagaaatcattctatgttgcatggttcacatgatttatttcatgattataaattccattaggtccagaacatatgtatttgttcatgattatagtgttgtcagcacaatggaatataatcatgattatatgttcaaaagtttaattacctgatttgtcggttcactgaatttagactggcatgataatcagcgataggaatgcttacaccttggataagtgttatgtccttttcagggcattggcaaagtttaccagtatcagatgtatcgagcatacattggaagggaccgatattgatcttggtaaagatattataatagttaccgttgtatctttctgagtcaatattactggttgatcttagatcaa

SEQ ID NO: 320150 - DNA, 1211 bp, Cannabis indica
aataatcaagtttggcaaactttgtttgaaacaaagattgcaattttattaatgcaaattaactaataaaatagcttccaaactaataggaacagacctctacaggaaagacggtcaggacatgaactagaagaacaaactaaccaattagccgcttggttcccagaccatttaacaaattgaattaaaatatgaaacatcgaaaaagatcgtataagactaatacaatctgaaacaattaaaccaagagaagaaaaaatttacctattattattattaaagtttggcaaactttaagctccttctacaataaaattaataataccaattattatgtcattgaattctttaattgatcaagtcaaataaagttgacttttataaatatatacatatatgtatatagtagtattaaatcttgattccacaatttaaaatttagaaaagaaccaagggcggtccaataatagtttgggttacgtggtaaatatgtagacatcgtaaaagagaagtttatcaaaataactagtgataacgatcaaataagtatttcttgcaaatatagcaaagaattttgccttaaaactctaacaactactcgtataattttgtctaatcttagtaagttgccataatattattaatttatgcacataaatacttatctaactaatttctaattaaacttgttacaatgacatcgacacaaacaaatacactacaataaaatacacaattcactttagtcaacatgtcagttaactccgtttattgtccaacactattaaccgtcgtgaagatgcatgtgaaatgagtttcaatattttaaacattcatctaataatgaaataaattctataaattaaatatataaaatgtggtggaaaggataataaacttttgtattggtaaaatgttataggaaaattttataatgcaccccttaaaagggatacaccgatacatctctatctgttttagtatctgaaataattcaaattttttctcatggtcatgtaaattatagttatttaagatatcctgcaaaattttaagaaattcagaaaagtttaacaagccgaaaattacgttcaaacagtgtgttgcacgcgtgacttttttattttatatacgtgtaaaatagagtgtttgaatatcgttttctatatattgtaaattattctgaatttctcaaaagtttgtaggatata

SEQ ID NO: 320151 - DNA, 1223 bp, Cannabis indica
aaaagggtgacacatggacacttccctaaatgaaaacggagaggtacttacggaagttccaaaagtgtgacggaaggtatttttaccgcgtacgacttaagtatttatctgctactcgggataaaacttaagtatttttaccgcaaattactcttataaaaattattaattggactcctatattgttaaataacaaaatgaaccttatatttttcaaaatggtaaaaatatgacctaagttcaattttcaataattttatttattaatataacacattttaagacaatttttaacacgaacagatataaaaaatataacaaattttgtcataacatctctatattaaattattattaagttttgacaaaaaatcagttcatggtcttatatgtacaattttagtaaatatagagtccattttgtcatttaataatcttaattttactattactatatattaagattatttgtttattatcatactaaaaaaatagcattgctattaaatcatatgggacctaatagttagttaaccaacaacgatattgacactgctaggcaggtgccttttagccgggcgaagaggggttatgttagcaaatatatatacataaaaaaaaattaattattatgtaaattaattaaactgtttttacgtttaattatataagattatttttccatatatataaaaactgttgccgatcgatcgacatcgattacgataactgaattaatagtgaaaataattattgttactcctttagtaaagtatattttcactttatacataattttaaggggatcgatgcatatattatagaatttttctatatagtcttatgactaataactttatttttttccggcaacttctttgaaaaagaagaagattatatattttgcaatattaattaaaaatcaatcaaatatttaaagagaaaaaaagagaagaaatattgtatcgactatgtataatataattaatgatgtacattggtatatatttatatcatcgtggaccacatatacgaggtaaaagaaacgtacacatatactatactactactaagttttcatataaatatatatatattaatgcagtattttttattttcttaattatcattatattcatttattattatatcacttacaaaaaaattttaacttttagtctaacaactaaaaatttgtagtattaaaagtaaaaaaagttgtg

SEQ ID NO: 320152 - DNA, 1399 bp, Cannabis indica
tttttataaatatgtgtggactggattggatcggttacttttactgttttacatgtcaatcaacatccaattcgcacaagtacagattttaaattttccaatccaatccaatccaatctacacattacggatatccgcactttgcagattagatttgatcggctatcttatgaacacccctatctgagtaaggcatatgatagagttgagtggggctatctacaagcaattctaaggaaagtgggttttgatgagcgcatagtttctctacttatggtttgtgtaacttcagccagatatcagatttgtcatgccggtagaatgtttggttccattattcttggaagagggttacgacaaggagacccattgtcctcctatttgtttattatatgcactgagggcttctctgcactattaaaacattacgaacaacgtcatctcttacgaggtattcaggttactcgtggtgcaccgatgttgtcccatatattttttgcagacgacagttatatcttttgcaaggctaatgagggagaagcaaccaatgtgttaacactattaaatgtgttcgagcaagcttctggtcaaaagataaattttgataaatcttccattttcttcagtcacaatattgatgtccacacccgtgatgcaatctgtggtgacctaggaattcatgaggcagatgatcacagaacttatttgggtcttccgaatatcattggccgtaataaattagaatgaaatggaaaataaataatttcattctattcctttatttggttacatattaaagtattggaataatattctaatgaaatgatctttccacaattttggtggaatgactattccattttaaaatagaagaaaatatcattcaaatttatgagaaaaaaattaattatttttttattaattttttgatgcattttaaattttattctattctttttctaattctgtttccattctcattgttataattttgggataagatgaatgaggttccatctcaaaaccaaatgacaatggaaagagtagctcattcctcttatatattctattatctttccacacattaacgatgtgagactatttaactaataggcattggcatattaaataaaaaaacattggcatatcaaataaaagggcataagtgtaattgtaataggggtattgttattatatataggacttaatagtgaaggaaaagtgtgtgaagaatttggttcgaatcctgagttttaatgaaagccattccgccattgttatctaaatactactgctctttatgtattttctgcatttgactaattctgatagaaaaattcctattactaacatccccccaagatggtagctattttatttgctcaccatcttggacaac

SEQ ID NO: 320153 - DNA, 1922 bp, Cannabis indica
aacacctagagcttaacttgccccacttctcaaagaactttaatcccatcattggtgaaactcgcaggaaaacatgttctcccacctaaaactctatgtctctacacttaggatcagaataacttttctacatgctttgtgaagcaagcattcgaaccttgatcttgtccattgcctcagtagtcctctagactaacttaagaactaaatattatttttttctccagtcttgtcccaatgaatggggaacgacatttcctaccgtacaacattttgtaaggagccatccttattgtactttgatagattttgttgtaggagaattctatcaaaggaaagtatttactacatgaaccctcaaagtccatgacacaggctcacaatgaatcttctagtattcgtaatgtcccctcaaactttccatcattctgagggtggaaatttgtactgaacttcaacttcgtacccatatctctctaaagacttacctaaaacttttatgtaaaatgcagatctctatctgaaatgattgattttacagctccatggagacaaaatatctctttcacatataattatgcatactgatccactatataggcggtctttattagtagaaagtgtgcttactttgtgaaatgatccactatgacccatactaaatcatgcattctcgtggttctaggcaaaccaaccatgaagtcctttataacatcctcccacttccacatgggaagtattaatggttgcagtaaccctaccaatttctaatgctttgccttaattttgttgacacattaaacatttagatacatattccactacatctttcttcacctccaaaaataaggtttaagatcttggtacattttggtgatacttggtgatactactcaaagtgtttgccactacattggccttccaagggtgatacaaaatctcccaatcataatccttaactaattttaactactgtctctatctcacatttaaatctttctgagtgaagaagtacttgagactcttgtgtcgggtaccgctactcatactctttcaactgatgagaagcataagcaatgacactattagcttgcattagaatgcaccccaaaccctgtctcgatgcgtccaaatatgccgcaaacttttattgatttgatggcaaagctaacactggtgccgtgatcaattactgcatcaactcttggaagcttgtttcacacttatcgggacatacgaaccattggttcttcttactcaactctgtcaatggcattgaaatcttagaaaacccttccacgaatcatttgtaataccctaccaatccgagaaaacttctagcctcagtaattgtccttggcctcggtcaattcttaactgattttattttacctggattaaccataattatgtccttttcgatgatattccctaggaaggacatttgtgacaaccagaactcgcactttttgaactttggatacaactcatgatctccgagtcattgtaaaaccattcgaagatgttttttatgtttcgtttctatctgagagtacacaaggatgtcatcaataaatacaataacacaattattgaggaaatccttgaacactttattcatgagatccataaaggttgtcggggtatttttcaaccagaatgacatcacgaagaactcatagtaaccatacctagttcgaaatgtcatcttcaaaatgtcttcctcccaaattctcaactattgataacatgaatgcaaataaatcttggagaaaatagccttaccctaaagttgatcaaataagtcatcaagcataggccatggttaattgttctcgattgtcagcatatttaattcccaataatcaatatacagccaaagggacccatccttctttttcacaaacaaaactggagctccc

SEQ ID NO: 320154 - DNA, 1255 bp, Cannabis indica
gaacactctagttttacaaataaaacactcttcttacaaagatagatatgaaaatatgagactaaaaaaatccctgatttgtagcatcaaattcagattttgctgctgcagatcgggaaactttccaaaaacaaccaagatcacaatttggtcttcaatacctaccaaataaagattactcaatttactatatacatattaaaaccaaaattaacatttagagaaagatagtcaaattttcaaaaaataggccactttccagaaaaagaattcattctcttgtaaggcaagtttcctaaacaaaagataacagttgtaaataaaacttttcctaaaagaaaagagcaatcaaagccacaaaattaacacaaaataatcaatatttaatttacaataaattaaaataatattttgacaactaaattgtcaagaaaaaacctaacagtctttgcctttggcactttagataatcaaaatattttaaaattttcaaatacctgtaaaataaagttagcaaaatcacagaaataaattcccccttaaaagcataccattaacacaaaaataatgctaactttaaccaaagtttaacacacaaactaaactcaagctcatcctagaaaaaaggtccagaattgagtatacaacccaacaaattaaaaccatatacttcccttttttgcttatctcaagggccaaagaactcaaataagcgacgaccaactggttttgagatggaaccacatacatcgtgttgggtatgcaacgatcctctcctcaaactaaggaccacatactactcgtgacctcccctccaacaaactaccctaaacatcgatctccatcttgtaccatcgtaatcataaacgggacacgccaattgactacattagatagactttcgatacaatacaccatatagatctttaattatgaggtcatcatattgagggcttctctcacacatcgcatatgcaacccactactcaactcatgaatttttagctttgatactacttgttgggcccaattcctccaacattattgggcttccacctcattttaactcccacattaatatgatattgtccgctttgggcttctcacacttttctttttgggcaccttctcaaaaggtctcatactaatggagtagtgtccatccatatatacccatgatcttttccatttccatcgacatactcaaactgaggaccacatactactccattagtatgaggccttttgggaaggt

SEQ ID NO: 320155 - DNA, 989 bp, Cannabis indica
gcaatgatatccaaatatgaagtgttgatattgtagtagataattccagtacatacagctacacccaagtaaaataccatccttagccaataatatccaacatctcttctcatatttacaaatgaccgatctgttaatgtgtacatttgtttccaccaacttgatttgcttttgtttgataacacaatcacttcttcctaaaaaaacatgatcaacatcatcataatcaaattggtcatataatgtcattaagtttagtcgtaagtaatattttgttgtgacttaaagattttttttaatagtgatgatcattaaaatgtgcatacagttgaattaattcgttgaatattgtctcttgtaagtgttgcatattttgaattattgtacttgtggatgagaatttcttttatatcttgtgtggtcatctttcctagtgaaccaactgatatggtagattcctgtgatttagaaaatagaaaaagatgttaattaaacactttttatgataattaatcgaaaattatgtacttgaaaaaagaaattaattaagaaccgattggtgtgtagaaatattgtcaaagtctgaattaacacatcgaaggaagtgatctgtaggatttgctcttataggacatgggaacccagcctctgcaaagaactgtgtatacaataatatatgaattaatgtgtatctaattttataattatgagatttttttcaaaataaaggggaattaagagcattagttaccaaaagagtttttgttagctataaataataaagaaatacattagaatatttatctaagagtaagaagataattataactaaatataaatatattagacaagaaaaatcaaaacaccaaaaggtatcaaacacaataacaataataataaacagtacttataatactacatcctaataaaattatttttaagtaaatatgatatttatacatatactactataatttaaaataaaatta

SEQ ID NO: 320156 - DNA, 582 bp, Cannabis indica
ttttattttttaatttttaggctacattatatgttattttattctttaagataccctgaggttaccttttcttttttataattttaagctatattttgagttgtggaaaatatatatatatttgtgatataaaaacgatgaagaagataaaagtaacatttctctttcttttataaattgttaacaaagaagtaattaaatattatatttgaacaaaacaagtataccatttaattttttgggttactacaataaatattataatatttcacatttgaaaattttctagtatttaaataaatttactttgaataagtaacactaacatattttatacagcagaaaagatgttatatttaaaaatttggtttcttataagttattttagaaattagttagtacttgaaaattcaattttgtagtaaagaaactcttcaaccgtttattattattattattattaaaaaaaagataaataccattttggaccctgtattttgcaaaagttacaaattggatcttgtattttgttaaatgacaaaatggaccctctattttctaaaatagtaaaaataggaccct

SEQ ID NO: 320157 - DNA, 1935 bp, Cannabis indica
taagatgttaagttagttacgacttaacgaacttagcaaactccttgtaacaatatctcccacgtcaacttaagttaaagtgacttctggattagacgtatgcttcttgaaagaaagaccagagcgtacgataaagggacttcccatataggaatggcatagctggagtcgattatctggaacttccttccaggaaggaacaactagtcattcagaactccttttcggaggaagactagctttcctgaagactccttccggatggacaagttagaattctaagaacaccctttcggatgacatttaactttccataaccataacaacttttggagatctttttatttggaggaactataccacaaattcctcctagtttcttcaaattaagatatgatggtgatgaagaaagaaaacagccatcatagttggtgttttaaatatctcagtatactaacttctaagattgatcaaatccaagcaatacttaaacttggtagtcccaacatcagcatgattatcttttgatctgaccttcgctaattcaaccaatccttattctatctttctctaatccagtaaaaataatatatatatatatatctatgtgtttgttctattcatgataaattagattcttacaaagatggatggatgcctgattatccatgtacataatcactcctcctattaaaaatttcaattcatatagagttcctcgaagccataaagcttccttgaacgctttcgtagtggccataaattctactttcttggttgaaagaccaatcacggactgtaactaggcctttcagcatatacaattttggtttgtcatgaatacgtaggaagtgggtgattttttagtatctttattcgaagcatagtcagtgtccacgaaattttttaactcaagttctcatttttgcattctcataggccagaccataatcccaagtgccctttaagttccttaataaccattagagggccttctaatgttcaatgcctggattcgacatgaaccgacttaggatgcttagatcatgagccatgcccttcatttcctctttctcttgtgcactattaagacattgtttgttcaacaagatgaactacccatccaacagtacaaatatactctttgcgtcttccatgttgatcttctgaataaccttcttgatgtatctgaactgctttaagttgattgtctcttcattcttgttctttgaaacttcaatcccatgtatcttttgaacttgtccaagctccttcaaattctctcttgagcttggctttgaccctcttgatcacagatatttctttgctcatgatgagcatatcttccacatagagtaataagaagacagttgtagattgctctagattcttgtaatataagcagtgatcatttgccgattgtttgaacccgatttgttgcatataagtatcaaatcttttattccattttcttagggactgtttcaaaccatataaggacctattgagcttgcatactaattcaactcctttcacttccacctaaaacctagatgattgcttcatgttgatctattcatccaagaatccgttaagaaagatagttttaacatcaagtttttcaacttaaaactccatttgagctgccaaagataacatcaatcttatcgtcttgtactttaacacatgtgagaagatttcgtgttattaattccttccacttgagtaaatcccttagccactaatctagctttgaaccaaacctgctcattctcattgattccctctttcaccttgagaatctattttcactccacaacctttttgttatccggcttcggtacaactatccaagtcttgttcttctggagtgaatccatctgctcatctatatcctggagccatttaaactttgtttctgctggaatttatttt

SEQ ID NO: 320158 - DNA, 1891 bp, Cannabis indica
atactactacaaaatgtctaatttgtgtcactcaacgcgtcacataaaaatagttgaccgacacaataaataaccaattattttatgcttcaaaggataactaaagctaaaaaaagctcaataagcgtcggttaactcttcaacactaaaagagaaactgaggaaaaaaaaattgaaaattttaacaaatatctttatattttgtttcggatgacaatagacactaattgtttttgcttcagttagaaacaaacgctaatattttagctagtgttatccaccaaagcaaaatgttttaatttttttctaaacccccttttgacaaataaagctatcatttagtcttcatcatgttttgaaccctcgcacatccataatttctccccttcgcctctttaataaccaaaccacgaagcaggccaacgacgcaccaaaccaccgctaccagcagcccgagacccaatctcgctcctttctccctcttcaaccctttccactctatctctctctgtcggatctttcttcactctcaactcaatctccttccatctaaattacactgccattatctaagcagtagcattagttaaatacataactataacaagtcaggaccaaacaacataaacaataacaagtttgaaccagtatgacattgtaatatatcaaacaccacatctagatcttcatactctaaatcaggtatattctagctatgattaaatactaaaaactaacttagtttattaatcataccaaccctttagacgaaaagcgcattaacccatcaaagagcaataagaaaaagaaaatgtacaaattaataaattgtatccaatatccaaaaaacaacactctacacactttaacaaaaatttcttttgttgtagtggaattgtgatatgaagtccgaaaccaaatcattcaaaacaataacttaattcatactaaatataaaagtcttatttatctagcgaaattcagattgatcataaactttaaggaaacaactaacagagaccattaacttcataaaaagccatatcaaagcagattgtacaattgataataatagaaagctcaagacaaagaagcaatgaaacttacaatttttttgtgtgaagaaaatgaagaaaaccccaaagctcctcaccaagacggttccacaaatccaaatgactaagttatcggtgcaaatcactcgaatagcacgacgagaaacacttctcattttatttttctatttcttagcttcttgcgttcaatattttttgggttgtcggggtggaggaggactggttgaccacgaccaacagtgcctaatgacattgtaataactgtctccataggggcacacatacatgtgtctcctatggagtcggttattacataataactgacttggtaggcccttcaaaattacatgtgtcctctatgaagttgattatttaataataaccgactcgatagactttttcatgagagcaaaaggctttgactatcctttttatattacttagcttaaataaccgtttttaaaggctaattttgtagtagtatttttactatctctgtttagtctatttcgtagtctaatcttccagtattttccactataggtgaatactcccatatttgtaagtgtatgttgttgttatgttcgattgcttatttttggtattttctaattttctctgataacatgggaatttacccgccaaatacattggaccttttatcagcgtaaatttgtaccgacaaaattatatgaactctagaaatttgtttgcgccaaatggcagtttcttttatcacttttgtcggcgcaattgatgaaccgcagcggtaaaaggggaccttcggtggcacatatttttttcgacaaaaaatg

SEQ ID NO: 320159 - DNA, 518 bp, Cannabis indica
atatatttttaattgtagtatataatttagtcagtatagtatagtatatatatatatatatatattagtaatataggttgttaacattatttaccctaaatttagtattaagtaaatttgtaatatgggctcgtatgtattgtggtttccaattagagattattattattattctaaaagtcaatatatattatcttctatcaaaaatgggtaaccaaataagtaccaaaataaatacgaaaatatctaaattattcaaaaaaagatatccaaaaccataatatcttaaattatttgttaaacatattttcttctattttaataataataaattcatttcaaaattaatgtccactttcctaatcctcatcaaatatattaaaaaacgattttatatctatctatatatctattctatataaagtgtacctatataaccgaattcttggtttatgagaaattcgtgggagactttttatttatattaaaaataaaatgatttattattaaaaataaaa

SEQ ID NO: 320160 - DNA, 681 bp, Cannabis indica
ttttgccgcaaattactcataatttaacaacaactttatttgaaatatgcaaatcaaccagatgtcaacatgttgcgtcaatcgaaaagagatctaacaacaacacgagaataatcttcaataaataaaataaattttaaaataactacaaatcacatgtacatcaactcaaagtattatcaaagtaaaaaataaaattagacatcagcaactgtaaattatatcaatctaaaataaacaataaaataataacacaaaaaataataaaatatcagcccatatacagttaaagaaatatgtataaattatcattaataaactaacacacagtaagaaaataaggaaattatatatgcatatatatacatatttaggggttgatgggaaaatttaattaattatgcttatattagtttaaaaaatttccccaaaacttataatacccaagatgtgtagcatatgccaacattttagttatccccaaaatacgctccctatttaaattgtaaagcccgcttagtttaatttggaaatcagcagttaattatgattaattatgaaaattatttatagctatttaaataatttattatattgttatttatggaattcagaaatgcatttttatgtcattcagtagttttcatattttgtcattttcggtgcccggtattttggaac

SEQ ID NO: 320161 - DNA, 903 bp, Cannabis indica
caccaatcctttctcctatttttaccccaaccatgtagacgtggttgacgttgattagtctttctgcttaatcaaatgtgaataataaataatcactaattaattattccgccacttaaataatatatcatgtaaggttaaattaaatgttatttatatgaaaagaattatataattaaataataataagaataatgttatttgtgtgggaggaagcgggtgggggtggtgagctgccaccgattgaaatattgaagcattgcaagaaaggtgtttggatgagtgacacgtggagtgcaaggttgacagacacgttagtaggttagtttcaaagtcatagggccaaagagggcgccaccaatgcctcctttggtctctttaatctcatttgggaatttcaaattcaattaaacaattcatgttttctgtcccttaatcacattacgtggcatctgatattttttcttccctacgtaggacccatttctaatcgccaaattatatcttaatcagatattaccaaagttggtcagatttttataaattattctgcatattattttatacttttatcttaccacaatagaatcttttaacttgcaaacaatctataacctcatattttgtctacgtttatttatttatgaatttaatcttttatttgagcaatgctatgaatccaaagatgatttttttttttcttttaatgtatcttaatattaagatttaccaaaaaaaaaaagcaaaatgaattaatttttttttataagtaaatgaattaatatttgtattgttatatttaggtgttatttgatttattgtgatgattacaagatttaatttgttgttggaataaatattaaaataagtgataaattcataaaattgttcttattttatttt

SEQ ID NO: 320162 - DNA, 2564 bp, Cannabis indica
ttcttatttacaagagttcttcgaagctcatttgaatgttaacttcttgactttctagggttgtgagcctcgctagggttgacgggatgaggttatagcgaaacgagcacctcgcttacttggtctcgagcccattcgacacttagtttgtacactaagggcttttgaaattgatatatgtcgctttcgtcttccaatgtgtactatccttgatgcctcgcaattcgcattgagtgacatatggtttctcgctaacatgctaagtaccagtttttatattaacttttcgcctaagaccttacagtctatatgttacaaatatactctgatattttcgtaattaatgagttattctataaaaagcgattgcaccaatccatattcccttttatcttgacacgtgtcctccactgagatggcaaccagattttgagtatagcagtttccaatagcaggttgttctactagcactgttggaaccaaagcagccggtacttgtagtggaggcattgcaagaggaccctcctatcatagactctaaatttctttgtcttgttggagaaattgggctttcatttctacaaaccttttctcccaattcggaggagcttggggtggattttcatgtcgaacaccctaaaaccttccacggcctctgccgcgtccacagggatcagaggattttgacctccccaacaacctccagtctcaccatattaccacaacttctcgtgtttcgttgggcgtccgtataataggacttagcctgagaacccgtaagtcaggtaggtcagacagcgatcacatatactctaagtaccgcacttatggattttaaggaaatgctttcaaatatattcataaactattatgcttcctaacatgcttttctaatcacattaattgctaaacaaataaaggcttactgaacactgagttgagcttatttctgacaatgattgtacatgtcttcacgatcttcggtaaaaaacctggtggctgtaataccaaaattgtaatgccttaatgctttggcgcgctacagtgattttctaattactgtgcccacctttgctaatcaaaggttttcttgataatcgtgccaaattaaaaattttgatttaaactttaaactttacactttattaacatatatatttacatcaaactgtgatcccccttttttaacttgacattcaaaataatattttcaaacatgttgcacaacgactaaaaaatacagcccaagtcgtcctgagaccaaactctacaggtcgcactgtcttgacatgtacaatcatcccttaagctctgaactcactgttgttcagccatagcctttcctttagctacacatgaaaataatatctgtgagtcaacaaacttagtaagaaaagcatgtaacgtaatatatattaccgacttgtatctaggcgcccatacacctatccacaaggcttcacagatgagtaagaacgttctttactaaggtacgtccactgtaccacatgcactacgtactgctactgtattagtgttggtagggtttgcactgtacctcgagtaccactaagtgttttaccacatacactacgtacctatccgtactagtgttagtaactgtaccaatgcactcagtattgcaaccatactatgttggtagtatacggatcacaaatagcatacatatattacacatacacatattcatatataaatatgttctatgctagtcttaccttgttccaagctatattgtgtcggccaatctgaacggaaaatcacatgctggatggatgcttatgtcacaatcacgtaaataggtaaagaacttgctaaaagctaatccagggatctaagctcaaaactaaaagttttcccatcaataactagcatgataataccttaattatcgaggaaacgccaaaactaaggctccaaaaatagcccaaatcggcaaaccagatatctggagttttgcctagtgaatcgattaatcggttctacagtacctacaatatggttaaccggttcgtacaagaaaacccaaaacacttcaaaactcagctaaattttctccaatttttctcaaactttccagaacacatgtactaacatcaaacaatagactccaagcagtaacagtaagaaaaatgcataaaaaattacaaaatgccattatttagcctttgaactcaaacttgctcaacacaagaattaggcaccaaaatcaccagattcaagcctaaaacaaccttactgttaacgttagatttgcgttaaccaaatttgagcctcacagtattgatttcacacagaaaaataaaagttgtaaaataaaaatatgaacacagggtttttacgtggttttgcagttaaaattctgcatagtccacgagtcaatcttattcaaatttctgattatttttgagggcttcccctgtatgagttttttcgtctcttttttgatcttctctgtcactatttataattacataggggacagttaattacaaagttaaccgtaatatgtttacaacaatcatccctaaaatcatgggatt

SEQ ID NO: 320163 - DNA, 1188 bp, Cannabis indica
aatacgagaggaccaccagggacaaaccctgagtaggtcaatacacaaccacctactgtgggccatggagtgatttcttctctggttgggatcacaccatgcgtacaagagactgggaacaccagttcagcagccgatcaatccactcccaacgctgaggttccgtctaccactaatgctcagaggccagttgtagacgatcttgaaatccaaaatctccgagtagcccttgggctcatgcaaggtcataataacgcttttcaccatgaccgggaggatctccgtgcagccataaaccttgcatttgacgaacaaaggcctcaatttatagaatggagggactaggagatggaaactttgagggctcagcgggcagccattgatgatcgcacgaggcaggccatcatgctaataagaaagacctaccaagtcaccaatgaccaactggctattgcgtccaggtttcccttgagcggttcagaagggtatgctgctgggcataccacacaaactcacagtggtcaaccgtccactccacggccacaggtccaacttgtgggccgcacggtagacgaccagatcctgctggaccgttctttgggtggagttatacacaccagcttcaccccaactgaaatctctggcgaacttgctggccaaacaagtcaaacaccaaggccaccaggtactcagtgtttgataggttgggtgctgcacatgacctgaggactgacctaaattaaagaaggggtctggacgaacaatatgtcccaccaactgtccaaccaggtatccgcatccaaaatccagttcaaagagaccccaatgtgacacaggccggtcaacaggccgaacaagttcatccatctgtgtaagcacaattggatcaacttaaaaacatggtacaaggcctgaccgacccaaaactcactgatgttgaactcgacctagcacgcagatcacccttctcccctgagattgagttcctcaaattattcccaaagttcaaaatgccaacttggaaaatgtatacaggaaaaaaaaagatcctttgtcacatctaaagtattttgagattcagatggacttgcaaggggtaagaggtgatgtctgatgcaaaatatttcctgccacactcgcagaggtcgcccaacaatagtatttcaaattgtctccaggaaggtttaa

SEQ ID NO: 320164 - DNA, 1090 bp, Cannabis indica
tctctggtttatgtttactgatacttaatcaccaagcatttcaataaaaatatcttcgactccgaatagtactctgcatcattgtttcatgataattcatcttacaaattatatatctctactattatataaatatcaataagctggtgcactgtcttgtattgtcattttcttaatatcatacaaataaattaatagatagagttagacttcattaaatgtaaacatatcttcctcaagttctatgtattttgagcgtactgccgtacttgcttaaaattctaactgctctaaacatacatatatttctcaagttctatatcgataaatatccattccacagaacccaactcatttaattgaattcaattatcaaaaatcaagtatctaattatagttaattaaattcaattaaatgttaaaatttagattctaattaaatttaaccactcagaatgttttattcttaaaattcaattaaaaactaatctaatctaattatatttataatttaaaaaaattatttatatttttctatgtataattaaaaatatatatttagttatacttttagtagtttttttagtgtgaatcgaaattgtaatatttcgttgttttatatatttgttttcataatattttattctatttcattacttagtagtattcactactacaatacaaatctttaaaggtagtttttttttcttcaacaaattcataaaatttgaataaaaatacctacggagtggttatttaataataaccgactccgtaagtgataattttttttaattttaataaaaaacacctatgatgtcggtcattttgtaataaccgacgccatatgtctttatataaccctctccaattatcgtctttctcaaaccctaaaataactagcagtccttcttcctctcaaacctacgaaaccctcgcccaaccatccctttcttctccccatttcttcatttttcatccgtttttacccattttgtgcaaaatcttgcattttttatacctaaaaagatatcccctgagtttgatcgttttttgtttggttttttagagtaaactgagcttagaggtg

SEQ ID NO: 320165 - DNA, 530 bp, Cannabis indica
tctttttttttttcttatgttttcttgatgtcttgtcgcactttctttgtttttttttttgctcttgtcgataaacaaaaagggagagtaattgtttattttttttaattgtatactcaactctggacttgttttccagtggaaagttgagcttggtttatgtgttgaaattctgttaaagttaacatttttatttattgttagtgatgtgctttttagagctaagtttatattttgtgatcttgctaacttttttttttacagatttttgaaaattaaacatattttgattatctaaagaaccaaagaagaagattgtaaagtttttttttggtcaattttattgtcaaaaaattatttaatttatttgtgaatatttaatgtgaattaaatgatattttattgtgtgtatatttagttatacaactaccttttttcttttagaaaagttttcacagagaaagaattttgtttatgaaaagtctaggtgctgtttggtaacacttttgttttttaattttttaatcaca

SEQ ID NO: 320166 - DNA, 1135 bp, Cannabis indica
aatagttaaaattgacatttaaacggttgaatgtgaaaattggcagttttgagaaagtgggatacagaaatgataaaacaggaaagttgcaaaagtgaggcctttttccccaagccaaggccggccacaggcataggttttatcatttaattttttcattattttaatgccaagtaattcaaccctaaccctatgtggtattctataaatagaaagtaatggcttcaggaaagtaacacataattgcatctcattcctttcacagaaaattcctgaaccgccacctctctctcgttttcttcttctttgttttgagatccctaagtgatagagtagtgcccacacacagcaagtagtacctcaatcatagtgtagaagattgtgaagaatccagattcaacaaagaaggacattcgggctcagatcttgataatactctgggacagaaaggatacaagggttagagatctaagtcgaaggagacatattattccgctacacccaatgtatgtttctcataatttatatgtatttacttataatcaatttagaagttcatatttaggttgttaatcaacatacttgtgagtagatctacgatcttggtaaaataattccaacacataccccccaaatgagctaggaatcttggcaaattctcagtcattttcttggagtctaacttctatcctcttttaatttttgaggagtagagtaaagtgtggtttttccctaatttaggaagcacactgtcttcccttacatgatcacttggaggggagtgtcttggtagtgcactggccactcccatgcttccgtgagagaaggccatgggtttcttatggcataggggcttttggttttccagaggtaaaattgggaatgtatccctacacgggcaactcttttcatcgtaaggtccaaaattcatgttgagttctatgaaggcaaacttttgaccttcacgaggaaaggctagaaacgcagaagaaatttagacactgaccttgcttgcaaacgccaaagggaatatgggaaaatatcacgagggagtagaatagacttcaagcaatcccttccattcgtgggagggagtggttgaagatgtatccgtaaccccagtgatctttcttac

SEQ ID NO: 320167 - DNA, 1395 bp, Cannabis indica
aaaccctaatataatttttcatcatttaaacatcgaccccagctatccagcaaaaaggcaaaagcgacacccgctagactcagagagacaaggggcacttaaagaagagatttacaagttattaattattgacttcatatacgaggccttctatcccttgtggatttcaaacccagttcttttcccaaagccaaatggtacttggaggagctgtatagatttttttagactttaataaagcatgtcctaaagattatttcccactacccaggatcgaccaattagtggatacaacagcaggacacgagctaatgacttttatggatgcatattttggatattacaagataaaaatgtatgtcgctgatcaagaatatacaagctttgtaacaagtatgggactttactgttataaagtcatgccatttggattaaaaaatgctggagcaacgtatcaatgattggtgaatggcatgtttgaaaaccagatcggacaaaatatggaagtttacgttgatgatatgttggtaaagtcgataaaaagtaaagatcatacaaaggatcttgtagaatgctttagtatacttagaaaatataatatgaagcttaattcaaagaaattttcctttccagtttcctcaagaaattttttgggcttcatagtaaatgctagaggaattgaagctaacccagaaaagataaaggccttcatcgagatgccctcaccaacaaagccaaaagaagtccaagctttgatggggagaattgtagcactaaacagatttatctcaaagtcaactaataattaccttccattttttaatgttttccgagttaataagaaatttgaatggacaaaaaaatgtgaggacgccttcaaaggcataaagaagcatttgtcaacaccccccaattttggccaaagcaataggtggagaaacttcatacctttatctagctgtctttgagtatgcaattagtgcagccttagtgcgagaatagggtaaacaccaacaacctatttactatgtctgaaaaaggttactgggggcagagtcgagatatcgcctcttgaaaaacttgcattatgcctaattcatgcatctcgcaaattatggccatatttccaggcacacccaattaaagtattaactaaccgaccactaaggcaagttttataaaaacctgatgcttcacgaagattgataaaatggtcgattgaatcaggacaatttgacataacgtacaaccttagaacatcgatcaaaggtcaagctttggttgactttctaattgaagggataaactcagaagaagacccagctattgaacgcgaaacagaaacatggaaaatatatgtagatggggcttcaaatgagaatggctcgggggcag

SEQ ID NO: 320168 - DNA, 1364 bp, Cannabis indica
ggctgctcttttaatagatcatttgggaaaatcagaaacgtaagaagattgaggcaagtgaataataaatatgtaagtatttatctataatggattaatctaatatttatcttctcttaacctaaaatcgagctactttttctacctctgaatcttctttttgcccataccatatttatcattttttttgtactctgttttttcatatctaattttcctttggttcaacacaactctttgattccagtaaaattaaaaaaaaaaaatctcctcaaataaatgcataatagccccacaaatagactcctaaagtataatatggcatttttctgacacagtcacgccagaatttctgatgttatcgagctttccgatcaattctctgatgacaaagctgtcgtttgagatgttcgataactataagactatctcggagggtgttgcggcggccgctaagctcggcggcggtgggaataagagagttgtggtgtatatgaaatttggtgtttataacgaacgtgtggaaattgggtaagatgtgaagaatttaatggttattttggatggtatggctgctactgtccttattgggaatcgaaatcgggttgatggtgccacttttggtgagtataatctatgcttataaatatatatgttacacactattgatttattgttacactatattaatctacatattatattatattgatttattgtataagcctaggtatttagttgtttgataaatgaaataaaataaaaattgggattttatttttcctttttatgttggtaatctcatagaattagtgcccattaatggaggtaggtatgttacgacccttcttttcattttgttcatttcaaatttcactttgattgagaaaagagtactttttatgctaatcaagatcagtaaattggtataactgttctttttttctttcattaactattgcaaatttgtcatttttgttcaaaatctttggagctcacgtaatgagtatattaatctggtaaattttaggcacttttgtatgttactatagaaatattcattcttttgtgatttatgtgcatttgggttataggacttgtttgaaaacaaagtatagtaatattgatgttaattttgttttgtacttaattttatgcagggaataattactggcaaaagattttttatttggtgagttttctatcttaattttcttttttcttgtctctgtcacatttgatgtaattgtgtgtatttggttttcggttgtttcatacatatatattagaaatggtagtaatagtacttgtttgatttggagtcaaatttgaattgaaggggttcagttataatctggatttta

SEQ ID NO: 320169 - DNA, 914 bp, Cannabis indica
taaaaaaaaaaaaaaaaatcccacaatagatttcttaacaaatgacttccaaaattaaattacagaaattagttatataaaacaaccaattaaaaatctgatacaaaaaaactaattacgtaaaataactaaattaaaaagtaacactcatatagaaacaaaacaactaaatcaaaaattaaaatttaaaaccaagttgggtaaatcaataaaattaaaaattaaaaaagagaaactagttacctaatagctaactaaatatcctaaataaaaacataagacaccttaaacatgaataatataaattgaatacaaaaatattagaggtgatgattatttaatttaactaaatttaatgtcttattattatttttttacataaataaagatattattgtagtcccttttgaaattgaatgcttcaaatactacatcaaaacaataataatataattatgatcaattttcatagcacatttattattttatttttgtttagtagtactagtagtcccgtgattttatttttgtatatatatgagatatattgattaaatgaatgttattatgttgaactgtaagtagatagaagtttaaatttttgtaattttggtgggagattgctaatgtggtctttctaagggactaattaaaccctctccaataagtttggatctctctctaccctatcattttgggtacttcaaatttaattatgtaactttttatatatatatatatataaatattataggtgaatgttacgtataattagttttaggagaattatctcatatattgtttttttaacttttttttagttcaaatttacagtttgagtttctaaagttgtttctccggtggtttctatgtgggttgctatacgattttttgttgcagcgctagttgcaata

SEQ ID NO: 320170 - DNA, 1600 bp, Cannabis indica
tttttcatgttttattttgcaataaaataacttagttgatacaataaatatatattcggctactattgatacttgattggtctatatatacaaggcattccagacaaaagttaaaacattgaaatgactacatgacatcacgttttttactcattaacccactacccattaacatcatcaacacctagatgacgtttggttagaggtaatgaaatggaaaataaacaattttcattgtattcttttgtttggttgcatttaaaattattagaataccattatgatggaatgacctttctatcattttggtggaatgactatttcattttgaaatgaaaggaaatgtcattccaatgcaagatttgaaaaaatttaataattttttttatcaattttttatgcattttaaattttattctattctattcttaaaacgccacctaaagaataagacctaaagagtaggacaaaatattgaatcaacaaaaaaattaaacaaactacatgactcattaatttaaaacatcaacacgtgctccacactttaactacgtgttccacactttaacattagttaagaaaaaaaaaacagcaactaagaacacaaaaaagaatttgataatttgatgaataaaaatatctggtattattcttattttcctagtgatcacaatgaatagtttcagtatggaccaagcaatattcctagaattttatcctagtatgtatgctagtcacaaaaggccaattatgatgaaatatgagttctactatctcagccatgtagttcttctacatgctatttcaattgatgaaatttttactgatattttcgaccttatattcaaaaagtctagtttcagtatttaaccatttgttactcttagtcttttgattgttttgaattccagttggaatttttatttttttaaagaatgagttcaggttggatttaatttgttttactttttacatttagaataaaagttttacctctgcaatttttttttcatgttttattttgcaattctataatctacttaaaataacttagttaaggaagaaaagaagaaactaagaacaaaaaagagaatttgataatttgatgaacaaaaatatctagtattattcttatttccctagtgatccacaacgagtagttctagtatagacgaagcaattaatattcctagaattttatcctagtatgtatgctggtcctaaaaagccaattatgatgaaatatgagttctactatctcagccaagtagtttttctacatgccatttcaattgatgaaattcttattttttaaaaaccccaattgatgcaatcagtgacgattgacgaagccagaaattcaacttagtgaagaattcttgtagactgggaaagtgtgaactcttaaaattagcaaagctaactttcgatatttgtcaacggttaacccagtgttaactctaagaatcaacgtttacaattcccggagacttgtccaaacattttggagaccggtctcatgatcgcccgcaagcaaagtgttggataagtagggaaagcacaaagggtgagacatcactctatgaagattttaaaaggt

SEQ ID NO: 320171 - DNA, 1139 bp, Cannabis indica
tcttagttaactttcgtatttaaaaacacatatcgaaatattttttcagtgttcgtcatacttatagcatcattctcaaaaatatttgaaataagtttttagttttttaaatactagtaaactataatatcatgaattttattttgagtacggtaaattatttaaaaaattttaaaattttacaagaatattactataaaaaaatattttcgaacactgaataagcactcctcttttattaataataaaaaatgaataataataattaaaaaaattggtgagtttgtggttctagtttgggttctgagctaattccaatgactaattagttgattttattgtcacaaagctccaacgtagaaatttctacttttgtttacactttacattattttattttttatttttattctttcaatattctttttttcaaacaaaaagaagattcttttaatattctaatttttttttttcttattataatatttttttagtctaaaaagacttcatttttattgagattgaaaattaaataaaattacaaaattaaagggtgacactaagagcataatttctagtacaagttcttaataaataactcaagatatatagaatacaaaaacaatcaaatagtcttaataaagaaaaattatttaaatttttattacaaaattgctatgaagtttacgtttattttatgaagagattttactataaatgttattaataaaatttattatttttaaatatttgttacacaatggtaataattacaatattaattgattatgtaattaccaaccgtcttgccaaatataataatagaaattcacatgtaattaccatttgatatctaaacgcacattatattttgaaatataatgtagttactatgaagtataattactagactagtaaccataatgcaaaataattacacacttactttcaaacgcaccctaaaattaattgaagatttttatttccttttccattaaaagattaatagtgacttttcttattttaccttctttcaaaataaataaaatctttttagagtaagggatatttatttgtgtccataatttataatacactttaattaaaataaaataaacttaaattaattagaaaaaata

SEQ ID NO: 320172 - DNA, 1110 bp, Cannabis indica
cgaattgaagatttaaaatatcagtaattaaaggtgggatttttgatgggggtgaaataaaaacacttactttgatctttcgtatgtattcatcacggaactgggtgacatgaccatggtacctatccacaaacaagaattttcgaaggccatactttcgaaaattgtgagaaatacatataagagaaatggcagccacaagagactgagagaccagaatttgaagctcaaagcttttgatctgatagttctcacagttggaacagtaagagacttggattattaagagtggaagtgcaataccaaaaaggaggaaggagacccatgagaaagtgaagctgaaaaatgagttctggcagaaaccaaagagtgtaagaaaggtttctaagtgatgaagatagtgattgatcaactgggtattaagagcatcacttgtatcttgtataataattaatggagtttcagattctgtgcttctacccatggaattattggagctctctctatctacaagggaaaaaggaaaaaggaatagaaaatggttttgcttctttgggaaagtgttctaaacacttgttgtctttttaagctgaaattggatttacacttcgaatatatatgtaattgagttcgaatcaagacaaaataattgaacaaaaagaatataaataacttgacatatgaatatatgatgatgggtatgtgtttgggattgcatgaccactactcatgtttgcaaagtagtgattagcattatcttttataaataaattatacattcaacttcaaatcttattggcacaaaaagttatatatttataggtatttgtcctttgaagaaaaaaagagtagaattgtctgtgtgttttatttccttaatttgagtaatttagttactaacctttaattctgtagtaaaattatgataattagataaatattatgttaaatataaatggaatgttagatacttttttttctcatgagtattaaatttggagaattgtgtctccctagataatgataaatataataagaaattattaacatgttattgagctatataattatacatatattataacatataagttttttattttttatttt

SEQ ID NO: 320173 - DNA, 1113 bp, Cannabis indica
aaactatttctaatgagactgaatgtaccaaaaaaacttatctgctaaaaatgtcgttttctagcgaagcaagcatatcatttgaagttgcaaaactcgaaaatttctattccaataactctttaattttaataactcaatatctttataactctaataaccaataattaaaacactccgcgtcaaaaaaaaaataattaaaacactcaaaaaacccataaatagtataaaattagaatactattattggacttattagaaagataacttggagaaaataaaacataccgattcacaatatataggcctaaatcaatttaaaattttatatgtaattgcataaaagagtagaaaaattaatgtgtattaattgagtatacaatatatacaagtattgttcatggttattaatggtgttcatcagcttctatatgtggcgccccacgattagttagcgatagtctttaaaaattattttttttaaattatatgggatctgatacttaattacaccaatagcggtatgacaccgaagatggtgctaagagaccagtagtgatgccttttagcaattctcaatatatactcatgtgtcacattcgtacccaaaaactcacccactcaggaaatctgcccgacctgaaacactcgaccccccccccccccaaaaaaaactaaaataaaacaggtttaaaaaattatagggtgtattcgggttacacccagttaccgacggggccgggtaggttaaaaaatttcgacgcttgaaaacccagatcaaaccaaacccacttgaaaaacctattttttttaatatataccagaccccctctgcctttaaaaacaaaacaaaaaagtgatattgtaaaaaaaaaccaccctgacccattccaactcgcactcgatccacctgaacccgacacttgaaaagccggtcgctcacacaagcattttggcacctataaaacacaaatctaaaattcaaaaaaacccgatgtgtattttagtccccgcttcaagcctccattaggtccttacacccatggaataatggttcttatacacgagtacgtcactctggttgcttcgtggactgatgactgaccctacaaa

SEQ ID NO: 320174 - DNA, 1126 bp, Cannabis indica
ttccagatctaaatttgggtgtttttttttattatttcaaaattaaaatactgtgggtttaggtatgtttacctcttttgtttcctttgaatctactttaaatgttgttgttgggtcttaattagtcgtggaactaatttttcctcttcgtcgaattttatgagtgtttttttggtgtttctattattccggtgttactctgtccgcctccaacgagaaatgagacactgtttgtcccttgttactgttcacagtataaaagaaaaaataatgggcctggacattataaaggaaaaaaaatgggcctggacaggaaaaaaaaatttctgctgtgtgacaatatttttgtaaagatagataaaattgtcagtatttttgtaaatttttcaaaatttagcacttttttcccttttcaaagtgaaatcacctttttttttatgaaaaatggatgaacacatcgattattgattttcagttttctgaaattaaaaaagaaaaatgttatcacatcacacacttacctacgtgagattatggtgaaggactatactaacttattcagtcatccaatctaacatgtctaaacttccattaaaaagaaatctaacatatctacattagattgaaaaaagggtcgaattctatatttttatcaagttggatatttataaaacttacataatgatgggccactaacaaaaaatacactgacaataatagcctaacaaagattggactattttcagcctactagagaagcccattgtagttccgccacagcaaataagacgatgtgaagtgaactatatgtaggtggatatatatatggaaaacttacaaaaatattataaaatggttaaaaatttacaaacatgacatgaatttttttatatatatatatatactaggtgaatgtacgtgccgagccacgtattgctagttttatttaagattttggtctttttaagattttgaatgtattttatttttaaagattacaaattttttatttgaaaaaattaaatatttatatttgaaatattatttaataatgtatgaaaaataatattagtgtaattataaaattgtaaataaatttattattggagtagtagattattctatt

SEQ ID NO: 320175 - DNA, 2486 bp, Cannabis indica
tgacatttcccaggcggtgtgggattgcacagcttacccggtgtttccccttacggatcacgggactactgactgtcacataattgttgtgaattatcagtcaaacactatacttaaccgccctcttatgtatttataaataggggcaggttatactaaaaaagggatggaaaatcattagagaaaaaaacaacttgagtgtagtatcagaaatctaataagattgactcgtcgacaatgcataattttaactgcaaaaccacataaaaacctttgtgttcatatctttctttttctgcttttattttctgtgcaaatctatcactgtttaggctcaaatacagttaacaaaaatcagtgtacatgtatacattattgacactagtgaaatattccttaattcatagacttgcgctaggccttttcgacttagagcattcgctaccacatttgcttttccaagacagtagagaatctcacagtcacaatctttgaccagttctaactatcgtcgttgcctcatattttaagtccttctgagtgaaaaaaagtatttgaggctcttgttatcggtgtagatttcgcacttttcaccatacagataatgatgccaaactttcagtgcagaaacgatgctgtcctagttccatattatgagtaggataccattgctcatactctttaagttgcttggatgcataagcaatcactttcctagactgcatgagaacaaaacctaatccctctttggacacatcgtaataaatcacaaacttttcatcactaaccggtaaagttagcacaggagcggtaattaatctttgcttcaattcctagaaactatactcacatttatcagtccaaacaaacttatagttctttcaagtgaattctgttaagggcatagaaatcttagcaactccctcaaaaagccttctatattaccttgctaatcccatgaaacttctaacctcagttgttgacttaggtcgaggtcagtctcatactgcttcaattttcaccggatccactaggataccattttttatttaccacatgccctaagaaactcacctgaggtaaccggaattcacacttcatggacttagcatacaacttatgatctctgaggcgttggaacaccatccaagatgtcttttgtgtgtatcctctatgttagaataaattaaaatatcatcaatgaagagaataacaaaattatccagaaagtctttgaacactcggttcatcaagtccataaatgccaccgcagcgttgttaatcaaaaggacattactaaaaattttaggaatatcttcttcccgaatcctcaacatcccttgtaactgaaatttcagtacttttagctatgcaggtgcatcctataaggagcttttgatacaggcttcgccccttgtattaaatcaatttcaaaatcaatttcccgctttggggttaaccctggtagcttctctgtaaagacatccagaaattctcgaaccattaaaccatgtttcggtcccactagtggtttctttgtggtatccactacacttgctaggaaactgatacacccttcacacaataaatctcttgccttaaacgctgagattaagggaatctaagatccttgcactttacccatagatacgaacgattcctcaccttctgcttgaaaagttaccatcttccttttacaatcaacggttgcgttatattttgcaagccaatccatacccagaataacattaaaattgtccagatttaactctatcagatcaaccgacaactcccttccttccataaatactgcaagagacctaacccacctgctaaagataaccaaatctccaataggcagtagagtaccgaagccactcaataagatatcactaggcctatccaaattctcaattactctattggaaatattagaatgcgtcacaccagaatcaattaatacaatcaataaagtaccagcaacagaaagctggccagttacagtggaagggccagcatcagccgagcaagaaaaagtgtatcatctttcttcttgtaacaccctaactagcataggcgtgttaacatgatttttaacgtactgtgcagctcgttgctaatcaacgaggttattgaaaaacgtgaataattaaaattttgctttttaattaaaacataacatatcatacttataatatttcgggatcccgtttacaaaatacaattacaaaagtttgctattcatttacaaaagatttgtcgcccagcgactaaaaaacagaagccctgatgtccggaggatcgtacgctccagacctaactgcctcgacatgtacaatcttcacctgctcgccctcacgactcctcagctttagccttgccgttacctacacatagcaatagcactgggagtcgacagactcagtaagaaaagcataacataataaacatactaaaatctcaggttataataaggcgcccataca

SEQ ID NO: 320176 - DNA, 1572 bp, Cannabis indica
agaatggtgctcaatactttttgaatatcgaccatcgtagtttctagcctttggttcttctaatggagataatttattttatcttcacagtggcaagtttgaaattttggggtcacagagttagctcgtttctcctttctagggcgatgtcgtgaggtactgggatctcgcggtgttagtggtggagggtgccttggtgatgatggacctccttcctttttgtcatacatttaccttcagttatgatgaaggcagttattctattgcgctgctcgtccacgaggatctcttcacaacgattgtcttctttgcttgtttgagatccctacccgcttgcaccctctcctcctacttgaggcctgatactgttcatattttctcttcctccttgaggtctgtcaccattagcaccttcttctctgaggacaggtggagggatgttccgccccaaagcaatcaactggtcaccatcaaggcaaacctccatgttttaaaggcggtgagagcgtctaggcattttgtatcaattgtgtgtaaagaaatgacttggcttaagcttgtcattcctacagatggtgccaaaatgttgatggtgagaactagtcaactaacttgttggctgaaaaatctaactatgccttaagcttagatctaagacaaaaagaaagatgaaatatgaattcaaattgcaatctccaaatggagagaaaatgataagctttcaattgccctcacggtgaagctacaagaatgattttccaaccccttctcatatttaagaaaggggtacttataggctctaatggcctaaagtacaaggtggtcccaaggagacaatgtgtcactttcaggttgcgcgtcgtaggtggccttactcttcgtacctttgtctggtgtcaggtggtccccagtcacagaggtggcccccaattggaggggtgatggctgcaatgtacgcttaattgtgtcctgagaccttgcaggtgcgttgcttccactactcatacctcctcgctctcagagcttgcaagaggcgtggctgtaggctttttccttgcatgtcttgtcccttgattcctcctccaacgtcattcttgtcgatatgcattcgcctctaaccttacactctccttcacacaaacaacacatttgtcactacacaacactttcacgcttacgggcttgtatgcaaacacatacatgcacgctcacacacatgctcacagatgcacacacatccatgcaggcacgcttgcttgtgaggctcttgtagcctcgcatgcaagccctcacagcatcgtagcctcgcattcgagccctcgcaacctcgcatgggaggcccttgcaaccttgcacacaagcccccaaagcctcgcacgcaagccctcatagcctcgcagacaagccccgcatacagacgttaccatggaaatagatgctccaccagggcttgcacggatgctccaccacttgcgtaaaaggctccaagactcacacaaatgctccacggctcacctaaatgctcctctgcttgcccaacgactcatgggctcacacaatgtctcatgggct

SEQ ID NO: 320177 - DNA, 1325 bp, Cannabis indica
gatgttaatgaaacatacttgttagtaaatctagatcttggtaaagtatttccaacattaaaaacttggaacaatggaataaagctactatatgcaagtatgtttgggccattgctaacaaacaaaagaacctatggatctgatgggttcatagtgtataaatcaagaagaaagactagtggaattactctgcctcaattcactcaagctggtattggaagaagatggttgcgctcaaagatcagattaagagcttgactaatcataatgggtttcaaaggcaatcctatactattgcagccggttataagctatttctgcctcctcaaagaaaactgaactggagcaatgaagtgtgggctaggttcaatacacctaaacatagtgtcatcttatggttggctgtcctcaatagattgaagaccaaagataagctcctcaaatacggaatgcaggtacaaccgggctgctccttgtgtgattcaaatcctgaaaatggacaataccttttctttgaatgcagggtctctaaccattgtttaatagagattaaacagtggctgaattggaatgcacgcaccaacagtttgacatagctgattaggtggatcgggaaggctaaaatgtcgagttttagaagaaaagtgttggctgctgctattgcagccctcgtgtacagtatatggaaggctagaaatgctgtcatatggcagcaagcataggtggatatagatagaataattgaagacataaagtggactcttaagcatcggattgccatgttcttacttaggaaaattaaggcaattgataaagattggtttgttgctttgtaatggaagtgtaaagataataagttgattgtgtatagattgttaggcccttgatagggtgctattagtttgtaaatattgtttgtgcaatacaattcattgatttatcaaaaaaaaaaagtaatatactcgaatatgaatatactataatatactttgtctttcgttcttcatataccaccccacataagaaaaatataccactttattaaagtaatatacttgagtatctttatctttcgttcttcatgtaccaccctacataaaaataatataccaaactattaaagtaatatattgaaatatgaatatgctgtaatataaaaattctttggagattaagatcccttcagtacaacttaaaaaagatgaaaaacaaaacataatgtaaccattaaagtttaatttactcaacctgataatttatatcttatttgattaaaaaaaaactaaataaataagagacatatactaattataggtggcgagatg

SEQ ID NO: 320178 - DNA, 1674 bp, Cannabis indica
ggatttaggtttttaagtttttgttttttggttttaacttttaactgactaagtattaagaataaaaaatatttaaaaataatatataatattataagtattaaaagaatatattatattatatgagtttaatgtttgtactttagtttatatagtattcgggtctcggattcacacctgaatcctatttagcagtatgcattttcgggttagacccgacctaacagtctgggttttttttttttttcagttttttcggcagcaagttggggcgggtggtcggatttttgggtttgcgggtccaaatgttcagccctacttgtggtcatttgaactggttttatttgctctattttgagcttttttttctctataaaattttgttttccaataaaaaaataaataataatttacatcaattggggtatagttgttcgcttattttataattttagcaaatatgtacatataaaattatttatgataaaaaaaaatcattatacactaaaattactaaataatgtctatcaattaaaagataaaagttaaaattagaattatgctaataatgtatatcaatatgagtgttttataacttaataattttaaacatgtgttagctcactttataatataaattcattgtgttaaccaagtataatctaatattaaaagtaattattgtaaattattataaattattttttctcattatttcattattttcttttatacatgtcaacttatactgcatgtataaatatttacaagtaaattatttgtacttgaataaacgatttttagcttttatatatagcatgttagctctgataccattcttcatatttcatattattttgtagatcttatttattttggttatattagggtgcagatttcaaaatatatttattcaattgagttttgtactttgtttacatcgagtgcatactccaatctgaaatgcatttattgaattgagttttaaaattgatacactttaggacaatactaaatataacccaagtgtacattacatgcattatttatatcattagtataataattaactgaaacataaatcttttattaaaattttatttaatatttttttttaatttgattttgctatatgaaaatttacttatactaaaattgcattgttataaaattttattttagagtagtacaatgaaattcctatattttaacattaatgtaattttacttttgaaaaaaaaaaataatgtaatttgttttaattttaaaaaatatattttcttttaaaaaaggttttttttttattatttttacacttaaaaataatttttttatatatatatttttacgaaaattcacatagaagttcatatagaaactaacagagtaacctaaattgcaactgaaatccacacagcaacccacatagaaactacaggagcaaccgccgaaacaaccaaaactgtaaatttaaaaaaaataataaaaaatagtatataaggtaattctaaaaaaaatgtaatgtatataggccaattactatataagtaaattttaataggccaattactcataaagagtaaattttttaatataagtaaattttaataggctaattactcataaagactaatttgcggcatgaatacctaaatttaacttttagttgtaaat

SEQ ID NO: 320179 - DNA, 1209 bp, Cannabis indica
caataaatgataattaaatataatacggtaataaaaaacggtaaacttacctaaaataataagtcacggcaaaaaaggaaattagatcaaaataaaggctccaaatataaattttccattaaaatatgtgtgaccttatatttaattatgcaaatatcaatataccatctagttggtgctaaccatcttttgcttatgaggacttatttagtatctttagagttatgagagtgtaaaatagaacgatattaatattgttagattttttattattattatttttttaatattttgacatctcacaatcagtttttcaaccagattgcacagtatgcatattcacagtcgcctatagtatagggcacggtttaaaatcgtcgcctataccctgttataggcgatgattttaaaccgtcgggaagtccacattagcaacagtttttaaccgtcgcctatttttcccattttacgacggttgtataggcaacggttatagcaaatgacaggaatactttaaatgactgtttaacaacgtcagaaaaaatcatttttgtagtattggaaattcctttgtcttttgatgtgtgagtgcttaccttctcttgaagtaagactttgacaagtcttcttccaatttccaaagacccttctcttattcaatgaagttcttcaacctattctaagaatagtgtaagcacaataaataaagactaaaacctagctgaacactttaggttttcacaaaagaaattctctcctcacaaagatgaaaatataaaaaatgaaactagaagatgtgaaaaacatttgtgtgctatttaggtcctatttatagaacatagaaatcgtaaagataaccacaaatacgtttacacaactgtaaaaaactttcctaaacaaatccatgattgcagcatcaagtttctattctgctgcagcagatcaagacaaaacatgaaactttctaaataggaccaagatcacgatttggtcttcaacacctaccaaataaaaattatttcatctactatatacatagcgaaaatgagattaacaattagagaaagcaaaagtcatttttttctaaaaatagacaacttttcataaagagattttattctcttgtatgacatgtttgctaaacaaaaaataacaattgtaaataaaagtttcaaagaaaaagagcaatcaaagccacgaaattaacac

SEQ ID NO: 320180 - DNA, 1049 bp, Cannabis indica
aattcatattaggatgttaatggaacatacttgttagtaaatctagattctggtaaaataatttcaacacgcaacagtctaaaaaccatgctagctgattgttttttttagggtaattggttgaaaaaaatggtagggtcacttaagattctttagggaagtttagatactttttacactgcaccttaaaataagtggaccagttagagctgaatatttggcgttgaaaacccagcccacccactgcactcgcccgacctagacccagtatccgaaaaaataacgtaaaaaacctgattcagataccacctgtatgatatttaaggcgagtattaagataaaattttctacatatcgagtttcaagtgaaatccagactcgctacatattttatttatttataatttaatttaaacttaaccctaaacctaatattcaactcaccagccacaacatccccttcttctttcttctcttctcttttgcatgttcttcttcttctcttcttcatcttcttcttctagtcttctacgttttctttatacgtcttcttcttcttctcttttgcgtctttttcttcttctcttctgcttcttctttttacaatatttatttatatattatatatatgtattgtatatatttatgagattaagggctgagaagtgaggagattagatctaggtttataattgtttttcaaaaaatatatattctaaaattttgggtgttaccaggtggaatccattaaatctgattaaaacccaaaaacttgatactaaaaatcgatgagttcagtagacattttcctacacctgaatcctaaaaactctaacacgaaaaacccaataacctgaaagacccgtctggtgtgctgcccttgtaccaatatatcccatgcgcactttgaatatttatatagttttgattttaactattttgtatcaccattgtagaaagtatggtatatgttgacttctcttttagccaacgaaaatgagtctatttgataagcgataaatactatatgataaagcaataagaagaca

SEQ ID NO: 320181 - DNA, 653 bp, Cannabis indica
aacagtaaaccaataagtgtttatcctcaaacactacttaacaactgcaaatgacatcctagggtttcgtatgaaaccctgtagcacaaatacactaaaataaaacttatattttgtctctaaaacatacaccgtataatagagctcgtcacaagcttcgaatggtataaagatcattcaaaacagacacccaagcaaaaagttatgacaaaaatacaaatttttgatctcctaggaatttccaaaaacggtgaaacacgtaaatcccaatttttgcacttaccgaaacaccaccgaaacctaaccaaatcactactaacttcaaaaggcacatatatatatatatatattatatatcataaatactaccatccttatgtaacagaaattaaaatcgagccctcaaatggaaaataccattaacattcaaattaagctttaaaatgttccaaactttatttctaacccaaaataacctcaaattcaacaagtaaacatctaaactagtcctatagctaccaaagaacaattctacgaagtcagaatctccataaccgctctcaatcacaaagccgctatatagaactaatcgtttttaacttaaaatgaaattaaaccttaccttaactctctttcttcagtgattcactatt

SEQ ID NO: 320182 - DNA, 1164 bp, Cannabis indica
tttagaaaccaaatcgtaaatttagaaaaaaaaaataaaaaaatagtatatggagtaatttccctttaatattttctctaatttttgtaccagtgtgtaccttaaaatactattgtacattatatattaaagtaatttcataaaaaaatatacaaaatataatatttggtccaaaatattatattcttattttaaagaaataaataaataaaataaaccttacaaatttaaactaattcttcactatgtatttgttcttatatggatgtattatgtaaaacacaaaaaaatttaaaataaccaaaattggactcagcaatgaatcgaacccaggacctcaacaatctctacaaatttatgcttccttgcttcccacttgtgctacagctttctctagatatttgttgaactaaaagatatatatactcttttgtgtgtatatatatcaatttaatttttcgggggcctccaaaatagtggggcctggggcgtatgccccggccgccccaccctctggccggccctggagaggagttataaagtttgttattatcatcattcaaggatttttataactcctttctatgatttatgctcaaactatataacctcctattatatgttattattttgtcatcttaattatttaatctaaatattatattatataaattatataacaaaaccataagcccaacaaaaaaacaatataaaaatacaataattgtgaattaataattggtattttttttgtcatatgtaataaagaataaataataaaaatcttataatctataaatatttagaattctgtaaaacaccatttttgtaatttttttggctttttttttgttgattacgaataaattgttgtaataaaagggtgggtatgctgtatttttttttattctttcacaaatacacaaaaataataaaaaactacaaaaatatagttgtatgaaattttaaaatatttttatgacttttataattttatttataaaaaatacagtcttttaatgtatttttatgttgtactcttattaatttgttgttgatattttgttattttaatgttgtttgaatgttatttttttttattatttttatatagttttttttttttagtgttattttataacataatataaaaatatatatgaa

SEQ ID NO: 320183 - DNA, 529 bp, Cannabis indica
tttagagtgccaaaataatagaatttaatcatacaattttttttttgaagtaactgtaaagatgttgaacaaagtgacacgaaatagatacaaagagggagagggaaactaacacctccaaataagatccttatcctgtcgaagagcttctctagcattgttatgggctgcactattaaaaactcgagagatatggtgtagaaaagcattagggaataagaatagggattgttagatcaacttcacaacacttggcaaaggcaaattgtccttccaatgactgttaacccttgaaactaactgcagactatctaattcaatggacctgaggggaatcttaattattgaacaccaatgcagaaatctaaaagggcttgagcttcagcaaaaaggggagtggaataactatcattactcccactccacaacaggtgtctggactaaggcatactaaagcatatctaagacctctcactgttgatttaagaaatctttcatggctttatcttttctggaatagttgagactt

SEQ ID NO: 320184 - DNA, 502 bp, Cannabis indica
tcaaaatagaaataatttttataaaaatgaaaaaattataaaaaaatatataaaagtgaaaaaaatagaaaatagagtatacattgctttgcatgggaagctacataaaaataaataataaaattaacatgattgtaattatttcgttttgcctgcttgtttgttttctcttttgagcgtttgctccttgttttgtccctgtttagtggggcttgtttgttttcgctttggcgattcttaaaaaaaaaaaaaaaatattacatgatcaattttagtattaaatcttgcacatgagtgcttgaaggttgggtagagtatattttcttcacaatgatcatcatgcttagggaagaaaatccgaattacaaatgagaatggaaaataatatgaaaagaagtgatttcaagatagaaaataaaatctgagtcattaaggataagaccaggcccgaccctgggcataggcgggctaggcctgtgcctagggcccacccagcccaggg

SEQ ID NO: 320185 - DNA, 3175 bp, Cannabis indica
ccatgtttcttcctatctgtttcacaaacatttcatttactagttgtcaatacattaccccagtgtttttcaaaccaaaaggcatgactttataacaataaagtcccatgttggttacgaagcttgtatgccctgatcaatctggttatatccagaatatgcgtccatgaacgtcataagctcgtgtccagcagtagcatccactaactggttgattttttgtagtggaaagcaatcctttggacacacattgtttaaatgtgagaagtcgatacaagttctccaagttccatttagttttggcacaaggataggattggatatccacgagggataaaatgcctcgcgtataaagtcattactcaataacttatccacttcctgcttgagtgccccttgtctctcaaaatccaagggtcgtctcttttgtctcttggctgggtaatttgggtcgatattcaagtggtgacagataatcttagggttaatccctatcatatctgagtggctccaggcggattgatcctggtttgcccttagaaaacttattagttgctattttagttttcatctaggtttttcccactgaatacacactttgtgggattttctggatataaaataacctcttccgattcctcgattggttttaattggttttgttcatcttgaatccgaggatcaagatcctcatcctgcttctcgccttcttcagttgtgactgccattagttgatggccagcttttctattctgtagctctatccggtagcattcatgagccagaagttggtcacctcgcaccacccctacacctgttggtgtctgaaacttcagggataggtgtttaattgaactaactgcccctagtcccattaacgctggtagacccagcagtatgttatcggcctacgacaggtcgacaacgagaaagtcttgcattatggtagtggataaaggcgtcttgcccacagttaatgggagttcaattatcccttgacttgctacactatcttttgtaaatctacacagatttaccatgcatggttttaactttgctttctccagtcccattttctttagtgtatccttataaaggatattcattgaacttccattatccaccaacaccctctttattcttttattggtgagtaggattgtgatcacgagcgggtcgacgtgagggtacctcaagtgttttgtgtcttcccctaaaaacacaattggaggttcctcagccttggctctcttagatgattatgaagcaaaggttgattgctcgttcttaacttccttaacatatctcttttgggcattgttactttctcctgcgggatgtggccctcccgagataaataaagtgtcctccccttcaacaggaggaggttgtaatccttggtcgcccgggttattgggcagatttggctggttttgtccattgctttgtcatttcacatattgccagaagtaaccatgcgagatgaggctttctatcttgtctttcagttgacgacattcttctatcgtatgccctatatccttatggaatttacaaaatttcattgcattccttttatgcctcgtgtgtctcatgggcttaggtttgcgaaatgcgaccctgtgcacatgtgcgaggtagatatttttctgagtttcattaagctcggtataaatagtgtagattagcacgtacttgccgtgctttttctaatttttcttatctttcgctaattccttagagtcgtcaatcctctttgtactagagcctcttggattgtcagcctttgtcaagacggtacttgtcgagacagtgctgggtttacctcccgagccaatctttaacaacttcatctctttccttaattcctcttttcgaacaaacatctgagctctctcattgaactcactgatgtttttcattgggcggccctgtaaatcatcccacagttcacctttagtcatcgagagatcagttgtgatccttacttgaagagcagtaagttggatactgtcgttcaagtttctaacccttgcagcagctgtactgaaatgacttaagtaggccttaagcaatgctttatgttagtaagggaagacgtttcaagtcgcctatctcttgctgcctagaactgtttcttgaagtctttagacagttgttcccagaggtgatcgagtgatggatgaatttgttgaaccagctgctcgcttccccaactagcgaggtagggaataaaatacagcctaagttattcgtaacattgctagctcacatgatggtattaaaattatttaggtgagcgaccggatccgtagtcccatcatatgacgagacgtgagggtttttaaatccttgggggaattcaacactcataatgtttggatggaaaggctcgggttcttcgtctgagtcgtaaccaggtaatttcccatattccccatcatggtatctcctgaatttatcctccaaatcaatgattcgcaattggataggatcctcttgcttttgattgagttgttgacgtaatttaggcttttctggttcaattgctcacaaagatccaaccgttctagatcataattacttatagatctcgtccttgaataactctctgttctagttgtgcccgtactctctcgatcattactacgatgagttctatcccctcctcgcgtagatcgactatgacctcgagatcttgtacatctcgaattgaaacttgcttcgtcatgtacgggccttctcctttgggaacgagttgatacatgtcctcttctggggcttgtatatgccccttccctatcagtgcgattaggacgttgatgatgtctcgggggcaacccacttgtcctaggttgagtctcaagatctctctcgttaccacgagggatttcttattccctagtccgaggttgccttctactcacatttctacgagaagactcttatataaatcacgatttccattccctaggttgtaaatccccggggtctccgtggtacttcttgacgcggtgcctggtcattgggttgttctgttggaaattattttaccaggatctagatttactaacaagtatgtttgattaacaacctaatatgaattctaacaatgaaaataaacacatataaagtttagaaaaccttacagtgggtgtagcggaatattatgact

SEQ ID NO: 320186 - DNA, 744 bp, Cannabis indica
gtaattttgaattttactttgtattatgtatgtacaataaaaaatagtaaaagcaaagactagtctaataagtaaaattgagcccaataaaagaagagagaatgcttaaattaaaaccctaatataaaaaataatttcccttctaactctaacatctcttatcgtagtcacaattttttctgaaataattaaaaaatttcaaactcttcttctcctctcttctcacagcaggacctattattttctaggactaagaaaattttctttctaattcttcttcatacaggcgcacaagaaagggttgtaattgtatatggtttctatgaagggtcgatggtggtgatggtggtgtccttagtgttcggtggtgggttcaatgagctgtaatggagatagtattgggttaatgatgatgttgttgtgacgttaatagttaatgcttcgtcttatataattttttttttttaaaatatataatattactttttcaatttttgtgataatatagtaaaatttctcttcattttatacataagcatgatataaaattaactgacctttggattgtttgccttccataaaattatcacttctgtgtggttgatattaatttgttctaaaactattgtgtatattattaacttttatatttaaattctttatataaattgaatggttgtgccatttagaattgttgtaatgtttggaattattcatactaatgagaagatataacttttaggt

SEQ ID NO: 320187 - DNA, 800 bp, Cannabis indica
ttaatcacataatcttgattactttcgactatgctgatgacacaataaacaagaagataaatgtgatatgggtttggatgaatttataaatcaaataaacaagtaaatgttaacatgaaccaaatgacacacaaataagagatgaaaaaatacttctatttctttattgatatttaaaggataaagattacattgaaatggagttttatttagggcataaaaccccataggcatatccctgatctccttcctcaagtcctcaacaagcttctttgcggccagaagttgcttgttaatctcacttagttgagtaatcttctactcagcctccttcttagcttcctccacctcctttttcaagttggtggtggccgttgtatctttcaaggccttagatttggattaaaagtatgtatattcaatctttaggttgagctgcataatgaaataaaattgaagcctgtatggataaaagaataagtcaaaagaccaaaggaaaattacttacataggtggtctcctttaatacattgcccataaggagctccacagacatgtcttcccctccagctagttggtcattctcctcatgatgcacccagtcctggtaaaactaaagcatctccttacccttcttagtcttagggtttagcacggtaggaatcactgagggtttgggtagcccgggccattcagtacttcctttgttagaacccttggacgaggtaactgtcatatgggacttaggtggcgtttggttggaggtaatgaaatggaatggaatggaaaggaaacaattt

SEQ ID NO: 320188 - DNA, 673 bp, Cannabis indica
atataaataaataattaatataatgaataagtacttttctttgtacatatgattttgtgtgttttattttgtctcaacttacttaaccgagaaggatgtctcgcacaagggataagtttttgaaaaaagtataaaaattaaatatataataataataaagatattgggaaatgtaataattcatcagaactaataataattactatataataaaattaattcatatgtagttgtgtaactttgctcactactattaaggctagatatgtatatttttgtctcccaagattctattaactttcatctattcaatataaatgttccctttctccctagctctgcctactagtttctttgatgagattaacacatacactcactaattaagatttaagacccaaatgtaatcaacaacaagaactgcattatttagaagagtattgttattaagttttagtggttctcagtatttatattttatatgattggttaatgatatttttttaaaagggaaatgctattagtatctaatatactctcctatgtgttaatattactattagttcaactaagtattgggtttaatataataatttttagggagtatcgttagtcaatcacaaagcgacatgtctagaggcagtggcggacccaagatttaagttgagggggg

SEQ ID NO: 320189 - DNA, 1529 bp, Cannabis indica
aatattgttattataacaccactataaaaaaaaaattgaaaaaaatattacaaggtatgatttaagatatgatttaataaaatgttatttttagtcctctaggttggatgggccttatgcccgtgcctaatctgccttaactcaggtccgactctgagagccctatacctcatctcggtatgcaccacaagttcgcagctcagctcatgagagtacccatccaattgaattagttatagttatgtattaatgaattgtttcaaagatagacaaattagaagcattctaactattaaaacattgtcttctaaaaaatgcatctttatagtatatatgttttttggcgtgattttacaacactttttatgcttattgttcaatttccaatagtatttgaattggttaaatatcattttgaattttgtattttacaaaagttactaactggacttctttgtttttttttttaaagtaacttaaaagttcattactgagagaaaacgatgggcatcacaggggaaatgcccccccctttgtaaacaccagcagaaagtgtggaacctttaacacttttagccaatccatcaacaaaaaccaagtccgaacgattaacataagaaaaactaacaaaactcgaaaaagttttaactaaaatctaaaaatcgaaagagagacattaagaaacttccaattaggcacacacttcccctatccagtgcctgaatagcagtcaaacaatctgagcaaaccagtattcttgaatttgtcctttgcttgacccaagagatagccaaccatattgctctagtttcagcatccagaaccagcagttgctaactccaccttatacatccaggatccatcttccaaattgatcaagaccacgactaaaccagtcaaatcaaatgactaggctgcatcagtgactagtaccaaatcaaagtcctttttggacttgcaaaaggacagtttagggacactaagctttggctccacaagctcaagatggctcataaagtcaccaaaattctttctaatacgcatgatcgctggtaataaacttgtctgaacttctttaaacaagattccgtttcttaatctccagacttcttcaaagacacacgccatatacaccaagaaagatgcacgggtactactcggaatagccatcaacacatgctccacaaattctagcattgtcgaaccagggaaatttcctatcaacaaaggaaaacttccagagatccaaagagccctggaaacaccacactctctaaaaatatggacacatgtctcttgctcaacaccacaaagaaggcattgcttatctccagcaaaagacagcttgttacgagtggggatgacttcattcaaaatcctccatagggacacaaaaagccttgaatgaatccctccttccaatcattttccaaatatcctttttttggattcatacagtactcttgatccacccaatggaccatgtatgtttcaaaatagtaaaaacaagaacctgagcctaatttttg

SEQ ID NO: 320190 - DNA, 621 bp, Cannabis indica
ttttgtttttgtgtatttgtgaattaattttttttaaagtaatgaccaatatcattgataaactaataatgtccaaataattactatacatcccaaagaaaaaaaaaatagaaagtcatcaagccaaacaagttgttcatccattcaaagagtatgcatagttaatccatgtccagtccacattggttgtccaatgtacatggactaggaacactcttgaaaatttggataagaaatttgttgcatcctttaacaatggtcttagatcactgaaaaaagaatgtcccctaacaaaaagagacacaactgctaaggagtctgattcaacatgtacaacagaatttgaagaaaatatcctatccaacgttgttaaaattgtcacacattttgcttaaattactgagaagcttttatcttccactcactcctaagttaacaaacgatgtttcttttacttttttcaaatatttcaaatgaaaataattagatgattcaaaactgcatgaaatacaaagaaagctaacaactaataaaaattattaaaagctagttctaatgagaatgaaagtaccataaaaaaaggacatatctgctaaaaatttcgttctttagcaaaataac

SEQ ID NO: 320191 - DNA, 897 bp, Cannabis indica
aataaaaccaaccaaaacaaaaataaatgaaattttagagctagggcaaaattaaaatgaaactacaaacaaaacttaggaaagtcatctagtttcctctttcccttctgactgttagagttgaaatttttttaggcaaagaaaccttcaacttcttcttcactggtcgaagatcacctttagccacgggagagcaaaatcagagtcatcatcgtcgatcactgggcgtttcccttttaacttgttagcaactgatttacgacccattttagaagcttttttagcaataaggatggagaagcagaggcacgggtaatcaccattgtatataccaaatgaaagatataaaaaattgaatgagaatggtggcagttggatgaaaaaattaaagatggttatggctggaagtgggttttgatcgtgtatatatttcgtgggttttgatcatgagagagaatgtgatttctgaatgtaaaactaaaaatgaaatggaaagagaagttgaagtataaatccacattgaaaataaaaagaaacatgataagaaacaaaaagggaaaagttgatgtaatttaagctacaatgcatggactatgtgtaagtggtattttggtaaataaaaaagttttatatggaaaaatatagtagagtttacttttatatggcataaaaaaatagtaaaaaaaaaatgagattaataaataattaaagttcaaaatatgagaaaaaaacaataaatatatttgataaaacttgtaatattaagtttcgctggaaaagttactggcgccgaaaaagtgattgtcactggaaaagttaccgtcatcgaaaaagtcaacaaaaaagtcatcatcgccgaaaaaattactggaaaagtcacaagaaatagatgtctca

SEQ ID NO: 320192 - DNA, 1091 bp, Cannabis indica
tacaaaaaaaaaaaaaaaaaaaaaaaaaaaaaaaaaaaaaaacaagtacacacagtatagaaaaagacagtaaaaatgtaatattttccttacaacagtaaaattgaaataaaataaaataaaaaaaatatgtggtgtaaatttcccaattgaattagttaggttgggcccaaaagaaatagatggtaaacataagtgatttgttaataaaaaatgtttgctttatcaaatcatatacggttttttcaggtacctaaatgctatatttattttttaattaatatcaaaattatatatgctattttttaaaaggatcatatataaatgcatgatttttttttcttgtactttaggtaatgggcttaaactggataaccagatatctgtaaaaaaaaaaaaaaacttgctttatatatagattagttctatttttttttttttttttgtataatgaactttctagattagttctattaatatagcttatatttgtatatatatacttagattagattatttttaattttgttaatatagtcttatatttgtagatattttattagattatttttagttttattaatatagcttatatttgtatatatatacttgattaaaattatttatgtacgatatataattatttattattttatattacaaagataaatataaaaatccaaaaattagttaagttacttatatcatgaatatatgagattaatattacagaagactgaaatttattagtgaagaagtaaaataagagaaagttgatatatctttattttagtttataaattaaatataactaatatttaaaaaaaatatatataaattatcttttgatgtaatgtttttgaataatgaaacaatttaagttatgaaaaatgtaataaaggttttaaataatatttttattttaaattatattgttaaatcaagattaaaaaaaaataaaacaaacaaataccttgcacgtaattgtcttctagtgtatatatatatattttgtttattgttatgtgtatattatatttttaatttttagtttttgtttttgttatatttttaaaatttttaattaaatt

SEQ ID NO: 320193 - DNA, 1504 bp, Cannabis indica
tttttttttttttgaaatggatacattgtactaactttgaaaacaaatataacatatttatatttcttcaaaaaatttaaaatatatgtacacactagcaaattaaacctaacttttaaactgtatttttgttctaacactacaagaaatgtcacttttaccagcacagttcgctacttacttttactagcgcatttcacaatctgcgctggcaaagtggtcaaagttttaccagcatacatttgcagtggctaaaatctaacttttaccagcacatttacgcactaggaaaagtcatttttgccagcgcttttcattttatgctggtaaaagttaatacgaattcattgatttgccaacccctttttgccaacacatcacaagtaaatattctattttaccagcgcaatactaacttttgccagcataaaaatgtgctggcaaaaatgacatttttttgtagtgtaacattttacaagaagtaaaaaaagaccgaattaattaattccattttttctttaaagcttcatcagttatctgtctttcattcctctagggccaatccctaaaacatattaccgacaaccactatattaattaaaaagttaaagaaagaaattaattaataaataaatatgaattaattaaatacataatcagcatatagtagcaaacaacaaacaaaatacatggccaaaaatatatatatacctaaatttgagctttcccattcaccataaaaagctttcttatcactagctaatatatacttttttgttcaagaatataatttaatgtctactatagtactttctatatagtttgatcgacaatttgcatattggtatacgtactagattctacacacatatgaaattttttaggcgagcatcacttttattataattgttttgaattttaatttttatactgtattttttgaaaataagtgagatgtatcataattaagtacattaatatacaacgtccacaacaaaaaaatgtgacatttagtgacaatttttttagacatgataaatttttcgtgactgacatttggttacaataaaaagttttgtaactaaaatataatatttaaataaaagttgtcactaatttaattttagtcataacaagtagcattgtgctaaaaacacatgcatttagtcacaacaaattatgatttttgtgactaatagtacttttatagccacggatctttagtcatatataggaataataatttgtaattagttacaattttttttattttaatcacatgttttattgtgactaaaaaaaaaaaatgtagtgatcatttaaaaaaaaaaaatctaaatatacaaaataaaaaataccctaggataggaacaaaattggtgccaatacactttattcaaaatatttaactttgttgaatttatttatttattttgtttttccaccacaatataatataggctaattagtaatttttcccttcgaacttttacatgtactaaat

SEQ ID NO: 320194 - DNA, 664 bp, Cannabis indica
ttttgaattgagatcatagaacatgtagaaggtgatcaagcttaaacatggaattaacacaaatagagataatttcacaaatcaaggtaaaaggaatggcaattgacattaactagggaaaactttaaacaacattcatcatcttccccaaattggaatttagttcatgttaaaatccataatcattcctaaaacaaaatttaacataaaagaaataaaaacgaaggaagaaagaaactgttggtggaatggatctgggccgtcactttgctccttctgcatttcttgacagcttttaggtctaaaattcgctcccccctttctctttctcgcagtttccgttatatttttcatccaagatttcaaaagatgaaattggcatccatttgtaaggaacctcgccgcggccatggattacctcaccgcggcgaatgctgctttggccgcggtggtggagtatctcgctgcggctactgggccagtcacgaaaacacttttctgctaaatttttggctgtggccgtaaataaatctgctgcggccaaaagtgaaccaaatcctaatttctcaatttttcttggctcaacttgtcttttatcgtacttttgaaaccttgaacgcccacagctatgggaaacctgaaaacatagaaaacaagcgtaatt

SEQ ID NO: 320195 - DNA, 617 bp, Cannabis indica
aggttacctaaattatttttttcataaaataaataatattttgaaaggaaaaaggaaaccatatatatttttgtaaatattatataaaaattcgtaaaatgtatagtttttcacttattggtcactagctaattcatgatgttaacgaatttaggcctttgatcaaatattacaattataaataagttcgaataatcagtactgatgatcatataatcaattaatgatcatgatcttagttaattagcttgaattaaaacttcaacaaattagcaattaattctgcaatgtattaatttgtattcatcatgtgtgtgtgatatatataataataaagagaatagcaacaaaattaagaatattagattgactaatattgtaacaaacctcaaatatcacaaatattcaaaaaaaaaaaaaacctaaaatatatatcacaacattattcacatgactttacaaaacactatttttttttttaaagaaaacactaattatatattgtacatgttttgcataaaaaacgtacagtgccctaactgtttccatatatttttataattttatgaaacgttaatttatgagattatttcataaatacttaaaaataataaaaa

SEQ ID NO: 320196 - DNA, 770 bp, Cannabis indica
tactatttttgaaattttaatatcccgttggagaaatcctaatacgatacctttagattatcttcaatggatagtgtaaaattttaaggattttcatagatatgagaaaaaaatttaaagtttactttgatatagcataaaatataatataaaaaaatatgagattaaaaaataaataaaatttaaaatataagaaaccaaacaaaagaccataaataaagttgataaatttctaataacaaatataaccgaaaaaatcatcgaacatacgtcgtcactggaaaaatcaatgttgctaaaaaattcatcgtccccaaaaagtcatcggaaaattcatcaaaaaagtcactggaattattatcgtcgtcgataaagtcatcagagtatccatcttcatcgaaattagatatctcagacataaattaaaatagaatcagtttcacaataaaatgagtaaaaataaataacacacaataactctgaaatcagttataaataaaaagataaatagaaaatcaactcctaaaacactgaaacataaattaaaattaaaactacttccacgataaaatgaataaaaatgataacacataatacctcagatttcggttacaattaaaaaaattaataattaattccaaaaatactgagacataagtctaaataaaatcggtttcatagcaaattaagtaaaaacaaataacacacaataactcaaaatttaagataaaagaaactcattatatgtatcaactagttataaatttgag

SEQ ID NO: 320197 - DNA, 1014 bp, Cannabis indica
aataaataaataattgtttataatttgatattttaatcaaataagtttaattaatagggtgaaatttggaaacatggcacataattaattaatataaataatcttcaaaataatcattgtaataatctattttatttataattataaataaaattacgtagatatatctttaactttaattataatctattgtatatatattatataaacgtaatgctagaaattaatactcacatattacatccaaaaattacacagctcaatatatagttaagatactattaatattttcaagatttaatttaattaattaattagtcattagtatatatttatatcacatatgattcatttcggcctcaagacaacttgagaggagcttagctagactgactaagttgcttaatattattaggcacaatttaatatatggtaaaattaatttagaggaaaaaatttaatatatgaataattactatgatacacgttcattagtaaattgaacggaattggatgaaaatttttaaatctagtaataatctcaataatttggcgatacaatttaataaatgttaaaatttaagaaaaaaaaaatcttaattagacaattatataatgaagcaggcaaacgcgcaatatgcctttaaagttcaactataaaaggggatatgaagtgcaaaataaaaaaaggggaacaaattaattaattaattttttataaaagaaataagggatttttacacttggtatctttttttgccatttttttacatttttatctttattcggttatttaaacatttttaaaaaaattatttttcaatattatattttaaaaagtttgataattacacaaatacctatgcatgcttatgtcataggttttctccaatattacactccatctcttccaccttcttctctttcatctccaatattacattccatctcttccaccttcttctctttcattcatttttttttatttttcttttattttctgttagttttttt

SEQ ID NO: 320198 - DNA, 2180 bp, Cannabis indica
ataataataagttggtgggaaataaaggaagagtcttttcaaaggagcttaagtggcgtttggttaagaggaatgaatatataagaattggaataggaatgaaattgaataaaatttaaaatgaatatataagagtcattccaccaaaatgatggaaaggtcattccattaaaaggatattccaatagttttaaatgcaaccaaacaaagaaatggaatgaaaattatttcctttccattccattccattttattacctccaaccaaatgccaccttagtgataagcttataaattattgatcaaacttcatgtttcatctctgttattccattcaacttttgtttatttatttattatttatggctatgtggcttggtttttttttgtagatcaagattatagaaaacaaataacagtatacatgaaaaataacaacaatgcactttcaagacaaagacaaataaatatttttttaaaaaaaaaaaaacgggtcaggctcaacccggcccgattatatcgggtcgggcctaacccgttaggctgaataaagtggttgtgccgggtcgggtcgagccaaaatgatatcgggccgggccaaatctatggtgggtcgggctgggcccaaccctattgacattactaatctgaacacacgataaaaaaaaatttcaacaagaagttgtggccatggctaggacatgaattctgccagattttgaattttatctttttgtttacactgagatatttttagtggttatatataggcttgtagggtatgaattttagtactttttgaacaatgaatttgagagagaaacttagagagagagagagagatagaagaagaaggagattgcgacatcaattattttacatcattgttctttttcttctccctaaactcaaactttttattatgatttctattacaatgtctagtttatagttagtttttttagttaagggttgttttaaaacccgagacatgaattcttgaatgctttgattaatataattatactcttctatgcttaaatttatggctaatattttgatcttctttagacgactgctaaattatgttttatattattctactatccttttaaaaaaaaattattcacctaatagtctaagattctaggtttgagtgataatttgtatttaatggtattgtgacaggtatcattacttgtgatgaagaatataacctaagttaaatgaatttatatgctaaattgatttgttgcttagattaacttgtcttcatagaatttaatgttttttctaagttaaatagattggatgctttgtgggtctactgcttagtaaaaaaatttaattattgagcgcttcgccgtaattaattgtaatagggaaactgagataagtaattatctgcggagttaatagtttaattttaaaataaaatataatgtttatcattattgtacttgattgattgttggtggtagagagtaattcttaactatttttaaaatcttagttgtcattcattatttattttctttttatgctatttgcaactcaaactcctctttttttttttaatttctatcattaattattgaataatttaataaacatagccctcctgggatcgatccttccttacttttatactaaaataattaaaaatattagaataaaaataatagtaaatttgatacggcatacaacacacatcaaacttgttggagggaagacgaaagagaaagggagcgagaatgtcgcggtggttctgggcaaacgacgatctgccattaacgccgaagaagagcttgtcagaggaaacatggaagggagagagagtgggggaaccaagatccatctgattgttttttttttttttaaaaaaaagaatcgatatgatatgatcgcatttaaattgaggtggactaataatatgttgatatttgttagtattactaagtgcaatcatcagttaacagattggtactaacagaactaataaaaatctaacttttagtatttaatcagtcgaaaaaagatgtactgtgtaaagatattattataaaatattatttatggatgtccaaatcaccaaattaattatcaccattaatgcttggttgtattttcccttcttacattgatttagtttcccatttttttagtcatatttttgtaaaa

SEQ ID NO: 320199 - DNA, 1344 bp, Cannabis indica
ttagtttttttttttgtttgttggaatctttaatattatatttatatattgtgtttataaaatttaaggatgtaaatagaattatacccttcaaatatatatataatttaatttttttaaagaatttcaaaaatatcctaaataactaaataatactaactaataattgacgttataactttaatttaaacatattccgaaacaaaaacagatgcactgtaaaattaatcctaacgaataatacatttcactattgttttcctttttatatatataaaaagataataataataataacaatatatggcatagctagcaagagcattcgtatgcttaaattaattattatcattattttttttttttgattaaacaaaataaaatgtataatttattaggacgtacatatatatagaataagtagtagctagtagtgttggatctctgaattttcataatcagttggcgctggtcttaattattatctttggttgagaaaatccaagaggaccgtactcttacattttgggcacttgggattagagtctgacaacatcacgtacatcagacaccgtgggcaccccgccagcaccatcggggctgccgccaccggttctgctgccgtgcggatggtttcggggctgctcatggcggagtcttgttcggcatctgaagacacacaagacccgtcaattgacatgtctgatgattcagatgccgacgaagaggcggaggatgaagattctgtctccgcctcttcagtctcactactcgagagagaatcgcgttgtcgagtctcggctctatgctgacgtggcagtggctgcctcggcagatttaggctcagttgcgtgttcatgttttactgtaatacagcaaaataataataataataataattatttttagttaatatataacaaaggaaaaagaatagaaaatattattacatagatatatatacctgcggagatggagagactagttgggaaggataatatgtatatatatatatatatctttatttaggaaatgtgtgcttgtcaaatgtgtgtttggccctaaaagttgatatctatatgtatttatatatatggtcgaatatttagagagagagagaataagatgtgtcatgtagaagagtggctgtgttattattatttaataattggtaggaatggagggtaaggagaagttagagagagagagagaagtgaaattaaatggaataatggtcagatcagatggttaaaaattgtatgacaattatgtatatggatgaaataatatatatgtgtagttaattaattagttgttgtaattttttcatttttaatttattat

SEQ ID NO: 320200 - DNA, 929 bp, Cannabis indica
tttattttgctttattttattttcccaagttatacattatcatatttgagacagtatagttttaacaacagaatctcattaagatgggtgtagttatttttactgcagtacttcttttcttatagttttccaccgttgcttgtttttaaatttaaatttgttcgtggcatttaatttctctagtttttgttatcaggtcctacaatttagtatgtgcatgtgtttctcgagtttcatttctgtgttgttttaaaaatgtcaactttttgtttttgtttaatatttgtcagattataagcttttgaatgatatgaatagacaggtacgaaaactagggtgttttggcgcatgtacaaacatttcaacaacaagatttctatgttagtttggtgcattgttacaaatagtttgtgaagtttaaacaagtactaagtaatgaaatattgtaagttgcaactcttgttatttaattgctgaaactacggaaatcttctcatgtaggaatatttgagaattctttcccctttaccaagtttttgtgccaatgttaatgtttgattttggcattatttgcagtaaatttacaatctaaactgttttctgcacaccgttcgaaacttgggtttgaattaacttttctggaatgttagcattattagtcattttctgccttttaattcaaatattcatttaaaagctaaaatcacctatttataaatcgttttccgtttaggtctcaaatcttagaatgacattaaaattatatttttcattcacagaaatttaaccttttcttttataaaattattaaattagtgtaaaaaaaatagtgactatattatagttatatattataattattggacatgtctatgatagtagatgttttctctgatttcgcccaatatacgtggaccaaccggacaggg

SEQ ID NO: 320201 - DNA, 677 bp, Cannabis indica
attaaaattaaaagacacatttaattccttaaaagacacaattaattctccaaaagacacattaaactcaaatataaacagttcaaaaattaaaactaaattataactataaatcaaaacaaaaaactcaaactcagaaatgcttgagcaatcgaaggaaccctagaaaaagtaaacccagaagttaccaccattttcgtgataaatcgaagaaaatccaaaaaaaaatcgtggtagagaaagcacacaggagggaaacacgagacccagccaacccaagaagagattcatcatcctcgtgtgaaatcgaacgaaacccagaaaattggtagaagtagaaggtttttgaaatggtgtttcgtcgtcgaggtgaagaagtcctcctcccgactacaataagtcccagatccataaattctagggttttttgtgttttcaaaaaatattggtgttgtttgggtgaatgtgagtagaatgagttaatggggggattttatacgaaattttcagtgggtagtagctttaatggtttgtggtagggcttgtggtctatatcatgtacagtggttggatatgacattaaagtggaaggtttgaaattattgcttaaaacagattagtcaaaggccgttgggaatctttggttgttgttttcttcaatgggaacatttccacat

SEQ ID NO: 320202 - DNA, 917 bp, Cannabis indica
tctctaatttttgcatcatttatgtccagtttggactgaggtttaaaaattctgggattgtacaggagggctaattcattaggatattctatttttaaggactctggagaataaacttctaaaccatattgggacatttttacaaaaagagcaatctcaattcttggataaaattcatcaaactagaggcttataaatacgataaacctaaattcttactcttcctaaaccctaaaggttacccaaaaaattaaatcaaaattactaaaatccaacggagccaagaaaatgcaaataataaaataatgatcataacccaggtaatgaaaaagatcagaggaaagaggatggatcacttaccatacggagtcgagttgtcacatgatgaaaagctctgcaactgaggatgggatgaatagcatgatgacttctatgtatacttgaggatgaaaaataaattcgagtagatgcgcaagaaatgtgtcaaagacaatgagggcatggaaggtttcgagaaatcagaatgggtttttcgtagaaaagcttgaaattttttgaaaagatgaaaatagtggaaaaatggttcctttttcattttatactttaagcataattatcgtaagatcaaaggactgagatccaacggataggaataagggagaattggaaaggatggctcattaatgctaatgatatgcttcaaaaacataaaccgccaaattcaaaagcatatattttttcaaattggattatgacgaatatacctcagtaatcatttactaagggaaatttcattttataaaatactatcctaataactcctcattttatccaaaatacccttaccatttattttttttttttaatcaaaacctgaaaaacttaaaaacaatccaatctctctctctctctcctaa

SEQ ID NO: 320203 - DNA, 1166 bp, Cannabis indica
aaaaataataccttatgtaaatatcccaacatttattagtgctaataacgagtaattattatcattaagatttctcttgccactgaaagcagcaaatgccttcctcactgtggtgttggctgaagaggtcatccacctgaaagtaaaaatatgcagtaaccttcagttaaaaaaaccagacatgtgatatttccattggaataaaaatcaactaaagaagaaaccacatcccaacctctttagctgctgctttcttctttccgtttgatgtagcatcttcaaggccactccaagcttttgagtggggcaaaatttgaaaatgggacttttctaattttttctttaatatacactaacttgcatagaatagaatggggtttgaacccttcacctccaacacaacataaaatttttccaaccacctaagctaacttattacaaattagggtggcaaaacgggtttcgacacgacataggacacattttacaggtaaaggtcggaaaaattagatgcaagtcaaaaatgggtcgacactacttaacacaaaatacaaatgggtcaaacacgacacgactcgtttaacacgaatttaatacgtttgataccatttttttttagtaaataaaataaaaaattattaataataatataactatctaaaagtatatatttagtgatttaatattgtgttaaaattttttaaatttaactttaaaatttgaaatatctgaaaacttttaatttttataataataataattattattataaaactatatatataagttttctaatggaacttatatttatataaaatattggtggtaaaactacccgaactttatatttttaatacttaactacataaattaataattttttgacggcaaaacctaccaaactcacattctgtttagctctttacacttccataaaaaaacctcaattaagtgccacggtggactgcccacgtgtacactattgtacacttccataaaaaaacctcagttaagtgtcacggtggactgcctatgtgtacacatttttagtggtccacataatattaattgtttaaatattataaaatttgtaagcaatatttaaaatttagaaaataatttaaaaaaaataaaataaaatacaaaaaaattttttttaatttttt

SEQ ID NO: 320204 - DNA, 661 bp, Cannabis indica
aggataccctgatagtcttcaatgggtatatgttctagacttattattttatgttttgatttaatgtaaacacatatggagatccattgggctatggtaaaatgataatcagataatacaaaactctttcgctacgtacctgatttagtaccataaaacccacacttgagtttatctttggacacttgctttggaaacttcggtattgaagcgctggatgtagcttcacaaactttcttgtcctacttacttcacattggtgatacttgtgacaggcataatgttatcacatccagtttgatgttgttggaggaattcgtctgacagttgtttccaagatgtgatcgtcctcggtcctagctgcttgaaccatttatacgcagatccttttaatgtgatcatgaaacattgacacctttccttacatgacaccttttcatcttcgttaacttataaaatgtgccaagatggtactttagattagtggtaccatcatatggtgtaattcgtgactctttgaagttttgtggaagtggttccattttaatctccctcgagggaggggagtcttcatcaaactcctcatcatcattttgatggctatcttttgacgtaggtcttgtatttatgcctccatgtaacaccctaactatcttaggcg

SEQ ID NO: 320205 - DNA, 2152 bp, Cannabis indica
agtgccatcgttagcctccatttggttttttattgtattaaaatccattggcttgtcaataaccttttaattgaaaattcaataagatattaagaagaaatctgagacaataacataatgcaatcaagcattttcttgctaaagtcaagaaaagagcatttaataagaaaagttaactatgcagaacaagaattctaaacagctattataatctcaattacatcctcattaaggctaaatacataaacagtgagccataatttataaatatatattttaaaaaaaaaattacaaagagtgcgactagacctgtgaaataaatctgtctgtgtcaaaaatcccaaactcaaacgcctagcaagtaatatttatctcacacctagtctagagaacatgttacaccgcctgtatttatcatgcaatcaacacttgaatcctttataacgcacatatttcccatgacatccagtttaaaccatgaaaggcagagaaaatatattaaagcttaaacttcacaaatgtgttctgttacatacatatgtaaaatgtgcaagcccatgctacacatgtttgtgcatactccttgattttcacaagtataaaatgtgcaagcccatgctacacatgtttgtgcatatgattctctcatattcatgttaattacctggaaattacattggagattcaagaaggaagcaataaactttacctcatagtagtcatgcaaaccgagaccttcaacatctacaggctgcataaagggccaggcccatttgtgtcttgtgatctggttgtcaagtcagataaatgtgcattataaaaataacatgatgcaacatttgtattttaagcatccattacaaacaaattacacaagattacaataccaagatgctctaaagagaaaactagaatatcagctctcccaaaggaaataaccatcactataagatcaaaagaaaataaaaccaccatcaatgagaaacttgcctggctcaaaatagttccgaattggcgcatgaggtcatgcattctctttgcagcagcagcttccctttttgatgcctcttgctgctgcttattaagacttgggatatgtttctccttatctttatcttttgaatttgagctgcctttagatgcctttaggtgcttcttacttgtactagagttgaactgctctacctcaatcattttttgctcaagctgaaagtaagtcagaataggaatggcaatctcaaaaacatattataaaaccatttagaatataaaatgaagcagcccaaatagcataataactgaggaaaaacaaatacttgaaaaactaggtagaattagttcccaagccttaacagatattcttacctcctcaatcttcagtgaaagttcatctacgagatgctgataaccctctacttcttccacattattataaccactaactgttggaacatttaaaacatctaaaacaggtacatccattgagcgtgcctgacaaattccacaaaagttaacagttattgaataatcaatataacaaaatcacacaggccaacaagacaaatgtcactgtacacgtggccccaagcatacaagcaatgtacaacagcatcaacggaaaaaagaaaaaaacacactaaattcccacaatcttcttctaaacccaatgactaacaatgtgtaactgccccaattaattcaaagatcatgctcagtcttatcacccaatttaacaatattttcaacaaagaaaatgcctacattttagctaaccacgtatagaactctgctaattgagagagcaactaaaaaatcgacatggcaacccacttcaggaagctaatgcatttgggttttccattttagctataatttgtacacccttggaattataaaagttgtaatgagggatccactactaccctcaagctggtacttaacagtaaggaaataagttaaaaactgaagaaacattttgttttaattcaaatttcatatgatatgtcaaaatcaaactaataaacatagcccatcacacaaacccaccgactcaactaacgtgaaccttgatatgtaacttgagctcctacatactgttgaatctttttattattattattattattattaataaaataatagtaataaatta

SEQ ID NO: 320206 - DNA, 1230 bp, Cannabis indica
tttccctcggtataaatacaaccaaaaggagagtaggtcattacccgctatcacaagggggtcgaaccactatgacaaatttttgtgcttattgcttgttcattccgtttgtgtaacatgtagtaagcgtcagatctatacgacccaactgtcagtcgattattttttgaggtcaacaccaattaccccataaatttttctaactatacataaatttttctctactaattctaagatgctaaactgtatctgggtgacactcctggccaaaacttcaattgtactgctatcaggcataaaacatgaaaatgccaaaatttataaatgacatgcatgacacacatgaaatttaattaagtctccatgactgagaaattatctctctaatgcctatttctgacaaagggttttattttctactactgcacatataatcgtaaataataaataaattactaataatgtactaattccatatctaattatgtggtcattacaatgggctaaaccccaaacacatcttcttattgagggaaggttcacactgtcgtctccattgaagcaatcatatgcattccttcatcttgggagatgtgtcgagaacactggtagctcttagatgctaggtgattcaggaggctatcactctcccgaaggacaaagttcaaactcagtttcaatgatccttttggaatcgtttttcactctcgaatgcccacgtgtctctcaaatattttttagatttagcctgttaatattgattttttatgtcttctgcggtagccctattgttacgtggtccactctacttaccacatattttagttaaaaaatatagacaacagtatgataaaactaaaagaaattaaatttaaatgggaaaaatgaaatataaaaaaaagttatatgaaaaattgactatgctatgtgtccatgttcttacctggcagacacatcataagaatcatctaactttgtcatactaaattaagaaaaaaaaaaatcaagtttttctatatttcgtttttaagaaaatatgaatagtattttagtttaatttcttttccttaatcttttagtataatgtttaactttttttttttttagtagaagtagcatcttgtttttattatactatatataatattacttaattatataaaatttatataaaaatttaaaaatatataataaattctcatatgataaatagtagatattcatttttta

SEQ ID NO: 320207 - DNA, 923 bp, Cannabis indica
aatttccaaattaaactaagcaggctttacaaggatagaccttacctcaaaggtctatcggcaagaacagacagatcccaacaaccagcggcatggggcttgcctgggatctcaggcttagcaatagcccccgctatccatcctatggtcggctagccaccagtattagtccctgcggctagccagccactagcaggagaccctatggttggcacaccatctgaagaagcccccatggctagccagagaccttcaaaagtccctatggctggccaaagaggagcactccctccccaaggggagcgagtcacccaaagatcaattttatgccgacaaggaccaggattgggtggaaacacccaaaacaacaatttgagaagtgaaattaatcacttcagacagttggatccaccaaactccaacaatttatgtgatttaccccatgtcaatggacaaactccactagccaaccaaggaggagtgggcagccaacccctttccaacttagggttggtcggccagactctagatagtctgggactgcagcttaatcaaggaaggccaatcaactaggcccctaaaacaatagatccttccactactacaaaaggtagaattcgcgacggttccaaaagcaatttttttgtgaaccgtcgctaaaaaaattaactgagtgttgaaaattgtctcctatactatactataggcgacaatttttaacactcgtttagacaacagtttaaaagtgtaggatttttttttttaaaataatacactatactcgacggttttgaaccgtcgggcaaagtattagccatggttttaaaccgtggcccttactttatctgaagattccaaactgtcgggtttgtagataaaaaattggctaattaggattttttcccccgaactttgatatgtac

SEQ ID NO: 320208 - DNA, 1151 bp, Cannabis indica
accatacatcagtatattgccttgatttttttatttaaatctttagtaaaaagaaagtaaaagaggatttatacctttttagttgattcatattgtccaatggctcttttctgtcaaatactttgtttattaacacgaaagaaaagagtacggtaattattgttgattgtatgtatgtatatatatattttttattgattaattattgttgaaaggaaatttggattaaaatttattttttgtttgctttatatatttccgtatgcacatgtgtgttagtgaagatattttgaaaatttttgatctagagataataacaaaaaaactattgttgttgatgatgttgttgtttcacagacggtaatcagtgaggatattggaggttggaaaaatttatttaagagtgatttacgtaccacaagttcacaactagaatgagataatttattttctaaattttagtgtcaattgcaatttggagcaaaagagaaagagtgtgcgtgcatttgtattgagtcaagcgagcgagagaatgaaatttaggtcatttttttgtgttagaatagcgagttacaggaatatcagaaactcgaacttgatttgtgacccacaagggtgaatgtcaatccttgaaaaagacttttggtgtgtagcggccaatctaatcgagtgtgcagggtgcaagctaaactccacacaaatattaaatcctaatttatatcaagtctataatttagaaattttttaaagttatgtaaataataattattttcaatgagtatgaatgtttttacttaattaataattatttattggaaaaaaaaatagtaggaatttaactaatgaattctaatttatatatttaaacttggttgattatacgcggataatattatgatttcaaaaaaaaattataaaagtttagcaatcttaaataaaaaaaatatatatttataaagtccgcgcggtgtaattctctagtctatctatatatataaaggagaagtatgaattttaattttttaattagttttataaatattaatctatctatcaatcaatctatatatctatatctatatctattctatataaagtgtgcctatataactgaattcttggtttatcagaaaattatgggtgacttttta

SEQ ID NO: 320209 - DNA, 654 bp, Cannabis indica
agaaggaaactgagtgaccttgccgagtttctgcttttgtttttgacatctggggttcttattgtagtctgcgaggcatttgtacacaaagaaggtatgtatttctgtgctagcatttcttccccagatctcaaattctgtaaatcctgtttggttactgggaaaatttagggaaagaaagtcaatattcattcagcttgatgtagctttatgacccaaaaattagtcaaaagaatttaagaattgcgtattgggtggtgaatatttattgattgagtttctaatttgtttgcttttcgtgcactattaatctcttttgaaagtttttactttctaaattaatacagtttttgactggtgtaatatatatcactgcctctttcagctttcagtcttgactcacacattttcgtttatgcatagtaattggcgcatattttgtcaaattcgtttgtttcattaactgtgcttggaaaaaaaaaaccaaacaaattatattatagttttctcaaatcacttgaaaagattagtctagtctaataaataattgaaatacacaatgtaaaccaccatctttcgagtcctatcttttcttttaatatcagttactaagtttattcaaaaaaaaaagttatcagttaccaacttaccact

SEQ ID NO: 320210 - DNA, 1100 bp, Cannabis indica
attaccatatcatgtatttttttttttttatgtttttagttaattataaattaattttagtattgattaattgtgatatgatacatttttctatattttgagtaattgtaaattaattactattatgatgaaacttttaacaaaattaaaattaatttgtatttcacatttcacattctttctttacaaataatttatgataacatattaatgacaagttaggcttttagttaattaattgactattcaacatactaattaaaatattattaactattactcattgattaatataatgtaattattaattaaattatataatcataaaaatagtaacttaataaaaatttgaattatctatttaaatttttatatttaatttcttattaagttaaagatgaaattaaaattaatttatcatttattttaatttttctaccacaatttgagcggcataacaactataattggatattcctaaaaattgtaaatagagaaaaaacaatcataacacaatctacaagaataacaataaaatcaaaataatatttcacaatatatataatttctacacattcggccgcagtacatgtattcacagaatctacttcactacggatcaatatttaagatattcaaactcatctaacatgcatatttataccattcaccatgtctatattaataattaaaaaataaccaacactaatcttaaaatgtaagttccttccaaagataaagaacaccgaaaaagagagagaagcttctacaaagaaaatcaactcattaatatgtctataatattcttttgatacatttatgagcaatttaacatatttatgtcctatataaataaaaaattatatttacatataataaatataatatattttagagtgtatactattacataatttattattgtgtcatttttgagtcaagtcgtgtcaatcttaatataatctaaatctgtttattagatattaattaagttttcaaatttttatctaaaatgagtttgagaataacaagaaattggttttaataatacacaataattcactactagtactgtataaatatatatatatagtttacta

SEQ ID NO: 320211 - DNA, 1842 bp, Cannabis indica
ggttaaaaccattcacatggagtttccaaaagtttttcaattgcaaggacaagaaaggaagttttaacaataagtctatcaatggacttaacgaaacttcctgatcctagtattaaaggtttgagattttctaaatctatgggttatggtatacctggtgatttaattcctctagtgcaagcaacttactttcgtaagatgctggagcattttttctaatggcttactctataggaagtcttttgtctcctagacatataattttatttatctaaggaaaaatttcaactattccagaaaagataaatgccatgaaaagaattctttaggatcaatagtgagaggtctcagatatgcttttgtgtgcattagaccagacaatgtgttatggagagtggagtaatgagtaggtatcagattaatctagaaaatgaacattggaagacaatattcaagtaaaccttaagatcaaaagaggaactatatgttagtcgataagggtggtgttttaatactcttagactacaccaaatcaggtttttagacttgccttaatgctggagcagtgattttagagaagtgtaattttttttttctgaaatctctaactctaccagtgagattgaatgttaaagttgtatgaaagatacttattcagcctatggaaagttctatactgtttttggcattgtaccaataatgaattaactactagtgttacttcctgactaacacaaatgcagttgccaaaaagtaaagaatccagtatccctagaggagtaaacatatagagagaaatttcacaatatcaaaaattttgtgattaaagatatgtaatggtggagaaaggatgtattgaatacaacctatcagatcctattacaggaataatactacatactacacttgatctggatatcaatgtgttgagatttattgaaattcctttttagttttatattagtgcaagtgagagtttgttgggttgtctgccctaaataaaacacatttcaatataatggtgagcttaaaaagaaaatccttgacgaagctcacactacaccttatttgttgcacccgggaaccactgagatatatcacgactgaaaccctattatttggtggtgtgggatgaagaaagatgtggtagattacatgtctaaatgtctaacttgtcagcaaatcaaagctgaacaccagagacggacagggttactacaaccattaacacttcctgagtggaggtcagatgatgctacaatggacttcgtggtggattcgcccaaaaccacaggaatgtatgactcagtatggatcgtagtgaaccgtttcacaaagcccgtacaatgtttatcggtaaatgcaacctatagagtggatcagtatgcagagctatacgagaaggagatagtttgttcccatggaactcttaaatccattgtttcaaacaaagatccaaaatttacatcaaaattctggataagtcttcagagggttcatggagtaaatacctacttttaatggaaatttcctacaataacgagagtggctctctttgagatgttgtaggataggaagtgtcgttccccaatccattgggacaaaactggagaaagaaagtatgtgggtcctaaatgagtctaaaggaccaatgaagcaatagacaagatcaaggctcgaatgctcgtttcacaaagcaggtagaaaagttaagcagaatgaagtgcagagacattatatttcaggtagggaaacatgtttttcttgcgagtttctccagtgatgggcatctggtgcttcagaaaaaggggtaagttaagccctaggttcattggggcattt

SEQ ID NO: 320212 - DNA, 923 bp, Cannabis indica
atatagttttaaagtaaaaaaaaaaaagtaacactaaaaaagttggcttaaataatgaaagtattaaatacaaagtagaggttaaaaagaaaaagtaaacattaaaccaaagcttgtattatgtttatcaatatcacttttatttttaaatatagtggtgactgccctctcacctctatatgggtctgcccttgctttcgacgctattaattaatcgaaaaatgctaaggagcactttaaagtgctaaaactataagagattcataccgctatattgttgcaatttaatattaggtttcacatattttaatttaataaataatataaaaaattattaaccattcataacatgccacatcagtatgataatgagtactttgtgcataatagtaatactctaattaattattagtgttcctaagtgaaataaatttgactttattttgaagggtatttaaaattttctttaaaataaatggatggcaagaattaatttcatactaatttgtctctttgagtttccataaatttgtctacccttatattatataagattaatagtattttgtgttttataaaaattattgattagactatttattttgttaaatgattaaatggatcatatatttttcaaaattatataaataggacctaaagcttgatatttttttaatataatcaacttaaagataattcctattacgaacagatgcaaaaaaaaatgtaactaatttgtaataataatttaagatgagattatgattaaattttattttgacaaaaagaaaatagtttaggatactatttagtattattttaaaaaatacaaagtttagttttattttataaaacagaaaaattaattagtaacttttacaaaagagaaatgctaaaagacattagtggtgcctaacaccctc

SEQ ID NO: 320213 - DNA, 1610 bp, Cannabis indica
gtatctcctcttcctcatcatccactgttatcagaatcccttcctcatcttcttctaaattcaactgatcatattgatcttccaaagccacctccgattgactccctgacgccataatacgaaccagaatctcacaaccaaacagacttctcagaaaaacaagactcaactttctaacatgtcaacagacaagacgttaaaatacaagtaattttaaatagtttttaataattatcacttttaattttaaaggaatatatgggaagattaatattgatatatgcttttcccttgctcctatcattttcaacccgtggcattcaagtttgttttttttttcttaaaaaaagttggaatatatattgaaataacagctatactcagataagtttggtagagtggagagagtgatggaggagaataaagggattgattaaatcctttatttggtatggagtgagagattgagagatgctctctccctctaaatacttaattttttatccctccaaaatgggagaattccaaaaaaaaaaaaaagacaaaaaattaaacaaaatgtcttttctatcttttaaaaataatatataaatgtaaaaataataaaattaataattttaatattatggaaatttagaatacaatttttattttatttataattctacacttaatattatttacaaatatacatttgtaaagttgtaaaattataaaaatatattttatcagaaaaagcaagaaaacaactaaaacacaacgacaaatcaacatcacggtaattataaataatttataaaccaacaaaaagtaaccataaaaatatataacatcataacaactataaataaattataaaattattaagtgtgaaaataaaaaaaatttatatattttttaaaaattttaatctattatgtaaatttttcaatatttatttactcaacaactatcaaataacacaaaggataaagactctccatcgatgttatttctcatgagcacaagctcctcaccttcagcttagaccatctccttcgacccgtctagaattgttcgtcgctaggtttttgtttcttgcttagggagtgattttaaaggtattttgatttctatccattcttttttcgagggtgtctctgagtgagactgttgttagatctttttaggttcttattatctatctttctgagtgtatgtcttcaacatgttatgcaaaatgataatatcgtagcatgatgagtatgatatgcactacagattaaaaacaagatttttaggtgggaagaaattccaccttgtttaataaccattatttgactctctcaataataaaattgattattaaaaaaaaaaactccccatggattctactctctccctcctaccaattaccaaacataaagctagtatattattttttttgaaagaaatcaagctagtatattaagtaataattgtgttaattaaaaactatagaatattatgttaggatttataaaacacttaagaaatatataaatcacagatctaaacatattccctacagtgcttcaatatagaaaaccctaaatcataaataacatttgctaaattaaagaagaagaaga

SEQ ID NO: 320214 - DNA, 1684 bp, Cannabis indica
aaccttagtttataaagaattttaacttatacgttacttgataccccgttcaggatttatgttgcagtcttaaatgtgtctctccaaaatgagttttatgaagaagaatgactaatcacacttctagccatgtccttagataaatattaattacatctcttaaatacccttcatgttaggtttgcctaacattttgtattggaagatgaaattatatttttttagtagttgtgcaaaataattttagacgttactcacttgattctgcatactttccatggtagtgttatccaccatagttagtttcaacgctttaattttcttgcctagttgatttgtcaactatggttttaaaaattgaaaagaaacaacgtctgaagattaatgcccttatgaaaaaaaaaaataagtttcattagtcagaagacaatatattattattgattattccatgaaaccacgaggaaagatccaccaaagtatagcataaattcttagacaataaaactttattttgtcacatgatttctttatgtttgtttattatccctttacaaaatctaaaatttattaaatcaaggggtcaagaattctattaaaataagtctttctattctcctttagaagatataaccttaatacttataccaaagtataataaaattctcatgattcaatttatattttgtaccataagagaaatatgaggtttctttatatgaagtaaatttcaataaatttataaattaaagaactagtaggactaatatcagaaaagactttcaaattctaaaagagcaagaatgacctaatttattcataatagaattcaaaactaaaaaaaaaatcatctaggtgatgatattgtatatgtcttttctaaatctaaaaataacgagtctttaaccatagtttgaatgtcattatagcctcaactatagttatttccctattgcgccgaaagatgaatctttcattataacttggattttagtttcacatataaccttccttagttatccttaaataagcaatgtcacaaaattttgcttacaaagtatatttaggtacaataaattaaattatttattgaaacaaaccaaaaattcattttccttagatatggctaatggcatacttagaacgctttagtcttattttttaatccctcttataaaagtcatagataatttcatgtctaatatattttccattttctttattagtgttccatacgcaatattttaagttttatctttatctttattctttatttaaaacaaggtagttaaagaagtatgcttctctctttcttttagttaaaattttgtcacatttagcatgagaattaactttatgttggtagatataattgtataaataaatcaaattaaaagaaaacaaaataaacaaggttcacaaaagaattcctataacacaataagtttaaataatagtgtttaccgagattttttgaaaccgattaataagagctaaagaaaataaaagatattaaacaacaaacaagtagattttttacgtggttcaggcgttaatgatctttgaaattccgtattttaatattcccaatttattatttaattaagtgattaattaaatgcggaataatgaaattggtactgaaaacagtttttccgtagttacagaatacaactctgtaact

SEQ ID NO: 320215 - DNA, 1598 bp, Cannabis indica
gagtttaaaaattaattgtggtagcaagcagtagagtttatgagcatccactttcttgttagttgaagcatcatcatgtcagcttcaaggatatcaatctatccaaaattcatattatttccataaaacaaaaatagaaagaatttgcttcaaggaagaatagttagttgcatgaatgctttgtgtatatcgatgaattaacttgagtttaatgtaataaagcaatgcatggccaaggcatatcacctagtgactgcaaaaagaggctcatgagctgcaatttttttaatcttatcaaaggaaacaacactaacaaatgcattgaacgaacatagtaaaagaacttaaatcaacaacactttaaatcagttaacttatactaaagaattcctatctcaactcacacaagaaaaagaccaaataatatactaatagatcccttaattcatgcttattaaaatatctcaatttatttgatttttatcttaaatctgtagtatcatcaaactatcctaaaagctttaaagtaaataaaagcattgccttggccctataaaacaatgcaacaaatacatgggaagcattgagcttttatatttaaatttatccatttataaactatcatagattagttcttttaaaaaaatcacaaaaaaagacaccaaagcaagattaaaatgaaaaaaaaggaacaatattataatgataagagcttgccacaaaaagagtttgcatgttgttgttgaatctcttagtaatcatatatatatcataaaaacatataacataaacgacaaaatatgtgatcttataatctttttttcttaatttaatgtcaagtaagctattttttaattctctcaaaattcattataattagtttttgtgtaaagccttaatcattgtctactttctaagcactagagtaaaagtgtacatactaattaaattataaaaatggaagattagtatcattgtcactaatgtaggagtacttataaaaatcttaactagattttattaaatatacaaatgattaacaaaaatgaaatataacattagcaaaaatatacatgatccaattaaaggacagtacaaaaaaaacagagtcaatataaatatatatacattattttaagacattatgatttcataagtatgtatatgtgtataaaaacttatatgtttgatatatgttataatctagagtttaaatagtttacaaggccattaaaaagcatgatcacaatacttacatagataatatgtattgatctcatcaaattaccctattgggtaggcccagtatctaaaattcccttcatcaccgtcaatcaatgtttaaaattgcgtttttgaggcgcgcctcattgcccgcaatagattgaggcggaagaaaaacgctctgttgcgtgcgcctcagaatgaaggagagaggtggacgcctcagatggctgaggcggtttgaaattttgtgaggcgtacgcctcaattagaaaaccagattttgcggcttttcttagcccattttcattcagcaattaaaaaaaaaaaacgtccaataacatgttagcttaaaaaaaagcccaataaaatac

SEQ ID NO: 320216 - DNA, 1017 bp, Cannabis indica
aaaaaataaaaaataagcaagaactatgtgaaaatctcacctaagcggtgcacaacaagtgaaaaaaaacttcaaagttatgtatattaaacaaaaaagagttaaattctaactcaagtgaataaggatatgtacatagagcactctaatggagagtttcaaatatggtgtatatgcaaattttagctgatcttcctagaagtaaattccaattgtagtgtataaagtggtcgaaatttagcacatgctaaaaattgtattatatttgcacaaaataaagcatgagccaagttttataccaaaataaatattattttttatttacttttttgtcacttataattaatgtaattaatcataatttgacatttaatttatatattttatagagttttcatatactttcaataaaattttaatgcttttgttgacttttttttacacatttctatcaaataattgttaattttactataaataaattgaagcactttatataaaatttggtccaaataaaatattaattcactttttttaactcaaattatacggaaaatattaaggaatgtgataaataacaatcaggtcttacaaattttgattgaataaataatataagaaacacctagctaattattaagtgctatatttatatagtgtcggacatcttaaggtactaaatagtaatgttctattaataataaaaagttaattcaactaaaataaatattattgtacaaaaattatacataaaaataattataggaaaaaaaataaaaaaaggaaaataagatcatatttaaaaaaaaaaatagtaaaagaaaaaataaaataaaaaatacaattgataagaaaaagaaaaaaagaaaaataaagaatcaatttaaaataaaatagtaaaataaaatttagtaaaaaaaaattaaacaaaaagaacaaaataaagtttttatttttactatttttactttatattattattatttttatttattattattattattttgtttgtta

SEQ ID NO: 320217 - DNA, 666 bp, Cannabis indica
atataaattgtctcatcaatgtagccagtgagaaatattattttaacatccatctgatgaaacaataattctcttatcatatatatatatatattacatcatataacaaaaattttgtaaaatcaattgacaagaattaagcactaaacacataaacaaaaatacgtgtgatgatgtgttttactaaaattgcctataacaatagtaaaacaaaaaacctttaatatgcgtatatatttacataaattgatttacatacacattctaaaaaattaaatcgcatatatatatatatatatattaacttccacaacatgaatgactagaatgaaatatatattcggcagtcattaaatacaaaatataatttaatggaagatcaaaattactataaatcctcaagaattaatttagggatgctcttgataccacatgttaagaacattgtaaatttgaatttagccctaattaatttatgagaaataaacaataaattaaagagtagaggaagcgtaccggagtccataaaatcgatctttaaatggtatgatcttccaattttacaataaaatctttttctataacctttgtctcttgatgatggggtttcaagagaatgaaaagatacgatactgcaaattggggaccattactgtttatattacc

SEQ ID NO: 320218 - DNA, 702 bp, Cannabis indica
tgcatcatagaaatactcaatttgtgtatatccatgattcttgtaaactatacctcgtcctggtgctcctttcaataatattaaatttgttgtaatgttgtcgaatgatgagttgttagagaagacataaactaactaatggcacatctgttcttaaggtgccaccttgcgttgtccttgtggttaaggctgctacacgaatttgagacccaagggaccatgccgtgttcggttccccatatgatagtaagtaaggtggggggcagtaaacggagcaattgcttatggagaacagcggtgttggcagttctctgggttgtttggttagaacgaaatagtagaatctttgaaggatcggaatgctcagtggaggctctatgggaaaaaaccaaattttggaccgcctcatgagcgtacaagacaaagctttttgaaaatgtttcatttttagacttagttagagaatggagagctttcttataagctatggtgtaaacttgtttgctattgcctcatgggcatccctccttcgagggatttagtttttgtttggttacatgtaattggtcctcggtttttatgtaagcatggtcttcctccgccacaagtgagggtttttatccatatcgggtttggggctagtctaagacaatggcctcattcttttttttttttttgaaaaagagaaagaggcctttgtct

SEQ ID NO: 320219 - DNA, 1555 bp, Cannabis indica
ttgtaactaaaagattgtcactaaaagtagcaatttttttatagtgatagttgaattaaaataagataaaaaagattaaattaaaacaaaaatattcatcatcctctttttccatcttctctttcctcttatgacatgtttactaataagtaattggaatcattggtaaggtaatcattcccttacatttgtttacttacattattaaaattaggaaagggaaaacttgactaaataagggagaacttcccccaccaattttgtaagaaatgccattatagggtaatggattttaattattttaattttaattttaattttaaatatataatgataattttgtcctttaaaatatatcttacaaaataactaccatataatatagtttaactcaaaagggcaatttagtcaattttaagcattccgattacgattcctaacaaagtaaacaagataaatcacactattccgtttccaaaaaaaaattgtaaacaacatattacaaatattgattccgttaacacgtacccattctagcaactaccaacaatgaccaccactacaacctattagtgaaatatgtaaactcaagtatgtctgctgtggttatccacaatagttaaaaaatatctataaccctcaatgatatgaacataaaaaggaccccatatgtcaaaatgaattaaatcaaagcaagattcagcaatatatgattttgagaattaaaaggtaatcttctttgtttagctaaatgacatatagaacatggggaaacaaaatcatgatcagaatgtaatttcttattgagtaatcttgttgtggacaaggaaggatgtccaagtctagaatgccatgaaaaggtattgttagaagttttattatattgattacaaggaaatggagatgtgggagaattggaaaattgcagcaagaagtataagttgccaattcgtttagctgtcccaattctcttgttctgaggaccctgtaatgtgcaagaatcagtggtaaaatgaatattgttagaggtattagtgaaaaaactagaaacactaaacagattgaattgaaaagtaacattagagattgaaagatcctatgaaatgttgatgtcacctgaattatgcactctaatagtggaaccatttggaagagtaatagtatgggcaatagtattcttatgcatagtagaaaataaagaaatatcacaacatatgtggtgtgaagcaccactatcaacaatccataaacaattatgagaagatttaccagaaacatgagatgcaaaaggtttagatgcatctgtagtaggtgtttgttgtagcttctgtgtgagcagtgagattatggcctaaatatcttcttgctttgaaagattagcaagaacaccatattgctcgactgaagtggaggcataatggtcagagagttcatcaaatttcttcttgtcaccataaccaggaggaaaaccgattaagaaaaaatatgtttctatcatcttatttgacatatgatgatcccactacctctgttgtcttgtcacaaccgaagagat

SEQ ID NO: 320220 - DNA, 1255 bp, Cannabis indica
ttgaaatagaaataaataattaagcatcttgattgaaatcaacttaattatagattttaatttatgttttaagaaaaatatcctaatttaagtgttatacccaatattcggctacacttcagaaactgacacgtgtcctacaaatggaatataaatcaccttaaatgataaaataaagtttatatcattaaatgcagaataaaataacttgtttttattatataacagtataataaaaaatattcacaacttgctaactatatagtcttaagtgaggtaagggtaaaaaattattaaactaatattgatgagataaatttcttcctcgaagtacatagtcaacaagaagatacttattcgtggaataaatataatcacccacgacaatcccaggtttcacatagtgagacgatcacctcgcaatttaaacacaaataaagagatataacgaggcaaaccacctaccaacacttagtatttttcctacgatggacaaggaggataactcatcttaagcaagatacaaccgtccaaatcggcattaacagtctaaaggataaaaacaaaaggtagttgagaagatatcaaatattatcccacaagcaattaaatgaaatgtgggaattgtccacgtttcatgaaaagttacatttacactgatcctaagagaataactacgaacctatattcctataaataggcgcaaattacacgaaaaaagttatagaaaaattgagagagaaatactattattctgatattatattctgacaagactagtgttggaattattttaccaggatctagatttactaccatgtatgttgtttaacatcctaatatgaatttctaaaacaatgtaaataaacacatataaagtttaagaaaccatacattgattgcagcggaatctgatgactccttctgttcagatctcttgcccttgattcctttctgtagcagagcattatcaagatatgaacctggatctctttctctccttcttgagcccaattctccttcttgttgattggattattcatagtgtgcacactataattgagataccactctatctgtgtgggcactcactctatcactcaaggtatgaaaatattaagaagataagaagagaatgttttttcggcctaatagaaagaaggatcagaaaaattttctgaaagtgaaatttttcatcaatctattaagtgtaagccatcactatctatttataggtaaccacctaggtttaggt

SEQ ID NO: 320221 - DNA, 2199 bp, Cannabis indica
gataccaattcaactttttatcataatagcattagagctagaaggagtcataattgtattctttctatatatgatgttagaggggtaagaactgaagatccttagtcaattttagtaatctttcttgattattataagatgttgctaggcagcagaatgcagaatagaagaagtgttatcaagtcaattatcaaacaaggctctactatttctaagaataaagtagatttgctagttaaaattttctcttttgatgaagtcaagcaagaaatctttgatatccctagcaacaaggctcctggaccagatggctattgtagcttcttcttccagggcaattgggatttgattagaactgacatttgtgaagttgtaacatcttttttgcactcgggtaagctgcttagggagtttaactccactgtgttgacacttattcccaaaattaagtatcctaattcagttggagattatagacctattgcatgctgcaatgtgctctacaaagcagctataaaattgatctgtcagagactgaagatagtgttacctaacctagtatcacagaactggagtggttttgttcaaggaaggtttattggccataatatcatgatatgtcaggatctcataaggcactatgagaggaaagctggcaaggctaattgcatgattaagctggatttgcaaaaagcctatgatactctggaatgggacttcattgaagaaatactgtatgcatttaagtttcctgaaagtttcattaagcttattatgatatgtatcagaacaccaagattctcattgatgtttaatggatccatgcatggattctttgaggccaagaggggattgagacaaggggatcccatgtcacccttactctttgtgttgggtatggagtatctatccaggattatgaagaaaatagggtcaaagaaggatttcaaataccatgagagatgtggggaattgaggctaaatcttctcagttttgctgatgatgttctactcttctgcaatgggaattacaaaagcatttactttatgctacagggactcaagctcttttctcatacatcaggtttattccctaatccttctaagacttctgtctactacaataatatgtgtgatactgatatccaaagaattctagatgcttctggtttcaaaagacatgaaatgcctttcagatatctgggtgtgccaatctgccctaagaaaatctctttaaaggagtgctcaatacttgtggagaaaatggttgccaggattagaacttggagttctagaaatttgtcttttgtaggtagagtggttcttattaactttgttttgctagccatccactcttattggagccaaataatggtgctaccaaagagtattattagagatatagaggctatttgcaggggctttctttggagtggcaatcaacacctaaaaggagttgctactgtagcatggagcaaagtatgccaacctaaatcagtagagggactagggctaaaacaggtttctaaatggaacattgatgctatgttcaagtatgtgtgggctgttgctaaaaaagaggataacatgtgggtgaaatgagtacattgtgtgtatattaaagaagatacctggtgggattacatgccttcatctttgataggaaaacgaccatcccaatgttcagccatttgtttttgtatggttgaaagcgaaactttttttatggtaagtattcgagcgtacacaactcgacctaagagcatatcaaattgaattggttctccaaaattaaactcaaacatagattgttcttcatcagtgagggtgatttttgatttcattttatcattcattgggtccatgattgtaactattattttgcttattatgaggaattacagtaggcgatggagaaaactgggaagaaattagggaaaataggagaaaactgaaaaaaaaaaacaattaaaatcattaaaggaaaaaactgtcacagagcaaacatgggcagacactcttagtattttattttatttattcatttttctaatatcaacctaatattttattaacatacaaaatcaacctaagtttcttataaactacaattttttttataagtaataaaaatataatttaaaaatattaaattatttttatggatataaattcatactatggaaaaaaaataattaa

SEQ ID NO: 320222 - DNA, 687 bp, Cannabis indica
gatcaatctaatatccatagatgttggacttgatctattctatccattgattgtacatcaagtatatctattttacattgatttagatttatctaatattttagacatagtatttctttgatcaaattggacccatccaatttttttatatgagattatttcacaaatatgaaaaaattacaaaaatactggtgtacgaaatttgaatatttttatgattttatttacagaaatatgatattttaattttatgttgtactcttaatttattgttgattttgtaatgtatccgcttcaagatgtacttggaaaaatttcctaaaagatcacccatcctaaaattatcccaagtcaaacacgcttaaccgtggagttctttcgtgacgggctatcgaaaaacaagattcaccttgttgatatatgtaatatcaatcaatccatttaagatctcttcaagtccaatacctacacagtctcagaatcatcacacttgaccttccccaggcgatgtaggattgcacattttacccagtattttcccttacagatcacatgactactgactgtcaccgactttttcttatttgtatgttatttttttgttgttgtttaaatgttattttcccgttacttctatgtaattttcttgtcgtttttataaaacattgtaaaaatataaaaaattta

SEQ ID NO: 320223 - DNA, 917 bp, Cannabis indica
ctaaattattcttaaaatatattcaatttttattttattcacaaacacatatagtaaacaatcaaacaaaaattgttaaaaatcaaataaatgttgtaaacaaactaaaattttgtcaaatttttattttatcttatttatatttaaaactcatattttaaaaagcaattattaaaaattaataaaagtataaattattttaaaaaatagaaaattaaactaaaaatttatgtttacttgaaaaaaatctagttttctagagaaaaaaaaaaattcaaacttgggcccattaaattaaatttttacacatgcaagtcatgaattttcgatataattttttcatatctaaataaattttaaataaaaaataattaattataaaaattttgattttcttttttgttttttaaatcattcaaaatgattttttttagatttgaattaattgtttttaaaagaaatatatattgaatttttttatattttcttttaaaaaggactacgatttgatagtactatttaaaatttaggggacaaaaatattaattaacaatgatagtttagcatttaaattttaaatgacaaaatgagacagtacttaacaaaatgactaaatttttgtaaattttaaagtttgtaggaaaatattaacaagccatatattttaagaattatgatttagtagtgtattcataagttcaaagaataaaaatgctacttattaatacgcagaaaatcaataatttttattgtacaatttacaatatgttatataaagaattaattaattagttagatatttaagaatcataaaagcattaattaaaaaaaggtaattagaattcactacaaaaaaaattgttacttagtgataatttttagttacaatataatttttttgtaagtaaatgtgactt

SEQ ID NO: 320224 - DNA, 1046 bp, Cannabis indica
caatgtctttcattcttactttgacatgtttatactgttcttctaaagatttgttcttcgaagtcttatataaaatatatattatgcattattgtcatatttatattttcatcatttgactccatttccataaatcaactgtataaattcactataatgaccattgtacgtaatataccctatttgggctgggctgggccttaccaagtggaggctggcctgttatttatcctcaaagagcttcttcttcttcttcaacaatacacacttattcttttataattatacaaatacgaccattaaacttggtatgtaagaataccatttctctaatgaatatatgatactaaagtacatgaatgttaatgaaaaacatataattattaatataagataaatgggtattaattaaaaaaaaaataaaaaaaagtcctttgaaaaatttttttaaaaaaataaaatactaatcatctataatcttttaaatagttcaaattaatacgaaaatttggaattatggctaaaaaagaaaaaaaatttattaactgatatagtatttctcaaatttgcacgttatacaattgccttcttcttcattttataaatttcttttaacttaaatgtttatttaatttcaaattaaaattgtaaataattgtgaatgatttgtaaggtaaatatttttttatattaggaatgtaaaatttatcaagcaaaagatatatcattattggataaatagtgacataactactcaaaattttgtgtttgttggcaatataaactgaataatttttttagctgtataaatacataatgttagtaaaaaatataatttttttcaaattttgttagtatctttaaacatgacacatataactatgatccaaaagctaaatcattagttcaacatataaaatgaaatacttttaaatctttttttaataaaatgattatttcagaaatacacacacaaaaaaattataataataccgttgtacgaaatttttaatatttttgcgatttttaaaattttatttataaaa

SEQ ID NO: 320225 - DNA, 680 bp, Cannabis indica
ataataaattccaatatagatgtgtcaaatcatcttggaccacagctgactactactacacacaatatatatactaagtatggtagatgtggcacaggcacataaccccgttaaaacatgtggattataatcatatattttacttttatcaattatatttatacaattgttaaaaaaaaaaattatgtttaaacaagaagatataggttcgcttatggaaactaagatcatcagtcgccttgtctaaatgtaagtacatgtgattttctctactattatatactaattaagcaatgttttgaagaaaaataaaataattattaagaaaaatttatgagaaaaagtaaaataacaacacaaaaaagattaatagcatatgtatacttgtatagtcttctaaactattatatatttacttataaacaaataagaataaaattttaaaaaaaaattagcaaaaaaaaaaaaggaaaaaagagatggtaaaaaatatagaaaatacttaaaaaaaatattttaaaagagaaaattgaacaaaaaaaatgagagagactttttgaaaaaaagaaaaaaaaaagaaggtgaggtttaagaaaaaagagaaaagtgacaaaagcattaataataagtataaataaaataaaacaaacaactccaaacatgataaaaaaagacacaaa

SEQ ID NO: 320226 - DNA, 993 bp, Cannabis indica
gattaaaacggtcggttttttttatatttttataatggtcggtcggttttcggattagaaccataaaaaccgaaaaccgaattttgaattttttgtgtaaaaaatcgaccaaaccgaccgttgctcatccctacttttaaacagtgtgggtgtgggggaaaagggtgagaatacatgtttgtggtcactgataccttcaaattgcatgtttgtgacatctttgcaaagacaaacaaagatataaaaaaaatcttgggacataataattggctaattatttggacggtcaaattggtaaactactaacttgtagtgtaaaataatcatgtctatatgatataaaagtttattctcatagtttttcttaattttgtcatgaaataagtcaaaaaattgtgattcgcactcttaaccatcaagcgcacaataaaataataaaatagactaaagttatcgagttatattaaacactatcgagcacacatataggctcattatatgctcgatggctcaattttatttatttttgtgtaaatattaattaataactatttgagagtaagggtgaacaacatccaatccaattcatttgaaccaaactaattcaatctaaatctaattataaaaaagttggatattcgattgcaattagattagattagatgttaaaagtttcattctaattggatttgatcagttattggatgtcattctcaaaatctaattaataaccgatccgatctaattatatttatatatattaatttttttttatttatgtataataaaaatacatattttaattatatttttctagattttcttttttgtgttgaatttgtaatatttagttgttttgtatatttgttttcatgatattttgttttattttattacttattaatgttgttattttagttattttgaaattttaattgcagtatacttataacaatgatattttatggagtattaaacttaaataaatagtga

SEQ ID NO: 320227 - DNA, 750 bp, Cannabis indica
gacccttaatataaagaaaaatagtatttttaaaaattactaaaaaatatatatatttttaaaggtaatttgttttatttgagcccctaaaatgagtgggccttaggcgcgagcctagcccgcctatgcctaaggtcgaccctgattctaatataaagtttagatgaaaaatgtgtgtttagggtttgtctctctaaatctattgtatatattgtagttgttgccgtcatcttctttgattaaggccaagttcgccgaccattcttggcttgtggcatggctctggttaggcttttgttttagaaaccataacttctgtgatgtggttcttctttttctttcgggttttttccttttgctttggattttttttgtttggctatttgcatcagcttgaatccttccaaaatttcaatggagctgcaaatgttgctgaaatgcaggtagtgttagcttcttcagaaataatctattatccaagctggtatctgattctggtgctactcaccttcttaatcctgatgtgaacaatttgatgattgcttaaaattttcaaggttcagatcaaatatatgtgcgtaatgactcgcgtttgcaaattcaacacattggtctctctactttaatttcatcctttacttctcaatctttttatctcaataatcttcttcatgttcctatcaattactaaaaatctccttagtgtgtcccaatttactagggacaataaatgtgtcttttttttttttt

SEQ ID NO: 320228 - DNA, 769 bp, Cannabis indica
aaaaaaaaaaaaatacttgatataagtacttgagaccttaactttgtcatgatagagattatacctaatttaatctttgcagctttttaagattgattttaaaataaggtaaataattttataagtatttaaattcttaagtttgtaagtgatataaactcaatatttattttttgcggcataagtacttaatgtttataaaattgtaatttttttctaattttatttgtactcaatgtactatcagttacttccaaatattcttttataatttcaaacaaattttgtactgataaaattaaaaaaaaaaaattacagttttataaacattaactactcatgccattaaaataaatattaaatttatgtcgcttacaaatttaaattttagatacttatatcgttatttatcctttaaaataacttatgagtatagttatagcctatcagtgatccttaacattattttaaaaaaaatatataaataattagtgttatttcgtaataattattaaattaaattacgtgctaataatgatttaaatgtgatgttcgtcactaatcaactttcaccattttagataacttatgcatatgatattattaaattgagaaatgctaaaagacactagtggtgcctagcaccttcctatgtgtcaatatcactattggtgtaattaagtatcgggtcctacataatttaatataatagtttttagggagtatcgctagccaatcgcaatgctacatgtcgagaaagtgctaggca

SEQ ID NO: 320229 - DNA, 936 bp, Cannabis indica
gactaatacttttagtcacagatattttaatcacaacatatgaattatatatgatttataattagttcacaatttttttattttttaattcacaaattttattctaattaactaaaaataaaaaaaattatagtaaaatatattcgatcgagacaagaatctaataataaatcaagtagtagctagtaattaatgtcaaaaatattaggcaaaactattaatggttgtgtccatatgtatgtgtaattatatttagagtattattataattgggtgttagtagtatctagctcgtgcttagtgacattgcgattggctaacaatgtactcaaaaaattattatattaaattatataacacacttaatatttaatttgatcaataaaaatatctatattaataatacataggaaggttaatgattctctttaatatttctcataaatttatatgattggtggagttattcatttatggtttaaagaaaactgaaaagacttatgaaaattacaacttatactttaagtacactcgatattatattaattcatgatataattgctggcttattataataacttcaaatcgatcaagttgttgtcaattatctattattacataaacatatatgtcttatatatactttttctttagcctataaaatcataaataaaaacgtatttatttatttttgtcaaaaagggatagtttaataaataaatggtaaaataatgataaatctattctatataaagtgtgcctatataaccgaattcttggtttatgagaaattcatgggtgactttttatttatattaaaaataaaatggtttaagagaaattcatgggtgactttttatttatattaaaaataaaatgatttatgagaaattcatgggtcacttttatttatatataataaaataaatcacatta

SEQ ID NO: 320230 - DNA, 1358 bp, Cannabis indica
tcaaatctatatgtatatatgaaaatcaacattaaacttttacttttttttctcttgaattggatggatccagtccaatccaatacatacaggatctaaaatattggatggatccgatccgatccaaaaaatactaggtctaaaatattagataaactgaaattaaataaataaataaatatgaaatacatccaatggatagaaccgatccaatccaacatccaatggatgttggatcgattggatgacaaaattaattggatcggatcggatggtaaaatctaacatccaatatatgattggatcggatctggataggcctaaaaatattggatgtgatccaatgaacaccccctatgcctatttatattctttgagatatacttatttttgtaaatgttgtccccattatattccttaagttaatgaaaattgggtgagagtatattgggcaacccacccacaaaggtggatatattttaataaaaatataatatgaaggtatttttgattaattgataaaaaaaaataaaataataaaatattcctcaatttattttattagtttgggatatttgtggccaaagtaagaggtatgcacacggggtggaatattagcagagagtgcttttctattctatctatatatttttttgttagagatgggacaagattctcctaatagggtaggatcctttaaaaaaaagtttatattaaaaatctaaatgtataaaaatattaaactgtataaaaattaaaatattatacattatttattattaaatatatttattttcatctcaaacacaatttaaaattttataaacaaatactattatactaaatatataaacataaattataaataaataatgttgttaaaaagataacaaaaatattaaatggattcttgtcggagcaggaagtgtcattcttatctttgtcccgtttaatttttgggaataaaaataactccagtccctaacacattccctatttagacaaaaaatctctgctcctattagagcaagttcccgtaagcccccattctacgagaataatatgtattcttatgaaatttttggtatgttacaaatatgattctaataaaaaaaaagtaacaacgtaactttattttgatattattttattgttttgtttttttattagttgttaagtatgtcaactaagtcgattaaataccaagtaaatatacgtaatatattttttactacttgaaattagctcaaatggttataagagggtgtgtgtattggaagtttggagttctaatcttaaatatgcatagttataatatataaatactaaaataaccaaaaaaaaaaattatattttat

SEQ ID NO: 320231 - DNA, 883 bp, Cannabis indica
taaaataatcacattaaagagtaaattacgataatgttttttttaacttaaatgagcaacgatatggttagaaaaataattttaaaaatatggttactttttggttaactaaatgaaagaaaaaaaaagaactacttttcagtatggtcattttgacgtgtaagaaaaatatgtattttctcatcgtcgccataattaatagtaactatttagttgcttatgataccgacagtgaaacctagaggctagaagtaactatgaagttacttttccacataacataaaaatgattcattcttttattaatatgtatttttttattgataaaaaaaaatccaattgtttacgatgtcaataaaaaatattgtgatatcaagatttttagtggagactgatgatattttaatttataaattaatataatagtaattagttacttgtttataaaaattttaattttataattataaattgttgaaatgtaactaataagtatataattgatacggtaagcaattaaatagtgactttaattttgaaaaaattgaaaaaaatacatactttttacgttttaaaataatcacattaacaagtaaatgacaatgataatatttttgaaattaataatgtaatcaaaaattatttttaaaattagaaacgaaatagaaattgataatgttagagagagaaagaaacaagtgaaagataaaagaaaaagaaataaaaattaataggaatgcaacatgtatgtatatgctaagtaaaatcaaaccaacagcaaaaaagttaaaaaggaaaaaaacaaacttatgaccggtaaattacggtactttataatgggcaaagttatttgtgtaatttaattgtaaaatacgtgtataga

SEQ ID NO: 320232 - DNA, 1508 bp, Cannabis indica
tcaaattttgtgattcccatcttaattgctattaactcttttagtgttgaatgataatagagttgagaatctttgaagtgtccactcttatatccacatatttatcttttcctctactcatcttgctcgagaaggaaaacaccccaatattggtctatggcatttgtttaaagaataccttttgcgtcagacagaatctataaagatggtagattctgcatgatttccttcagcttccttactgctatagtttggtcatgtgaccattctagactattcttcttgagcatattgatgagtggccttgtcagtacagaatgtcggggaacaaagtctcacaaataatttatgatgtccaagaattgtcagacctaaactttcgtgagattttcatgtgggaatttgagtagttcgtgggctatatgtggttgggcttcatattatcctttagataatttcatcccaaggaattctatttgcgtctgtcaaataatcattttctttttcagacaacatgataccatgggctttattgatagaagaaaattgggccaataacaattgatggactttttcatcaggagaaaaaagtaaaatatcatcaatatagatgagagtcttttccaatatcgggccatatacccttgtcacaaccttttgaaataaagaatgggccattttgagcccaaaaggtaggacggtccattggaaatgatgatttggaatgcaaaaagttattttgggttggtcatctagtttgatgcctaattgccaaaatcctgcttttagatcgaacttttaaaaaatatgggctttggataaactggcaaacaaataattcttatttggtattggaaatttatcatctgctaagaactcatttaggggcttgtagttgatgacaaccctttgcttttctcaagcttgctttgatcgattattaacataaaatgcatgacatgcccatggaaaggaagttgactctattaaaccatactgttgtgactcttttggatgccatttgttgatgttttggattcatgcctaggtgactagcctttctagggtttacatcttcattaagcttaaaaggaaggcttatgaagaactattgatttttctataaaagatggtaacgtttctttaggaacttggcatgattattggcacatgagactttgatgagctctttcatgatttgatgaaatgggtcatggggcattaagaaattatatgatatggcttcccgtggtgtaaaatgttgtttgtaaccaagttcactaggaagaatacgcgaacccttcttctttgtgtaaagatcaaagccgacaattaagtcttttccaggtaattttgatccaatgtaattgtgagtaataaaacaccctaggaataactgcaattgaatcaatttactgatgagttatgtgcaaaaaatacttccatttggagcatgaaagtattgtttctcttttctccaatatctttaggaagaatatcagggttca

SEQ ID NO: 320233 - DNA, 655 bp, Cannabis indica
acaacctaatttgagagaccacttgaacaggggtcatgcacaaagtgaggctccttatcaagcaccatatgatattcctctacaaaaaggagtatatgtgccccaatataatgcaaacgctcctcaaccagccggtcccaatgttcctgctcctgtgataaatgaaccacgattcatagcacatgaacaacaaattcagcagttgttgaatgccaagggatagttgagggatacaaatctgttgaggaactgagccttgtgctccacacatcttggcattgtcatacccccaaggattcaagatacctaccatgaaaaatatcatggaagtactaacccgggagtctagattagtgattttaacacattaatgaggataagctaagtaagtggggatctgaaatgcatgttgttcctgatgaccttgctaggagcagtaagaaacggtttaataaattcaagaagcattcaatcacctctttggacaaattggcaggtgattttaaaagcaaatttcatgccgccaagtttagaaaacctgaatgctcttcctaggactgttcatccgatctaatcagcacttttttggtcaaacaacatccaatctgcacttaggacgaatttcatttttttggatccaatccaatccgcaaaa

SEQ ID NO: 320234 - DNA, 859 bp, Cannabis indica
ccctttttactcgtatacatatatacactaaaatcatgatttatggtgtacccgcctatatatttatctttaaactattaattaccatttattaaactatatataattaatttaatagtttttattgggttatgtatagcaatagtagtactatactgttagactactagtcacgtgtgtaatcagcaaaagcaagccctaccctttaattttttatcgagtaacaattatacacagtaaagattatattttcgagtcttgaaattatactaactcaaatctctaaactgtggagctcctcacctctgagtaacttttgtgataggaaaaaaaaaaaatatgggaaatgataaattatttacaaaattatggcataaagaaatccataaaaatataaacaaaagaaaaaactcacacccgtattatttaattatgccataaaaagtaaatcttacaaattttcccataatttatgtaatttctactttctttttaggatttttgtcatttattttttacggttagtgtagtttcattttttatttttaccatctttttaaataaacatactgttattatttaaatttttacattgtatatggtttgcttatgtcatctgtaactgcttacacgtttccctccattgtctctaatcaatcacgtttctctgccagttattcactctctaacccactgtattactttttctttcttccctttttattttgatttctttctccttcatccttctcattatcttctttgtttttctttatcttattttctgcgtgtttcttctttgtttttgagtaatggttgttactcgatctcgttcaagttcattgtctcattctcctaa

SEQ ID NO: 320235 - DNA, 722 bp, Cannabis indica
aaaaaatatcaacgtaattttttttacaaatattattaggaaaattcttgttttcacaaattaattgcttgcaatattgcggcaatggcattatgacccttttatactcattgtaaaatataatatagggtaatcttttttgaaaaataaaacacagccatatttgttccttttatttaatatttctgttcttgaattaatatgcacatattctctatttatcaaacacataccattaagttaaaactaattaggatttttacttctgaactttgagatataaaggcttctcaagatactaaaattttaaaaatagtggagttaagacacaaaattgctccaatgaaacactaaaagctatcttttatatgtgagagtctatagtgtcccactatttttagtgggacactataaattacactaaattttctttttcattttttaacattaaaataatatgtttatgattaaatttttatatttatatacactatagactacactcaattttctttttctatttttaatgtaatttttagtattataattgaaattggaaaaaaatttagtgttgaaataatatcattttagtgttgatttaacactaaatttaaattttttagagttgctctaataaattatgcccgatgaacttatgctccccttgataactacgcacttaggtgccgtttggtaacacttttgttttataattttttaat

SEQ ID NO: 320236 - DNA, 2092 bp, Cannabis indica
aataatatcattattcagtttcttttgaaaaagtttaaagatccttttgtattatttatattctacaatcactcttcatttttaacttagcccaatcacacatcatgttagttaggcctttttgtacagttgttagttaggactaattagttatttttgttcttttgtacaactttctctgtaattaattttgttagtcttcttctctaacaacctaactatacgattgtatttatagagcttcgatgctcatattttctgtgaatgaataatatacacatttttattttctctcattcttattcttcctaatatggtattatagcaacttttttttttcgcttccgcatcttcgctctgttacttgattgttctcgttgatcatcttccatggctgctcaatcttctgctttagctcctgcctttaatccagttgtattttctcacaaagtctctgtcaaactcgatgatatattttttgttatggcgacctcaaatccgcaattcgtggccatcgtctttaagattatatctgtgatatgattcaacctcagcgacaatttcttcatgatgaagatgaaatttgtggtattgtcaatccgagattcaaataatgggaagttcaagattagctcttatactcttggcttctctccttcatgtctaatggcatacttactcgaattgttggtacaaaaacctctgctcaaatttagaaaactcttgaggtatacttcgttactcagacctctacaaaaattgatatgcacactacacaaattcaaaatctaaagaaaggttctctttccattaaatgactacttgcttcatataaatactttggttgatcaattaggatctgttggtcataaaatctctaaacatattgtagcagctattttcaaaggattacctgcagattatgatacctttgttatctcaattaattcaagaaatgataaatactctgttgctgagattgagacattacttttgtctcaagaacatcaaatggaagctcatcataaggatcttgattgtgtcaatctagccactaatcgtggattttgtggaaaacgcactggttcttttcagtctaacaatcgttccttctctgatcttggatctattcctcctagtcgaggaagagccacctagaatcaatttgatgtgcccctagaacatcacaatctaatcctcaattctccttttatgaactggtcgtgctagttcttcgtccacttctcctgcttcttattcccctcaatctatcttccatgaatcaagtagttagacctattttccaaatctactccaggcttggccacattgcctctcagtgttattagagatttaacattgattttcctggtgtgggtgctgctaatgtcaccaatccatctgctaatctggctactgctaagactgtaatggattatgtctggtaccctaattttggtcctacatctcattgtactctagatgcttccaaattcactcaaaaatagccttaccttggttctgagcaggtgcatatgggtgatggtttgacccttcttgcccaagcctcaatgcatttaacttactaggatgaagttattaggatagcttgttatgttatcaataagttacctacccctgtgcttcaaaatagtacccctctcaaaatattgtttcaaaaataacctgactattctactttttaaaaaaattgggtgtgcatgttatcctaacactcgtccttacaacaagcataagcttgaatttagatcagaacaatgcacatttcttggatatagtttgaaacataatggttataaatgtcttgctgcacctggtcaaatttatatttctcgagatgttatatttgatgagtatagttttcccttttctacttgtcaaactaactcatttggttttgtttcatgtgatgacactagaccaaatgcagagattcctcttgcttttataacagctccctcaccttcatcatctgctcatagaacctccactactgcagcacaatgtgttgggatttgtgccctaaataaaactctattttaatttaatcttttctatttaattatcaata

SEQ ID NO: 320237 - DNA, 884 bp, Cannabis indica
tttttttttaactaaaacttctataataaatttttaaacttgatctacctaaaaaaaataaataaaaaaattgaacttagaatttaattatacttatcattattattaagggccaaatttttaagattagaacagggcctctaaaatgtttaagacggccctgcttgcagttcaattctttattatctaaaaagaatttaggtagtttttataatttgtcatcacataagaagaagaagaataattaatttttattaataattaggtaatcaaaacaattgaaatcatttttctaagttcatatctattgattgaacccttttattgattgttttatttttttgcattgttgttttcaataccataaatctaatttaattggtatttaactacaatttctttgaattcgatgtcacttgtgtgagttactatttaaataatacatatacttacatgtgtaaatatctgcaacaacctttatggaagtaattttaattttatattatgcaattgaatctcataagagaaatatattttttttacaaagatgttataactatattgattatgggcacatatcatatttttatttgtattctgtcatttttgtatactggaatttttgtttcatataattctaattaggaatattggcggctaaactaactgaactttaaggtttgtaacactcaaccacaaaaattgaatttttggcggctaaactacataaaccctggttccgttttgctctgcacacctccatccaaaaatcacagttaagtgccacggtggactgttcacgtgtacacacttgtacacgtggcaaatttttagtggtccacgtaatattagttttaaaaaataattataagaattaaaaaaaa

SEQ ID NO: 320238 - DNA, 840 bp, Cannabis indica
tatatacatactatatacactctctatatacactttttatatctctactatatatcatttattatatatattctacatcatatatatacactattatttatatgattttatatagtttacatttacttgtatctttgagttgtaagttgtaactcttttcttttatttatattttgtactttgggattgtcttgatttaatattttgtccttgtaatattttacttagagttgtaattgtcttagtcttttattcatcttattttattcttttattgtaatctctcttttgtttctaatatatatagtttgtgacgttttgtcatttgtggtgtttagccaaaaaaaaaattatttagtgataagttgtaattagggacaacataatatacaagaacttacaaagaataacaacctaaattgttttaaatctaaatctaatttctagtttttgaatgtgagtagtaaagattagtttttttattttatcttttaaaatacatcatcaaattctcatttatccattttaatatatttgtagtcaatttttttttatttctatctgtaaacacttcaccttttgatttttttttttgtaatattctcctaactttacttttatttgtaaagggtgtctattaaatttcaccattaaatgttaactatttaaaataaattttataatatttaaataattaaatttactttgacataaaaatatatcacgtgtgtgttagaataattttatatacggtaacaaattaaatatttgattttaggacaaagaatatagggcttttttcagttttaacaaaaaaaaagtaacaatattataaaaata

SEQ ID NO: 320239 - DNA, 2291 bp, Cannabis indica
ttaaggtcattaaaaatgccccctgaactattaagattgttggatttaatgacttttttccaattttagtaaaaaagtctaacatggatgaaagttcaggggccataatttagtacatgtcaaagttcgagggacataatttggtagatatcaaagtctagggagcatgtttttgtacataaacaatcactgaaatagtaaaattgaatgaaattagataaaaatccttaaattcaacaatctccatagttcatgagacatttttaacgaccttaaaattttagggggcatgattaaatacatgtcaaaattcaggggcaaaaatcataattagcctaatttaaatgtgaagtagtaattgtatatagatttttatttttttgtacaaaaatgggttagctagtaaatatataaaaatagaaatattttgtaattatacagtgtaattatattctctttttatttgggtagcataaaattagagagtataattaagacccatcaattactacaaattacatatttattatgtaattatgtggttgaacaaatatgttaaacttaataattactttgaattaccctccattcaaattacatagtaattttcaaagaagccctaaaaaatataggctaattaatatgtttactttccgaattttgacctgtactaaattttgattcctgaatttttaaggttgttaaaaatctacttgaactaataaaattgttagatttaaggattttttctaattttagtaaagaaagtctaacatagataaaagtttagaggtatgatttggtacatgtcaaaattcgagggtcatgatttagtgcataaacaatcactgaattagtaaaattgatatatttatatatatatattttacttaacccacatgttaatttcaactagtagtaccaaagaaatctactcttattacaacactaatatatttgtatatatatatatatatattgattatttatgcattattgtttacattacatgcaaaaccctcttccaaaaacagcatataatcatctctcctttttaagattatctgatttttctttttaatgtcggatattataaccaaacagttccttaacatctactccatcaagattcaaataccaactttccatattttaagtcttctattctattctatcccttcctaattattattattattattattattattttctatctttttgtagcaaccgatggaaaattatttttaaaattacaacatgattttaaacaaacaaccatgtcgacaaatgctatagaataatagtgtctatggttcatagacgaggatagaaaatataataaatatttatatataatatattatatatataatatattatagggtaaaagtttttttgttgtaattaattaataaataaataattgagaagaaaaagccaaagattgcactggcttttaaggtttcatgccctttatcttgtatagccttttacaatatttatataacattactttaagaacaaattaggtgactttctcttttattataattatttttttaaaaaaaatatttatattgcttgaaaaatatttaaatattgatttgcatagctgtactgttttttgtttgagatgtgaatcactgaataatccaacccaccaaaattatcaacctaaatattcacatccacaacaatataattattaaatataaatataaatatatatatatattaaaaaatgaaaatttgttctggaacaccctaatgtatataatatatatttttctaaaaccaatcaattgttataataataatattaattaatcaaaacagaaacgttgatatattaaagaaatgtataagtaattaatctttgattatattctgattcagctctgactagttgccgtatttattattattattagtttatttaatttattaatataagttttagcatcgaatttttatgctcttttaatttaattttttgttctgtaaaattaataattgcaacaacaggagattattctataaaatccagtgcaatgttatagggtggccataatcgatgagagttaaattaattgtttatatatttaaataatattattggatttctgaattaatcatcaacattgtccaagtggtaatcaaatatagataattaattatacctttgattcataatataattattaattggtgcatttagcctcgtacattcccaggactgtccactaatctccaagtggatcttgatatttatatttataaatatatat

SEQ ID NO: 320240 - DNA, 1308 bp, Cannabis indica
aaaatggatctcttctaaataattaaaaaactatttattctaaagacaagtaaatatgtggtatttgtatttgatcctctaaagtaaactaaaactaacttacttagtcttaactaactcaattaactttcagtaatgttagttggttagttagtgctagttttacacctagtttctcacttctgaattagagaattgggagagagtttagaggttgattgcttagttttctaagctgtaaaatcatgttcttgaagggatcaagaactaagggtgtactcgggtaggagttgagaaactgagactgtttctctggtgtgtttttcaagtgaagaagagcattgtttgctctagtattggtgattgtacaaacttttttattctccatattaattaaagtattgatggtgtttctcagttggagtatggccagggatcaacttgatctttaggaccggaaccaggataatccttgttgcattctctcttgattcaattatgctttcttgtattatgttttcttgttctttctgttcttgttaatcgttttagtgcaggtgttagtgttgaatcgtgttattattgttgttgaatttacaacaaatcatattctaagaaaactagagaacaactttaaggtggttataaaaacactaatgttatttttttttttcatcggaccaaaatttttaaataatttattcaaaaattatttaaaaacatacctcacatataaacaaaatttaaataacttgtttcacatgtatatgaaaagaaacacacatcacatatattgaatggactatttgaattttgtttatgtcacaataaattatttagatttttcttttgaaaaataggtatgatataattatctatgttatattaaatctatataattaagagtattgtttctttttttttttaaaaaaaattattacaattcaaatttaaatttaaattcactacatatttatcttatcttttattttatatcaaaagctaattagtatttttacccccgaacttttacatgtgccaaataatatctcatgaacttttttagctgttaaaaattccccctaaactattgagattgttagatttaaagacttttgtttaattttattcaatttgactattttagtgattgtttatgtactaaaccatgctccccagactttgatacctacaaaattattgttggaaattattttaccaggatctagatttactaacaagtatgttggattaacagcctaatatgaattctaaaacaatgaaaataaacacatataaagttagaaa

SEQ ID NO: 320241 - DNA, 2152 bp, Cannabis indica
ctaatccacccattactatattcaaaggatttgataaaagagtctggggccatcttggagttattcaggttagtaaattttccatgggattaatcatggtgcgatttaatgatgaagctactcgatatcaggtagtagaggcaggagtggttcaattcgatcgaaaaccagttatagtccgtctgtggtctgcggatttaaacacaatgaatctggttcacacgaatccattgtggataagattacatgacctagggcttcaatattggggtaccaaagtttaagtgctcttgttagcacaattggaaagcctattatggtggaccaacacaccaaggatagaactcgtctgcaatacgctagaattctagtagaaatggaagtcacagacgctccaccccgattaatttcttattttaatgagtttgggtagctccaagattagaatgtggagtacgaatggttacccccgctaagtgtgctcactgttctaagtatggccacactaaagaaacttgctgacatgatgaaattgtgaaaatgaggacagaaaaacagcagcaacaacaagataaaaataagcagaaggagaagaagggaataaaggataatgcagcaagcaatagtcagcaacagtaggggtgggagataccaaagaaaactatagttcagtcaaacatcacaacttggaatgtcaaaggagagtgcaaaaaactccagcaatttgttcacagtgttgcaggaacaaaaggaggatggggtagcatctcaggtactaaactttctggttctgtaacttctttagtggccaatggataacaataatatagggtgttggaatgtgaggaggttgaataaattggagaagcagaacatagtgtttgatttctattgtttgaataaaataggggttcgtgggttgttggagaccaagttaaagagtagtagaattagagagatgatggataggaaattcactagttggaatttttatacaagttctgttatttagaaccgtattttgattatttggaggaaaagctttactcgggtgattattgttagagaggaccctcagtttgttcattgttatgtgaaaatggcttgccattcgaatgctatgagcataacttttgtgtatggttttaacactatagaggaaaggaaagggatgtgggatggattactcaatttcaatttttctgctaaaccttggctagtaacaggggatttcaactatctttttgaattggaaaataggaagggtggcaaagaggttactttgaatcataagatgaaacttattggctagctcaaagccacacggaaagactccttaagacaggaacgggatatacctggacaaataatcaagatggggataagagaatgtaatatcccgataagcctaatcgtaaataattagggtttaaatttatattatgggttaatcaggtaataagagggattttgattctactaatatattttagcataaaatttatatttttgctataagtgagtaaataagcgtaatttataaattacagagatctatatagcatgtgtgaatgtaatatgagcgatatgtggaataaaaatattttcaggttcggtgaccctgaaggcccataaataagcgtaatttgttaattacggagatttatttgaaatacgtggatataatatgagctatctgtaaaataaaaatattttcaggttcagcgactctggagacccctttggaggccaaaaatgtcacaacagttttagttagaaatattaacggaattattgggataagttgattttagaaatagagatatttaaggtactcggagttcatgaaataccctaaaaatataaatttcttagtggctaagaaataataaaataactatgaataatatagtttttattaatattattaataatattgtattattattttatttttattaatattattattattataatatattaactcgtaaacttatctaactttatatataaatattatattaagtttaatatataactaaagtaaagaatggagaacaaccctcgttctccctccttcgtcaaaaatttctccccatatatccattttcttcgattttcaatcagaaacttagtgatctaagctctg

SEQ ID NO: 320242 - DNA, 1040 bp, Cannabis indica
attacataatttcaagaataaagccatcattacattattacaagtaactagtaactagtaataactacttaaatatttttcctttgtagcaaggataaaatcctcctcaataataatgtcatgatttattatttcattaaataaataatatcttaataataaactccattcaagtccttcaaaacatgtaattaattaagcttaattacaatttcatcatatcaatatgtaagcttttccatcaggttaatttactggaaaataaatccttgacataatctttatttgtcacagttttgtatttgggaggattttgttgagtaatcaagcttgaggctgggcctatatcacaatctaactttgtattaagaaatgtggcaatagagagtctttcttgcttagggtttactactgctctatgctcaatgctaggatatagtccattatttgttaaataaaattgcatatatatatatatatatgagatgtggatgaataatattgtgtttacccaattactaaacttctatatgggattaaggcttggtagctaaagatttatataattttgataaattaacaatgtaagacacaacatatatatacacaagattgactatgggctaaaacggggtaggcccaatacaatgacaccctctatttgtcaatcccacttgctacatacccccaattcacttattagtcaatttggatacaacaaaagagaaaggactttaaagcaatgaaaaagaagaacatgttgcttctaaggtaatggactcattttttctttattttattaaaatgttcttaggtttaaaaaatttcagggccagccctgcaaatatactacaagtttcttttttttttttccgtatagctttaatttactacaaaaaaatagctactttcagtaataattttttaatcacaacaaaaagttatttatgactaaacgtatttagatacaagttgtcactaatttagttttaatcacaacaagtattgtaactaaaaacacatttagtcataataaattg

SEQ ID NO: 320243 - DNA, 622 bp, Cannabis indica
ggtagacagattagaaaaatggcaatatgagttaaatttgttgatattcccaagtggaatataggacatgagtaattaatggaggtatccatctaattaatttgaagaacagaatattttgattaaaagtgatctagtgttagtataagtgggacaattaatgagtattatccaaaatcttaggtaaattgaaggtgacgattgcatggttggatctattcactactaaggaagagtgaaatcgtgggggcaagggtcaagttgtgacagttacagccctgtgatctgcgaaggaaagaccaggagctttacaatcctacacagcttggggaaaggtcgtctgtagtgattttaagattatgtaagcatgggactacatcgttgttaaggacttgaatagattgcttgggactgactatattagcaagaagcatctgtttttggtagcccatcatgaaaaaactccacggctaagtgttcttggcctagagtgattttatttggggagttccccatgaagcatgggatgttagaaattattttaccaggatcttagatctactcataagtatgttgattaacaccctaaatatgaacttctaaaacaattataaaataaaca

SEQ ID NO: 320244 - DNA, 857 bp, Cannabis indica
ggataaaaattctaattagcctacgagaattgacaaagtgagcaactgaaattgactacaattttcaagggtgtagaactcaataatgactaaaattgccactaattctttggggggtgtaatgaccatttaatattttggctgaacaagtcaaacaagaggtatcagcagattgaattatagcttgtttcttcttcttctttgacataaaattaaaacttgtataacacaagacaataaagattgctaataatttgatattaattgtacacttgtatgtagggaaggaaagcttgatttgggcttggtgaaaaaataaacaactcaaaccacaaaatttgtgttggtggctttggtttgatgccattgcttaatttcattgtgttttttctaatagcattgttatatggcgttaaagtgcttagtactttttttgacatacatcatataatcagttaatagtttttttataacttttattaaattaaaataagtggtacccaatattgaattgcattaataatgatattacactttataaaaatattaggcaccataatttccctataacatttctctaaacccccaacccaagttaataatgataagtattccataatattaagtttcaaaagtttagaaactaaaaatcacacaagttagaaagtaaaaatctgccaccacatgtaactaaaaaaaaaaagacttattatgtattatgtaaaatggattgcatcattattttgaacagaacatcttttctattttatatataattggaaataatattgcatggtattgacattgaggtaatttgtgcaagaccttatcctaaatatcatttaaaaaaaaaaaaa

SEQ ID NO: 320245 - DNA, 545 bp, Cannabis indica
ttacaaataatacttatctttcattgaagagactgaaagaagtaatatatagttaacatcccgatcaatgagtttcaattcgtaaccccagagttaattaatttacatcgacatgttaatgataacagaatactctcaggtatttattcaattattaacttttattcacatttaaaaaagattatttaactatttatctttataatattccaatatctctatgttattggatgcttatgtggtgtcagtgatatagagattattggacgttataaaaaaattcatcaaaattaagtatagcaatattttatttttcaaatatcttagtttatttgtttttttttttttatttattattaagttttgttatttttatatatagtttgatcacattaaagataattttatggggaaagttgagtgagattttcgatccaaatctatatatatatgatatatgtaaagctaagtataaggcagtaacatagcgttctacaataacttcattctattttattattttttttaaaatttttttttctata

SEQ ID NO: 320246 - DNA, 1183 bp, Cannabis indica
tataattttaatgtaaaataaataataaatatttttataacaattaagcccccacagatcaaaaattctgggtccatcactgatgatgatgtttgaactttgaaataaagatataaactttatttattagcttatgttatttttattttattttatatattattttttggttgaagaagtaaccctactgcactatctccctgttaattattttataaaaatatttgtttgggtagaatatgggtgatttaacttttgtataagggtaataaataaataaattggtcaccatatcatatcttggaatttattaattttcaatatcaatctattcatataattccttttttcaatctcgataattaattatatcaatacaatttttaattcatcattatctattttccaacaataataatctaattaaatttacatataatttcatgctatagactattgttttttcacatattatgcacgtacgtactcattattaattagttgtattaattagtttattatgttcatgcacgttacagcacatatgcaaaatatactaattatataagaatattttatgatgttatataaaaattaattaacacatatatgcacatgcaaatattttttctatcataggttgatacatgaattttctatattttaaacagtactaaatatcactttggatcttattgtaaaagttactaattagactttttatttcgttaagtgataattcagttcagaccgtgtatttttaaaatacaatacaaattataatttaattttcgtcaaattaaaacttaataatataacatgatctggaggtaccatgaccagactaattacatttttattcgtggtagaaattgattttaggttagttattatattagaaaaattgaattcaaaatctattttgtatttaattacttttatggtgctacagggaatatgtgaatgcccaatatatatcttctataggtcttatgattggttaacgatatttcttaaaagttattttcttaaattatataagatttaaggtggcgtttggttagaataaaaatataagaatggggatggaaatggaaataggaatagtaatagtaatttaaaatgtataaaaaattgataaaaagattataaattttttctcatcatgtattggaatggtctt

SEQ ID NO: 320247 - DNA, 809 bp, Cannabis indica
tctctctctctctctccccctctgtatccaactgtcgccgagtctaaggtaccgatcgaatcacctttgttttgttttaagttttaaccccaaaattaaataaatcaaaacataaaagcaatttccctttttttctctgctcagtcttttcctgttttatttttttgtggtaaaaagagaaattttctttttaaaaaataaaaattaaagataatgaaacataatactaatttccaggcaaaactcatcaactgcgcaatttggtagtgggacccgccaaaatatttgagttgggttgagtaggtgaatatatcgggagaaaaactcaaattatcgtgtaataattttatggaatgggcgagtcgagaggaataatactggcatcacctgttggatacttaatatcgtcaacgacgaagcgtgattggctggaattaccaccagcgctgtcatctcatctccctttgatttttagtttacccgccagttatgccttgttttatattttttttttttttaattgtttatcatacacaaaatatatatacaaatactaccatcgtaacaaaattgtgtaattactaatgagaaagtataacaaatcaccttaaaatatagtattatgtaagtaaataaataaatattcttattttaaaatttgtaaaaaaatgattattttatattatttattatttatattattttttgacacataaaaaaaagtaataattttttggagaattacctcatataattatttttttaattttttttaaaatttacagtttgagttgcttccagtagtattt

SEQ ID NO: 320248 - DNA, 1747 bp, Cannabis indica
agattttatttaaataaaaaaggttttttagtatatttataatgtactattgttattttattgttgatttattattatttgtatattaatattttttatgttgttttcttgttactttgatcatgtggttttttttttgtattttataaataccgtaaaatataaaaaaaaaatatattgaatgtaaaataaaaaaaaaaataataaaaattagtgtttatataattattcaataaaataaaggtatcaaataaagacatatctaaaggaatatcttcttaaataatacgaggaatatcttcttaaataatatgttgtaaacaagattggtctgaattagaatatgaaatctgcttgtactgtggaattattgcacttgggtctgcctagctctagctctattttgattgtggaatttctaatatgcaatttaataaattttatattttttatttatcatattactattattaataataaaataataattttatatattctcgttaaaatattaaataaccatcaatataattaattttttttattttacattttatgcattagagcacaactatcaatagtaaatataacacaattttttttatactaaatttagtacaaattctaaatatcttccatttgaaatagtattttattctatagatataaaattaattaaagtttccctattttcccatatcttccatttgaaatagtattttattgtatagatataaaattaattaaagtttccctattttcccatttttcttcaatagagataaagagacaaaattctcttatctcttgtgccttatattacagtttccgttggaaaagtcatgaatatatatatcgtcagcatggtgacgttgtgttaaaattgacacaaggcttttcgcagggcacaaaaaataaataaataaaataaacaaaccaagttaatcataataaaatgataaatttataacttttgcataatatatatagctagggtagtgtttcgtgatatgcacttttaagcattttattcgatgcatgtgagttctgagataatatgcgcactgtatgttaagtactatattctctaattattccaattaataaatattagatttcatatatataaattaattaaataatttttaaaataaatcattaattaactatatatagtgttatctttattattgatggatctaataataatactcacatttcctgtacatgcatacatcaaagttttctgttaaattcgtttatatatttcctttttgatcttcaatgctatttcattagttatttttatcgatatagtatatttaaattttgattatttattttgttaaattatatactatgtaaattcttcctaacttctttttaattattgtagttctaagctgaatacatataataaagttaatattaagagtattccgttaaataacaataaattttattatagttaacaaagataattaaaataagtttaaaccgacactttattctatatatgaatgcaatcggtaactagtggatatgtacatctacaaggtgggaatatataaagttgcgtgtttatatcaatgtatatatatatatatatactaggtgaatgtacgtgccgagccacgtattgctagttttatttaagattttggtctttttaagattttgaatgtattttatttttaaagaattacaaattttttgtttagaaaaaattaaatatttatatttgaaa

SEQ ID NO: 320249 - DNA, 1736 bp, Cannabis indica
ttttgtttattttggataagtgttgacatattttctcttttcctcgtagatatgaattttgaaaaccttttcatgagcccttcaggtttcaagaaaggtaagaaatgaattgttggctcagaaacttcctcgggaacaaaccctgaaccgttgaagagagctaaaaagaccacaacaaaaataaaatgtgcctcgaaataaatttttattgagcttgacaatccccagacaattcctccaatcctgccagttgcgaacaacgatgaacgggtccttggatatgttcatcaagttaagttctcgggttctcaacccgagatagttttcttggagcctacctaccctttgttgaattgtgtcggcattatgggcccacaggcctgttcgcagcttgccacttcttgttggcgtcacttccaatctttccagcatgatgactaggattttgtcatgaattagattttaagagcttgtgtgagaggagtttaaatctctctttatcgataagtattaatcttcatttagttttacaaaacttctttctttacctttaatatcctcttcctaaattatttttgtcttgtaggcatctctcttttctcagctagctcatgaaagaggcttttagagagtcatacaactggagtctgagcttcaaacaactgtcaagcaacgtgaggttgttgcgaggtaatggaatgactctcggaccaaagttgctcgtttaatgaaggaagctgaagaacaaaagaagatccataagaccgagctcgatggtgctaaaaaagatgcaaaggatctccgtgaagcatgtagaaagctcaatgaagaacttaacgaggcaaaccaaaagcttaatgaagcaaaccagaaacttgatggggctcaaaaaaatgttatagccagagttaactcaatggctaaacttccatgtatcatgcctgcttagctaaacccaacatggatttaagctttttgggagaaggagtcgcggagatgctggcctattttgagcaaaccaagaaagatgaggctgcagagaccgaggaagaagaagaagaagaaccatccaagtctccaaccatgtagacttggtttcattcgatttttttatttttggaaaaatggccattaggccgagacaatggttgctccttgtagcattttgtaaaaacttttgcattgttggatggccaactttacttatttatacatgtttactttttatgcctcacatcttgcttttgagttaaatatgttaatttattgcgttttatttcacaatctaaacatttatctctcgattttgcttaagatactttgagttgaatgcatctccaatgtcattttttttaaaagatatacaagtagtcaataatctaccatgtctttcgcaagcagtttttcaatctgccacgttctacgcgagcagtttataatctgttacactttttagagcaaacttaaaatattttgaataattcaccttaagaactattttgaatatcctttgattgctcatatgagtagttaatcctctattcatatttttagcttaagtattttttttttcaaggcacattcgtgtctcatttataatacatgccaaaacaatgcgagctgttacatattcaactcgtatatagcttttcgttattttatgggaaaatctcacttacaactgctattttgatttttccttttaaagaaaaggtttttcaatttcttgactttat

SEQ ID NO: 320250 - DNA, 2000 bp, Cannabis indica
ttttcttttggttgaacaactaaataataatgagataacaaccctgatgtaatatgaaaaattattagaaatcgacaaattgtgttaacttaaaacacacacacacaaaacaaataacaaattaaaataaaattaaaaacaactactaataacttgtacatcaactcaaaaaagtatgtgcccaagaaaaattaaatatatacttatttaatatagtctgatttgatattttatcttggttatattttaggattattttataaatactaaaaaattgacaaagtttacattttagaaatttatagcttttgttttacaaaaataggaaagattattttttgttgttgttttcatgttactgctatgagaactaatattcttttcttgaaaaaaagtgaaaaatagaatctgataaaatgtaaaaaaaaaaaatcctaaaaaaagtctagttttaagtaatttttgtgtaaattttcttgacatttttttttatttgatttgttaagaattagtaataagctagttggtggttatgttaaatgtttaaaaatgcatatttctatatgtaaaaataagaaattaaattaaagtcatctaatatttttataaattaatatgatatattttcatttaaaaatatttttttgttagttatttttatataaaaaataaataaataacatttatgacatatttgaaaaaaaaaaaagaaaaagaaaagaagaaaaacatatgacatatttctttagaattaaaataaagacctacgtaaaaaaaaaaatttttttaagaaaaaaataaaataaaatgttaaaataataataatattactctacgttacttctaaatttcaaacattaacacacctaacactattctttttatttttttttgtaaaggatttttttttctttctccaatttttttttttatatttttttgaaaataaaagtctgaactactcattaagtgacatcccaacgcgccaaatggcgcgtcctctcccatcaacagcaagcggggcccacacacatcagtcattctctcctaaactacttgacagtgacaccgtataaaagtaaaaaaaaaaagaaaaagaaaagtaaaaaagaaaaaaaaatgtattcaaccaaaaaaaaaaataaatcaagagactttttagtcaatttttgtaaattttcaaaaaaaaaaaatgtaaagtaactaaagcactcattagaaagaaactattttttgtaattttttttatgtgtaatttaaaaattaagaaattttaccatatttattgaaagtactatcagtgtaacctcttagccttttattataaactaggaaacaaaccactcttcgcgtgtagttgtatttttgtttagtaataattatgttataaaaatagcaaaattttaaattttgatattttaatatttttgatataattttttttattagaaaaattaactattttataatattttgggctttttttatttttacatttcaggacaattttttttttccagaattctacataaaaacccctattgcaactagcgctgcaacctaaattgcaataaaaaatcgtatagaaacccctattgcaactagcgatgaaaccactttagaaacccaaaccgtaaatttaaaaataaagttaaaaaaacagtatataaagtaattcccctaatatattttacttagaaaaataaattaatatcctacaaaataaagtcctgaaaagaaatcattgataaatttatagaaatcttatgatacgatttcaaaactgttatcatcactgtacttcacttgtatatattcgctacaacattaaatttgttgtcattgtcgtatctcaattatagccgcctattccactttaagttacaactaaccttactaataagtttgctctgtacataaaataaattagtgaattagttaactgctcactttttataaataagtaaattattttgttataaattcatcacttgtgtatt

SEQ ID NO: 320251 - DNA, 502 bp, Cannabis indica
ggtaaaaatgatagattttaaaaaataaggtaaaaataaaagaggacaaaataaaaagggtatagagtgtaatttcctctgtaaaaacgtaaaaaagaaaagtgtaattttaagtattttgtgtatattttttataaaataaagtacaaactaaactatttttgtttttaaatcttatttcaaaaatgaaaatcgttttaccaaacaaattttttgaaaatattttcactatcttaaagtaatttgaaaaacaaaaaataagaaaaacaattaaaacctcatagcttagtgcttcatttcatgaaaatatatgccaaagcatcatatgacaaatgatatccttaatgtaaacttcaaataccattgattaacagaaaaatactaaaaaatacccgacattctctatcatgttatattatttttagtacaatttaatattaagtctcatataatttaataaaacaattgttataaaaattgataatacatatatatatatata

SEQ ID NO: 320252 - DNA, 1122 bp, Cannabis indica
gagaaatcggggtgttacaatatacaccttaaaaaatgcacataaaataaacatcaactatacaaaaaaaatatacatatatatatatataaaaataacggaaaataaactataaaataccttgttgacaaaaatatggatagagattcctaagtcacacctactcactagattgacgagaatgagttatatgttaagtatatatagagagacacaacaatttacagtagtttactccttgtatcgcggcagtaatgagctacgtctacttcgagtttttattctcatgagatgaaattacaaaaaaatagctaagtctgaatgtcctaatttttagagagataattagagagagatgctctgactttatgactatttttctaaataaaaataaactagaagagctctcattttataggtgaatttggtcattgaaaacaggaataaaatgatctaaaactatgaaataatataaatttgctatttttgatcgtagatgatgatctaacggtaaaaattaacttctagcgttaattgttaattttcggagcatgggtcgcgatggcgggacccgctctaggtaagttatagcttaaatttgtaatttattttgggtaaaaatttggagtcgataatttcagaatcgtgattgaagcatgtgacatgacttgatcgagtgtttaaatagtttcgaaacgcaagttgaatcgcgtcaatgagatcaatattgagtgaattatgactattttactgaaagttgttcatggcccagttagggatgcaaatttctcccattgggatggggttctgagaggacctgtccctaatggggcaggaattccccgtctaaatgggaaacggggtaacgataaggattacttttgttctcgaatgttaaatggggcggggacggggatcactctctgccccgacaggaactcaattagtattttattttatatttttaataatattttataatttataatgtatgtttgtatttttttagtatattagtattctttttatgtaattttaagttttattttagaataatagttagtttgttggataataattattgtataatatttaaatttttattataatttaatattttta

SEQ ID NO: 320253 - DNA, 1053 bp, Cannabis indica
gtgcataaaaaaaaaagaacgtgtagttcattctattgtacaagaaggctcgatgcataatcttcggggaacatgggaacttcatacatattatcaaaaggagtaccctgattgttaaggataggagatatatgtctagcatccaaatacttacaaaactatacttggatctcaatctttaacatctccacattcctattgaattggttgcaaaggagatgcatgtttttatcatgctcgataaggacacacctcatctcagcatcctttctggaaaagacagttgacgcctgcagtagtttatatctaagaaagagtgttctcgaagatagctcctcaacacgaccagctaggctgtccagttgacgtaaatgatcatgacacttcatgtcccttcctcaattaacatcctttgagttattggaaagagagtctaaacaacgtactttatttcgcaaattgttaaggcacgaaagagcattaggaggaagttctttagttcactaatgggacttgtgttgtgtgaaaagtgagaagataaattgtgacctccaaaagacatgcctaaggattaatattcaaaataataataataaaaaaaaaaaaagaagatagcatgggaaaagagatacatgaaagtaaaaaagaagagtatgataatttataggcatgtgagcttcctccccaaatctccacgtagcaaaaaataaaaagatgagtaatcattttttaacagtaaaattgaagtgatgcatggaagtaaaagaatagtgtgataatctatagacatgtagtaaaaaaatgaaagaatgagtaatcaactttgaatagtataattgtttatgcgaagaaaaagcattgagcattttttttttaaacacaaacaagatagctaatgttgatgagtaaaaagagagaaagagattgtgtgtaataaaataaaataataacatgaaaagaagtaaaatagtaaataaatgtacataaaaacatgaatggtagccacacaaaatctaatatgaatatacatctgggtttaggtgtgaatgcata

SEQ ID NO: 320254 - DNA, 664 bp, Cannabis indica
acagttttgtcatagcacttttagatcgaattataattaaactttaaaaatcaattcagggtcctatttgtactattttagaaaatataaggtctattttgtcatttaacaaaacacagggtccaattgataacttttgtaaaacacagggtccaaaatggtatttaccctatttttttgctaattgtttatctttgttattggaagatattatttaatgaagattgaaattaattaaaaaaaactaataaattcatgaaaatattaacaattttgaatggaagtacttaagtggtgtgtgcatattagtatgaccatgaggtattaaattaacaccgataaaatatgatatttgtgtagttaaatactatgccacactacttttactcattcaaaattattttcatgaaattgttcgtttaatccttctcaataatgtttgataattgctgctaatggagttttgtaatgtttagtggaatattttaagtcaaaattccacattttgtgaggttttataccatgtgtataaaaatataatttttttttgttaatttatggaaaaaattcaaaaaataaaattcaaaaatcatgagaaaaatagtttaataaccaattacctatactattcaaaaaaaaaaaaaaaaaactaaaaacttaacta

SEQ ID NO: 320255 - DNA, 1998 bp, Cannabis indica
atctataattttagctttgctccttttgtaaaattttgtcaattgtaatattgtgaaataaaaattataaattactaagcgtatattattattttctatagttcatgaaaaataaaattccaatctgattattattaaatttattattttcatgtagattttaagtgaattattctattttctcccactgattttttcataaaattattatgttatttcaaaattttaacatatttacattaaaacaacattaacgcacgtgcaaagcacatgcatatacatatatataagattgtaaaatttaaaaggaagagtttactaaaaataattgaaaaggaagaaaacaatggctagaagaattttagatatggatgaccaaaatgaggtacgtggttagttgtgattgctttgagagtcaatatttattggtggtccttacatttaatttgtattatgtacaaacatccaactacaattgattcattttaaaaaaataatacacatggattataaatagacatttatttaatattttattttcaatcaagttaattatttattttgatgtgtctgtcgataatgaataaataaatggtagattactacattatttaaattcatattatgttattaagttgttagttttatgtaagttatttttaatataatatatccttgaatatagtaataaatactaacgtttagttattatttatgaatatattatgtgtgtttttgtcttttagtatttgataaccttatacaatctagtttattcttgtcattctatgtactcacgtcatggaagtacattaatcaaatattaaaagagttaataaatctctctttctgcaataattgcctatttttcttttttttttttaagtcttatctttatggcttcaattattaatatgttctacgtagtacgtactgatagacgtttttgtttaatatgtacatttaaattttctaccaaaaaaaaaaaactaatcttgtgttaccacttttggaaatatctaggtttcatgttactatgtaattttcatttatatgaaaataataatacttatagataaaaaaaaaaaaaatcaaccaatataagcttaccaacaattttcaaatatcaattaagagaaaaaggctaatagaaattttcagctaagagttcaatatataatgtacttcaagcaaagaagattttaggggttgatgaagagtttgtgtggaatggtagaatttcacacatctttagattgtaaaactaatttttctctggacaggaacaaagaacaaatcaactccctaactataattactacacaataatctctgaacaaaatataaatatttatttaatttgattgtaagaattaagaaatattaaattttttgggaataaatgaaaacaaatctgccaaaaagaaaagtacagtatgttattttcttgagacatcataaacatttaattttttcatggaggagaaaaataagatgtgtatatgctgaagaaaataacttagcaataaattcaatggaccactcactaagtgcttccactcaacagtctttttactttaaaaaaaaaaaaacgatagaaataattatctataagttattagaaatttatggtcatttctcccaacccatgtttgcataaaaaaaatgaatttataattcaatatggggaccatttttcaatgcttaggtaccagagtcataaaaaacgtctgtacatacagatattatgtgtcactctattattttatactaataattaatttatttcttttatattatttttatttctattttaaataattttgtgatctaataaagaaagttactaatatttaacattgtggacccttaagctttcattttactaaaagatcttctaaataaggtatcttactacgagaatattttttttttcaaagaaacacttttgtaatatttttcgtttgatcaatgtgatatgtatgtatgtcactttct

SEQ ID NO: 320256 - DNA, 1685 bp, Cannabis indica
aatgacgtgggctaatcaaagaaagacacgtggacactaaattggcacataacggccaggtacttacggaagttccacactagtgacggaaggtatttttaccgccaaaaatatgacttacgtatttatctgctactcggcataaaacttaagtatttatgccgcaaattactcaaaaaagtattaaaattgattctgactatatagattaacattatatctctctagataaccacccttcctactcacataattagcctcttgaaaaaaaatgtaatactattagactaggtctaaaatttcatttccattttctaattcaatattcttgctatcacatatagtattcattatttttaagtaaaattaatagtgttaattgtaaatctttataaacaattaaattgacaaattttatttagtacaagtacataaacgaatcaaaatttccatccgaaggacaaaataatttgttcacattagaagctcccgatatataaatatagggatatgattttgtcatgtgatgtactttcacggaatgtattctgtgatgtacgacagtcgttaaatgagagagttatttgatctgagggctggggttgatttaggactaattagggttaaaatataataacgtactctgagacccatctaatgtaccatgagactcatataatgtaccaagaaatacattccgtaaaagtacatcacgggaaaaaatcacgtccctataaatatgtatgaataatctatagaattctttttatactaaaacacccttgggtgtatcaaaacactatatcggctctaggagaattttttttttatttttttccttaatcttatatattggagttatttaaaatcgccttcaaattttcgaaaattctcctcaataccaaaacaattagaagagtatcaaaatatccattttggagagtaatatagatgtcccaagttataatagtggtattaacatttttgcttttaatatttcagcaactatagtatgaagttattataagtaaatgatttgagagaactgatttgagagaactgtacgcaaatggagacacccgccaacacccatcattgacatcccttgaccagaggcatttttaataggctaattagaatttttgcctcctgaactttgacatataccaaatcatgtcccctaaacttttaaggtcattgaaaatgtccatgaactattgagattattggatttaaggacttttttctaatcttagtaaaaaagtctaacatggatgaaagttcaggggcataattagtacatatcaaagttcaaagggcatgatttggtagatatcaaagtctggagacatggtgtaaagaccgcctaaaataatatttgaattattatttaattagattttatgcatgagatttgattttcatatatatatattgtaagttggtgaaaattaattaatttcaatgtgttaaaaatgttatttatgatatcctcgtagctctgtaatgtgtttggaagcagtggaaagagacgttgggccagtagagttgcattttctgtggtatataatggatttaatgttggggtgttatagtgaggtttcgttagtgtcaggaattggttgaaataaattgtcatgaccaaaacacccttgaaaaccttttcttaaaactattggtattta

SEQ ID NO: 320257 - DNA, 1469 bp, Cannabis indica
tatactatttttttaactttttttttttttctaaatttatagtttgggttgctccgataatttctatgtgaattttgattgtgatttatgttgcttagttggtttttatgtgggttgctatgtagatttttgggaaaatacaaaaaaataaaactgttttgaagtgtaaaaataaaaaaaattcttaaaatttaataataagaaaataaaaaaaaaaaatatagaatacaaattgatgcaatagatgtgcaaatattaccctttcaagagtttattttttattcaccctaaaaaatgtatttttgattaatatgtttgttggtttacaatacttattaaatttataaaaaagatgtaagataaataagttagattatacataacaaatatatatttaaatagaatacaataatgcatggcttaaaaaaaatctatatctttaactataaattttcaaaatatagcataatgtcaaaattaaattggaaagaaaattatttatgtatttcataaaaactcattttgcaatgaggatatagaacaaaataaaatacttttgtaatgagaatataaaattaagcaaaacaaataatttatcaactcatcatataaaatttcctgtcaaatctagttagttcaagacatgaaagatagtaatttatcctattaaattaattgaactcctccaccaaacaaattaatttctaatttccttaatatcttcaaaaagctttggcttccattagctttcaaagtgtctatctgcaaattaaatttaaaaaatttattaatttactaacaatttcaaacaaattataataataaatagcctgaaatttgttagactttttcctttttgaagattaaaaatcttcctaaaaactaaatagaatttgtaatactacttccaataattattcaaattgaagatgttatagttttatctcttattgagattaaatgacattgcattgagatgagattcagattatatttataaacaacaaaaaatcaaaatatatagaagatcaaagtagaatttcaaacttatgagaagcaagtttataaaaaagggtggaatgaagagaaaaaatatagtagaaagagagatatatgatgaaaataaaaacaataaaaaataatgataatctttcaaagcaagaaaaaaataattacctaataattttagtgttaaatatccatttgagagacttgccaatgcataacctgaaaatagaacattaataattaggaaaaaaaatggaaagaaaagacataataaaatcttcaaaaattaacagccattgttaacttatgaatgtccacaaaactacaaattataaatgtccacaaaactttaaattatgtgacactatatggatgaggtttcaatggttacatttttattgtaaccatcatagttacattttttaaagctattggattattattaaatggttgtgattaat

SEQ ID NO: 320258 - DNA, 1152 bp, Cannabis indica
agtgcacatgctgttgcaacctgtataatcataatgtaaataattcctttaattttaatttagttataacttatacatgagagtagcaagcttatgacacaccatacaggagagaataatctggattatgaaatacttgctcactactacatcatcattttaacagcttcaaactattttaaagcagctatttgaaagactagagatacaaaaggtgaaaactttatgtcttgatacaagacttaactattatttctattagacacttttctgactttgctatcaatgaaactctagcctctctgtttttcgctctttttgttctttgttattctcaaatatttagcattgctaatagtgcttggtttatgggagtgagtttattaagcgtaatcacagcttggcagaagatggtataattgtcatacgtacagtttgacagaagcaattgttgtgcagggtggtctcttggtattagtgtcaattgttctttctcgattgatcatgttcgaagtgcagttttgagctttcatcaaattttgcatttggatggtgttttggtacggttcaacaatattttaaatttgtaatggatataagttcatcttaggaaaatttcaattatttggttatcttaggaaagaggagatataaaactgattctataatgatacttacaggcatcgctttaatggcctttccaccaaaaccacctccaacccttcttgtgataacacgaacattatgccctggtacatccaaacattttgcaataacattatgtacaaattcaggacactgatttgaactgtaaacaaccatgcaattgtcttcatctggtatagcaagggtagtttgtgtctccatgtagaaatggtattgtgaaggaagcttgatctggtaagaatgaaagtataagctaaatactgcacagagatgccaaatcagtgttcatgcaacttgttcactctctttcttttctttttttattatgctgtagtacatgtagtctcttctaaatagatgagactgccataccttagcagatataattttgtggtcagcttcagccattctttttgatgcatcaccaacttgttttgggtaaatgaccggaggcacttcaaaaaaactagatcttctaacagcctc

SEQ ID NO: 320259 - DNA, 2372 bp, Cannabis indica
ttataaatagtgagctatattcactaaaaaggggagggcttcttgtgcctcatgcactaaaaataaagaaagaaatacttaaaaatatttgaaagcttttgagagagaacaagacactcacttacttcttttctcacaagtaatacaactaaaagaagagtagactattactgctgaaagtggctgaacctacaaatcttgtgtgttgttttctttacaacctttataaatgctttattcccgttatcattttctatttgttccttatgtaatgcatccgaaccaacaggagaaagacatcatttttctcattgaaaaatcataaataatttttacgattatattataatatgtattctgagcagtagtaccttttgggtgtagtatttttgacgattctctatagtgcagtggaggtccgatacaatatttcaattggattgttttatactaggtatgatggggttaatagtctgcttgcacaattttgagcagtatcgcgaacgtcttaaagagagcaacctagtccgtgactcaacctaaattttcattcattaatttcattcctttttctttttctgcaacaactattccaacaatttttaaatgttttgtttctgtcatgactactgatgagaattagtgttgttgatattaataaactttttttcgttttgagggaaatcattttaaacgatggagatagaaaatgttattttttcttactatgaaaaagattacttatgttatgactactgataaacctgttatttctaaaactgctaagggtgatgaaaagcagaagcaaactactgatttagcaagttgggttattctgaatggtttatttgatgatttgtatgactcctacaattttgacaaaactggcaaggaaatttaagacacacttcaaaagaaatacgacattgaggaggttggaacgaagaagtacactatcagccgctacccacttttgtggaagaaggaggagtcacacaaatgctcatatgagaaaaattgtttattaacttattattttttatttaattaattaaaattaatttataaacgtgtttaattgatgagtaaaactgagacgttttctccttagctttttacagcaacgttcacaccatccagctttctctcaccacgattagattaaatgacttttttcccattattattttatgtgggttccctatataatgcattagaaatagtaggagaaagacattcattttctcacaaaaaaatcataaacattttttacgattatattataatatgtattctgagcagtagtatttttcgggtttgatattttcgacggttctctacagtgcggtggaagtccaatatagtgtttcgactaggttttttttatcgtggggacgatgaggctgatagtctgcttgcacaattctggcagtactgcgaacgtcttaaagagagcgacctagcctgcgactcaacctggattttcattaagtaatttcgttcctttttatttttctactgaaactattccaacaatttttagacgttttgtttttctcatgactaccgatgagaattctggtgttgttaatattaataaatctttttattttaagggaattcactttaaatgatggaggcagaaaatgttattttttctattatgaaaagcttgcttatgttctaacaactgataaacctgatgcttttgaaactactaagggtgatgaaaagtagaagcaaactgctgatttagtaagctaggttgaaaatgattttttgtgcaaaaaatttattttgaatggtctatctgatgatttgtatgattactacaattctgacaaaactgccaagaaaaaatggcatgcaatttaaataaaatacgacactaaggaggctggaagaagaagtacgttgtcagccgctacctaaaattccagatgactgacgataagtcagttgaggctcaatttcatgaactaaggaaaattgctcacgaaataatttttgaggtatgtctttagatgaataattccaaattgctgttattattgacaaactgcctcctcattggaaagattttaaaaatactctctagcacaaaacaaaaaaaaaaaaaaaatctttaaaaaagtctgttcactcaccttcgtattacggaggaggctcacaaaaaagactagaaagaagaagtgcttgttattttaaacaacaatgctaagaatgtccagtgcgattacgaaaaccattgagaaaattttttaagattcagaatcgtcaccatgatccaaaccgcaacagtaattctcagaataataaccaaaattggattccaaggaaaaaaacaaacaacaacaaccttctaataataa

SEQ ID NO: 320260 - DNA, 1379 bp, Cannabis indica
aggcttccgccactgtcatctgatgccggatgtactttgtcacatcctcatcgtggttactggaatcactaggaggaggcttttccctttgagactctagcttctggacttcgacctctatcttgttcttctttgtgactctacctcttgaattggtttggtcactatgccctgaggtgtggtttcctttcctcttctattgaggttggtcaacaactttagaatttttcggttgttttgtcgaaggattcttctttcgttcttcaatagcgattctctttcctttgtccttgcaaacgcctgaagttcctggatctttcggatctactttctcaggtgcatcagttgttggaggagctagcacgttaggagattagtttagtttagacagtcattacagcttccattctggtcatcttgcagagtaataactcattgaattgatctgtcggagttaacctgcttttggccaattagagttgtcttgccatgataaccacaggatctgactcattaggctggcttttctctccaacgttatcatcagtgactttttcctgagggtcgtcttcatgcatatcctctagtacgtctttactattaacttcaacatccccaaagctactttccccagattttgcatccttaataatgggatcgtctcgattttgatcttcatgttgacgacctttctaacgactagtcacctcttgagggtcattagagtctccagctctggcactagggccaatgaaacgaagacctgacttggttcaggtgagcgccatgattactcgaacgtaatctataaatggtctcattcctttcttcagctctcaatgaaagcaccaaaatatttatcgaaattttcagaaatggaatttaaataataagaactgatgaataattaatcaaaagagcaagtataaaaagagacaaatagtttttacgtggttagagaggtaactagccctagtccacgaatagtattatttagtaaatacttatcttgtaaaaaccttcaagaataaagagaacatatgttttcaagtttgcccgagccaagtttacaagagagttccacctctaatccagaagattcctggagtatttatattagtttgagaattacattaggttttttctctcccactattggggagtttagagtaactaatactcttaggctatctcatgaagtctcgcctataaagaagatgatatgctgactaggcatgtaaagcccgcttagttaatttggaaattatcagttaattgattaattatgaaattatttatagctatttaaataatttattatgctgttatttatggaattcagaaatgcatgtttatgttattcagtagttttcatattt

SEQ ID NO: 320261 - DNA, 1012 bp, Cannabis indica
tttttaacagacaaaaaagttcaaagaacatcatttgatagatatcaaaattcggaagaaaatttctaattaacatattcattattccgattacaaccaaacattttcaagttttcttttatatttttttcttttggaagaaacccattacgacttcccatatatatgaagaaaaatggtttgtgtatgtattcaacaaatataatatttcaaaaaaaaaattgtcttactagcactacttgtatttatttatgtaatcatatatgcaggggccggccctaaaatttagtggatcataagaaaaataatatggtattttttaaaattgataaaaaaaaaatgtgtaattttaaaagggataaatttttttaggcccctaagctaggtggtccctagacacagatctaacccgcttatgctcagggccgacccctgcatatatgtgacactaaataaaattttacattattattgattttaattattaaatctcatgtattttaatctaataattatggttaattcttttgtaaagatatttcactattactcaaaagaataatcattatatgtaggggctaaagaaagaaagaagtggctctactttttttaatgacctttatttgctaataataatgctaaaactaagtgattccaccttgaatgtatacgattaagcactaactttgaactttcatagtgtttatttaatattaatacttatgtataacaacaagtgtttgtcacacgtttttttttcttttcttctttgtaatcatagcttttctcctttttattatcattattatacattttttttattgaagaggaaattatagactgattaaataacaaaaagacaaagattaacaaaacgtgacatcatttaaataagggtgcgattttaattttatttgctttatagaatagtacccactaccaactagattcttttttttttttttgtgtgtgattatattctgattttatttatatgattaaaaattaaaaa

SEQ ID NO: 320262 - DNA, 3256 bp, Cannabis indica
cgtctaaatgacttgccctatccattatagtcctatactgctcggctagtctgtagtacgattcagtacaactaatttgaacacggaatctgggataccaattgtcaaactaatgtgtaatgctatccacgaggagaggatgccaaacataaaagttaaagcgacaatctcaaaatgtatctagagtgttatgttcagccctaagcagtgtggatgaccaaccacattgattaccttaggaagctccttcacccacttcctgaggggcggtattctgaaggtacagtgcccgagccatgtgatcttaagctttatcctcatctgggatggaaacctattgccaagaggaatacatgggatatttgtaatcacaagtaaactccttgtcagttaggagatccaaagacctcagattaacctcgcttagaaggaagtcacatgacctaaggccatacgagagagtcagcaacaacttgcaccattcggccatctgaggggtaggggcaggtcttttcgatgtagttgtcgagaacaaaacaaaatttcagtcaaataacttggaataaaagacatggaataattcaaccaagtctaatgcagataatcacgtacgaattatacggaaagtggttgtgccaatcatggaaaggacaatcatccaaaagaaattatccttgaaagaggttttgttcgacaaatccacgatgattttgcgatcgtcggagtgagtgccgagatagtaaaagccccctacggcattcttcctcgcaggaacagctttaacaaagtagagatactctaattccaagggagtggggcactcccaatgcaagattttatacagaacactcaaacttgcgaggattgtataagatgtgggatttagttggaacagggcaagctctaggtggtttaccaagtccttgaaatagtcacgaagggggattattgctcatgccttgatgtgctcaagactccaagcgcctattccagttgagccacttgtactagtctcaccactagcccattagaggtctcgcgtgtaagtggcacaggtgggtaacaactaaactcgccaactcgtactgatctaaccttacagtgtcgcttatactcaatgccacaggtccttattgaattgcctacgtaaattgtgatggtttgcaccctcaactctattaactttacctcaaaggtgacgttagggtcctggggagtatttgatttacgtggcttgggagacattatttcaaaatccaagtcacctggttcaaaagcaattgtgacattgggtaaaaatagcggtttagccaaaggaatagaagacaaactgggacgttcaggccaagcaacatctcgcaagaaacaacatttacctttagtattttcttgcaagaagcatctgtggtgactagcaatgtcttcctgatgaattttcactaagtgttctataattcttgcttgatttatctataatttggattggggttcagaaattttgggtttgtaagggatggcaatctcagtagggtaatcaatttctaaatcttctagaggataaacttctaaacagactgggacattgctgcaaggaaaaagcaatcccaattcttggcagaaatttatcaaaccagaagttggtaagttggagattctagaaaacctacatactgtctaaaccctaatatttttcgaaatacagtctaaccctaaaaattgctaaaaacaaatgagataacaacgatgatgaccaataagatagtaattgagccaaaaaatacaacataataagcatgttagataataaatagaaaagccacttattgtttaaagttcgggtttgggaagatgaacgactctgcaatctgtgaatccctgaacgtcttgaagatctctccgaatgctttgaagtcaaaaattgaatcgaatgaaactcgtagggaaaatgccaatgacaaagaaggcatgcaaggtttcgaaataatctgggtacgattttttgcaggaaaactggaaaaatttccataagtttttaaatggcgaaaacaatgcaaatgtgtttcttttttcctttgtatactcttgggttaatctcggttagaccagaaagatgattaatcctacagatagaattcgaaagaggagtggaaaagatggtccttaaatgttgatgtacttggaaaccacaaaactgccaaaatcggaggacatgcattttttcaaaaggtattatgacaaatataccctctataatcatgaaaaagcacttttctttaaaaagaactttttaaggggcaattgttatactcgaaattaggctaccacttcagaggaggacacgtgttaaattgagagaatacgaatcaacaaaaataatgatgattatatttaaaatggagtaactcattaaatgcagaattgacagggtatatttacaacttgctggctgtaaggtctttagcgaggtaaagatatacaaactattgcatcgtgtgatgacgagaaaccatacgacctcagtagtgtaaggcgaggcgtcaacctcgctacgcatgaagagacaaagacgagacaggatgactgttaagacactttgcacataatataccttatacaaactaagtataacagtcgaatgaatccaaacaacgaatagcgaggtatccatctcgctataggaaggccactcatggtaccttcactaatcagcttcagacatctttcaatgcgtttcactgcttcgtcaagtcagctctctcaaatagaagctgacattcaaataatattgactgctgaagttcaccttgtcactaagaactgcaatttccagatgaagcgttatgtctggaatagcataaacgacgagatttacattatcaacctcggaaagacatgggaaaagctctagctcgctactagggttattgctgctatttacccagcgcgatgtcccagaacgatacgctttacaaaaaattaaatacacgtatgcattgacccagtaaaagcgaaccaatcacaactgtgtaattttcaaataataactgcgttattttacaatggatgcaatctattgccacaaatttaggggattatttttgtaagatataagtcccatttgtaattaattgccctcatacgtaactataaataggagcagttgacactgaaaaagggattaaacattcatgagaaaaaagccctagaattctatccgatatgtaataagattgactcgttgactatgcagaatttt

SEQ ID NO: 320263 - DNA, 1797 bp, Cannabis indica
gatgacacaataaataagaatattaatgtagggtaagggtttggatgaatttataaatcaaataaacatataaatgataacatgaaccaaacgacacactaaataaagtgataaaaatacttactgtctctttattgataattaaatgatagagattacatttaaatagagttttatttagggcacaaagcccaacaaaagaaacattaagtcacttacaattacataagaaacgtgggtgtggccatacgttgacctccatttacggtgttaaaattatcaagaaagtagaaactctaatcgacgactccaacaacaatcgagaacaggagttgaaactcgaatcaacgactcaaattttaatcgagatcgattttctatgcgaaggactcaatttcttaaggaatttgtttcattcgccatcaaacttacaattttttggagaattaacttaccatggtaagcttttatttattttttatttaattaattatttaaatttaaattatttattaaatcatatttaattatttgaataaataatttaaccaaatttaattacagatatttatatcttataaccgatttaagaaatctctcaactacttgaaagaacatctcaattactttttaaattcaaatatttatctattgaattaattaattatagggacaccctacaataatggcacatgcactgtgtctgaacacagtgcactgtcaacttttgtttttttttcctattcaattaatttaagaaataaattatctattataagatataaataattattattttgacaattcaaaatagattttttctaaatatccataaataattattgtttcgtttattttaggaaaagaaaagacatacattttagactattttatttatcttaaggatattagatagattttagactgctttatttatattattgatgttcattttcttttttttttggatggttgtgttctatggtacaaaacttaagaatctgaattgttttaaacctttcaaatgagattattatggtttattaataatatatatttattaaataattttacaaaatacaccataaataaattattgttattgatacataaaaatttatgaaattaatgatgtacatcaaaatcaattctctaatttttcttattaggtcatcattattttaaaaatattatatataaatatgtgatattaatttatagtattattgtagtaataatattttgcaatttgtagaatacaaattaaaaaaaaaaaccctaattttatgataacatataatgctaagtttagattttaagctcaagaaaataattaattttctaaagatcttataactcttgtttttttaaaggctttttaatcaactcttgttgaggaaccctaaactattaataaaaaaacaacaatgtaaataaatcatcaacttgttcttcatatataaacttatatatatataaaacttgtatatatataaaataaaattatctttatgtagttgttagaaaaaacaaacaaaacattagacatcaataatgtttattattatttaaagatctatttgtgtctgtataattttttttgaaatatactttaaagaaatattaataaatattcatagtgcttaactcaatattgaattctatttattttactttaatagatattataaaaaattactaactaattgtaagataatactttattgtagcggtaaacacttaaatatgtcataacaatgctctatatatactttagcatttctaaaaaaaaaaaaa

SEQ ID NO: 320264 - DNA, 1067 bp, Cannabis indica
acaaatcatcaaaacaccacaatcacacaactatgcacttaagaatacaattcatggaaacacacattttcaacttcaaattacaacaacaaaataaaaagaaaagagatggaaactacatcaagctctaaaccacaatcttcttcaagttccaagcacaatccaaactttaatctttgaaaagaaaatgcaaaatgaagaatggagaaaaagagagagatggtcagtttttgggtaaaaaaatcatagatgtgttttttttcttattttgtaaaaattcctcttttatcgataattaattaaatggccaaaaagaccaaaatacccctaaagtcataatatagcatatgcaccattataaatatattcggtcaatagaataatcacgaccaaaagatgaaattccatatctcggaaaaaatatgaaaaatagattaccctgagaatcccatatcttacaagtctaagatatcaacgacccgagataccatatgttatacctgaaattcggctggtactttagaagatggcacatcaaccttaagaaatattaatcgccaaatataatggcaattatatttataaatattaaatggaataactctttaaatgcagaagtcaatagtgtatatttataactcgcagactgcacagtccttagcgaggcacgaatgtatgaactattgactcatgtattgacgagaaactatttcgtgtcagaagacataattgcgaggatgatatcaataatatatagcgaggcatcaaccccgccctgtgtggaaaggtgttgacgaggcgagttagctgttagaacacttagcgtataatacacattgtactaactaagtataacagcttgaaggacatgaatagcgaataacgagacacccatctcgctataggaaggcatactcctgctaccttctctaataagctccagacatctttcaatgagttccactgctccatcgtgccagctctctcaaaaagaagttgacattcaaatgatgctagctgttgaagtttatcttgtcaccaagaactgtgattgtcagatggagcgt

SEQ ID NO: 320265 - DNA, 871 bp, Cannabis indica
atttattgtggagtgctaaataaaactctacttggttcctcatttcttctaacaaaaagaaatcccaaattcaaatttccattcccattataagaaaaaaaaaaaaaaaattaagccacaacaaagaaaatttatataaaaaaaagatattgttgaaaattccactctaatataaatatgcatgatgatgtgatatatatattagggtagctaggtcaaagaaaaactcactattaattaatattgttatatatatacaaagctttcattgattagctagtatagacttttgacatataaatttcaatctgtcgctctttattgcctttgcttttgacagaatttcaaagtgtgtcaaactttttcactgttttattaaattatgtccctctatcagtctctctctcatcccaatttgtattgttatatatatataattctttcttttgtaaataaaatgtgtattataatttataaataaattaatattagatataactatcattataaaagatatttattagaatagtggtcgtacagataaacaattatattgatgatatatataggtaaataggtaaaaattcaatttaccatattcattgtaagtaacaaaattataagtcctatttctacccatactaaaaaaaaataaacaacctataaaataaggtgatattttttacaaaagaatataattctaccaagtctttatacatataattaataataaataaatactattttagaccctctgttttacaaaagttaccaattggaccctgtattttgttaaatgacaaaatggaccctgtattttctaaaatagtacaaataagaccctgaattgattttttgtcaaaataaagtt

SEQ ID NO: 320266 - DNA, 675 bp, Cannabis indica
tttagagatcttagacaatataatatttctttcttgggtaagcaagggtggagattacttaccaaggaagactcactcgtaggaaggatctacaagggtcgatactacccgatggggtcttacatcactgctgagttaggaaaaattccagctttatttggtatagtatatgggaagcccaatccttttttcgatgggttgctaaaagatcaattggaaacggctctactgtgagcattttaaacgatccttggctgcctcaagacagtaatccatatgtaataactgttaaccaaggacttgataataaagtggtgtccaatttgatgttggtgggagaaaaggggtgggatgtagatgttgttgatgatatgtttgaagagcgtgatgttcaactgattttgagtatccaattgagtgactcaacaaccacggattcttggtactggaagatggaaacttcgggcttctactctgttaaaagtgcttacaatcatcttcaagtttcatctagaaattgcctccatcttcaagatcaaagctattggaaaaagctttggaaacttgacatccctcctaaggttcttcattttttgtggagagcttttcgggttgtcttcctaccaaggtacaacttagcactaaacatgtaaatgtcgatctcatatgtccttt

SEQ ID NO: 320267 - DNA, 665 bp, Cannabis indica
aaaaaaaaaaaaaagcataaatgtaagcttattttaccaaaataatttaaaaaaaaatgacaaattgtagaactcaatttgaaaacaatatactgaaaattgagaaaaacaaattaccctccaccgctaataacacaaaataaatatacattatattatatagtatatacaatttcggggacagtttagagcactcataataattaatataaaataagattttttttaaaaataaattttaagaaccaaactaaatttattattttaatttttctttttatgtgtgaatatatgttaatattatatgtctcttctacgatgcatccacaaaaatgagtgtactaatgtattttctttgtgtttctgaatgtagtgataatcttaattttttacatgataatgtatattgtagttattcaagatatcttgtaaaactttaaagaattcaaaataatttacaatacaaaaagtagggttcaaataacttattttgcacgcctataaaataaaagaaggaagtgtgtacaaaaatttaaatttatttttggcatgttaaattattctaaatataatatgttagaaaattaatgatatacccaagatctatttgtatataacatagaacacaatagtaatatataataattaggtatgtgtacctgatt

SEQ ID NO: 320268 - DNA, 627 bp, Cannabis indica
atcaaacttttaacgtcataacaaatatactaatcaagttgttgtaatgaattgtctttaaaaaatgatataatatacaaatatattacatattatatatatcaataataatatattagcaataagaagtaagaaaaaataaaaaataaaaataatttatatgaatgttccttaaatttatttgtaagtgattgtgtaagcaataaatattataatgtaaaaattaacatttttgtaatatataatgcaatacgattattaaatttaaaattgcaaatcctactattgctaggttatatttaacctatgttacgggtctaataagtaagtattttctcggttattggtgtcttttggagcgattttacgcttgattttctttgtttcaggttcccggggtattaaagttcaaattcagtcaattgacgaaaagacgagacaaactggtgaaaaatcgacaaaagctgctcattgggtgtcagtggtcgcgactagcaagaagtcaggtcgcgaccacgacttgaagatttggcagaatctatgtttttcgagatttgcctgtagtcgcgaccaacctttaagttggtcgcgaccaggtacggaaaacacagtttttgacctaattca

SEQ ID NO: 320269 - DNA, 709 bp, Cannabis indica
aaaaaaagttgacctctgatgaaaatcatcaatattcagagtttgaatcgttttcgagcaattcgcaaaaaaacaaaaggaattgttttgggcacaaattttaaacttgaaatttttagaatagtgatgtgggtgtgagacattagtttaattagctttttaagattattaaaatgcaagttgaatcgcatcaattggatcaatattgggagagttatggtaattttactaaagattattttagcacccagcgcttacgttgacaacccagcgcccaggttaacatcctgacatcaacctggacattttcaaatcataatccttaatgaaaacaaagaatattccatgaatacttcttctaaattactgttgacaatgactcaggttaacaaagtgtaaacttgggcgctatcccaacaaccaagtcaacataggtgatgggtcctagtttttacctccatgtcaatctgttcattcccaaaacaacttaattattcattttggaaggagataaataaaattctcaggatacttctttaatagtttgattggaagtaccctagattgacaatacatcaaccttggcgctaggtgcacttggtgccgtaggcacctagtggcttaggtgctcaaaattgaaagtgttcagataatgattttgataccttagataagttcatgatggatcttattcatgtcaatgtaaaaa

SEQ ID NO: 320270 - DNA, 571 bp, Cannabis indica
acaaaaaaaactacttgtaactaaaacatagtatttagacacaagttgtcactaatttactttgagtcacaataagtattgtaactaaaaccacatttagtcacaataaattgtaatttttgtgactaattcatttagccacgaaccttttagtcacaacataattatgataattaataaaaattaaaaaattctgtagtgtcaattgccaatgctaacttccctattgccacttcattcgattccttgattcttctcaaccccaagaccccttccttttatttgatatttcttcttcaacattatatgaacgtatataaatgtgatttatgcaattaacctaaaatttggtttaacatatgaacaatgggtaattcgtattcccattgcacctagatgtgtataagcgtgactttttaaaaagggtgttagttgaaaaataccacttttattaatcaattaatcaaatttacttctaattttatatttaattgaaacatacctctttttatatgtattgtacttaaaatactctcacataagagagtcacatggagagtatcttgaagtg

SEQ ID NO: 320271 - DNA, 1162 bp, Cannabis indica
aaattttatatttaattttttctagttatttttaatttcatttttattagattattacaaaattaattaatttattattattttttatatagaaattattaggggcaaaattttccgccttcaataataacttttaggggcgacttttattgtcgcccctaataaagagttttagggacgaagtattagaggcaatattttgatggggacttgtcgcctctaatactatttgggggtgaaatttggaagttttaggagtgataaaagtcgcccttaatgctctcttttcttgtagacgtgttatgtcactatttatgatatttaacacttttcgtaatattatcttatgaataatatttttgtcacaataatttctgtgggttttttcttattgatcttaattttttttcttatgaaaaattttgtttatttaattttttatttacaatatttttatctagtaaattttttttattaatagaatattattattttgcaccttaagatgtgaaaaataatacatataataattgattagcagtttctcatattattcactaaatcaatatttgtgagacccgatattgaaatgcaccaataacgatatgtcatcatttatagtgtttaacacctcccttagtatttttcttattatatccaatagttttttttaaaaaaaaatgagtatattatatttggaccaaattttataatggtgctcttcagggttcccccccccccttttttttataaaaatgtgtaataaaattaataatagtattaaattttttattgaaagcatataaaatttttgttaaatatataaaaaaaataatgtaaaaattattaattacattcataagcagcaaaagaataaattaaaagtaatatttagagcatatccaatggtgagctataaatgtggtgtattgtccttttttttagaatattttgctaaaacttaactccaatggcaatgtaaaatgtgtgttaaatttggcaaggacttgtaaggcacagttaattgattttaattaatcaattataattcaaaaattagattatgtctagtttatgaattttcactaagcaagggcttaaatgtgaagaaaataaattctagggcttatttattaattaagagactttattaagtctaatt

SEQ ID NO: 320272 - DNA, 1092 bp, Cannabis indica
cacaagggtttagctcaaactaattagcgacacaaacaaagctatacaaacaaacaaaagaggcacacgtttaataactaagggaaaccaatattccaacttaaagagagcagtttaaaactcaaaaagaaaaacatttagttttaagtagctaagcttaaacaacaacgtcgtcattgagccccccttggcaacactaacaaagacaaattacacccagaacacataacaagaggacaaacaatgataaacacaaaagataataataccaaaaacataaaatttaattaaaataaataaataaataaacattaaagttgaaagaaagaacactccctctacctaacccttgggatcatcatccgaagggctagaatatgcctgagttactggatcagtccaccgagcaagcacctcatctggaaacaacaggaagtcaactataggccttggggcgattcacttcagcgatttagccaatgcagtataacgcgcctgaacatagcgaaagtaagtaagtgatttatccacaaggtgctctaggcaattcatgatatgtgctagcagagtggaaggagcactagcaggagccagttgagtgatggatggctagccatggttctgagcagcagtaaagggtgtgcaatgactggcaacatgctgaatcgaaaccaaaatcaatgttgatatgctcttttataatttcttcaccgcccctataggagcattacccgctacgcaaatctgagtgataggagccgggaaaaatagggtgctgccctttttcttaatgcacttccaaattttatcataaatgatcttgcccacattcattttcttgctcgccaagatacaatacaataagaaaatatgtgtctgactcactgtagtatcatgggtcgtggcatcaaagagcacttaataaaagcaagcaaaacactagcttcgggtcgtaaagatcattgtaacaaagtttgatggctggaaggagagatagaccatgcaaaactcgagtgagtaacaatacgaagcacgacatcaaattagtgttgggttttgtgccctaaataaaaccctttacaatctgattag

SEQ ID NO: 320273 - DNA, 974 bp, Cannabis indica
gaaaaataatgccctttttacttatagggtgttaaatatactcattaaattttagataattataaacaattatagtattatattacattcggtcaattttcttaattatcttatcgatacagcataatattatataatattatctaatttagtttcttacctaagcaatctaaaaaaaaaaaattacaaattttattttgatttaatctttaatataatatatttgaacttttttactttggtaatcaaatttgtttccattttcaagtttttctagaaagtttagtttataaatataatttttacgttaaaatagagtttttagtatatattagtaatttagtcttaattttactaattgataaagttaaaggagtatttttaataatactaatattacaaaatcgcataagtgatattttaattttattctttaagaaaattttaaattttgctaactgataaagttaaggagatatttttgataactttaatattacaaagaacacaatcatataaatgataaagttgagtgagcaaaatattttgtttttctggcattagaatagtttttcatattattctaaaatgaactagtgaacaatccactaaaatattatactttaaaatatgagcaaataaaaataataaaattatcttttttctattccattgcattttattatgtccaattaatcgttttcttaatgtagtaactccgtacaccttttaatttttttttttattaattgtttctggattattaagaactccaacgttttaattatcgtacgatagaaaaatgatggtgttttctaaatggggtggggaaatcataatgtgaaaattgaaaaatcaaacggctagaaatggcatgggtaaaactatagtatacacatataattaaagggtaaatactattttggaccctgtgttttacaaaagttacagattggaccctgtgttttgttaaa

SEQ ID NO: 320274 - DNA, 673 bp, Cannabis indica
tattttctccaccattgaccttcggtaaacataaataactagatatttaggttagtcgcaagtgggattatttatttgtactttaaaatataatttgaaaagtaaaaaaaattaataattttccataggcccgtttagccccatttggtaaatatgggtcggccattttataaaaatcgagttggcctgtttaggcccgatacgactccggcccaatactaataatctatgcgtatggcccgagttgggcttactttgaatatatgggccaggcttgacctaatttataaaatggatcgggccgattcacataaaaaagtaggcttttataaaaacaggtcgggccaagactgcctgcccaaatgtacagttttattcaatatatacactattttagaacaaagtcaagaatgtcaatgtataaagggatatttaaggcaaaattattcaaaatttgagtttgtaaccatcccaaactcaataatttttttagctacattaatattcaatgtacttaaaattgcaatttttgtctaattttatcttttgtcagtatcttaaatatataaataaacttaggtaccgtttggtaatacttttatttttaatttttaatcacaaaatgaaagtaaaacttttgtttttaaaaaattatttttgaaaaacaaaaatg

SEQ ID NO: 320275 - DNA, 577 bp, Cannabis indica
aattgtaagttgacaaagtctaaaaccaccctaaagctagccttatccaatcccaattaataatatatgtatttgattccaagtatacatacactaacttcccaatagcataaattataagtaataatattattttcttattgaaaaaaaaaaacataacaacaacaacaaaaactaaacgtgtatccattcaaaaaaaaaaaaaaaaaaactaaacgtgtatgaatacgtacgtactaataagtttgcttttatagcatcatgaatatatagctttaaatatatatagtcatttaacttgagctaatatatattatatatagaggtgtacagaatgtcattcaatctaattagaacaatcgatttaatataatcggatatccattcataattggattgaatcgtatgtaaattttaaaatattcaatcagattatatcaattgttagatgggacatctgatcttacggataatcaaactgatcgaactatcatctaataatcattcaattatatttatatagttttaaaatgcatttataattttatatatttaatatatatttaacacatgagat

SEQ ID NO: 320276 - DNA, 964 bp, Cannabis indica
tttttaaatgattataatggtatttttgtcttagcccaaattttaaaaattgcatgctttgggttttggcggttcaagatttcgaggcacatcattagcattaaatgcccctctttcccaattttgtcgtgttcccatccgttagatcttatttcttttgatctatcggtgatcacttccaaggtataaaattcgagagtaaacactcatttaaccatttttatccttcaaaccttcaagcctttatgtgaaaatcatcgtgacttctctgcatgccctcactatcactaacttattttttttacgtgtttcatcagattattcgtttaagctatgaaagtttcaggatacatcgattcgcccatctcaatcccagttacagaactctttcttgtgcaaaaatactcaccagaacagtaagtggtctatacctttcttttttatatttatagtttaattttcacgattgtttgtcttctttatttatttttgtttgattattttttaggtaatttttgttttgttggataattttagggttaagtaagaattttaggtttactaaattcataggtttttggtttagtaatttcttctagaaattaagactattatttttgtacaaatatgtcccaatctggttctaaaattccaacccgagatttcccagaaatagaatgtcctaaaattttaacccttccatttgaatccaaaatccaaaaacctaaatccaaaattgaggtaaatgatgcaaaaaatagggatcatttaatagaaacccatcaagttgaaattgccagtcgttataggccatttttgtaagaaattaacgagagtaaacactgttttctacgagatgcagctcggctagaatcccagattttatcttctatccctttaaagagacccttgtttttacctcgagtcactgttgctttttcaccaggtgacctagactttgaaa

SEQ ID NO: 320277 - DNA, 841 bp, Cannabis indica
cagagacataattatcaatattctaaaaataataagatcctttcagcgctttgataacaatttctggtaaaatggaaaaattggacagagtcttcgtcatatgttctaatgtcatgcttaaaaagaacattatgattttagtgaattatgactcttttcgggttaagatgatcatgtcttttaaaagataaatcataatggtttttggtacaatcctactaattaacttatcttcctattaactatctaaaataataatatgttttattaattatctgagctcacgcgtttaattattaatggcactgtgtgtttatcatgttttcattttaggtgggtcagatttttgagtatctgtattattcaatatttatttcattatttattttgaaaagaccagcagaaatatcttagaaaagctttctagaaaatttataacatttgggacccaaattctcccttctaattttgttcgccattttctttgtccatacaataaaatcccgacacaattttgcttttctttttccaaaagggcattttaactgttcaagttgaatagtatgccacaaaccactttagcactttagcgatagaaatttggatcttgcatatgaaaatttacgtttaaaaatatgattggctatacttctattcattgtatattagttttaaaagttgaatttgtaatttgctaagaaaaaaaaatatttagaaaatttttcgaattagaaaaaatgaaaattctaatttgaattctcaaaaaacttaaaaaaaattattattataataattgagtaatttacgacataaatacttaagtttaatatttagcggtaat

SEQ ID NO: 320278 - DNA, 985 bp, Cannabis indica
ttttaattattattttttatttagtaccatatatttgtaaaatcagtcactaaaatagcattttttaggatttcgatcaataatttttctatattgctcaaattactcatttttttttaaaaaaaaatatataattttattaatagcaatcactaattcccatattaaaattagagaaatgagtcaaccaatcgatcgcctgattcacaaattgcttgacacaaaaactcaaataaagttggataaaagagattacaacatcataattaatcttaagaactctatattcagtttcctctaccgcttagaagacacaacagtagattctgttgcagcagaaacccttacgtaactacagcgctaacaacttcttcaattgtagagaacttgttattcataactactaacaacaattatttctttttcggtactttaaattgtcaaaatttattttaaaaaaatattatgacacatataatgttataactagtctagttcttaatttttaaaataaaaaattatttaaaaatgcgtttaacaaaaaatgaaaaaccaatttttaaaaagttctatttagtttttattttaatttgttattttttataatttcaaaattattttttcgtgaataatatcaatatgtgttatcatatttctttcccaataaattttacttatttaaaatactaaaaaggaagaataatttaggtattatggtaaaattattaaccaaaatcatagataaagtattattttgactaattttataaatacaagtatctagtaatctaacatcctgatttggctgaatctaacaattattttcttattatttttgtgctggtatggcttgaggtatatcttaggtggtgtttagatgggagaaattgttggaactttgtatgaaatatgtaaaaatagaaaagtgaagtgtgtgagtaggagtcccacatgggatagaaacactacattttaagtgtatatc

SEQ ID NO: 320279 - DNA, 1059 bp, Cannabis indica
  modified_base (993)..(993): a, c, t, g, unknown or other
attgggtttatttgttaacggagatcaaacttaatcgttaaatttaacagaatattcttttatttttaagtatattctgttaaaccaaaaaatggcatagacacttttaatatataaagatatatatatttatattaaataatagtaacatgcatatttggttatctaattatctaatttttttataaaaataaattttagatttttaaattatttttttaaaaaaaaattaatttataactaatataacagtattaatcttaatcgttaaatttttttttaaaaaaaaactgttaaactaacaatttctattacataatcacattaaagaagagagatatgagatatatgtgatttgaaacccttttaatttaatcaatgtataatcaatatatattactagttgtatttgagaaattagtatataaaaacacagcttaaacatttgatgattaaaagtatacttattttttaatatcaatataaaagatctcatgtgaaaataatatctttaaagtttatgttattatccagcaaatttttcttaaatgggtgaaaaaaattgtaaaaaaaaaattacagtattaatgaaaatataaattttattagaaaaaaatgtaaaatttataaggataaaaagaaaattttgaggataaacataaaaaatataaataatatgaggataaaaatataattatgtaaaaattaaaatggagaaaaaataattttatgggagtgaaagtaaaaataattaaaattttatacacaatattatgatttataaaagattgagtggggttattatgtgtcccacagaactcttattactaaaaatattagtcacaatattataatttattactaactatttttattttacaaatgacaagtagtcacaaaaaatgtgacttatttttttttttaaagtaatatcgttatttttttttctaaacaacgtagaataatatccttattttagtttgcatatacatntatcaaatgaactgaagttaatatttaatattgtaaaaactattaaaaaaaaaatctaaattttaa

SEQ ID NO: 320280 - DNA, 715 bp, Cannabis indica
gggttccctaaagagaaatgaatgtgttttcacaagagtacaaagaaagaggtacagtatcaaacccaaagacagccctgacataacattttcccaatggcttatttgcacaagtaaaaccacttggcatataatcaagaatattaaaaactaaaggaatcaacttcggattctgcctaactaaatatttctagaacctggaacacagtgatttagtgcagtcctctctaaataacaaaaacaaaaggcgtaccggttaagcacctgtttgtcttgaaactctcaaatccataaatatctagaaccccaatcaagctctttgaatcaggatcttgaccaatggagttattgatcttgttcaccagcctggagaattcaaagttcacagtatgaacaaacaattaaaacaagtgtctgattatttttttcgtgagtgtatagaccttaccaatcaaacaatcttgaatacacaattttcgccagagcatctctactgagagctgcagagttcggatccagacattttgttatggtctcatcacgggtcacaatcacacgtttgcataaagagtcttcaagagacttctcattgcacctaacaaatgttgcagaatgaactattagcaaatcatctagccatgaatatccaaaagtgcaaattagaaaataatataaaataaggatcccacatgaaaagctcagctgctattttgag

SEQ ID NO: 320281 - DNA, 742 bp, Cannabis indica
tgccaaattgtgtaattacctctaattacacacaaatctagttacattgtggctttccaaacgctgtaaataagattacaataaaattgagttttatttaaggcataaaatctcaacaaaatcttcttgactggttgaacaggttcgacttgcagcagagtggtttgattaacacagtttttgcagctgctgtagctcttgttgtgtgccatatttggtgtaattgaaaccgatgtgtatttgatgaggtttgtagttcgatcaaggtggtcaatggccaaattaagcagagtttgaagtttagagtgttgttttgcaagggtaaaaagcttacgaaaaaagaaaagaatatactagacgtaattaacacttttaagttgtttggttgctgctttagcagtgcgtatagtcaatggttatttgaataaaaaatttctttctttgcttaaaaaaattttaattttaaataaataaatatatattttattttattttcaaaaacatacgtagtagtaagactgtactcatttttaacttaaaatcaataaattacttcaaaatttatttaacagatttttgtaattatagtttatattgtattttttttattaatatttatgatattttttcttttattactttatttcactactttctgttactatacttttccactcattattacatagaaaatataaattgacactttatttacaaaaatacatctataaggtgtggacaa

SEQ ID NO: 320282 - DNA, 681 bp, Cannabis indica
tttgctaacaatttagtagtttagaaaatttcaccgctaaaatttgaacttagagaattaagtgtaagtgaaacgataattaaagaaatttaacggtcaaaaactcattatttatattatattataaactatttttaattagagagctacgatatggtgagagtttccttggatcacattcacaacaccacttatgcattattttataaattcaaatataattcataactttggctgtacttatgagttataatatatcatcattcatttgtgtgtattacaattttaaagaaagtccaatctccttgcccaatgcttcaagtggtcattaacttatttgtaatttaatttacggtctttgtcttgcacatgctatacacacttcatcaatttatggatcgattaaatgatctattctacaatttttttttttctttctgaaatacaaagtaatgggaaactaagactacatttaattaagtgaaaattaataatcaatatttttttttcgcatcttctcaagcaatattatagccattctataagtagatacgttgaatctagtagttcatacattctaattttgaagaggttttggatgtatatgtatgcttctttttcacaatctttgggcactctattaattattgtttgatatttttttttttcataatttgataa

SEQ ID NO: 320283 - DNA, 2066 bp, Cannabis indica
tattactaaaaatttacgttttttgagatgatcatgatatattttccaaattgattcttttttgatcttttggagatgaattcattttgccaaatttcgatcccatcaaacaactcaacaacgcatacacacatatataatatatgtatattaggcttctctatctatagctaattagctttaacaaaattatgtgtcataattcacaattgttttagatgatgaaaatttgttaaaaagtagtactaaaagttattaacaccggccacttgatgggccacacctttttacttactattcacatacatacatatataaatataaatatatatatatagagagagatgattccatcatctgataagattggcttgtaatttttccagaagatcatgtggactatattcctgaaaatacccgagtgaatgattaatgattatttctttgaagaacccataaattaatatatataaataaatatttatagtgtaaaaatcatgaactaattaaaaagctcaaactagtcatatataagagagaaactagctaagtgatgatcttttcgagacaatatataatataagaaagagataccacatattcttactaacattgtttagtcactttctctactcactcttccttattgaactcctactaaatttggcccctactgcttatcctattcatatgtatgtacattcccatttatcaaaatcaaacaatataatataaatatatatatataaattcaaaatatatatctattatatagctgcacaatgcatggttttctttatatttcaaaaaaaaatatatttttccctgtcacaaaatatttcttgtctagtgctgattttcttgtctaatatttaatggcccgcttcttgctgacacccaaaaatatatatgaaaaattatgtgatatatatttatataaatattatatatcgaatatatataataaggccgggtagctccaaaagctgattatgctgacttgtcatatatgtacgaatttgattcctcatgcattaattctcagtcttttatatggcatggcaatctcaaagggatttattttatgtggctcataatatatatgtgggttggttttggttattagacgtgaaatttcaggtgtacaaaatggaaggaaggaaggaaggaagtatagtcaataatcgaagtagctagtattagtaaaaaccaatgttaatatttctcttcagaatatggaatattttctttcttgagaaactaaattgcatgcgctgcacatctactttaagatgccaatatataacttcaattcaataataatatatagtggcatgtgttgtcggagcaattttgacacaaccaaattacgtataaataataaatgaaatgaataaaaaaactatgaacactcatttatagtagcaagtatttgtggagaagctactaaaacaacagaacaactagaaaatataaacaacataagagaatataatagttcagtcagattacggtctgcttagtccactgtcactacaaaaaatagctacttttagtgataactttttagtcacaacataattattttgtgactaaatgtgacttttagtcacaacaaaatgttacttgtgactaaaatataatatatagttataagttgtcactaatttagttttagttacaataagtattgtgacttaaaatacatttaatcacaacaaattgtaatttttgtgactaatatctttagccatggaccttttagtcacaacataagaatagtaatttataattagtcacaattttttcacttttagtcacaaattttgttgtgactaaaaataagaattttttgtggtgtgttgcatgcaaatgatttctgcttagtttattgatttagctcactcctttatatagaaggcaagtgtccttttagttttacataacagatcagttatagatccgttttacaattaaataacatattaaatcagaataaacgtaaagaataaatgaagaatagtttaattcgttacaataataagtacatcaacgtatgtgatcta

SEQ ID NO: 320284 - DNA, 1634 bp, Cannabis indica
taacaatttaaaaattcaagcatgataagtcaataatgcaacaactatattttttattaggcatctaatataaaaccctaaaacaacttataaccccttatgtgaaataaacaagcttactacaatcaagtttcctctgtataagttgtgtattgcaaattttgagctctattttaatatataataatattgtagtagcacaactattattcaatagatctacaacataatcacaacaactatggatgaaaaatatgtttgggcatcgttaagtaaaaatatatcaatatttttttggcactgattaaaaatcactcttacgttaataatatttttgtggagaaataactattataactttgcaaatcaacgttaaatcaaccaattttatatatgaaaaaatgtaatcatattataattgtttttttttaaaagagccttgtgttggattgttgatatgaaacacctacaaatatcatacaaaatcttgtatagttatcaacatgtaattattgacatgtccatttccagatcgttagtaaaacgttaagtcaactaaaatgcaactactcagaaatataaaaatcaaaacaatattttcatgttcgtggcttaagatgaatgcagttttactttagacttcgtgatttgatataaataaattcaccattgaaaagctagaaaacaaggacaatacaacgagtaaaatattagctattgtattgatatattttttcggattgaccgagaactctaaatctatttcttacaaatctatatttttatgaatctgcaaaatgaatttaggagaattagttttctggaattcgaattatcattcatggttgaatttatgtctcaaactagtttttctgtaaatttttgcatcagctggtaattacagatgtttgaattgatttgggtcgtcttctcaagtgacattgctagaattaatggtggttcttcgcctgttagggttaatttattgttgtcgtcctcatttgatcgcacgaagggttcgagtctgcgaagactagatcgtatgacttcaaggttagtgtaagaggtatttgagtaattttttttatttaggttgcataaatgctaactaggctggccaaatgtaaaattataatattgttactttttttatatataaccgaaaaaagctcaaataataatatagggtgaaataagagcatctccaaagtaaaacctaaaatatagaaatctatcaaatttacgaagagtttttcgcagctaaagcctctcaactatcattccacttacagttaaccctctaagctcaaattttggtggtaaaaccctccaaactactgaattgttagcaaatttaaggtgaaatttatttttcacaattaactgtccacatggactgcttatatgtatacttttatacacgtggcacgtttatattagtatacctaatattattatttaaaaaaaataaaaaaaaaaaatctttcaaaatttataatattttttaaaatattatatttttattttataattgtatttaaatttaaaagggaaatttgacatttaatgctaaaaggttacatatggttttaaaatattctccctcactacacattttttaactatacttttaa

SEQ ID NO: 320285 - DNA, 1678 bp, Cannabis indica
ggaaacagggaagaagcagtgcagtagtaggagtaggagttattgtagtggttttgagtgtgtttctttcttgtgtaagtactactattgaaggtgctacctatgttgttggtgatacctctggctggacttataatgttcagagttggaccaaaggcaagaaatttaaagctggagatgtacttggtaattgttatatatacattcatatgcttatttttagtgcatcattttcattttcaaatattatacatttattattctctctcttctctgtttttgaccagaaagtgtggcatttttttcttcaaattttcctaaagaatgtgtcatataaaaaaagacaaaaatttatatgtatacatataataatgattataagttctttgaattttgaagacaagaataagaaatttcaaataaagagctgatatacaatagctctcaaaatatcacttgttaaaaaaggttagttgttgttattgtcaaagttttatgaataaaattattttgtatctttgtgtattataagtctttctcaccagtcaaaatttaacaaatcatgagttattaacttaaatttagattatcctacttatatttattcaaaattcacatttttattaaccatttccacaactatatttttgatgtgtttaatttttatttacattcttattattagagtatccatattgtcatcaatctttcataattttacatggcaaattttgtggtaattataacgattttggcataatgattaatatgagtcattaatgagtagaaattaaaagtactgattatatatatataaataatgaatgagaacagttttcaactatgatccaaacctacacaacgtggcagtagtggattcgaatgggtacaaaggttgttcttcaagttctaataagtctaataataatcaggcttattccactggaaaagatcagttgaaattatctaagggaccaaactacttcatttgcagcattcctggccactgcccaggtggactcaagcttttcatcaacgcttcctaaattattatatatataaatatatattatggtatggtgtaagatctagtaagagagaggttttcatatatgtgactataatatataataatgtttaatattatgtttgtgtccaactgtgattttggactctctggctatgtgtaaaaattttaatgctgttatatatagtaataataataaaaataatttactagcctaagcatcaatatcatatgtgtatttaacaaagtagaggctataagcatcaaaattttacttaatttgcattcctataacaaaaatatatataagtacacgttttgaattctgtttcgatactgtgcaagtcaaatacttgacttaattgatagctctgtaaataaatacaaatttagtcaaagatgtaatcacaacaataataatagtgaatattctaattgaaatcataaattatagtaaaaattgtaattaatcaatatcattgtgggaattttagcatattttttttgtgtattcacgttaaagtaaaggggagaaatttattttttaaggaaagcatgttttacgttcttggagtttccttttaattactacttttacatcatcttattatttgtatttatatttttattctttaattaattaataatata

SEQ ID NO: 320286 - DNA, 684 bp, Cannabis indica
ttatagggccttaatgcatgaggggaggtttcccttttgcttacaatatataaaataggaaattacatttattatataattatgagacacgaaataggaaattagaataggttgctatatttctctaattcaatcccatgatcgtagggattggctttgtgtctggacttcataagatcattctaaagtaattaactcctgataagtagttcggcaagccagatttatacctcctcggatgatctgtctttcatcttgctctgataatcaaacgtctacatgctaacatacaatatggagtctgtttagcacattcacttctgcccagatacaggaaatgcaggacacgtgtcacttgagtattctgccacgtcattgtgcaagaaattggataacacacttgtctgaagtgatcattcaatacaaagtcatttcaattctcactccttcagttgatgttaacctatgcattttcgcttattccaagacctaatttattaaaaataggccttagaacgacctattctcaaatattccaaggaggagcatcaccttattagctaaccagaggctacctaagtggtgttgtttttctcccaaaaatacatggtcgtcccccaatgtcacctggtgcaagggaatggctatcctgttgggttttgtgccctaaataaaaccctttac

SEQ ID NO: 320287 - DNA, 1637 bp, Cannabis indica
taagctttttctaagcttgcacagaagacactcttttcttttgactttataaccctctagctgctccatgtaaatttcttcttcccagtcaccatgaagaaatgcaattttcacatcaagttgttctacttctaaattcaagcgagcagctaaaccaagaacaactctaatagaggacatatcataacaggagaaaatatttcttcaaagtcaatacctctcttctgaccaatcgtgccttgtactgtgagccattatttttcgtcttatgcctgtaaacccatttgttcttaagagctttcttccctttaggcaacttcaccaagtcatatgtgtgattctcatgcagggatcctatctcttcttgcatggctccatcccacacaatcttatgctcctgtagaatggatttttggtaagtttatggctctcccccatcagtgagtattacatactcataaggattgtatcttgaagttggtttacgctctcttgtggatctctttactggagtctcaactggtggtggtggaggtgcttcttgatcttgtttagttggctcaccatcatcatcaagtataggaacataataatcaatattctcactacgatcttattcttctgcttcttcattgacatgctcttcatggttttcctattcatctccccatgatcattatgcactatgggtgagggaactgagttggtactcataggaacattaacaaaagaatttcacttttgaaatttttcactgtcttcaaacatttgatcttcaagaaacaccacatccctacttctaataatatcttattcattggatcccataatctttacccaaactcttcatgactgtacctcaagaaaatacatgcttttaccttatcatcaagcttgggtctctcatctttaggaatatgaacaaatgatatgcacccaaagactctcaaatgaccatatgagacatctttccctctccatactctctcaggaacatcagcgttcagaggaacaggagaaaggttaatctaatcagttgtagttctcataccctcccccaaaaggacataagtttcttggcatgtgaaagcatacacctaacaatttcttcaattgttctatctattcattatttctgccacaccattatgttaacgactttttagaactgacttctcaagcttgattccatggagactacaatagtattcacatggaccactatactcaccaccattgtctgctcgaacacgcttcaactttcttcaagtttctttttcaatttcggcatgaagttctttgacagcatcgagcaccagcttttagacttctaagtaaaaacccaaacttttctagaatgatcatcaataaaagtaagaaaataaagtgcacctctaagtgttctagatttcatagtataaacattagtgtgaatcagatcaataacattagatcttctagatggtggatgtgtatgaaaagaaactctatgtgcttttccagctaagcaatgatcacaaattttaagaggcgtaccttgtaaatttggtaagaattgctttctagcaagagtttaaagtcttttcttgctgatatgactgagcctctggtgccaaagatcaatatttgcatctttt

SEQ ID NO: 320288 - DNA, 893 bp, Cannabis indica
gcataaaacccaacattatcatcttccactaagttagcgtcaagaacaaataaatgatatttacctttcttaatcttagagagatacttgttacagtttctcgtctagtgacccattacaccacaatgaaaacaattgcctttcaccttcttatccttggacttaaggatggccttgttgttcttggctttaggtgccctcttgcctttcggtttgggctttccactgctattgtccttactgtaccatttccttttcttatcaaacgagggagagatagattttgcttcaacaacgtttggttcaccttccttggacttgtccttgttaaggttatcaaacacggtcaactcgttcaataattgagtcatgttgaactctagcttgatcgtcacatagtttttgaagaaagctttgaagcaaggagatagtgactcaaggatcatactcacttgagtcctttcatcattgatagccttgtgtgtctctgcctcatccattagcttatttatgtacaatacatgagttcttacaggggtacctttcttcatcttacaatttatgtatttacgagtagcaccatctcttgtttgattagactgctacccaagcatgggctatagagaattcattatttgtgtttcattctccatttgttcatgtgtcttacgcaaacatcgtccattctaacaagcatgaagtgtaacgccccgatttctcgagacgtcacactgcctagttcgtttaaaactatttaagataaagattataaaagacttctttaatgaaaaataactaagcatgagatatcattatttttaaaacaaaacatttatttattcataaccttaaaatataaagctttacaaaactatttgaatcataatctttaa

SEQ ID NO: 320289 - DNA, 747 bp, Cannabis indica
ccaaaacctaaccaaatcaattctaatccttgccaaaccttccagacctccatagtataccccaaatgacatattccaagcaacgaaactactacccaagctgagaattaaaattaccattaaaggccaagcttcagttctaaaagtaaaagcttgctcaaacaacactacacccactaaaaccatccaaaatcaacatttctaaacataatttagcttcaaaaaactattccaaataatctcagcaactacagagctcaactacttcaaaattcatgcaaaatccaaacttgaaacttaagaaaactagagagggacttgcttaaaatcttactttagcttggattcacttaaaacatactagaaatctgcaaggattgatgaacaaacttcaaaaccctagcttgtctaggaggttcgaaaagagaaagagttgaaagagagagagaaatggaatttttgtcaaatttgatttttcttctaaaatgaataaatgaaatgtgttttattaacaagtaaactcagccaattaaactttataaattaagattattaactagattgaaatccacataaagacaaaacacaaatggataaaagaccatttttccattcccacactaaaagttataaaaggtcacttaggggtattttggttaattctaaaatcttgactattcctgacattcccaatgtctaactaaatttcccttctatattaaaaatactaggatgtgattctaatag

SEQ ID NO: 320290 - DNA, 591 bp, Cannabis indica
gggttcatctacaaaagataagaaacagatgagtgtttagtcgggatatcaaacagaaaaaaacaaagtataacgaccaggtccgatcaaaagattagaaagggaaattttgggtgatttaggttcataacctagaatctcaaaacttcagattaagggttaatcttcacttaaccccgaatgggcaacttaccaaatatcgtgaaaataaagtcagaataccacaacagtcaagttatatggtcaattacaagcaaagttttatatctctaaacctagattctctacagttttcctagaataagttcaagactgttgaattttctacaatggaaaccgagaaaattagagattcaagtattaaagaggaaaaaaatgaagaacttactcactgtttgaagctttgaaaaagatgaaaaacttactcaccgtttgaagctttgaggttgctcggatgatgctgatcggcaatttctggaaattcattgaagaatttgagtgaaaaaggtgttcttactctaaaatcaccaaataagaaattgttaaaagtggtttattaggactttttgccctatttataagcaaattagt

SEQ ID NO: 320291 - DNA, 1412 bp, Cannabis indica
aacataaaatgttatttctgatctttattaactactaaatctgattatattgaaatggattttatttagggcacagaacccaacaactcaaccctactaaatctgcatctcttctttttgaagtaaaagtgtatctcgtctggcttgtcagatttgatcttgtgcaacaataattgatggatcaatgcctccaaaaattgtaatggttctctctcaaagaactgtttgaaaggggactccctcaccctatctaataatttgaattcatcaaatttggtcttaatattcaggtagtaataagtttcgtcacgcccagtgacacgacctgtgtaatgctccgagacttgaattatttcgtgtggaagtctccacaaaaaaaaaaatataatgaaagttagcaattctgtagcaaagcatcgaataaaaattcagacctccatcagacccatatcgcacaaacaaaaatgaaaaaatgcattcacaatcggacaactatcgactttaattggacctacttgtatgaatatcatcaggccaggtatcgtcccagcgttggaccccattgtcccaatacactaaacaaaaacaaaagattggtatatcccctatcaggctaatcatcgaactgaatatcaaattcatcaagcctacaacaatagcacatatctacaagagattttgggccatcatcagaccatatatcagtccaaaaaaaatcataaaactgaataaagaacaattagacacctatcggaccaccatcggcccctattggacctacattggatgtgcatcgggtgtgcatcggtcctgggttgaaaaccaggttcttgcccaaatcacagatctgacaattcaaacccctaaatctaacaaaacatagattctgctatatatacacatagcaacattcaatctgtaatagtaaaatcacaaaaaaaaaaaaaccaaaaaaaaactaaaaacataatacgaactcacctttgacatttttcatagttgtggtccatgcgccgagggtcgtcggtagggtctcattttggtggtctgtgcgccgagagtcgtgggtagggtaggttcgaggatgggatttgtcgtgggtcgattgagattcgttgtgggtatgccgtgggtcgattgggtctgagaagaggatgcgcgagagggaaatagagaatgcagacagtttgaatttgtaattttattttgaatgtgaggggtattatgggatataactaaatgttgacacactttactaatgacctatacttttactttttctaactaattttaccttaaaatatacataaaaaatcaaatttcccattgtctaaattccttcaatagcattcatatatatatttctaaagattgtacatatatatatatgtaaaaagtcaattatgttattg

SEQ ID NO: 320292 - DNA, 1999 bp, Cannabis indica
aaatcacgtaatacgcctaaggtagttagggtgttacagtttcatcacatttttgtaaaaaagcatgacaatatcttttagtgtgatcaagacgactacaataaaagcagaaatcaggtaaacgctcatatttgaagtcaagccacttaataaactccctccccagtaccttctctaacagtgtccctatcaacttcaattaggtctccaacttcagaagcaataaacctagcaagctcataagatttacatataaaaggaataccatacacttgcacccaaaaaggcacatagtgtaaagtatcaggagtgatagggaaggaagtgtcaggagcagccaaaacagtaatgctttgtgcaaagtgccaaggctggccctcaagaactctacccttattcccttcacacccaaaagtaaacataaacatgccatcagcatgctcagaaacacaaacaaggaatctacacagcgatgaccacattccaaagagggttttcataagggaaggcttattgaagggtcggacagtgtgtaatttgagcaataagctaataggggtcgggatatcactagaggggttagcatggtaagtgaagacagtgttttcatcagcaggtaaacacaagagcactagaaacattactcagaaattcttccattatactgaacaacaaagaaggcaacaagagaaataaaggaaacaagcaagggatagataggaataaagaatgatacctggatcttgccttatatagataaaaccagtatcctctagggatgtctcttgaaaaatccataatcataaccctagtattagccggagtagcctccattatggaaagatcttgatgatcttcatcccctccatcttacggtttccaatggcaaaatagaagatgaaaagatagtttttaacggtaaaatgccagaaacttaatgagaaatgactatcggagaagaagaaaaggaaataatgataccaggggcaataaatgtgccaagtaaaacaaataggattggagagagaaacaaccagagaccaagagaaattaatactctcattaattactataagatacctaatagacaggaaatgagaaggaaaaccaccacatgaacagtatgggtggacacaaatctccatagcagggaccatagttcgatcaaacaagaggagggttcgcacgcttaccagagtgttccagagagaaaaagactacttgattgattacacatacaatataatttatgtttacattttatgctctatttttcaatatctgctttagtgtattaaaatttataaaagcaaaagctataaataatagattagaaaatatactaaagaaaggaatccaaaaactttttctaaaatcaatagatacattggatgggtaatccacttttgagtttgagcttttggtgtaagaatgtacataccaaatccatccaaatatttagtgaatttatactgggttcgggtgccactcaaattcgttccaacccaaatataagtcacgtgacacctgaatttgatctgcttcatctggattacatagaattataaaatattacatatatattttcctatgctaattatttaatattgtcttataatttttatcattttttattttattttgtctgttttaagtattttttattctatattatattataaatattgtattacttttcaaaagtttttaaaaaactaattgtgtattttgtaatatttattgtttaaattattgactaaaaaatacatacacaaattaaaataaatatttttcaatcttaattttttcatatatttatttttcaatacatgattaatatttatactaatcataaaaatagaaaaaaatgatattttttataattacgtaaaattttatactttataatatataatgaatttgggtgactattcaatggttacatttttattgtaactatattgtaacaccctaactaacataggcgtattacgtgatt

SEQ ID NO: 320293 - DNA, 1902 bp, Cannabis indica
ggttaatgttgcctattaggggcatacggccctccgacttggtaaccccccagcccaggctttggttgatcattggtctgactttcaacttcgtcatcaccatggttgtcggggttgttaggacgataatcactattgacctcggggtcttcccttctcccctaagcctactgtttctcaggtgatcatttccccctcgtggttggtcgcggggctgccactccctgtgttgggctatcctttcaacgtttctaccgcggtcaccattattgtttctggagtttcccctaccgctatgtcttagatgaacattatgggagtcatctcgtcccatataatgatcgggtaggacttgttcatctaagggagcggtcgattgttgttgtggcgaaccttgttggaggggtgactcttagccctctcttggttcattaggcgttcttcaggtccgtagaccaccctctctcattggttattcggggtatggacttttcgtggataggtttagtggtcttgagatatttgttgggtgagtgtttggttgaaaatagctttgaattaagtcgacagcttcttgagtgtgacgatcgtcatcttggcgcctcctcattctcgagcatgatcttccaaccaagattggaactctctcctttggttagggagactttcagttagggccgctcgagtttgagtttgctcttggtgtacagtttggaactgtccttgcatttggcctatcatgtctcgcaattgatccatctctgggtcaattccttcgatatccacatggggttcattccgtggtctaaagacaccaaggccatgaccagtttgagtttggcccatgcaataattaggtgggacggagtttccagtattgccctttctagtggcgccgtcagtaacgttgcctccagtggttgtggcattggtggtacgcccaaccgttgtctgcccagctgtggaagtttggctagtggtcctacgaccatcagtagtttgggaaacatcattaatggtagttgcaccaccgttaccaggacgcgggggtcgctctccattattttcgactcaattgctcgttgatggaacttgttgggcattatccatctcctccccatgaggtcgttcttgagatattttggttagcacaattttttccaataaaaaacttgaagattttggttgaagctctcaatgaaagcaccaaaatattgacgggatttttagctcacagacgcagagtcgtaataaatgagatttaaaccaaaatcttaataataaatgtaaataatgataccaaaatttgcaataaatgtaaggaaaggcactaaatatttaaagaggttcggtctcaaatgttggtaatagcttactccccttgtgttttattaatcagagctgcaaaatttaagaacaagctcttgaatgcaaagaataaaagagtattttttctctaagtgctcaaaattgcagatccctttcccagatcatgggtgaccctttatatagggaaaaagttcggtgcttctcgcttcaggagatgtgaccaacgcggagttatctcaactgtctccttagtttttggaggtggttgaagtctaatttttatgataatatctcattattttcgtgggtttgtaactgtctttgagcttcttgtaggatttgaatatttgaattagccaataacgatgagggtctaccaagggtgtgacatggtcgttaatcaccttcgcggatagaagctaatatttggaggtgagacccccgagacccaacatgaggagggcgtcaattgccatcttggggtgaccctctgagatcccttcgacgttgtgggtagtcttggtgtcatgaggatgtactcatatcaaccatgtctttgttgggttttgtgcc

SEQ ID NO: 320294 - DNA, 590 bp, Cannabis indica
ctctctctctctctctcttgatgatgcaggtccaggtccagttgccgtcgacgaagaccaccgagccattggccgtttacgaggaccccgacttaggtaagtcgatcacttctttcttagccctattctctttctccttctttacattcttgttaatagatatgtgtataaatgttccttttaggtattattgtgatttttatttttcagatctatggaaagataatggttgtggatagaaataaatttagggttttgaggtttgagtttttagactgaaattttgtgtgtatatgtgtgtgtgtgtttgtttgttgaatttagatttatttaaatttaatttaagtttggagctttgtttaattttttttctgtgcgatatatatttgaaaaataggttgtggtggtagtttcggtagtggtgggtggtagtgtttacggtggctatggatgatggtggttgcaatagtggtgggtggagtggttacaatggctatggatggtggtggtggtgacagtatatagattgaagaagaagaataaaaaaatattaaaaaaaataaatgttttttttacaaatatatgatatg

SEQ ID NO: 320295 - DNA, 839 bp, Cannabis indica
ctaatgtccaaaactgataatttgagaagagaaatctttgaattttatcaaaaggataactaagagttttattaaaatttgggaaagatttattattaaaatatccccaccatggttttgaaaaataagaaattttagaatatttttatggtaatttaacccctacaaactaacaaattattcaatctatgcatactagacaatttttgaaattgcaagggcaagaagcatgggttgttctagatgagttatctcttaattcccaataattgaattactatgatcctaggtctagatcaaccagttcaccaaaaagaggaggaaagtatgttgtaacagatgactttgacataacatcatcaaatgaaaaagtagagtgaaaagtagaagccttactgataagtcaaactatgaattctcatgtgcaacctatgaaagatgtttgttctttatgttctagtacatataacaatacacaatcatgtcattcgttccatgattttttttaaagaggccaatgctttacatttgtatgataagacttttgatagtccattctcctccacttataatccttattggagaaaccatgcaaaattttgagacaaaattagcctcagattaaccaagggcaacaatttaatatgccaaaccaaagtgatgcccaacaaacccactcttattctcaacaaagaaaactgtaattccctaacaattaggcacgatacccaaggggattaagaaaccctaatcctttaaaccggattactagaaagataaacactggtaattaaaactttaatcgaaaatagattgaaaataaaacttgtaataaactt

SEQ ID NO: 320296 - DNA, 789 bp, Cannabis indica
aaaattccgtcccacaataaaaagtaaaaaaaatgaaaagttcagtatgtggtgtaaaaacctcattttataatggattaaatgaatataatctcaaatttaattttaggttatgtttagaagtttgattttaatgaaaaaaaaaaaatgggaaaaaaataaggaaggggtatgaaaagaaaaatcatgttcgatgtgaaaattagttatttttcctatatttttcttacatttttctttctctaccaaattcgaactttcaaatatacccttattatctttcttagaaaaattacactttactcttttctttctttttgaaatatcacaatttgtagcattcataattaaatacaaaaatatgaataaatttttgtacactttgtaacaatatttatttgaattgtaaatattgtttactaaatcagaatacgaatttgtaggttttaattatgattttgtaaactccagttacaaaagaaactgtattatcacaaattcgtaagattttgtgaccagaattatactcctttatattgttgtaattttctctggattctgtatttttcaatttttttttaaggaattatgcaattttgaaaagttcccttttcatttttacccttatatctttatgggcaatggatccatttacaatacatgacaagcccaagtatagatatgggtataaaaagaaaaattgagaaaattacattatacccactttactttacatgttttaatttttaccttcatttctaaatttttaaaaatatacctacttttata

SEQ ID NO: 320297 - DNA, 1236 bp, Cannabis indica
gattttttgtcaaaataaagtttaataataatccgatctaaacgtgttttatgacaaaattatttatattttctgtagttgttcatattaggaattatctttaagttagttatattaaaaaaagttgtcaaaaattaagctcagggtcttatttttacaattttggaaaatacaaggtccattttgtcatttaacaaaagagagggtccaaaataatatttatgtaaattataataaaaagaaatatgttatgtatagaaacaacttattgagtagaatagtgaccatcactagtaagatatataggacaacgaaaataactttataagtaatactgactacaagtaaatttctatgatgacaatagttttaaaactatataatgagttttttttttggtaaatttattgattattatatatattaattttaatttaattttttaattaattttaatttaatttattcaaacaatatatattttgaaaattaattttataataatatatatttacattaaataaattaattaaaaatgatcatttattaagtttaaaattatttgtacaatattaatttatttgatgtatttttataatttaaattaaaaattaagtaagatataaccacacccaatgcgccatttaaaaaataaaatgaaaaattgtccgtttcaaacataaaataattttttttaaaaaaagaaaaaaaaaaaaaaaaaaccttaaacttttttttgaaataaaaaaaaatctgtacttaatctaaatatttccactgatttgtatttcataggaagccacgttctagcattcaaaatgtttaaaatgtgttgcattattttattttattcttttgggaaattatatttagtactttggtactgtttatgttgtttgattgagtgttttagagtgaacatttgaaaataaaaacaaacagaacatccaggtgggacaggacaatcattttattgacagtgaggacatcaattttattaaaggaataataagaattaaaattattagccatagccaaaaaagaatcaatattacaaacaaataaatactattacatatattcgcagaaagataaaggtattattagaaagtgtaatatgtatattaggaagggaaatttgaaatttcatccttataagactttaaatttttttactctaaatgcatacttaataaatattaggtcatatatgaccacatttctaatatcccacaa

SEQ ID NO: 320298 - DNA, 518 bp, Cannabis indica
taatttcttacattaaaaatacaaaactaacatattttcaaaagaaagtgcaagagtattacttaggctatgtttagggggagggagagactgtaaaatgaatggagatgaatgttaatctcttttatattatttgatattaggtgtgatgtgggatggacaaaaattaattagtaaaattataaaattattcttttgaaaataaaaatttattatatttttaagggtaattattatattttgcaaatcgtattttgtctttttccataattctccgatttaatttttaaagtttggagggagagattcttccttcatctctccttcccctcttgccaaacaagtgatttagcctcttcttttatcattctccttccactcatctctccttcctatccgacatagtattagtgtgggtctaatggtgacaacccttcccccaatttttttgaaaatttttaaattatatgtgaaaaattattaaaaaaatatataaaaattatttttttatatatata

SEQ ID NO: 320299 - DNA, 511 bp, Cannabis indica
aagcaattttttttttacggaactcgatttcgataaaaattgtaaaagatatgaaagtttgaaattcgtggttgaatgggtgtcaaagcttggtgcacacacgcaccagaggcttcagaatacctcattcgcgcgcgtccttcaaacaaaattttgtctgaatcctcgctcacgctcggacaccagcgcccaggaccctacaatcccgcccgtgagcaccctgtaaacgtcgagtttccacggctgcccttccttcgtgcgcgcgcgtctggctcatttgcagcctccaggggctgaagctgcagcctgtcctgggcacaatgattttttcacccaatttctgaattttgtgggatttttccccaaaatttgatttttccaattttcaaaccctaatatctaaataaaatattatttttaaatatatttaaacttaaatttcattttttttaattaataatatttattttcttaatagattattattaattttgatattttgaggtttaaa

SEQ ID NO: 320300 - DNA, 1076 bp, Cannabis indica
ttattgcttcaattatttgagtgagagaaggttttgcttttcatccatcgaattgttaaagggcatcaatagtgcctagcattctcctattatcttatgtgttaatatcactattagtccaactaaatatcggatctcatataatttaatataataacttttaggaagtatcgctaaccaatcgcaactcaacatgtggagaaagtgctaagcaccactaatgcctaataacaatgctttaattaatttgtatgtaattaataaacaatttatctgattatatcgagaatatgtatttatagaagttataagttcgtgttctattatttcatccactaattggtcgattatgagtagtggggaacaatttttatgacactttaatcaagtctgaaaaatttatacaagtcctccaagtgtcgtttggttttgggacaagaattgggtttgagatccacgagggatagaagacctcgcgtatgaaatcattagttaacaacttgtcaacctcttctttgagttctcttgtctctcggaatctaatagtcgtcgtttttgtctttttgctatttaaatgatgacaaattatattaggatttatccctatcatatctgagtggctccatgcaaattgatcttggtttgccttcaaaaactcaattaactgctattttagttcttcctctaattttttttcccaatgtataacgcatttagtaggattatttagatctaaaataacttattctagctcctcaataggtttgagctggttactctcgtcttggattctaggatccaaatcttcttcttccgtcttaccttctacagttaagattgccatcaattaatgattggctctcctattctgaagttctattcgataacactcccgagccaataattggtcgtctatgactactcctactcctgcttgggttggaaactttagggacaagtgtttgattgaacttactgcccccaagccaattagtgttgggcgacccatcaataaattgtacactgatggaagatcaacaactaagaactcctgcattagtgtcattgataagggt

SEQ ID NO: 320301 - DNA, 495 bp, Cannabis indica
tcactttctctttctctcttctttttcttcttctttcttctcatctattttatattattttataacagatatatcattattataataattttgacagcataaatatatatatactaattttatttaaagtgtatagtagttatattaagaaataacttagggaaaaataccaaaaacatgggttttcatttgagttagtcatgggaaaaggattcgttagactaatattctgtgatgaaaagtggagttcaatggaagagaaatttatatttgaatcgggttaagattttaggggtttaagttatatttatatttgaaagttaaaagagggtgttaacttttattgttaaatttgcacgtaacatataatcagagaatttgaaggagtgttttgcgtgaaaatcacaaggagaaagacggaaggagttggaaaatttaaccccattaacctcagccaaaaaaaaaatttagctatttttgaatagaaaactttaa

SEQ ID NO: 320302 - DNA, 2891 bp, Cannabis indica
gttcataaaatacaacatctcgtgaatggaaaatgttcctcgtttgaatatctactaatctgtaggatttcatattgtgcggataaccaataaaaacatatggtctagctcgaggtgaaattttggttttggtggtgacaaatgaggcatatgctagacaaccaaaattttgaaggtgtgtgtagagtggtgactttcgatgcagtaactcataagatgttttatcattaattaaaacagtaggtacactgcagtggttaccatataactccaataagctagggatacatgttggaactagttttaccaggatctagatttactaatatgtatgtatgattatattctataatctaacatcataaacatgaatttcttaaaacaatgaaataaacacatataaagttctaaaaaaaccttacattggtggcatcggaatattatggctcattccgttcagatctctaacccttattcctttctgtaacagagtattgccaagatctgaaccttgatctcctttagtgttagaattcttcacaatcttccacactctgattgagtattgacttcaattgagtgggttcgaaattatgaagagagggagagaggaattttgaattctatatagagagaggctctcaatacttagttatctgatagaatagtttgatgtaggttatgataatgagagccattatattctttatataggatttcaactagagttaggatttaaattatatgaaatgaaaaaaaaaaataatggcttgaaatgcccttatgtggaccccactaattttaattttgccattttatttaataaattattttttcttttacaaatgtcattttttaatttcaatcctttaaatgccaaatctatttatttaataattataattaattatcaaataaaattgtcatttgattatttattaattagaccttataaagtctcttaattaacaaataaaccctaaaacctcttttcttctcaagtaagcccttacttagtaaaaattcataaataagacataatctaatttaaaattataattgattaattaaaaccaattaattgagtctacaagccaatattatctgaactagtgtggggactattggcctatataattaagcttccagtaagtagttctagaatttaccaagtaaattctctatcttataaattcttccaaactccactatagatttagaattgcactcttgattatatagaatgctctatatattccaaatatagacaccttatttattatccattgttttaatccaaagaatcattgatcctctgtagatgatctacatcaagtaggggcaagtttactgttctacccttcaatgtgttttatcctcttgtaaatgatattttagtaaactaatataattactaaaatgagtactctaccatttaatctcgtttagcctagctcgaaggaaatcttcgtttaactactattcatttatgatagctatagattctgtatttatgattagcgctcccactcaattgtactactatgttcccaagatgtaagtattgggaagatccgattggtcaactttaacgaacaagtcaaagaacacaaataatacaattgaaccatagcctaaccatctcaggattgagatcattgatctaagatcaactaagtgatatttacttagaaagatattacggtaagtttatgatatcttttctatgtgaatattggtccagtctgatgtataacaatacatccaatacaaggttaccttaccaatgccttgaaaaagacacaccactatctaagtgtaagtaaactacattgttaattatcgtatgagtggaaatcttgtgtactgataaatcgcggtactaatgtttaatagcataatcttgattattttccactgtatagaaaacacagtaatcatgaataataatgtgataaggatttaaatgaatttataaaacaaacaaatgatcgtgaagcaaacatgcgaaccaagtaatatatattaaacaagtaataaaataattatgtttctttattgataaatgaatatttaagattacattgaaatagagttttagttagggcacaaaaccaaacaaacttccacctgcactaacataaaacaataagtacatttttagctctgtgaagaacttttgtagcgagaccagttccttagtagcctcaacggtagctatgtattcggcctccatggtagagttagtcattgcagattgcttaacacttctccaaacaactgctccacccctaagagtgaacaccatcccaatatagacttcctgtcatcaagacaagcctgaaaaatctgagttggtatagcctaagagatttaaagcaccactcttatagactaaaacataatctcttgtcctctttaagtatttcaaaatattcttaattgttgtccaatgttcattacctgagtttgaatgatacctgctcataattcccactgcatagtaaatatttggtttagtgcataatatagcatatattagacttctaactgttgaagcataaggaaattttcttacattttctatctcttgggtattagtggcacactatttcttagatagtcgcaaatcatatctaaagggcatgattgcctttttggcattggtcattgagaaatgctctagcaccttatcgatgtaagttgcttgtgagagagcaagtgatacgttcttctagtttttaataattttttagaacataattagattcacccaagtctttcatttcgaattgggtgtttagccattcctttatgttagtcattttcttgatattgttgccaatgattaaaatatcatcaatataaaggaccaggaatactaccacttg

SEQ ID NO: 320303 - DNA, 1598 bp, Cannabis indica
taagtctgatgtgtcttcacttttgttgagccagtactcattaattattatgatcagaatatattatattttaatggacttgtttttttaattttaattttagggtcagttttgtgttggtctgcaaacaattattgtgcagcagatttcagaaaattgttctaaatttgaatatttatatttatatatatatggtttttatattatatctttatcaagtaatttatttatatttccttttcagcactgttacatattaattcatttcataattaataatcgtgatcaaattaaaattaaaattatataggtggattataattatgactcttcaaactacaaattaaataagattatataagtaaaattaatcatacatattaatatcaacgattcaacatattacatttttatagattaatataaattaatatgtaaaacaaggtaaaagaatcattttattcaggaaaaaaaaagaaaagaaaaggtataagaatcatttaatactatagattatataaatatgcttatattcatttgagaccggtgtagtgctgattgatttaattgtaataaaaatataattatatatatttgaaataatctcaaactttattaatcaagttactatgaatggctaatacaaccaataatgtcataagactcatcactatgaaaggtatgggccaaaatatttctctcaccaaaaataaataaattgataagaaccaatattgcattaaaaaaagactgtgtttggatatctccaacaatgaatcaagttcctctgttagaaaattgtatatcatagtatgttaaactaattaaatttagttctaaatttgaatatttatatttatatatatatatggtttttattattatatctttatcaagtaaactaattaaatttagccaactcaactaatttaattttatattaactatgctgatcctcattcctctaacaataatcccatctccaaaaataaatgaatatgcattaatttataaggactacaaaaaataacttttaacagtgcatttcataaattgcattgataaaaaaattaaaattttaccagtgcacatttacaggagctaaaatctagcttttactagcgctggcaaaagttctattaccaacgttgatttgccaacttttttgccaatacatcagagtaaattctattttactagcgcaataccaaatttttaccagcacaaaatgtactagcaaaagtgacattcttgtagtgagagtagtttgtagtccaccgtctaaaaagatgttgtggtaaattattctctatttatttcggtatacaagattattattaagtcaatttttttttatgattatgtatgttatagttatgtaagattaaatggtaaatttttttagtaaatttttcgagttactttactatatatgtatgactaaaaataaaattttacataaaatgtaacttttaatcacaacgaaaagttacttgtaacttaattagttttagtcacaacaagtatgtgactaaaaacacatttagtcacaaaaattttgtgactaatacttttagtcacgaccttttagtcgcaat

SEQ ID NO: 320304 - DNA, 614 bp, Cannabis indica
tgagattttcactatttcgattaaaatgatttttagtacttgaaaattactttttctctcaatgtgtccaatagaaaagtgatgcacaatgctcttggcttcatccctgtgaaattttactattttttgagatgtgtagggtgagatttcaatgtctccaccggtagttggttaatgttagtcggggcactaacttcaagattattctttctgactgctacgaactgccttatgaaattagtctgtaacttgttccaacaatctatagattcgagctcaagctttttgaaccattcctcaatggatcctccaagaggaaacacaagcattttgcgtcattgctgactctcatgactgtcattactcggttgaaccttgacaagtgatcactaggatctgtgtctcctgtgtacagggtcatttcaagaatttgaaagttcttcgggaggtttgattcaagtacatttctggcacaatgctcccggtccttgtagtcaaatttagggtcctcttggggtgcggggaaggagcttaactgacaattttaaggaaagaattcaaagttgtaaaacagaattggtctccttaaaagtcggttggatgtggagtctctt

SEQ ID NO: 320305 - DNA, 1192 bp, Cannabis indica
taaagagttgaccgagttgatcgactcaacccggccaaccgaaacttgccaacccgtgacccgccaacccgacccctattcgggtccgggttcgatttcatttttttaaacccgaaacccgtgaacctgaaactcgcgaactcgaaactcggtaaacttgcccgatgttcacccctaatatccatgggttgttgcttgacttattgttggcgacctgcattctggttcaatcgatcatgaagatctagaatgtttcgattcaatcgttcatgcaagtctagttgtctacggttcagatgctcgcgtagatcagggttgcaccacctctcgtttcttggtcgtaattgctttctaaccttgttgcagaataactttcaaattgataacttcaagagttactaatgctatcttgatcatctcgataagtgtggtgtgaatcttccccatctcatgctcgcctttcacgtgcgtgagttctagtcgatctgatatgcccatgggtccttgaccttgagccactaggatctgtacttgacccttttcttgagattcttcttgcaatggcctctatgttcaaaatagatttgataagcgtcccctatttaaataggtgtacgtactatctctatcattacggtttggccttttcagatgtctcgatggtcggcttgatccaggctgattccttaccgttgtcgcatcgtgctgaggaaatccttaattcctaggctatgttttcctgggattttcattcatgcgagatgattctggattcccaagttgtacattcccacagtttgtatatccacgggaagttcctggatcgttgggttgagtttcttgatttccagtgtttattggattttggggtttttcttcatccattgggatgtccctcgtgtcctcaagttaatcctcctgagtgttcgagggatttccaagattattccccctagggggatccccatgtctcctggtcctagagcctctaggtcttccctgaggttgtctaatagacatatcaagttggtttagaggggcattatctcgtgtagccctcgcagctgctgctgttgtgttaaatttttgatacgcaagtgcacgtagtcacaaacaagtaatatagtgataagtaatgagtatcgtctccacaaggactgtgaaaataaaatttctattgcaaaaattaatt

SEQ ID NO: 320306 - DNA, 486 bp, Cannabis indica
acatatatattttttgatttttttaattaatttttttttcaaattaattaacaaagtaacaagcaaaaaaaaaaaaaaattacatatggaaagttttaaatattaaattatttatataaaataaatgaataatcttgaaaattacaccaatttttatgtttgggaatttatttgtccattgtcaaaatatgaaaaactattttcgaaaaaaatgactttaataaaacctcaagagtaaattgagtgggataaacttcaagaaaaaaaaaaagagtgccaaaaaatattattaataaataaaaatctgtcaacatacctgtaatgatataattttagataatctcacattgctaataacgtgtagaaaaataataaaatatataaatgagttactcctcttatttgatttttagatagaacctcatttactttatcctaaactagtgaattaagccgcgcttcgcgcggtgttgtcaaattttataa

SEQ ID NO: 320307 - DNA, 2508 bp, Cannabis indica
aaccacttgttcagcttttggataatggtaacttggttttgagagatgagaaagatgcaaacacaacaaaatatttatgggaaagctttgattatccaactaatacaatgttaccaggaatgaaattgggatgggacttgagaagaggtctaaataggcgattatcgtcgtggaagagctcggatgatccttgtcatggagattacacttatgggattgagcttgatgaaccagaccatatagctcctcaactattaatccgtaatgggtcttcgatattgtatcgcgaagggccatggaggggagtaagtttcagtggaacttcaaattatgtattagttttttggggaaactctgattatgaatttgtgcacaacaaggatgaaatttacttcacttacaatactcaaaataagtcattgatcgtagcaatttccttacgccaaacaattgattacattagatgggtagaagaagaacgagaatggaaatattattacagaattccaggagacaagtgtgacatttatggcacttgtggagctaactctcaatgtatcatgatggatggtgaaccagtctgccaatgtttacaaggtttgaaccaaagaatcaaaataatttgtcacaaggatgtatgaggaacagttctgtgaggtgtaatgataaagagaaagatgtgttcaatttaatactgagttgaaagtgcctgaaactaagtatacttgggcaagtaaaagcatgaaactcgaggaatgcgaagctaaatgcttaagcaactgttcttgtactgcatatggttataattctaatttagatggaagtacttctgttttagctattggcactgagtgtgtactgtggttcggagatttgtttgatattcgaaggagcagatatggccgaagacaaaatgtttttcttcgaatacccttttcaccctcaacaacaggtacatacatactaaactatagatttaatataatacaacacaataaaatacgacctaatacgacgttccaaacgagccctaagtgagttatttatcagcatgttcacatgtttacatgttctgtttctttgaagaaaaaagttcacatgtgtttttattatattttgtttttgtctttctcagctccaaaagaaacaagtgttggtagtaatggtaattccaaggtgaagaaagcagtgataattattgcagtgattctcttcgttggattagtcttgattggctattacatttacaggaggagatacattaatggtaacactctcttttcttggcttgaaattattttgatttcaacaaaacagagcatttgcttttgtaaaatttgtaacatatatagattaaaatttaagtgcatacttaactaaatattttctgctgagataacattaatggtaccttttaaaaatgagaaatcttctttggtgattaggagtagaggtgggcattctatttaattcaacatttttttttgattcaatctaattagtaattaaatttgaaaaattattgtccgatccaatcctgattttaacattacataaattatctaaaaatttcttgaaaatttacataaaacacatgatactaaatgagtatggaaccctaaaaacaatcactatgaaagtgatacctgcatattactcagatattgaacattgtaaagagatagacaaaatgagctacaacttgtaacaatatcttattatttcgacattttaatcgtcacagccactgaaaattattttgtgagaaacgaaagcgaagatgatgacatggagcttccattattcaacataaacgcaattagtactgccactaataatttttcagaggctaataagcttggagagggtggttttggacctgtatacaaagtaagcttctctctcatttacttgcttcataacattcttttttttttttttacaaattatagatattttcattgtgatgtaatagggtaccttggaagggggtacagaaattgctgtgaagagtctatcaatgaattctggacaaggagtcaatgagtttaaaaatgaaattaaactaattgctaagcttcaacatcggaatcttgtcaagatatttggttattgtactcatagagaaatgaagctattaatttatgagtacatgtccaacaaaagccttgactatttcatttttggttacactctttcctcgttcttttaacacatgtgatgttcaatttgtgaaaattgccaattttgttcaaattaatgaaagtagaaaaactaatatttgcagatgaaagtcgaagcatactattagattggcctaagcgcttccaaattgtgtgtggaattgctaaggggcttctatatcttcatcatgattcaagattgagaataatacaccgagatctcaaagctagtaatgtttttactagatgaagacatgaatcccaaaaattgcagactttggcttggctagaactttggtgagaccaatagaagaaaagcaacgca

SEQ ID NO: 320308 - DNA, 793 bp, Cannabis indica
tcaaagtattttaggtgtactaggggatcttctttccccgtgtacatcttccatgctggcatcttgaacttgggaaagggcaaggcatttatgtatgccgagaatggtgatcctattgacctgtctagctcaagttctaaaggttttggaccagctaggcactttctcatgtctctcatttggtccaactgtgcttgcacaaagggatctgttgctgcagaggcctggttgattggccttccttgattgagctacaacctttgattggccagagctgggtcagccataccctaggagaggtatgttcaaggttggccaaccctgagtctggcagctactcatggttggtgagccctgtgctgggcagggcctgaccgcccactcttccttgactgactagtggagcttatgcgttgacatggggtagatcacaccaatttttggagtttggtggaattattattgtattgggtgtttccacccgacccgcacctcaccaattaaagattggcctttgagtggttcactcccggatgtctcaggatgggaattcaacttgttggttggccagatgtgtacttctagggtgatggccgaccatgagttggacaattaggggcattatagtgccagagattcctgacgggtccccaggccaatggctaccgggatctggctattcttgccgttagaccttcgtgggaagtcttgtcctcctttgggtaggggaaggtctgtcttggttactaaaaaacctaggttggtcagagtgttgatagaccctccctaatct

SEQ ID NO: 320309 - DNA, 521 bp, Cannabis indica
gtatgtttcaaataaatataaaattaaaggtaaatttgattaattgattaataaaaaagacatttttcaacttatccttttttagtaccaagttttcaaaaatattgtgctacagtttcaaaatcacgaaaacattgtctcaataaaataataaaacaacttaaaaacgattaacacagctaaaagataattctagaacaacttaataaataacatgaaaacaactataaaacaacaaaaacataactataaagcaacagaaaaataacaaaaaattgacctaatagcaatatgcaaaataatatcaatatcatttttttataataaatgtaatttgtattatgatttttttacttagttttgacaatttaatttatctttttgtactgctacattattattttatggaatttgttgttacaacttcatacttttatatttttttacttcataatttattttttaaaagttaaataaaaaattacattaataataaaaataataaaatcttatgattttaa

SEQ ID NO: 320310 - DNA, 579 bp, Cannabis indica
tctctctctctctccctccctctttattttgttttatttggttattattttcccccattggccaagaactttgatagacaattaaacctattggtggcatcatatatgatttttgtgtggtatatgtatctatagtaggcatggatcaaatgtactagaaggtggtcctatcatatatttcttcttaatgatttttaatgaaaatgtgctaaattagggtgtttatctaatttattatgcactattttgtttctaatttttctaatttacgctaagtagtgtggatttttttattttagactcaattttaggtacaaactaacccattctgcactaaatgcgcatatatgcactttccgaattccattaaacatttgattggtactagtattgtaggtaaggccgaccctaggcataggcgggttaggctcgtgcctagggccagtcctaggtataggtgagctaggtctgtgcctagggctcactcattttaggggtttaaataaaaaaaatatcttttaaaaaaggggtaagttgaaaaatgcctcttttattaatatattaaccaaatttacctct

SEQ ID NO: 320311 - DNA, 2040 bp, Cannabis indica
aggaaattaaactagaaaacagtaaaaataaagagcaagtaaattaataaggaaaataacaatgattaaagttagtgcttcgatttcaattgtatcgattgattatggtttttcacaaaaataaacataataaatatttttttattaaattattcattttattatgatttataataaattaaaaatatataaagtaaattataaatccgtaatgtatacaaaatatatatgttaattttaatttaaaataaaaaaataaaaataaatattttatttttattgtcacaataatattataaaggcttaatataataaattagtcaaatattaatataataaaggcttaatatgatgatcaagattaatccattaataatataataaaattataatacttatatcattaaatatatatatatggtataattatgataagattaatcaattaataataaatattgttgaattaaattagtgtatacaaagttattattatataatttgaatataaaaatgagaatatatttctcataattaaaaaatatacaatttgttgtaaataattttattgcacatataatgtaataaatttttattaggggaatttttataaatatgaaaattgagggtatagtttactttttatggcataaataataacactataaagttatggtattttttttttttttttacatttgtatgagtttttttatgccatatttttgtaaaaaaaaagtggaaatctaatatttgtaaaacaacaataagttttgctcgaaaagtcgtcggcaccggaaaagtcaccgaaaaagttgtcgtccccggaaaattcgccgaaaaaatcactgttactggaaaagtcaccgttgccggaaaagtcactagaaaagtcaccagaagtaaatgtctcagatataactaaaaatataaccagttctaggattaaaaactaataacttaaaccggttataattgaaatataatcggttttgtaacataataaataaaaataaataatataaaataactcaaaccagttataattaaaatgaaacaggttctataacagtattataattaataaaaaccaataacatgaaataactcaaaactagttataactaaaatagaatcggttatagaacataatgaatacaaacaagtaacacacaataatttaaactgattacaattaaaaataaaggggaaatcagttcctaaaacactgaaacataaattaaaaacaaaattagttctacaataaaaaacctcataacacataatacctcataaaaccgattataattttttttttaaaaaaaatagagatcaatttcaaaaaaaatattgaggcataaatatgaaaagaaccagttctataacaaaataaataaacacaaataataacacacaataactcaaatataatataaagaaactaattatatttatcaactagttaaaaatttaagacaaaataaataaaaataaataaataaatataattgaaatataaccggttctctgtaacataataaataaaaataaataacataaaataactcaaaccagttataattaaaatagaaccggttctataataatgttataatgaataaaaaccaataacacgaaataactcaaaattggttataactaaaataaccggttatataacataatgaatacaaataagtaacacacaataattcaagtcaattacaattaaaaaataaagggaaaatcagttcctaaaacgctgaaacataaattaaaagcaaaactagttctacaataaaaacctcataacacataatacctcataaaactgattatttaattttttttttaaaaaaaatggagatcaattttaaaaaatattgaagcataaatatgaaaagaaccagttccataacaaaataaataaacacaaataataacacacaataactcaaatataatataaaaaatacagttatatttatcaactagttaaaaatttaagacaaaaaaactagttttgtaaagcaactaaga

SEQ ID NO: 320312 - DNA, 552 bp, Cannabis indica
taaataaaaattaaaaaaatgagagtaataatctatgtatctatatatatatttagagtaattttaaagtgtaatgtcaccgctttatatctctccttaatatatatagattatgaatttgtaaaaaatgaaaaaattatcttttaaaaattattatataaataaaatatcaagtagtaggttttacacctaacaaaaacataagtagtgaatttaattaactacacagttaaatgtttctcaagaaaaaaagattaaaaaaaataaattaatgtattttgtagttattattaagaaaaatactctaaaatattgaaactactaagaaatgtgaataatacaattatttctttgagtacattctcttcactttaaataaaaactttaaatacatactaataacaaaaaatcaaaactaataaagttacaaaattatctctaaaatatttactatatcaaaaaaagtactttaaatatgaaaaataattttcataatatatatatatatatatatatatatataaatatagggcaagactatggtaggaccta

SEQ ID NO: 320313 - DNA, 654 bp, Cannabis indica
ttaatatataaatataatcaacttacacagaaaaagacaaaatccccatataaagatgaaatgttcacttaaagaaatatagaataaagacaaaagaaaatggaagttcttaaaagtagaaataaaaaatataatacttttaaacaaaaaaacaaaggagttaaattttcttttttctatagccacttttacatttctttcaaatttaaaatgtttgaaattattagttgtctttagttttaattatttaatttgggaacatattcacatgtgatcaagtgctaactattcttcttagtatataagattaagaatgtctaccacctgtgtataaaatatagtataaatcccttaagtcaatttccttggctgttaatgtaggaatgattgctccaaatatatgacagtggaaagcggaaacttgcagaaatttccatcttatatgctgctggtagctgctacaagtccatataaaataaaaatcaaattaaatatttaataagtttattttgatttacattacttaataaatattattttggagcctgtagttttataaaagttattgattagaccttctgttttgttaaataacaaaatgaacgatatattttttaaaatagtaaaaatgggactctgagcttaattttcgac

SEQ ID NO: 320314 - DNA, 691 bp, Cannabis indica
aaaataaaatatcttaccgacaagacttttggcggtcggtttagaaagaaaaggttcgggtattaattgccatgaaatgtcacgcacgctacgtggcgttccgtcaaatgttgtgtcttctttggtttgcacacttgcaaaactcttcgattttcacaccattttgacttcatccattgcatttttatatatataaatatttttataactattgcatttttgtattagaaaaatactagtaaaagacaaacattatttaagtaaatattcaaaattcaataaatattaacattaattttttgaataaagaaagattgcacagaatagtattttatttttgttggtatgattactatttaaaaaaatgttgtacaatatattacactaagaacacttaaatatttcataaaaaaaaaaaagagaacacttattgttaagaaaaaagagcacctaacaataatgatggtggtatggtgtaagcagcggtgttgctggtaggcgaagcttttggtgttagacttttatttgggcttacattaaattttattggttttattaaaacttgggttgattggatagttctttgctgtgttagcccatattgttggtgatcaattattaatgggcttagcatctgtgtataaagtctaggtgaagcataagtgtgggcttttctagttgactgaagcct

SEQ ID NO: 320315 - DNA, 1050 bp, Cannabis indica
ggctagctattcctcctggaagggtgttccggatactcgattccaactgactctttttctatgcggccctttagcattcgcttatgtccattgtctagaaagtgtgtatccggaagcaccttgtcttgtgctgacatggagattctgttacaaatattttgttaagtttgttaagtcgcaacttataacttaacaacttaatggatgcagccacactatcttaaaatttttatcatgagcccataaataccacccacacttatcagtttaaggcgtgattgatcagacgagtttcaagaggtggtttcaaagagagagaataagaggtagagagagagatgtacatagaaaagagagattgggtttgagttttgtatgaaaaatattttgtagatgaagaagattcttgggtaagagagtgagagaaaatactttgaaagaactcaacagagaatcaatctcgactgtattgtaccatgttgttgctcaatcaataaagagaatttggtagtgttccaaaactgagtagagccatagatcacatttaatctatcagacttgaatcagtatatatcttggtgttaatattgttatttattgctttcatctgattttaatactctgttcatccaaatataattaatataatatcaagtacttttttacaattttttcttcaattaaaaaaagaatcatattatttgacattattttttcttattttcaatattatttaaagaaaatcatattttttttaatcacttataaattcttttcaattttttctaataacttttatacaaatttttatttttgtttttctatcttaatatttaaaatatattttattttaattttatatatacgtactttaagaatatgacaagtagaagttcttttttttttttttttttttaaaaaaaaaaaaaaacctttgttacaaattaaagatatataatattttgtacaaagtaaaaatgatttaaatagagtgtttatataaatttttaaggtataaatatatatatatatatattatttttttttata

SEQ ID NO: 320316 - DNA, 1413 bp, Cannabis indica
gctagtttcaacatattctaagacaagagttttattttccacaagctctctaataaagtgatgactgatgtatatgtgctttgtgcgtgagtgttgaataggattttttaaaaggtttatagaactagtattatcacagaagatagttaaagttttcaaatcaaacccataatctgccatcatttgtttcatccataacaattgggtacaacaactacccgcagcaatgtactcagcctctgctgtggacagagagattgagttttgcttcttgctatgccatgaaaccagattgtttccaagatagaaacatccaccactagtactttttctatcatctgcattacctgcccaatcagcatcactaaaacaaacaagattaaagatagtgtctttaagaaaccaaatcccaaaatcaacagtgctatttacatattgaatgattcttttcacagcagaaagatgagattccatgggatttccctgatatcatgcacaaacacaaacactatagcaaatttcaggacgactggcagtgagataaaacaaactgcctacataactcaaggagaaaggtgaatacatagctcaaggtgaaaggttgatggcctacttgagtaaaatcaaagattttctaagttagcttaaaggctacacgatcaagtgaatccccagagatcagaacgccacaaccgatgcacttgcccgtctagtaagcaacactaaacttggtgcccatacatttcctataggaacctggcattgttttcctagttgaagtcgacatgttggatgacactccaacatggataacacctatcgtagcttacctccaaactggagccttcctaaaagaaaaaaatgaagcaagcaaactgagaaaaaaagctactaggtacttgatccaagatgggttccatgcctctcttgaggcgtgtcaccaaagccaaagttgaacggctaatgatagaagtgcatgaaggcttctgcgacaaccatgccgggggtaaagcttatcgaaaaagatactcgaacagggatactgttggccaacgatgatcgaagactcgatggattatgtcagaaaatgtgacaagcgccagagatttttgaagatacgaagagttccacccaatgatctcatgatgatggaatctccttagcccttcgcaatgtgggggatagacctgattggtcaactcccaaagggaaaaggaaggatacaatttgttgttgtcgcattaaactacttcaccaaatggacagaagctgaacccctagcaacaaacacctccaagaaggtccttaactttgttgtcaagaacatcatatgccttttcagccttccttagaagatcgtgtcaaacaacgacaagcacttcgacagtgacatgtgttaggttttgtgcccta

SEQ ID NO: 320317 - DNA, 524 bp, Cannabis indica
atttaccaaacactcagctcaacttttttccacagttctgctacagttgctttttctcacagcacagctacaactgctttttcccacagcacaattgtgccaaactgaccctaagtaagttatattcttatcaatctctaatgtcaaatttcctactccattaaaaattcaatctctattcttacgtttccaaatactattatacatcaagtacgcaaacacaattgatattgtcatgtcaaaaagaattagaaaaaaaaaagctaataactacaaataaattttgaatttacaaaattttagataattatcacacatatcgggctaaatcgtgctcaagctcattttgaataaaactatgaatattgggtatatgtcaaaaaaccataaaaaaaatatcacacctctagatgtgacaattttgagcaaaactatcaaatcaagagcatgtttagtattgttttctgtttttgttttaattttttttttttttagaaatgagaacaaaaaatagtttttgaagt

SEQ ID NO: 320318 - DNA, 786 bp, Cannabis indica
gttttactggtgttttacaaaaacacagtatttttgaaaagatttccgtgtgacagtatttttgtaaaagttaactcaaattacaatatttttgtaaatttccctatttaaaattaacttacgcaacatctacctagtctatatataacagttaaactcaacccatgtgcttccgaacaggtggattttttttttctatatataacagttggttaaatccaaccccacatgcctgcgatcaggtaaactctttcttttattttttgtacagcaaacatatatgtgtatatatgcacacaaataggcatagataggacctattttatacatgctcacatatataacttttgtaatatgttacatggaaattggtgccaacatgaaatttaatatttatatttgtgtatagattagtttatgaggaaatccatatattgattcattcatgtatctctttcaatcgcaatattttcgtaacttttttctataacatatcaataatttttgatatcatgatatatatatatctttatatattaaaagtgcctatctaacggtatttcttggtttaacattcttggtttaacaaaatatacttaaaaataaaagtatattctgttaaatttaacgattaggtttaatctactgttaaaaaataaacccaataattaaaccaaaaaattaaacaatcttttaaataaacaatcttttaaatattaataatctctttttaaattaaaaaaatcatgttagccacatatctctctaacaaacctatcttgggag

SEQ ID NO: 320319 - DNA, 522 bp, Cannabis indica
aaaaaatattttttcttttcttttcttttattttatttttcttgaaaccctaattctttctctttaccctaacttatgttccttccccttcttcttcttctccattcaccgccaccatagtcactaccaccaaaaccaccaccactttaacctaaatctaaaattataaacaaaatcaggaccccaaaatactcaatcaggatctaaaacttttcaatgaggggaaaacaaaactgagctttgattggctgaataggacccgaagatagctcaatctgagtcgtagtgctttcaacttcagtgaggtccaccacgaagagagagaagggacaagagagagaaagagagggaaaaatctacattaaaaagggaaaaatacaaaaacgtttctttttgtggtaaaaataaacttgaaataataaaattactacatggaaaaaataaattgatactatatttataaaaatatctctataaggtgtgtacaacatttatactttttatgtgcttttaattatcaaa

SEQ ID NO: 320320 - DNA, 827 bp, Cannabis indica
agaaagggacctctttggttattgtactttaatagtgactagttgccaattttgcaactctaccttctccaaatattattattactattcagaatttttgtttcgcgaactatattttattatttaggactgactcaagcagtttagggtcctcaatgaaaaattaaaataaagtcttttattttaaaaaatattatcaatcattacttcataaatttaattttaaatataaaaaatacttcataagtaaaatttttagaatcatgtgtattgtaaacacaaatttttattagttattttttctaagtatatatttattgttatgaacatattctattatttgatttttttttttaattgagaaatatttcttttaattttaaaataaattttgaaatgattttttataatttttaaagaagtatattaggcgaaccaatataaatgtgtgccatatgtacatggtacatgtagagagttcatgtcaggatttaactaagataaatagatgtcaccttaaatttgttaataatttaacagtttggaggattttactgtcgaaatttgagattagagagttaaatgtaagtgaaatgatagttgagaggatttagccgcaaattactctaaaaaaaattatgaatacagtttaagtttcatgtaataataaatataaaaaaagagcaaaaaataaaaaggaaagaaaaggaagcgactgtgagagattgtgaaatttattaggataaatactattttggatcttgtgttttgcaaaaattaccaactggaccctttgttttgttaaatgacaaaatagatcttatatt

SEQ ID NO: 320321 - DNA, 1707 bp, Cannabis indica
ttaattaaattaataaataaaaaataattattttattaaataattttttctgtaaaaaataatatagtgtcacaccacaccaacccggcccggatcggacggacggcgcgcgcgcgcgtgtggtgggtcaagtgtgtgtcctcacccattcgcacaaaactgggtaccccttggggcccaaaccaaaatgccaaagttgcactctttatacccttgtaaatgagggctcatatcccatgtgggactctttccaactcacacacactaaaacacttatatattttgttaaaatattcacaacatttccaacatttataaagatagtcacatttacatatatacttatttacagtattaaataattaacgattgattaatatataggcgtagtactgtagatatgtagtgaagttatctttttttttttgctggagaaaacattctctaaaatccagaaaaccaagggaaacaacacacagtcacatggccacaagaggggccaagtcctcagcagtgaaaaaaccagaaacagagctcccaaaggaccatttcgcaagcttgtgagccaccagaacaccgtcccttggctgccacaccgtttccacttcaggcaggtcatcgagcatctgcaccagcctccagaacagaccagcaagacgccaatcgggggccctccgtgcgtgtaatccgtgcaccaacagttgacagtcagaaacaataacaacctgcttccaatccctgcatatacaccatttgacagcattaatcatagcccgcatctccgcctccagcggctgttcagattcaaaaatgacagccatggcctccaacaccgatccctccgagatagaagccacaatcccagccgcagcgcgcaagtccttgtacgctgcatctaccagcagcaccatttttccagagtaaatatttgacgatctcagctgcacaacaccaggggccctcggcaattcccaagcagtccgaagagtagcagtggcatggttcaccttagcaagaactccctgccaagtggggttaatgtgttcatggaaagcacaattacggactgtccacagagcatcaaacaagcagataccaaatctgacaaattcaccataatcgttatcctcagctccctgtagaaaatcaggggagagaagccattccaccatgtttctaggagagtcaaaacagagattctcacttctaagggaccatcggctagcaaaccaaacagctttagcaataggacatttaaaaaaacagatggtaggccgaatcctcctccacaccacagaggacacatctaacttcattaccaaaaatcctttggagtcaacttccaaaggggattatatctctgcaaagtttccaaaggaacattctcaggcgctccgtaatctgaagtttccaaatccgagaccacagctgatcagactccccctaacgacccttaattgtagacttatatgccgctctcggagagaacaccccatttgtagcgtctttccacactaggatatcatcttgggatgtaggaagccaccctattaagttaagagaactggccacactagggacgaaccatctatggaccaatcgagatatccactccccatcctcatcaagcaaggtagagaccttaatagaattctgaacacataatggattgaaggcagctctagacatgttccagtctagccaagg

SEQ ID NO: 320322 - DNA, 1665 bp, Cannabis indica
gttgcctcgttaaaaaccttgctagaaaaacctagtgggacaaaatctgagctaaggaaaaaagagtgcatctctcatgcacatatgattcataattattttggtgataatatatctcataaaattattgttatctcttttaaaatatcactgtatattatctatgattatatgttttctgtaactctttcagagtgtatgtgtggacttctaaattatggatgaggagtttctgcaatatcaatatttatccactaattgtatcattcatgtgtgtatacaattttgttcatactaaaatttaaaattttaagtagacatgaacataacacatttattataatataaattttttaaataataaataaatattaataaaaaataaaaatataacaaaattgtgaaaaattaagagaacagcaaaaataaaagaaaattcatatgagaaggcacctcacatgccctaacaaaaagaattatataaatataaagatatagatagatggataggttggatgcttatccattaatataaagatatagatagatatagatagatagatggataggttggatgcttatccctcatacaggacaaaaaatataatcacttattttcaatttccttcatgtctccactacttaaattttgctacccatttaaaatgtcaaaatttttctacattattgattttcaacattattattattattattattattattattaaaaagaatataatcaacttaagatatcatttactagaaatataaaaattatattatatttgggaacaaaaaacacaatttaatatatttattttaatttttagtattgtgttcataataaaaaaaataaaaataaataagtattgtactttaaggcataattataaatcttaatacaaaatttaatgattaactaatttttattaaaagatatatgaaaaaaattgtcattaatttaattttattatatacaataatataacagacgaaactaagctgaatcttgctgtaacaggaggaaaatatcgtgcaaaaaactattataacttgcttgtggatgagctgaaagtgaatttatgcaagtgctgtttgggacaatttgattgtgccgaaacacatgtttattttttggcaggttataaataaacatctcctcactagagactacttgagcagaatcataaaaatacagatggagctttgcacgatttgtgatcaagaggttgaaactcatgaccatttgttatgcagctgcacttttactaagtaagaattggagatgaaattaataagtggttggggtctttttgttggcctggctctttggccgagatgactagctggtgctgtgattggaaaggtgagctcgaaatcaggataataaacgctgttatggtagcaactttttacaaaatttgaaagaattagaaatagatgtatctttgaaatgacatgctctactcctagaagcataagtttggttgtaagaggtatatatagtgcggctaaggatattgagtaaaggtccctttaaattaaagattgttcaaaaaaatatatatttaggtggcgtttggtaacacttttttaatcagtttttctatttttaaaagtggaaaagtaaaaatatttgtcaaaaacatgttctataaaact

SEQ ID NO: 320323 - DNA, 1734 bp, Cannabis indica
agagagagagagaaaagtttgtgacagaaataatgtgtggagatatatagattaaacttttatatatatatatatgtattgttgtgtatgaatgaatagtaatattgtgttgtgtgagagagagaaaaagagaagaagaagaaggaggcaacaataaacgctaccacataggaagcatgaatgagaagaagcaatattatgccctcttctcaagccaaggcggactcttcaatgagaatgagaaagagaaagagagaagtcaagattagaattttaagaaaacccacaactaaaaattgaattttgagaaggtaaataataagaccaactcaaattctaccattctttttattaaatttgagttgtgtttttggggtttggcgttgggttttggtatggtctgatgataataataatcactttctctcctccacacatgacatagacaaagagagagagagagagagaaaggaaagttaaaaagagaaagaatagcagaagagagggaagaaatcagatgcgattgaaacgaatcagtccaagagagagacaccttattattctgctccttcctccttttattatttccccttctctctctctctgtatcttttcttaattttatttatttatttattttatataagaaaataaaataaaaaaaaatagtaaatgtaggaaagaaatttagtagtaatgtagtagttgttgttgaggtgagtacaggtctctctgccgctaccgctgccgctggaattgtttttatatggcccatgcgtctctcgccagctttcttaatttcttttctatataatttttagggttttttttttattttatttgaaaagaaattttttttacaattttataaaaatttaaataacaattcacatagaaattatataattcaaacagtaaaaattaaaatatatatatataaagtgattctctaatttttattaatttttattatatatataactctataatatggttatatttattaataagacttcaaatttgaggtttctgcagtacaaatattactccgaccatcatgatatatttttattaatattttatagtttgatttgtgtatatattatttcatgttaaaatatattatattttatttatataataataaaatatatttttttttgtgtaaattttatattttggttagagtgaaaaaagttttacacattaaatttaataatagtgtgatattaaatttaatgcatatataagttggagatgctctaataaaattgaagcatcagctatcttcatgctacttacgtaatattattattattacttaataccaattaatgaaatattaaagtttttgagtgtttgagttgcgaatatatagataaatatatttaatgtattttttatgatttaataataaaataaaaaaaatattaggtagtgatttatatttacgtggaataatgttaattagttatttaattattgaaaatttcttgatgttgaagattatattattcaaagtataatatagctatgttcactcttagtatttgtttttcccttatcttagaaaatagagaaaagatcacaatattggtgccttgacctaattgccaggttgttggttgagctctccctatttcttgtgtttacaaaaaaaaatttatatatatttgtatttgtatagatatatataatatatataaactataaataaatgtcaagttcaaattc

SEQ ID NO: 320324 - DNA, 2477 bp, Cannabis indica
gaatgaaaataaatatgaaagaatctttaacattatgtagttgtgaaggtaatacaacacaaatccatgtctagtacaagagatgccttaactccctttagtttggaaggccacaaagccataataaactcaaaccaatacataagtggagacaattacaactaaggagaagaatattacatagtacatacaataaggcctctatatatatttatatagcatatagctatggtgaaactgaaacatgactgaaaaattaaaattgcccaaagggttagtgaacaaccaataatttttttagggggaaaacaaatgatgttttgctcaaaataacttgagtaacaagacaacaatggctgccgttagcaagctcatcggtggagatgagtaagccatggcatgagatgaatttacatctttggatacagatggtggcagtgcaggacactccaaaccttgcttcccttctctgcactcgcttgagaaaagaccgggagggtatcttccgtagaggtttatgtagctgaacatggtcgaagcgcaatcgtttttcagttcatttatcatatctgcatatggacaagcaaattccttgaatgattcacaacactgcttggcagggtaatgaggtcctttgcattggctggtgatgatagtgtagttcataaactcaaagttcacagggcaacctacataataataccaacatgacatattataatctctttagatgatgacactaatggaatataaagcaataatctgttattctaacaccgccacgaggttgcgtcttaataatagttagcgacattccataaaaattattatattaaagagtaattggtggcaaaacttccttatgttttaatttttatacaattaactccattatatttacttttctttgcaaatttaaagtaactagatgactactgtatatatgtgaaagtaaaacttcaaagccaatacagtaataattcaattggtatttaacgatgatatccagctgacacatcaaatttataaagaaaagtaaacatgaattttactacaaaaaaaacaaataagggagttcagtgtaaaaaatgaaaacatgagagagtttcgctgcaactaaccctatattaaatcacgtgagaagagacaatattaattataccaatagcgatatatcacatcttaggtgggtgctaacaccaattgtgccaattagcatttctctcatttccttttaatgtataaaaagacttaggttcatttcaaaaacatatgtaggtttttcttgaatctcccaagtggaataagtcttagtatcatagaaattgtttttgttgcagcaaacaaaattgagcaaaaaaatttatgataatctatttctagcagaagaattattataaacaaagactttaaccaccatctattccaataagacaaggtgattcttaaagctatagactttgctttcttacaatctattaagctaagatgatcctatttcaaaagtaagcatggtcaaagaaaagcttataatttttctcatcttatgatgaacttctagatctcttaatctttaaaacaattcttttcaagagaaagattagattaaatgggcaaatcttaaatgtaaacaaaaattaaagtaagaaactttgaaatgaaacagaccttgcttagcttgaaggagattacgaccagaagaagcatgaaagtcaaagattgaatctgcaattaaagacacaaactttaattcaaaaattgcaaaaataagtaaagaaaaacatcaaagttaagaaaatgaacctgagatatgagaagaagatgaagatgaaactaaagcaagaaaatccatcaaaaagaaagataatataagtggagagcttcgatccaacttcattgtttctgggttcagcttctaagtcttggatttttatgaaaaagaaacaatttttaaaacaaaaaatggtaaagcttgaatctttctttgagtattaagatctatgaataagaaacatacaaaataagcaaatgaaaatcaataaaagagaagagaagaggtgaggaggagtaggagcaataggggagttgggggcaaatagatgggttacagtaaaggacagcaaagcaaaggtgagaacttggatttttaactaaaaccaaaccgcgtttatttcttattataaatttatgtgttttgtctcaaattgccttttctttgaactaattataatacttaacaatgacacaactaaaacattgaattttgtttagtgtaattcgttgtataaatagttcagtgtaattttttcatacttaaatttaattttttaagataataatatttaaatattttgttgaatttttttagagagtttaataaaaaaaaaatagggttttttgttcttaagttattggagttattggaagttatctttttttttttcagactcacgggctttttttgggcttaggtgcag

SEQ ID NO: 320325 - DNA, 2432 bp, Cannabis indica
aaataatttccaacacaaagatggcatggatagctctagtagagaccgaaacatcaacacccctaaccttcactatgtcattcttccttttgggctagttagcaaaaaattctagggctaaggtttggttgactctctcaataacaatcacaaattttacccatccccatttttcaacctgttcccttattggcacaaacattggatgaatgcctattctaggagctctagtgtcaccaatatcaatacccctatcatcaatgaatgctctatttttcaattctaaatagcgttcttgggcctcgacacttacgaaccttgccctatctacatttgatcgtctcgatgaccttggtgggttggatgatgaagcacctcactcactcactcttgatctcttaggtcccattctcaatcaattctcctaacactcaagaaaaatttcgctagcacttccccttaaattttctctttcccgggtgaacacccaatcaataatcactcaatctttcaatcacagacaatatctctacaacaatatgcatgacaataactaaaacacaccgatcccttgcaagaatctcaaaaattcaaaatcatccaaaaatttcatagataatcatgaaaaattacttacattgatgagaatctccttcactatacctccattgatgaaggcattgtaaattcttgaggtagaaggtgataaatagtggattttttgaaattgtgtgaaaattagggattttgagtgtggttttcaaaggaagagatggattgatgagagaaatagggttttgaagtgattagggatgaatgattaagaaataaatgaagaaaagtggtttttgtgagatgagaatgaaggtttttggtgatggggatgaagaattcggagaagaggatttagggttgaagaatgagtgtttttgggggtgttggacgaaattccccattttatttatgcctgggccatcttgccgcgaccaaagttggtatcgccgcggcgagatggcaaaaaaaaaaaaagccctctctacctaagtatctcgccgcggtgaaagccctatcttgccgcggccactgggcagtgcccaaagttttttttttttttgaaaaggaatgaaaaaatgatgaactaaaaattgagtttacaaattaaatgaacaaaaactaagagaaagtaaaaaaaaattaattaggaatgttcaactaaaaatgccattaaatcttgggttgcctcccaagagcgctctctttatcgtcatatagtcggacgttgattgctttcttcaaaggggtgccagaatcatggaagacttggcttggccaatatgacctcccaagtagagcttcaatcgctgcccattaaccttaaaagtctctgggctctcgccttttagttctacagctccatacgggaatgccttcaccactgtgaacgacccagaccatcttgacttcaacttaccaggaaacagtttcaacttggaattaaaaagtaggacttgttgcccgggttgaaactctttcctgactaagttttggtcgtgccacttctttgttctttccttttccatcttcattcaacaatttgtacattttaatggctgatgattatgtatcgaaatgggttgaagctgctgcaactccagctaatgatggtaaaacagttctatctttcctttaaaagtacatattcacttggtttggaactccccgagaaatccttagcgatgaagggagtcacttttgcaataaatagtttgatgctctactatccagatatggcgttcgccatagagctgctttaccctaccatccatagagcgatggccaagccaaaatttccaatcaggatattaagatgatatttgaggaaacaatgcaaagatcaaggaaagattggtcccgaaagttagatgaggcactgtgggcttacagaacagtgtttaaaacacttatcgggatgtcaccaagtagtaaatagtacgcaagtgcacgtaatcaaatagtaaactcacacaggtgaggtcaaaccataaggaattggattgaataccactagactaaatttatgattctatttggcaaaccaatagtttttatgaatcgaaactgaataataattcaagaaacttaagcaaacagataaagattaatcaagatgagaaaatagggaagagaatcctgttgatttgtttacccaattgttaatgcctaattggtattctttttcttgatgtgaatgataggttatacaatttaatctaactcttttcagatctttcaggttctaaatcacatgttctccaattaatctcttaattaaaatcacatgtaatcagcattaagcaatagtctaattgtcacataagtcacgcaaatacgctcgtttcacataaaacctagattatccaattttagcattc

SEQ ID NO: 320326 - DNA, 611 bp, Cannabis indica
atcaaatccatattatctaacttattttttttttttttgtgataacttaataatcaactatttttgcactatcattattgtgtcataatcttcttctatttataggtaattcaactcaataatatgcctccattacaaggcgaaattgtttgcctattgtagctaatactaataaacctaattggaaccaatttgtctataatttttaaaaatatatgtaaaggtaaaaactaatatggaatggaagatcttaacacttctcacaagagtatgacttttattccttaatgatagtgaaagtgataattggggaaacaatttttccttactttttacatattttaaaaggtgattttttatttttctttttgttctaagaaccatttggcctaaaattttcaactgactttttcttctttttttaagggagtaattttattttactgattgttttcttgatcgtgaattgtaaattattactactagaagtaagttcactttttaagttttccacactaacacattattgatatagatttgtcctcaaaaccttttgaactgctaaatcattttttttttcataaataaattgtgaagacagtgtattttcc

SEQ ID NO: 320327 - DNA, 1721 bp, Cannabis indica
aatacttaaaaaaacttttaaaaaaataacctaagctatctttgttctctctcactctagctcgctgctattcttcttcttcctcacaaagcatttatgactcaaagacagaaaaaaaaaaaaagatgatgttctttttaaaagatgatgcagtcatcctcatcaacatcaacccttgaagatgacgatgcactcccctcgtctctggtttcgccagcattgatcgaagctccaatggttcagataaaaatgccaaatctgaaactcgacccactccgtcgagcacaaacacttcaccacacaaatcgaacgcatcgccagatctcagatctgagatctccacaaccctgaacacaaagaaaaatatgagaaactacagatttgagcatatgccgccatgtatgacctacatattttggcaagactcaaaatgacaaatagaaagaggaagaaacaatgtcgcacctgcctagatttgttcatctcagctttggagtagtctcctcgtagcttctgcgatgagacgaaaggtggcggacatgtcagcaatcgtcttcttaagcctccccatctttcatgagtggttgtctttgagcatggctgctttcttgatgataaacaagaatagcagtgagagtgagacagaaagagagacaattttaggttttttttttttaaatttttttaattatttattaattatttttgttgacgtagtttttcgtcaactgatctaagaagatcgtaataaaaccgcaaaaaattaaatagacactagagatttatagttactcacccccatgttgcgatggtaatggggctacgtctacttgtagttttattgattagatctgacacactagagttatattctcaagagtgtgtggataaaaatacaacaaaggatttcttgttaaaatcttaatcgagatttatgaatataaagctaatgagagacttgatattcataaatctgatctaaattaaaggttgtaaagttcttgggaacaataaaccaattatttgttgaaaatgtgtgtatcaatggtgtttgaggactcgtgtcgattgagtatggtggatccaatggagaaggtgatggaaataatatgatattcttggctgttgtcaagtgaacttataggggagggtcacgaagagaaagatccaaaagagagaaaaaaggtcccaataagaagatcatttttctagcctccttcttgaggtatatatataggctagagggtttgttagtgatcccccacacattgggatatctcgttaacaaaccccatatctcactctttttatgaataaaatattataagtaaataaatatcaataacaatctccttgcatctaggcaaatatcccacaaatataggacaattggttattttcggttgaggatgcaccaatttaaaatggagagatgggatgtcacgtctctcctaaaaaatgcacgatgttgatcatgagtgctgaacagatgtgttttggagtgtcaatgcttgtgcacaacgccacataggatgtggtagtgtagctaccaccaaccctcgcttagccgtcaatttcccgattctcgagtaaaatgtacaaacttttctttaaagctaattgtgggcccgataacctccaaattgagtcatggctgtgagacacactttgatcagtcctgaatttgtctctccaacacaagttgaacaaggtcatttgga

SEQ ID NO: 320328 - DNA, 747 bp, Cannabis indica
gtaatgggttttatttagggcacaaaacccaacagtaacaagatctaaaaattttatgttgagctcaaagtccaaatcctcttctaagggtgtcaaaatttgcaattaaattctatcttgtaaaaccgagcttaccgatttctactattttctactaaaatatgctaacatccctccaattgaatctaaatacatgattagtctttataatctttaaaacaattaaaatcacactaatcaataatttaaagaattaatttaagaatattaatacataaattgatcatacttatgagataaacatggactcattaggagtcatgggttgggcttttatctttgcttgtcattttcaagaggcacaatcgtgtttaaaaggtgttagggtggtccaactaggttgtcctatacaaggttgagtgccaatgccttggtgttccctgccagagggatagttcaaaatcaatatggatgttggtctacaaagtatagatcgttgtatgggatacagagtcttcattagagatcatgattgtaggtgtattgcttcggcagcatacccaatagtggggctattgtctccttaggtggtggaagcgatggctatattggttggacttcaattgtctaaccgtctaggataccacaatattgaggtagagtcagattgttaagttgtgacgatacttttaagtaaaaaaaaattcttgtttagcaacctatggttcagtcttagtgatattttat

SEQ ID NO: 320329 - DNA, 628 bp, Cannabis indica
agagactttgcttctaaggtggcaactggaccgcctcccaagtaaggctgggcgagcgctgcgactaccaaaccttcgctgttcctgattactccactgaaacccacttttccaccaaacttaggagttgctgcgtctacattgagtttgagaacaccggggtcaggaggaacccaaaatggggaagcgggagcaagactggggcagccaagaaaatttgaagctgacgaagaagagttgaaatctgccaagaagctctgagccagactgaaaattgcatgggcctgatcacaagattgacctttgagagctttgttcctgttaaaccaaataaaccaagcacaacacagaaaaagttctacatcttttttgggtaaagatgagtgaatcacgtgagctaaatcatgaaacaaaatctctgaagagcaggaacaaatataagggtaaaattgcgtacctttccagactcttcggacactctgacagtagaacaacgcatgtgagaccgactctacctggcttccacaacggttacaacccgggtattggattattttcctaaaggctagattttggacagtggggagggttaagtttgtggctcggaaagcaaagtgtttcaccttgg

SEQ ID NO: 320330 - DNA, 914 bp, Cannabis indica
aaaaaaaaaaaagaaaaattcattcaaacaaagcaaacaaataaaggcagctatccacaaagacagccccacacaaaaattagaaaactaagcattacaaatcgtgttcaaaacatcagtgtctcttttgttccttagaaaagaaaaaagactcctaattctagctttaatggcaagcttaattgataaattgaccatcttaactgaataataagtactctaaaaaattcaatagtttcgatttctccaaacaaaataaatcaaaggagaaatcatggcattaatacatgatctactaaaccaggccgcatattatcacaccaggaatgccactcctccatagtcgtcaaccatttgaatagaccaaactaggaggaaacatcagcaaggactttccttgcaaacacacactcgaaaaaaaaaacatgatgatgcgattcatttctctcttcacaaatagggcagagggtagaggatagcaccagaactttagctaaatgatctcgggttaataactgattgttcaaggaaatggtattttggaacgcacattctatgccaaattgcagtagcatacttcacattctcaacagaaataagggagatatagaattgtttagatttgaatttccctttccaactgcattagtcaatgtatctttatcaaacaaatctcttagcttcataagctttcgaaagtacatcttgtgtcatttttaagagagctaagctagccaaaagtaggggtggcaattcgtgtttgcaggttgtgttcgtgtcgtgtcgagacccatgtataacaggtacatgcttcacctgaacacgacccgtttaataatcgtgtcaaaaaatgaaacttgaacgcgacttgtttataaacgggttgacacgacacgacccgtgtaacccgttta

SEQ ID NO: 320331 - DNA, 1164 bp, Cannabis indica
ttttccatatgaaagaaaatgtttaatcaagttaaaaaaatgaaatttgtctaatcgtgtcttcgaatattgtaagttgttaaaaatatttctcgaactattgaaattgttaaatttaaaaatttttgttcaattttactaataagtgtgtattatagacgaaattttaggagacatgatttagtttatgtcaaaattaagaatgtatgatttggtacatgttgaaatttgagaacacgttagtatatagacactcgtcacgttagatgttcttacgacttgaaagtcgttaaatccaacaatttaaataatttaaaagaatttttaagagtctaaaaaaattcaaaaaacacgatttggtacatgttcgagagaaaaaataatcataattagccaaaaaaactcattttcttgatgttattatattatatgatacttctacaatgcacctttaaaatgggtctatcgatgcacccctatctgtttcggcatttaagagaattttttaattcggtttttatggtcgtctacgttgttgttatgtaagacaacttgcaaaattttagagagatttaaacaaatttaacacacccaaaatagggttcaaacagtctgttgcacacgagactcttttaatttatatatgtgtaaaataaaatatttaaaccctatttttagcatgttaatttttttaaaatttttaaaattttgcataatgttttaaattactacaacgtaaacaactaaaaaaaaaatagactaaaatattattttaaataccaaaacagatagagaatacattaatagatttttttttggaattttttttctatattatattggcaaaatttagatagtgtttggttagaaggaatgaaaacataagaataagaatgagaatgggaataggaatggaataaaatttaaaatacaaaaaaaaaaaaatgataaaaaaattattaaattttttctcatcatacattggaatggtctttctttccatttcaaaatggaatagtcattccaccaaaatagtggaaagatcattccattagaatgacattccattagaatgacattccaacattttaatatgtaaccaaataaaggaacggaataaaaattgtttcatttcctttccattccatttcattacctcaacca

SEQ ID NO: 320332 - DNA, 678 bp, Cannabis indica
ttaatttaagcttgaaatttcacttttattttcaacttacataattttttcaattttatagatcattttttttttagatttaaccaatttatacattctaagtgtggaaacttaaaactaaagaaaacaaacataattctattccaaaaagtgacaacaaaaaagaaaattaactctaaaaataacataaataataggctaaaaatattttaacaatacatgtgcttacattattgtagtatatttgtcaaatataaaaatatctctaaccataacctccaacacacttcttaattaaaagagagaataagtcttaataaatgagctccatcaattttgtaatagagaatgaattacaaactctttaaatgtagaatttcctacttttttgacaattttttaaatgatatatttaataaaagtattgctactttcattaatttattaaattaatttatatgtcaaattatctaaatattattaaaataatcaataaaaagcatgattagagtagcattaagaaaattgaatattttaatattttacctattttagataaaatttaactaaaaactaaagatgcacttaaatatatctcaatataattagattggtgttacgtgcaatgtgcaatgcacgtatacttaattttctttttaattaggtttaattaagtga

SEQ ID NO: 320333 - DNA, 742 bp, Cannabis indica
aatttaaatttaatactaaaaataatctaacatggccctgtcactaccttagcctctgcactctccctggccgaccccgagtggcagcgcaagctctaggccgaggaggttggggtgttgacaaggaggttgtgagagagtacttcaacaattccgagtttcaaagatggaagaagatttacggagagaccgatgatgtgaacagagttcagaaggacattagactcgaccatgttaaccgatgatggtccgcttagtggagtcattgtatgcgatgctggttgtggaactggcttgctttcgaatcctctcgcaaaggagggtgccattgtctctgcaagtgatatctccattggcatggttgctaaggcttcaatgaagaacaataataagaaagagagaaagatgttaaaaatagataacttaactgagagaactcatattaatataattaaagaattattatctaatactaaaatattattaaaaaataaatttgtgaataatctgatacattatgaataataattatttatgtacactcattcatttatcaccattagattaaatatcgatgattgtaaaaatatttccaccatagggacaaaactaatgtgtctattatagatatgtcctatatatacaaagataaaaaaaaatagtttgagaaaaaaaaaaagagacacaaaaacaaattaaaaacaataaaaaagataaatatatatatttagagagagagaga

SEQ ID NO: 320334 - DNA, 891 bp, Cannabis indica
tatattgtcaaatttccctttgacacaccactaatatttaataactatatacatatttaccatatctctcataactttttggttttctttacttccacaactgttctttgttttctagtttcattcattattattcagcaatactcttatcttatgtggtcaattattattattattatttatgttgtaggggatatgtatgtggtcgattattactttcacttgttttatatcacatgccttttaaaatgtgcgaacgagaatttcttttaaagattatttatttgttttttataattattatatttataatttttattgttttttattattagtatttacttggattttaatttttcattttagacattgagatcctttgatttattttttcatatagtagggtatatatgttcagttattattgtatacttttccatgaatagatagtgtcattatcataaaacaatattattatattaattagtttatgaaaaataagttattcttcaatataaatattagtaagtattagtgtggatgatttgaaccttttctaaattaattaatggacgatagatatattttctatgtgatctatcatctaataattaaagcttaattctttttatttgaagttattgattatatattatattagaatgagaatctgactaatcttggatctatcaatgagttcaaaatagcaaagagatccctctagatttgttatttacgtaaattacttaaactatatatatatatagaagaagacaaaagcgaaaaatatctttattcataaaataaagtaaatatgtatattttatgagtaattgaccacgaaattttttatactttaatttttatacaatttatttactatttttttag

SEQ ID NO: 320335 - DNA, 627 bp, Cannabis indica
aagagtgttcgatgtcatacaatatttttgaaagaaaatggaaaatattattaattaacaggtaattcattaattaataggtaattcgatgataaaacttacaaagcaaaatcaacactagcaggttactaagccattaaatgaaagaaaactctaacaacaatcttaactaagaatccaataagcaccagcatcgaagaattgtgaaatgtaatagacttttaaaaacaaattatacatttaacaaagtccacatatcaataactattagtcaataattttctaataaaaattagaaaatatcaatccaattctttaagtaataaataatagaaactacacgactaaccatattctgacactctatcatcaaagaatgaagcacgaaacacaagatcaatgagcacatctaagtgacagagagaaattatgacacccttccacgagcagcttgagccatatataaaatacttactacccaaaagagaacaaagtcctcattagtcttaagatcagggccgaccctgaggtgagacgaaggaggcggccgctaggccctccatcgctcagggcctcatttcgaaaaaaaaaaattaaatatagttagtaataaaattatttttgcca

SEQ ID NO: 320336 - DNA, 750 bp, Cannabis indica
ataaatcactattattctatttactaaaaaaaattagtaaacaatatattacaaatattgattatgattattttttatttattccgttaaatttttctattaatttattctgattctaaatactgtataataaacgtgtcattattactaatgacttttccattccaatgttattccaccaaaccaaatatactaccttctctttaggctatgtttggaaattaaattttagtaggtaaggaaaatataaagtgtgcataaatcaatccaattcaattacaactaactactaaacattaaatatccaattataattagattggatgttatttttaatttttcacatttttttccatcaaaatcgtaacttaaaaatatagcccaagtgaaaaatgagtaaattggaattggatgttgccaaactatcaccacactcaacttctgggtaagaaacagccgaccatcttcaggaatgttgactttgatagaaataagtactagcataataacttctaaatatatgtatatgcaaaataacctcaagtcattactgcgatccaaaaattacactaaacgaccttgagagtcgctcaaacaaaccctaaggtggcgtttggttagaaaaaatgaaaatataagaataataatagaaataggaatgcaataaaatttaaatgcataaaaaaatagataaaaaaattattaaatttttctcatatttcattggaattattttttttttctctattt

SEQ ID NO: 320337 - DNA, 773 bp, Cannabis indica
taattactattacaccacttatataaaaatacaataactcacgtacccttatttaatataataccctctcattaacataaaaaattaagtaatatttttggtaatacatcgctcattctcattatcatttcaattcacatctgatttaatttaattcaatttacaaaatggtgaatatctatacttatacatattgaattgaattagaaaatctaaaattcacacttatacaagttgaactatttaataaacaagttgaattgtatatctctttacataattaataaatctcgcaataaatactttatgggacaagtcgttgaaactcgtgactcaacttgtgatgcgacctcatttaaataaggagcacaaaatttatgaattgagatatttcagcgttgttgggatattttttcaacaaaaaatcaacattttgcaataaggatcttgtagttgatcgtaatatacaataattttgtatctggacgtaatacaaggatcttgtacctcgtcgtaaatacaagaattttgtagctggtcataatacaatgatcttgtaattggtcgaaatacaagaatcttgtatctgctcgtaatacacacttagttatgtatttgctagtattacacactcaggtatgcatctgctcgaatacacttccactatgcatttgctcgtagcacacactctgccatgtatctgcttgcaaacaacatgatttgaccaagtcaaagacaacttctttgtattttaaatataaacaattatttat

SEQ ID NO: 320338 - DNA, 742 bp, Cannabis indica
aaaagtgtgatacaaaattaagtgatcaattatgttatgggtatcaaaagggtattaaattgtcatggataaataatgtgtagataccataagttcacgtcgtggcgctttggaggcgcaattagcatcatgacgttagttttgggcgctgcagtgcttgccatttttttgctccgacctctctcaataaaatacacataatttttgcatacgaatttcaaatgagttgattaaagatgcgtttaaaagctgagaaagagctctaaattttcatgttttgaattttctaaaatctgaatagaatgtggttaaatttctgcttgaaagttcagctttatttttattggtcgtccagccacatcatttaacttttaacaaatactattttttaaaaaattgattttaattaaaatagaatatatagaattgttagtgctttaagtttgtgcgtgtcatgctggcctggtctgtacttattcgtgctttataaaaaatacagattgtgttatgctgtgccacaaaaaaatatgggtcgtaccgtgtcgtgctaatatttttaaagggtaggctccggacgatccataggcccaatatttttgtactgtgctcggactcgtgccgtggttttcttgtgtcagctcgtatttcttaaacaggccaacctattttcatatctgggcttaaattcgtgctttattatttttttttatatatttttttacaattactaaattatatgtat

SEQ ID NO: 320339 - DNA, 999 bp, Cannabis indica
agtaaatataaaagcataatatttattgtgatgcaaattttacatcatgctatattgtgatccaaatttaaaaatcacttttgttacgtgagatatttgtattacaatttggcacactattagactagaattttgacaaagtgaactatattttgcatttgcatctccattggagatgttctttcttaagtgacatttagttgggaggaatgaaaatataagtatagaaatagaaatagaaataaaaaaaatagaaataaaaatagaaatgtgaatagaataaaataaaataaaatttaaaatgcataaaagatattgataaaaaaatcattaaatttttctcatgttacattaaaatggtatttctttctatttcaaaatagaatagtcattctaccaaaatgatgaaaatagtattccattggaatgatatttcaatttccaaaaattgcaactaaacaaaaaaatagaataaaaattgtttattttccattctcttctattttattacctccaactaaataccaccttaatttatttgtagtcaatttttttacactcatttatatacttataatattataaaaattattttaataagctaataatacttaacactttattatttgaaaacatataaaattaactaaataataaaaaatagaatagaaaactattctccccgcggaactttgtcacttatagtcttataggattgtacctatgtaatatttacgtgtaaaaaatgccccttaacttaatcagctgtaaaaatttagattttagttaaaacaaaaattaaactattttatcccctaaactttgtcaattatactattgttccccttctaatattagcattattaaaaatgccccgttaaatttttcataaattgggctgacttgtccatctatgtaatttattatgtggctgaaaaaaataaaaataaaaaaattctaaagaaaatttgatgaaaaatataggtgccgtttggtaac

SEQ ID NO: 320340 - DNA, 2329 bp, Cannabis indica
ttctgctactgagattctcttaggacatattggaactcctaagtacttgaaaggtaaatcatgtttcttgaatcccgaagcatcaagaactctttggacctcatagtcactcatattattacaatagaaggtagttttagatgggttaggaaataaacccgaagtttgtgaaaatagtttgagtccttggagcatgaggtagatgcttttgaaatctccattgcaaaagagtagtacatcatccgcaaaactcaaatgatttagcttcatgtcaccaaatctctcatgaaacataaagtcttgcctcttcccaattttctacataatgtgagagaggtattccatgcctaggacaaaagaagcgaagacatcggatccccttgcctcaaccctctcttggattcaaaaaatctatataaagagccattgaacatcaaagagaacctaggaactagaaattagcattcatcaatgaaattaaaaatttatatctcgggttttaaaataactcttaactaaaaagatactactcaaaactaaaaattataatgaaaatcataataaatagtaagagtttgaggagaagaaaaagaacaatgacatagaataatcgatgtcacaatcttcgtcttcttattgctttctctctgagtttctctttcaattttttagttcaaaagcactaaaattcgtaccctaaaagtcatatttataatccttaaaaatatctcacttaaaaaaaaaatagaatttttccagaaatcacctcctcgtcgtggccacgacttactgccaaataatttcattcacagattagtattttggtcataacttcttcaatacaactcaaaattggatgattcaagatgttcagaaagctaagaacaagatctatacttttcatgttgagctcaaatgctttcaaggtcgtcaaaatttgtaattaagttctgcctcgtaaaaccgagctcaccggctttcactattttcaaccaaaatgtgctaacatccctctaaatgactctaaatgcacgattagtctttaaaatagcctaacaaattataatggcactaatcaataatttaaagaatcaagttaagaatattaatacataaattagatatattaatacctaattgtgtagcctttgagctgacttagtaagtctttgatcttgctcaagtaggccaccattttttcacctcaaattgtgtatttacctaggactattcatgactaattgagagtcactgaatatgtccaggtggttagcccggacttcatgtgccagcttgaggtcgattattaaggcttcgtattcagactcgttgtttgaggctttaaagtcgaatttgattactccgtgcagctacttgccccaagggttataagggaaatgcctgcactggatagttggtcagtgcaacttctatcaacatggagtttccatgttggctcttcaagtttttactactgctcttgctctcgcttcttctgtggctcttgtttttctcttgaatcataagagatttcaggatatgagtttgtgcactcagctacaaagtttgcaagggcttgaccctttacgaccattcttagttgatatgtgatgtcaaactggccatgctcaatggctcacttgagtagtcagcttgacgcttcaggtctctgtaaaacttgttacaacggttgatcggtggacacctttatagggtgtgcctagaagtatggccttacctttttggtaccaactttcaacgtcaattaatttcttactaatgtagtatataaggcgttgtatatcgtcttcttctctagtgaggataacactcacaacatgttatgtgactattaggtacacgcctatctcttcattatgcaggggttttaagaacataggtgattgagccaattatttcttcaactcttggaatgcgattgcacattcctctgtccactcaaatttttattgcctctcacaatgttgagtacacatttatctatagacttggacacaaatctacttagtgtagttatgcatcctgttaggctttgtacttccttgatggttgtgggtgactttatgtccaaaagggcttagatcttgtctaggtttgcttctattcccttggcattgactatgaagccaaggaatttgcctaacctactttgaaagaacatttgagggggttgagcttcaggttgtagttacgaatgattttgaagcattcatctaggtcctccacatgcccccagcctttttggacttgacaagcatgtcgtccacatacacctccatgttgcagccgataagatctttgaacattt

SEQ ID NO: 320341 - DNA, 3873 bp, Cannabis indica
ttaaatcttagctaatatacttctttgcattaaatgacttccattattgttattattttattattaaattttacatttaactttgtattattattattatttatatttcttactaaattattaagtgagcattaaataacatattaaaagttgatgtataaatattacaaaactactttttatataaaatatagatcaacttttacatctcccaatcttagagtagtgggtgcgaatcccatgtttattaatctttattcaaaactttctttgctgcttgtatggagacaagctacagtgtccttcaactaatgtgtcaaaagacgagtcgaatactctgatcacgtgaacaatgtgtgggtcttactcaagttgtcttggaggcctgatgttagggtttatattttaaaaagtctaaaaatatttttattataaattgaacaatttgatatataattgaatgttaaattatttattaataatttatatataaatatcccaaaattccttatttatatatgagaatgtgagttgtattatacggagtattaagatcatgagctatgaataaaatagtcagcaacatattaaaattatgaaatttttaatctacggttgttagcacggttcattagcccgttacttggtgcaagcaattttgattcagatcattgatgtcgatggatttttcaatgaatgtgttgtatataatagagattatatatgacataactgatatgaaattaagttgtctttatcataccagtcgtttattataaagaattaattcatatcgcagtgataatcaattagtagatcgacctaaatcctaagaaatcttgagacccgtaggtaaaggccaacgagaaatcttctaaaatcggtggattaccttgagacccgtaggtaaaagccaacgagaaatcttctaactatgtcatctaggaatgacttaattgagcctagacaggatgcaacccaagctttgtaggccttatgtgtgacctgtgtggaccttctttgatagtgaggctaatttcttgatgtattcatctgatgcatggtaacacatgtctcgtctaaaaatataaacaaactttcttatttagttaatcttagtttattaactccctttcggtgcccttcctcttacttttaattctatttaacttcatggttagttcaataatcttttccaatttgaaaggaaattatgttcttttgaataactttcttgatgtacccagactgttttaagttgattgcccttttcttcctatttcttgaaacttcaataccaagtatcttttcaataggtccaagctttttcatctcaaactctctcttgaatttggctttgatacttttgatcactgattagtcttgcctcattatgagcatgtcatccacatagagaaataagaacacggctctacattgctctagattcttaaaatataagtagtgatcatatgctgatcgtttgaacctgatttgttgtatcaaatcttttattccattatcttgggaactatttcaaaccatataaggacatgttaagctagcaaactaactcaattcctttatcttcgtcctcaagtcttggtggttaccttatgtagatctcttcatctaagaatctatttaaaaaagtagtcttagcatcaagttgttcaatttcaaactccatttgagctgtcaatgacaacatcaatcttatcatcttgtatttaccacgggtgagaatattttagtgtaatctatttcttccacttgagtaaaacccttagccactaacttagctttgaacctcattggttcattcttattaattccctctttcaccttgagaatctatttgcactccactatctttttattctctagctttggtacaataaccatagtcttgttcttctagagtgagtccatcttctcatccatgtcctggatctattttgacttttttttttcacttaaaattacctcttcgtagcttctgggctctttaatcttagtttgttgtactgttgccagtgcaaatgctattaagtctactttcgcaaaccttgtcggaggatggatcactcttctgaaactatcacacgccaactaataaccttccaaaccttcctgtttgaatctttttggaacctctatttgggctcagcatcaacttttatctgtgcattgttttcctgttccatactagcttctgtctatgaaccttcttctaaatgcttcattccgtaatccatttccatgcttgtagtgttcttgtttcatatttttacctacttcacatggagacacactacctttatcggatgtcaagtgaggatattctaattcattgaaaataacatttctagcaatcacaacctttggtctacccttcttgaaaatgcaaattctataccccttggcacctaaggcataaccttgaaaagttctcttaactctaggttccagcttgtctatagattagtgtacataagtcgtacacccaaaggttgttaggtgcattaggttcgggattctgttataccgcatttcataaaggatttttaagcctataacacgatttgggcttctatttataaggtaggttgcagtagctagagcttcccccaaaaatggtttctctaattcagaactgaataatagacatgtaacttgttcaacaaggttcggttcatcctttcaacaataccattttgctttgggattttcactacggttctatgcctaatgatctcttactctcaacacaatatgtcaaagtcagagttaataaactctaactcattgttcgtcctaaggttcttaacttttagatcagtttggttttccacctgggttttccaaattctaaactgttccaggcactcattctttgttgctaacaaataggtccaaacacacctactataattatcaactttagaaagaaaatattacttgctagagtgagcaggcactttgtagggccctcaaagatcaacacgcacacatttaagtaacttcttaattgtgtgccttgttagagtgaattttaacttatgttgtttccttaaaacacaagcttcacaaaattgtaaggcatgagaatttgaattttcaattatgccttgtttgtgcagttatttgaggccttgttcactgatatgcccaagtctgtgatgccataactttatatctcattctatccctttgaccaaacgtgcctctccgactggaacaatttctccttagagatcatataaactatgatcttttcacctttcatcactattagtgaacctttgatgatcctcaagattacgtgcagggacatgtatccataaccctcatcttcaatcacacccagggatatgagggttcatcttaactttggaatatgccttacgttcgtcagcaccttgattccactatcatattgtttgatgacaaccttgttggttccaatgaccttgcatgaatagtcattttccattagaactttacctccatcgactgatttataatcaaaaaataattctcgacttagacacatgtgataagtatatccggagtcaagaatctactccttgttcattaaagattctgatatggacaacaattctccatctgctgagcagtcatcactgtcttccgtgattacagtagaatccttcccatggtgatgattttggttgtccttcctatctccattgtgagatttgttgaagccttgatgttccttgtactttttgcaaaatctttgcaagtgtctggactttgatcttgattgagagtgatggtgtttactttacaaacttactttcttgggtgatctccctctttctaaacacttcttctttcttggattct

SEQ ID NO: 320342 - DNA, 1078 bp, Cannabis indica
ttgattaagtgaaccaaaacatacacaaatgaatgaaaaaaatacttcttttactttattgatattgaataatctggattacattgaaatagagtttatttagggcataaaacccaacaattccacgttttcatattcattacgaacaaccagcctcacacttgttaccccatcaggttgctaacaccaacatcgacatttatggtataatggccttcaagaggcagctgccgtctggctaattcccactgctgttgaagcttcttctacggactagcatttctcagttcagcaacatatatacttcccacaccaatccaaaatatcacatgcctttggtgcaactcccccatgcagaacaatatttcagtagaccataccttagccatcagactagtcatccggccccatcaggtcctatatcgggcattatttgtcttcaacctagattcaacttttcatcacgatgcattggacctacgtcggaaatgcatcggacttggattaggcctgtctagaaaatacattttttaacccagaaatcacagatttaaatctaatccaaaacgcacatatcagactctaaatctatcaataaataaataatattttaatattaaatcaataagaaaagcattcaaaaatggggtagggaaaatcttatcttggtggttgttcgtcttcgtggtgggtcaactgggtggtgagtggagtgggttttcgtcctcagattgtgggttaattggtgctcagatggtgggttcggtggctcttttccttcgtggtgctgggttcggtggctattttccttcgtggtgctgggttcggtgggtttgacagagttcgagagaaagagagaaaggggaggaagagggagtccgtttttagaataagaggagtaaaatagaattttagtaaaaattaacttattgttttaattttgaattagtcgaccaatcgtagtccaactaatgcctaaaaaatcagatctccctttgataaacacccataatgtgtgtatatgtatatattgcgtgtaacgccctaatgttaaggcacgctacagtgctttttcaat

SEQ ID NO: 320343 - DNA, 2741 bp, Cannabis indica
taataaatatattaaatgacaatataatttaataattaatttttagtattaaatgattagaattggcattaaagtggttaaattgaaaaaatgacatttttgagaaaataagatgaaaaatgagaaaaatggcaaaattgcaaagtggggcccactatccatgaccgaccactctatagcaatttaccatttaattttttcattattttaatgccaaataaatctaacctaaccctaagtggtttcctataaataggtagtgatggctaaagggaaaagatgatgcatctcattccttcagtaaaatttttgagcctctcttcctatacctagctgaaacctctcttcaaaatcgaagtctatagtgaaagagtgagtgccggtaaaataattccaacactatatagctaggaatacaatgattggagaagcatctccaacaattgataaggatgatgttgaaagcatcaagacttgacatttaagacttggacatgttagtgaaagaggacttactgaaattggcaagcaaggcttgtttcaagggggactgaaagggaaattgaagttttgtaaggaatgtgtatatggaaagaatagtagaatcaaattcagcactggcgtgtatactactaaggataggttagcctatatacattcagatttatggggtccttccagagttaaaaccttatgtggtgctagctatttcatcagtattatagatgattatttaaggaaagtgtggtatttctattgaaaagcaaaggtaaggcttttaacagctttgacacatggaagaagctaattgaaaattacaccacatgcaagattcaaaagttgagaatggaaaatgcttcgaaatattactcaaaccagtttgatgaattttgcaaagagcatggaatagctaggaatttaactgtgcgaggcacacctcaataagatggacttttctgggaggatgaatagaactctcatagagagagtgaggtgcatgctcaaaggagcaggtattgaaagaccattttggggagaagctgtcaaaaaaactttttatttggtgaatagaagtcattcagtcccattggacttcaggactccaaaagagttgtggacacgtcaagtacctaagcttgaacacctaagagtgtttggatgcattgcctatgctcatattagccagcacaagcttcagcctagagcactcaagtgcttgtttttaggctatcctaatggtgtgaaagggtataaattatggtgtttagaacttggctacaagaagtgcattatcagtagagatgttgtctttaatgaaaaagaaattgtgatcgtaaataaaaaaaatattacctcagctcaagaagcagggagtagtagacttcaaattgaggtggaatttttgtctaaatatctaattgatgaatcacgagatgatctcaatgaatatacaaccgctgaagatgctcaaacaagcctaaaaggctattagttggctagggaaagagaaaggacaccaaagcaccagacaagtatggatatgttaagttcacaacatttgcaatatcagtagctgaaaatcttgagagtgcagaacctaaaagctacctagaggccattacaggtaaagatggtgcaaaatggttgaatgccattcaagaggaaaagttgtcacttgagaagagaaaaacttagattgtagttaagagaccattgaacaagagacgtataagacgtaaatggattttcaagtggaaagaaggaattccaagagtggaaggaacaaggtataaggtaaggttagttgccaaagggtttactcaaaaggagggtattaaatacaatgatattatttcacccgtgatcaagcaaacatcaataagagtaataatttccttagctgcagaatttgatcttgaggtggattaaatggatgtaagaactttattcttacttgggagtttggaagaaagggtctacatggagattcccgaaggcttttagaatgatgatccagataagatttgcattttaaacaagtcactttatggtttgatgcaggctccaagataatagaacctgaggttcgatgaattcatgataaaagttgggtatactagaattaactatgacacttgtgtgtattttaacaatcaaatttacctcttgttgtatgtagatgacatactaattattggtaaagataggaccaacattgataatcttaagtctcaactcaagagtgagtttgagatgaaggatctaggtgaggccaagaagattttggggattgagataaagaggaacaaaccccattcaatcatgttaagccaaggcagctacctcaagaaggtaatagagaaatttgggatgactaatgctaaaccagttgcaactcctctaactcaacactttaaattgtctcaagagaaatctcccaaagactgagacaaaaagaagaaagatggatggtgtgccttatgctatattgagcgggttaaaaataaagcaacccacccaattaaaccaacataacccgaactaaaccgaactagaattttcgtttttatgtttttaaaattttaattatatatatttattataatattaaatataaatattaaatataatttatataaatattaaaaatataaaactaagaaaattaataatccctaaatcttaagactcatctccatctcctatattctcacttgtacgcagactctctctctctctct

SEQ ID NO: 320344 - DNA, 1218 bp, Cannabis indica
cctatctttttcaattattttctgaagttgttctattttcaattcatctaatccacatacacaaaaagaaatattccattgggccaaaaaaattcacacaaaaaaaagaacaaaaaaagtgtggtccctttacttcattttctatctagattagaaattgttgtaaattatcatgttgctattttttgtagagctttgttattgagggttagtggtgcttagcaccttttataggtggtgtctcacgattagttatcgatattgcttaaaagttattttcttaaattatattggacccgatacttaattacaccaatagcggtattacaccgaggagggtgctaggcacctatggtaccttttagcaattctctctttttttatataagaaatgctaaaagatattattggtgtctaacactctcttcggtgtcattaatataattaagtatcagatcccatataacttgagaaaataacttttaagaaatatcactaataaccaatcgtagagcgtcacctataaaaagttctggacactactggtacccaataacaatattttttatattattattttaaaatatgatcccctttattgccaattggcttggttgcaattgtttattaaaataaaaaatacaagcaaacaataaaaaacaacaagtttatgaaaatattttttttttctttctttcattataagcaatttataaatatgcaaatttttgtttttttttactctccaatggacattgtacattgattataacaaagtttgtagtaaaatatatattttattttatttttttatttaaaattaagatgatttgcattaattttaaagagatattatactagttcaacgcatcctaacaaattatctcaataaaatatttgattcatttatcatgacataatttgatgttttattttacattttttttttagatttattttaatttattaatacttaaattactgcctttcaaaaaaaacaaatagtattagtttagataaaactttttttattagattttttccccactgaattaagataaaaaaatcaacaacaaatgcaatttattgtttttttctctcacttttattgagataaaaatgttattacaatttattatatttttgttatgttgaaaacttgggttttttttttttaatttcttttaatcatcaagtttttgttttttttttctttcc

SEQ ID NO: 320345 - DNA, 634 bp, Cannabis indica
cacacacacacacacactcatacttgcatctacaacttggtccccatccttcacttcacttactcacatcctctccttttgccactttttgtttgtagattaccacggggtcggtcatcgagttgcttggacgcattctgagacccgtaagtatcgacggtaacttcgagaaatgtgtgtcgagtgagtaagcttgtcgaatgcacttttcttagcccttcgattattagtcgactaatctcgagagttggcagtgctaattttcggggttagcagaagtcatcctaattcgctatcttccatcggcatatgctctctaaaccattctacttacattgtccggtacaacactagtgttctcgtatacatgatgcatgtccataacatgccacaaactagctcaatcttgatctcagtctaaactcatgcatattatctatctgtgggtcacagcaattgtgcatgtatttactttgaacaacccatttgttgtagtgtttctctcatgattcacacaccaaaactaaacaagtaccttgatcctcaaggcaccatgcttccatgcatgtcgacaggccctcaagataactcactagactagtagcatacattaaaatctctctctctctctctc

SEQ ID NO: 320346 - DNA, 2790 bp, Cannabis indica
cttcttcaatacaacttagaatttgacgattcaatgtgttctggaaagctgagaacgagatctacaactttcatgttaaactccaagtccatttctacctttaaagtcatctaaatttgcaaataaattctatcttctcaaaccgagcttgccggtttccactatttttaaccaaaatgtgctaacatccctttaaatgactctaaatgcatgattagtctttaaaatagcctaacaaattataatcacactaatcagtaatttaaagaatcaatgtaagaatattaatacataaattagctatacttataagacaaaatatcgacttatcagaaacttttaataaggtataatttagtacacatcaaaattcaaatactaaaatcctataataagctaaaggtgtacattcgagccagacttttatattataataaattattaatagtattgatatgcttaagaaaatactacattttttatggcacaatccatattttgaaaattacggacaaaacaaaccaaaaattaactgactagaatggtagatgatgcagtcaatagtaacaagatatctaactagaagcgaaccaaaaaggaaggtgcgaccacatgagcattgtcacggctacaggaggaagttggtattggaggaaacttgttgccattaaagataaaatgaaaaacttggttgatagaaatgccattacaaacagcaggtaccaagtctcccaaggatatcaactacttactcatgttgttactaaagttcattggagttctattgtttggagccgtttcaatactcctaagcatagtttcatttttttggctaaccatgcttaagaggatcaaaaccaaagataggctccaaaagtttaacatagccatggattcttgctatattctatgcagcaatggtgaagaatcattttttttttaaagaacctcagttcgaaattgattaacgctaaaagaaatcgggatgggaatccctcccctttgaaattctgcctgccaccattacaaattcgagtggacttggctaaactatccacgtaagtaaggcaatctcttttagcaaaacaacatgacagcaaaaaaagttgataacaactgtaagataaaagaaaaggttgcagtcagcttccaatcaggagatcttttcacacgaatggctccaccaaggctctagaatctgaaataatcgacaaattatcccactgattctcagatgcccaatttaaacaccaagcaataccgcctgcatttgaatcagttgaacatcttattttgatcgctctttcttaaagattgtctaaacctagtaaaaagttggttgaaatggaacgtgagttcaacctcattgtcccgaatagtcaagtggataggtaagggaaaggtaagcaaattcaagaagaaggttttagctgctgcaattgccgccctggtgtacttcatttggcgaactagaaacatcaagttttgggagagcaaaatggagaatagcaatacagttgtttctcaagttaaaaatgtaactaaaagtagaattacttgtatatggccaaaaaaaagtctctagctagtagtaataaaatagtttgatacattataaaattgtataaaatatttatgtcctctttattaattgaagatgctagtagatggtacaaataaatagtgatgagaataataatgatatatactatccgaatgattaaaaaaaccacatgagcatttaaatctatatatataacgcttaagaaaatttacaatcaattaaaaaaaaaagaatggtttagtgtcccatataaggcatctgcagtgtatatataatatctttttttgttgaaaaggaataatacacatgatttagaagaatgtacacaaaaattatatgtacatgcatgtgtgtttcctttttgatttatattattattatttttggatggtgggtgcaaataattattagataaaacattcacgcacaaaatgcttgtggaacaatctagggatgattgtgctagctgcagtagcagtgtagcacaacctgtttcagacacaaaaatcatcatacaatctctagctacttcttttctcggatttattatgttcaaatatttcaaagatttacttcttccaagatttgaatcattgtttgcgtttatcccaatttgaataaaagtatattcatatgtatccaaatatatatggaataaatatgctactaattatctctaacttgcagactattaatctatagaaattagaagatatattttcatttttaccttaaaattacaccgtttgttatgtaattacgtctaattacctttaactacacccaattccaattctttttggcttttcaaatgcgacctataaataagtaagtatatatagagtttcaaaattttgtattttatgaaaccatagaagaaataagaattgactgaagaatacagcttgttcataaagaattaatttagatttatgaatcgaatggtaatgaaaacatatgggacaactggacaagcaagatgtataagatgtagagttgttggtggctttcaggcgaaggcaaaatgaattgagttatataccacttgatatatataatatatatagtgtgtgtaacccatattacatgtgggtttggtatacgtacaggtgtgaagattacgaaaatagtttagaatataaaaagcttatttaaatccatatgctaattactcttttattaatcaattaactaaatttatctctaattttacatttatttgaaac

SEQ ID NO: 320347 - DNA, 1244 bp, Cannabis indica
atgacaatattcgaataataaactacatgattattattattacttttcttgctgagtccttgagactcacgggtgttatgtggtgcaggtaaaggcaaggaaaagctagatcacccatgaggtgacactcttctccagcaatgtacatattgaccttgccgacctgcgtgtcgggttgccaagagttgttttgggttgtatctattgtgtattttagttttatgtttttggggcatcatcgtgtatagtttttttttgtaaaactctttataacagggatccccgaaacatgctttttatgtcgttataatgttcgtttttagtgtttctatttagtcaagtttttaatattatcacggtttttaacaattaattaatctattagtattaaactagtttataaaatcacacacgtggcgtccctatagattagggtgttataagaactttcgtagagaaacttttttcctaaaagtgaatggatcatagtcaaaaattggctcgaagctttagattttattttcgatcacaaatagagcacgttgaacatccaaaacttagattttttttaatttatttttggaaagtgatcactcttgaccctagaccacgaaattttgagctaaaaatgcaatctttgacctattttaggcaataggaaatcaatccaagctaaaagaagtttcctctctttattatattttttatttttacttaaaaaagcttgcagaataccaaaattaccaaaattgaagatctctaatatttttcctaaaaaacaaatagaaaataaaaccaagcataattctacacaataaaataataaaaatattaaaacacacattgaaatagactctaaaatgcataaaaataaacttaatacatttccccaaacttgacatttactcacactcgagtaacgaccaagttaagctaacaaaaaaacacacacaaaattaagccaccattgctatcgataatacattgcattttccatgaaatctcaattataattttcaaccacatttttagctcaattgcctcgaaattcaaccttaaaatttaattagagaaataaataatatgattgataaatgacctcaatatttagactccaccatatgagctcaactcatacaaaataatttcacaaatcaattttttaaatgcttgcatcatttaactttctccactaatgtcaaaaataaatattttgaaatcaaaaggactttaacaggttataa

SEQ ID NO: 320348 - DNA, 1848 bp, Cannabis indica
tttatttcagtactgtgtttaagtttttagttttcggataatttcatatcttggtgtaaatgaagtgtttggtggcattgagaaatttctctccaaataaaatctaatttatggtgtttcgatttggcatatacagtatatgcaatcttcttcatttcgtttcaaccttcggagcctctctgtatctcacattcaaaaatttattcctagaaagtggaaagggacgatttcaaatagtgatgtttctatgatagattctcttcttattgccattaagaacttcacaagcgagggccatttatcaaaagcatttaaagctttctctactgtccaaaatcatgtctcttcttctactagttgttccaacaacattttattattacgacccatttcgtctcttattacatcctgcaccaatcttaaatcactttctgaaggtaaacaacttcatgctcacattattgtgttgggatttgaacaatatcctagcttggttccaaagctggtctctttttacacaagctttaaccttcttgttgatgctcatgtttttactgagaattctaagatattgcatcctttgccttggaatctgctcatattttcatacgttaaaaatgggctatttggtgaggctctatctgccttcaaacaaatggtaaatagagggattagaccagataatttcacttacccggctgtgctaaaggcttgtggcgaaaagatggacgtagcttttggaagagaggcacacatgtccattgagcattgctctttggagtggagcttgtttgtgcacaatgcattagtcgccatgtatgggaagtttgggcttatagacattgctcgccacttgttcgataaaatgcccaagagggatgcagtatcttggaatgcaatgatctctgtctatgcctctaggggaatgtggaatgaagcatttgaattgtttgaaagcatgtggatcgagagtaatgaagtaaatgtcatcacttggaacaccattgctggagggtgtgtgcgtacaggaaatttcgtgggagcacttaagttgctttctcaaatgagagtcagtggtaatcttttggactcagtggggatgattattggcttgaatgcttgttcccacttgggtgccgttaagttggggaaggaaatccatggttttgcagttcgcagtggtatttatgggtttgaaaatttaaaaaatgcagtaattactatgtattccaggtgtgaagaccttaggcatgcatatactatgtttcaattgatagaagataaaaatataattacttggaattctatgatttctggttttgctcatatggatagagttgaggaagcctcattcttatttagagaaatgatgctgtcgggatttgaaccaaattatgtcacaattgccagcatcctacctctctgtgcccgagtagcaaatctccaacatggaaaggagttccattgttacattataaagcggaaagaatttgggaattatttgttgttgtggaatgcaattgtggacatgtatgcaaggtcgggcaagattttcaaggctaaaaaagtatttgattctttaccaagagagacaaagtaaccttcactactatgatgtccggttatgggatgcagggagagggccaagctgctttgaagatatttgatgagatgaccagacatgggatcaaaccagatgatgtaaccatggttgctattttatcagcatgtagccatgcgggtcttgtgatgcaaggtaaaatgctatttgagaagatgtcgagtgtttttgatatatgtccccgtctggagcactatgcttgcatggttgatctttatgggagggct

SEQ ID NO: 320349 - DNA, 603 bp, Cannabis indica
ttttccttttttgtatttttctatttttttcccaaaattatatcacaacaactattaacagtattgttgaaaaaaatatattttattatattttcttataattaataggtgtaatttagataactatgtgagtagtagtttggttaattcctattcttcagaagatagtgggatgtggtgcatgtttacatattgaataattagtgctcctattttttagtataagtgaagagttaaaagctctacataaaaggcttgggctgtatgaattggtgtgtgcataaaagcaataaaaagttttctaatttactttgttctctacatatataagcatatatatataaatagtaatagtggtatcagagcttggtgagtttaaaaaaacgagtaaggtttaaaaaaaggagtgaaattgtgagattacatgtatatacatatatagtaaaagctatattttctatttcactttcagttttattttgtagcagcaatgcggctgacaattttattcaatcaacaatttcgtgtattgatggccactatatgtgttggaaatattttactaggatctagatttactaccatgtatgtttcattaacatc

SEQ ID NO: 320350 - DNA, 557 bp, Cannabis indica
tagctttaatgcttaacttgatccgcttgctcagaactgtagctggttcacaatatccctcaaaattacagttatttttattgcaccacaccatgtcggtgacctcagctactactgctgatttgatatcagcaaccatgttatttctactcccttttaacccaatcagccagtcctcaagattagaagggcaatcaaactgactcaaccacttggtgacctcaagaataacatttttagtaaaggggcatgcaaagaagaggtgatcacttttgcaaactggacataagggagaatccagatgattgtacctgaccaaaagatctcatgttaataggttggagtgcaggacctgtcacaaaataaatttatacttcgagactttgagtttgtgccaaatctctttgtaaaaagagatcttcgaatctgttaaaagagactgataaaagtgtttaactttaaatataccagtctttcctgtctcaaaaacagtctacctattaatcttatcatgcagattaacaagtttatgaaattactaatttttttttaaaaaa

SEQ ID NO: 320351 - DNA, 627 bp, Cannabis indica
atatttactttaatgaacctgttagtgaaattgattaaacaatagaattgacaccaatatatatatctttcattattgaattgaataagaaagctgaattataatcctaaggtacaatgaaattaaagtaaaatagattcggtagatttgcctttctttctttttttaacccatttattcatgatgatgactttatttaactaaaagcctcaaagtcacaatgtgtgaaaatactttgaaggactttgtttatctccagctgtttattttggctacttctttccctcacagtagctttgtcttctcatctaacgacaaggaatatcgtcccatttgcattgtatttgtagatttgtggacaaaatccgtcatatatatttcgcattaatttaattccctacatgttttttattttatttttttatgctacttgtcagtcacaaaataagttttcaaaatttcctaaaaaccatcaaaaatttgatcaaacgaagatagggatttattctatgataaaacacattttaactattatttttctagagaatgtgatcagggagagggctgaccttgagttaaaatgggctataaaaaaaattgtgcccttactataaagataaataatat

SEQ ID NO: 320352 - DNA, 845 bp, Cannabis indica
atttgattttttttcttttcaattttagtactaattctgtttgtttcaaaattttatctttttttttcaggttcaactagtttatgagatgttaaggtgcaactgccagattgcctattgatcttgaaattgagaagacttgcagacaaaatagaagaaggaaaagattggaaaaagctacaatagagattgaacacgaagtagatatggctgacaacgccaatgttgacaacagcggtaatgtagaagaccaggctaagggtcgcaatcacaatgaccgtatcctaagggactatttgctaccgaattcgacaggggctagatcctgtataaggacacctgccgttgatgctaacaactttgagatcaagtcggccatactgtagatggtccaatcttcagtccagtttgggggctgccaatagaagacccaaacatacatcttgtcagacattcaagaggaatggagttagtgatgatgccataggttgctcccattctcattaagggagcgagccaagagttggttggtatcattcccacccaattcttcaacacatgggaggaattggcccagaaattcctttccaagttctttccttcgacgaagattgcaaagttgagatctgaaatcaacaacttcaccccacaagacaatagaaatctttatgaagcctgagaggtttaaggatttattgagaaagtgtcttaaccatgggattgaaaagtagctgcaagtgcacaacttctacaatggattggttagcaacacccgaacactcatagatgccgcagctagtggggcttttatgaggaaaagtgcgaatgaggcctttgaactactt

SEQ ID NO: 320353 - DNA, 2656 bp, Cannabis indica
ttaagtcaactcaaattattgcaaatcaagatatttcctaagcctgtcaagatgacatattgataggaataaggagtagcaaatggttattaagactcactgccaatatttttttttaatttgaatgaatgtctgattgtgcaggaatttaagtattgacttctgattcaattttattatgaaatggaaaagcgctcaactatgagaatttagttcaaaaggtgacctcatatgttgtctttaattgctggtataggtcatcaactgttactccagaagccatttcaacatatatagttgactgcataccgcggatctgaaagattgatacaaagattcattttagcaacaaaaagtttgcagaggatagaatcactaatacaatttgtgtaataattacaattggcataagatgcggggtgaaactgatggttatctttgaatcagctgcatcggacagtccctgttcaatttctggaactgaaattcaagaagaaccaagattaccacaatacgcaatagaattaaaaacaacctatttagccttgcatataagttatgtcaattgaatatcatgtgaacccttaaaagaaacaaagtgactatacagttgtctatccattttgagggaatcatttatgaataaatttaacccaaaatactgacctttgatcaaaactagtcatatatgttctctctcccatttttcttccaataagaaaggttaaaagtatttagaaaagaaaaacaaaaacagatctaatttatattacaataaggatgcagacaataaatattaatctccgagggcttgcttgatttagttatttatattattcaaagtgaaacagcaaatgtaaacttcctaaaacatcttagacaacatcattcgccttttgtttcaattttcaataataaataaagaaaatatagtgacccaaatctaaatccttttcccatactgatttttaacacaaaacttaccatggcgatgccgggaaacaccataagaatagatgccttcagctagttcggcatacatatttgactccttcgcacctctccctgcaaattaattaatttagtaaaaatattgagtaacatagcagcactggaaggcatatcctggaccctccatgtgaatgttaggaggtataaaaaaaaatacaaacctgctccagtaacacctgatttcgagtcaataatgatattttcaactcttacgagattcccctgcatgtgaaagggctatcaggaatccctaaaaatacaaaaggataacttcgaaacaagtctcattgtgactgtacaactaccattacagaacatggtataaaagcctattctagaatgtttcccttaactacgaaataatttgtacagcattaatacttagagcctacatgtcacacagaaggataaattttctcaagcattattgtaattcattttgcaagataaattaaccaaagattttactccatagaaatcacagtcaaactcaagctataaggaaaacctttgcaccaaggtcatttgaattggattattttctgaaggtatcataggcgtgaatagaatatttttctaccacgagaaaggcatgattatttcttatttccattttatccctgatgcataatgttaagccatgcttaatgggagattatagatcatttcagtttctctttctttaagattttctatatagaaacagtacattcttttcttgtcaggctgtaagtgtacattatataagaaaattacattcttaccagctccagttagtaagaaattccaagctacattcttgtaaaaacacgacaaatgaattcaaataaccaagaaacacacctttaacaaaggaaaaaggggaatttgaattgtcgtgggataacaaccaggattagcaactagacgtgcatcttttatcgcctctcgtgaaatctcagtgagaccatacacagcttctttctggatccagtaagataaataatttttagtaaaaaaattgaatgcatttaaaacataacctttttaatgcctgttgtgctagattctcttcataattcatggttaacttcagagcccttacagaaactatgaatgacaggtataaaacaaactacctggcatattctagacagaagaaaataattacctcacctgcaaatctggtgctctgtgtggctgaccataccattcttcatactcagatatatcccgaagtcggaagtcctacagaatcaataaatacaaatttccacaagcaatgacttcaaactttcaaatatgttacataatgaaaataacagaagaaaaagaactagaaacagcacagggtcgtcaagcgaacatacagcagaaagatccacaatctttaaatgtttcggcagtccttttataatatcctgaaaattaaaatatagaaggcaaatattcagtaagtaaactcatttcctacttgtaagcttaaaaaagcactgcttcctatctacaagaaagggaaggaaaaaattaaaaggtaaacttgtcaatcaaagaaattaacaagaaaagaaaaggtaaatagggaacaaaaccgtgtgtggttccatgtggcgagacagcagaaaacaagcatcaaacccggaaaaactacagcatccttgacagc

SEQ ID NO: 320354 - DNA, 985 bp, Cannabis indica
tagtcaattttccctctaaaaagagatgaaattactactctatcctttgttataataccacatcatcaatacaaacagtatttttaaacaaaataaacagaaggactaaatgtatgcatataaaattatacaaggactatttgtaacaagctgaatagattaaggggcataatagtatagtgtcataagtgaagggggtaaaaaagataattattcaattaataatatgaaaaactgataattaattataaagggctaaatcggtatatatagtgttgaacaacttaaatatcaaatagcaatcctatatggaaaatggtcagaggccacagtagtagctaagatcagatgaaggttttttaggaggctggtaatgataaaagtgaaggaattgagcaaggtcaaagggtttgaacaacaaaggatggtcttcatccacaagctcttctggggctttgactatgtaacctgcttttggcatcgaaaacaatgccaccgaatacctttcctcctttcctctcatcattactctatgatttggggcatgtactccaccattagcccaagcctgcatgcatatagaaactaattaatgatatcattaatatatcacttaattaattaattaattaattaattagtagtctactcacgtggagggattctccaatcataacgatgaaagagtctgaagaggagggtttgatggaaacccattcttcatttttagtttgaacctctaacccttcaatttggttctgatacaaaatggtaaccatgtttttatctttgtgggctttcaagcccagctgccgcttgctggtttcatcatgatcagctgggcctaatgggcccttatatttcatcaatcgaaggaggtagtacgttgagtccatgtgttcttccaagtatttatcaactcccaaactctctaaaatcatccttcttatcattccatccaactcagataattgttcagaataag

SEQ ID NO: 320355 - DNA, 795 bp, Cannabis indica
ctcgcaggtgacctacgttccccagggtcttcctcatttctatgaggaatttcttgttcatttatgtgctagaataaagagagattttgtaggaaagtggaagtgactttttttatatgataatcaaagggagtaggaaagaagccctaattctttggaaaagcccaattctctttgtcttcaagatttcattactcaatccattgttttgttcttccatatacctccccgccaatatgtagagacaaataggaataaccaaaccacgtctacaatatgccaataccatgcagctacttcaaagccaacgagatgctccttggtgagatgaccaagattttggcaaatacaacatatgatcaagaaaagagtaccgataatcatatgaaaaccatgaaagcaagttgctaagaaaaaggtggaaccctaaatactacctgaaatagtgaagagtgcttgataatattccattccttgaaagcaagtgaatactagagccagtataacggtagctactaaagcgtaaactgctcgtttttccttccatgcgagtatagcatgatgagcccaagttacgacaactccagatgaaaggcaaattagggtattaagaaaagggatttcctaaggttctaataccccaatcccttttgggtgccaaatgttgggattttatgccctaaataaaacccatttcaatgtaatctgatttgttatcaatagaagattagaagtcatttatgtttacatgtatttttcatgttttatggtctaatgtgtacaatttctgtcaag

SEQ ID NO: 320356 - DNA, 980 bp, Cannabis indica
ttttatttagcatgacacattgatggaatgttgggttaaaaaaaaatctgaaaaattatattgggcctttttaaattttaagccctgtgcattagcactgtttgcacaggttaatggccggccatgtctacaccattaagataatccaagtaacattcttgtttctcagctcctcactagacaagacaattaaatgtattagagtagttcaatacaattagctatctctgtcaagaataagttggaattcttagatggtaatattcctaaacccctgccttctgatttgattatgtacaatacatggtttagaaacaacaatttagtaattttttagatcttgaattctgtttcaaaagaaatttctactagtattttgcgtgatgagtctgcagccgctatttggtttgatctcaaagtttattttgatcaaagaaatggacctcacatatacaatttgaggaaaactctaataaatttgaatcaagataatcaaattgttagaatgtattacacgaagttaaaaatggtatgggagcaactcttatatagacatgcatgtgtttgcaatagttgcacttgtggtggtgtcaaaaaacttcaagaaaaccatcacatggaacacatcatgtcgttcctcatagggctcttcgattctttctcaaaagtcagaggtagcatcttgttcatggattctctacacgaagctaacatattttttcgcttggttacacaagaatcaaaacgacaacttgaaccctacatcggatccgaatcctggaatggcctttgccttctaaggagataatcccaccaacaagaaagcatttgaattaattgttagagtttagggattaaaattctggtttagttaattgattgaaatttcacgagggggtagcgtcagtttgattgtttggtggcttagggttaggttatttttagtattaattttagattaagtttagtatatttttaat

SEQ ID NO: 320357 - DNA, 1239 bp, Cannabis indica
cctccacgcaaaatgtaaaattttccttctgctagtaaaatacccttaatttaaatcatctttaattgtaaaatctcgcataatatctacacaagaatcatcacattttttttctgaaagatgtgagattatacaacttatattaccttatcattttataaaaaatattgtattttttgtgtgatcttttttttaagtcattattagtttgtttgtttctttcttcttttttaccattatgtagttgagtttgtagtttcaaaacctatttcttaacagcgacgatgactgaaaaatagtaaagaaaaacaaaagcctacttaaagtacgtagcattaatattcttagaaataatataaaaaaaaattatgattatatataaataagggataatttcacaaatacacaaaaataacaaaaaatttacaaaaatacagttttatggaatttcaaatatttttacggtttttttgattttatttacagaaaatgcggtcttttatgtttttatcttgttaatttgttattgattttttgttatatgtatgttatttttgttattattttgatattatttaaatgttatttttatagtacttttatgtagttttcatattatttctatgtaaaatcgtaaaaatgtaagaaaaattttttaaacgtaaaaatataatttttttataaaaaatggtaccttgttaattattcatataaataatatatactaaggtgcataaataggattgatttaatcatgtcgtatttcttggcatttatttaattataactacatccacaaaataatacgaactacaagtgccattttggttggatataattggacatttactctgtgagcccaaaatcatataattctgtcaaattaaggatctcagtttttatacattaggcctgctacactaggccttaaaagaaaacaaggcccaaaaaaatttgagactttggattttttttttttttggattatttcacaaatacacaaaaataacaaaaaaaattacaaaaatacagttttacagaattttaaatatttttacgatttttttattttatttacagaaaatacggtgtttttatgttgtactcttgttaattttttgttatttgtatgttattttgatattattttcatgtaacttttatgttacttttaaatagtcgtcggagttgccgttgacgccaaaaaagtcgtcggaattaatattgtcgccaaaaaaa

SEQ ID NO: 320358 - DNA, 2190 bp, Cannabis indica
attcttacataggttatcatagtgtcataattagccatgtcaatgtgaaaatggcgtaaatttaaacctatttatatcgtgcaaatttcggattgtattatatttttgtttgattcaaaatgtttaaaattatatattatataaatataaaattaagaaatttctaattttttttttcttctaaagtacaaataatgtaatttaattagttaacaataactcagttaggttttttttttttttttttttttaactaatataataactcagaagttgatcacttcccaaaccaaaaaattcatatatctatgtactaaaacaagccaactcaattagactacacattaattaattatacatttattatcactaattccaatttgcaattaattaaacaaattcgattcaaaaagtaatagagaaacattataattatataactatatttgttcaaaccaacaatttcatctcaaatgcatgcattttctgccttatattccatctttatctcgataaatgagagataaaaaataaaaaataatacataactaaaatagaggatagtactcaaaatattaatatattttatatatatatatatatatttaaaatgtagggtgagatgtgttcataataataataactaaaattgggagcacatgaaaataaataaataaataaataaaaaagggcaataagtgttgaccatattaatttgttgttgatgatgaactcaattcttatttggtccaaacaccaaacaataataagatttattcatgtgatgtcacatgtgttctcccatgtttcacatctctatctttccccacttgcccatattgcaatttgactcttatttctttattccttaaaaacccatttcagttattacagttatggggttagttgcatttattatattatagaaaaagaaagaagaaagaagaaatcatgtatgattattattaattagttagtagtaatagtagtagtagtaggagtatattgattcactataaataaatattgagagaaaaaaaaatattaatttggttgatgtgattagggcaaatatgttattgattattctgttttgttaaatgaaaattttgtattttttgtaaaataaatcaacaaattgatactctataatttttcaacaaagtagtattaatactctaagcttaatttttcaatggtggtttcagatctaggtcaaacaatgattctaaagttaatcgtactgaaatttctgtttgatcgaaattgaatgcaatacattttgcaaaatatgagatttgaatttgtcattttatcaaagggttaatattattttgaactttgtattttaaaagttattgattggaccatttattttgttaaatgataaaaaagaccccgtattttctaaaatagtacaaataaaattggatattaagctcaatttttaaccttttttttttatatatatataaccatcttgataattaatttttaccacgaacatattttgaaaacataactaattttctcataatacctctatattgaattattattaagtttcatttttgcaaaaaatcaattaagagtactgtatagtattatattttgaaaaatacaagacccaatttattatttttacaaaccgatagtccgatcagtagcttttacaaaacacagaatacaaaaatagtatttattaattctttaatatatgtataaatatataattaataaattgagttagggagctcaaacacgatctgttatatgtttatgaccaggtgttcatgaacatatcataaggttgaattttgatttggtttgaccttggaatgcaattgcatatggttttgaaccctttttttaatagttagttttatctaattaatattccctcctttcatatcccatgttatgttatgcattttttcttttggttttaatttcatttatttattgcttattaattgactactttcttagctttcaaaaaaaaggttcaaattaatgcaaatatttatatatggatcttcatctacataatttgtttactttgttaaatttcaaagtttctaaaaagtgaaatttatatatgtgagtaataatatatatatatatatatatactaggtgattgttacgtgccaagccacgtagtgttagttttatttaatattttagtttt

SEQ ID NO: 320359 - DNA, 712 bp, Cannabis indica
aaaagctaaaatcaaaaactcaacgaaatgttctaattaaaatataggctgaaaaatttataattatttttaagaggacccaaccaatcaaatgtgaaacctttaaatatttttatatatttatatatatatagaaatacttcagttaaaaaaaaattgcatgaatatatatgtaaaagtactctagttaaaaaaaaaagattgcatatatatatactatgcagtctgcaccaaaaaaattcgtcattggcaattatacccatgtctttttgtgtattttgttttcttagacaaaatcttttgtactattaactagtttatctttagactggtatctttcacgtacgcatcaaatattctaatttcatattgtgtatatttcaagataaaatctgctctattaatatatatgttgaagtatctacctattatattaatatttcttatcgccaattacatgaatttacaaatatatatggttttgtgttctattaaggtttaatagaattttttgatattttttttacattaattttaacaaaatatttaaattacttattaacagattattttttattaattttataacattattatatatatttaaaaataataaattatgtaaatattttatataaaacaaatttaatttaattatgtatatttaaaaataaaaattatatttacatataatcatatctttatatattaa

SEQ ID NO: 320360 - DNA, 2097 bp, Cannabis indica
tttattgtatagtatatcattttgttttagatcatgcatgtttatttttaattttattattgttgccccggtttttttccaaaatacgtagtcacggctatgtatgacacgtagaccaagaggacacctcacccgagaattagttaagaatcgtatagaaaagaataagtgtggttcagggagtaagctcctggaccagtgcaaaaagaacgccctcttctccgggagttgaagatatagtaaggcatcttcgggacgagaagagcctattcgaacagtcacctcacatttatgcaacatggagaaagcgtctgggaatgcccttaagaggacatgtcagccatcgtaagctttatttaggatgattacacgataatcgaaggggctagtgacgactccaatatgaagaatcacatcaattaaggaaggatgaaggttaatctcacctaatctctatggcacctaccgtgtaggtaatacatgccctattttgtatcttttgggaacttgtgcttatccatagctagcactcaaagacaagttacccctttttaactattcccatcaatctctataaataccactgagaaaaatgggaaggggatcgaagaaaggagaaagaaaaacacacaaagaatattctctgtaaaagaaatactctcattaataacagagactcgtggactacgacttattaatgcccgaaccacgtaaaaatcacctgcattaattatcccaaggctctcatcattatctcatttaattgattgccaaaaaccttggtcaatattttggtgctttcattgagagctgtggaaagcgttgtttaaaaaatgacagtaaaaaattgaagctgcaatggtggaaactcgaaacaacacgcgccaatctcgccccccccaggatccttagaacccagaaggtgaagaggctgcttcacgagtgaatgtgggctctgagaaacgagaagagacaaacgacgaggaatacgaagaaaaccttgaagggtacgatgcttacgacgaaggtagctacactgagttgctgatcctaaggcaaaaagtagctaatcacgaggccaaactggccgcccaaaaagaacagaataggaggatgcaagaaatagtggttgccatccaaaaggccatggaaacagctagaatacatgtgcatcccaaagccgtgcccgcgggactagaggaaacacaagaggagtcctcgccaagcacttaaaggcccaaaacacgggacccaagccctatacgatatccttctgaaggagaccctaagaaaaataatactttaatccccgggagaaacaagaaggctcaagatccgcaaaaggtccgctctgatttcccaaaatggaaaggtccatagaggggcaagctccctcgatagagtcttggccctcaggatcgagaggaacgaaagagcgtatctctgcaccaagaactcggggaaagagggaggaagggtcgaaggcatccctcagttgatcttaggcaaaaaatcaacgagaaacatgatgacttgagaaaccaccccgagaagaaaaagcactcattaccagtatcggggggtgccttgaacgaaggaatcttagtcgagttaccaatcctccgtaacgacatcactagagtctcccagagataaaaagggatgaatcagactctgattacgaggatcaggaaccttgcgcccaaaatatcttagaagcggaactccccaaaaatttcaaaatgctcgaaatggcaacctacacaggagactcggaccccagtgaccatctgtcccgatttaacaggctgatgaccgcatgagggttagtaatgacgcaaagtgtctatgctttccactaacactgagcaggtctaatggttcaagaaactaaagctaggatcagtggactgttggaacaagttacaagtaagtttcggtggcagtttgttgcggcaaggaagatcaacctcgaggtcggcgccctaaccaacataaaaaaattgcacgtagaaaccctaaagaactttgtaaagagattcaaggaggaggcctcgaaaaccaagaaggtggacgatgtgttggaaattattttac

SEQ ID NO: 320361 - DNA, 559 bp, Cannabis indica
atttataattagtcacactttttttactttcagtcacaagttttgttgtgactaaaagtaagattttttgtactagcagtctttgcgtgcgctggaaaaattctatctttactggtgcaattactcgttggaaatagtcaaatacccatctatcagaagacattttttggcgctttaatgcgccggtaaaggttagacttttattaatttattaatgtgccgacaaaagattttacaaccacacttaccgtagatatcttttaccagcatgtccacttttactagcgacttaatgcgctggtaatagtcatttttgttggtacttttaattttatgttggcaaaagttccagtactgatgtcgatttgtcgacccttttcgtcgggcattttactattttgcgttgcaatatatctaacttttgctaacgcaaaaatatgctgataaaagtctcgttttttgtagttgtagttgtgatttgtgggggagactatgaacactacaaaaaatcttacttttagtcataataaaatttgtgactaaagataaaaaagttatg

SEQ ID NO: 320362 - DNA, 1822 bp, Cannabis indica
ggtgggttatcagaaagtagatgcctctttgtcgttcctaattgtatttcttactttcattctttcgtagaaaagaagatcaagtcccaccactcccttcattcacctcttacaattccttataggattcattcacttaaacttgaggaattcccgtcttattatcaacttgaatcttggtcatttcttcttatcttaacttgtatcgatttctcttgaactgtcagaactgttgacctcgcttttagccaacaacagtgagtgtaattttgtaagcgataaatagtttaatatgattgaactataataaaacaaataaagacaaaacaattttacagaggttcagccccaagcagttcctaatcctcgttatttgtattgacttaagaacaaggagaatagttcctttttttagagctcttacaacaatatctctgaatatgaattcttacacaaaatctttgaccctttgcccagtgaacatgagtcactatttatagggctatgagcttggaagggaagtatttcctttctgattacaatcgatataagtagaaagattgcataataaatacataatacatcaattgtgggatttggacagcttgccgtatatctgtaatttgatcccaaagttagggggatttctctgatgactcacaatgcaaaagtagaattcgctaagagttgtcattatgaacggattactcactgcttagtttgagaaagtgtgataggtgccctgttcggcctatgttttgtgagcaggtactcatagtcgattccacatgtcgctatcgtgtgctgtcacgccagggtacaaaaattgggataacatttgcctccaaatcgaggagcagggcgatgtttgtcctggcagtcctttccgaggcagaagaagaggaggaggttgtactttctaaaactttgggggatacaatgaggcttgggagccactcgatgcggatagcggcgtccttgtcaagggtgtagattacttcacggaggaacttactgtcgcagttcctcaaaggaggcagagtgctttgggtgctagatgggtgagccctccgtctaaaatcactgtggcacacttatgggatcttgacaagggtggctatctaggcaacctggactgctacattcctgcctcaaacaaccgagccacaaaccctgagagggggatgtgcgcctggtcgggtgtgttggaattattttactagcatcttagatttactaacaagtatgttgtttaacatcctaaatatgaacttctaaaatgataataaattaaacacatataaagtctcggaaaaccttacattgggtgcagcggaataatatgtctccttccactcagatctgtaacacttgtatcctttctgtagcagagtatcaccaagatctgagtttgaatgtccttctcttcagtttggattcttcacgatctgcagactatgattgagatactacttgatgtgtgtgggcaatactctatcactcaaggtttttgaaaattagaagaagaaaagagagagagagggtcggctatagaaggatagtgagttgctcaatttttctgattttcaatctcatgttaagtgtgagccatcactatctatttataggtaaccactaggttcaggttagtaattacttggcattaaaataaagaaaataataattgaaaaaagcctcacaaagtggctggtcatagtgttaacgggcgccacttggtattttgcaattttgacaaatttcatatctattttctcaaaaatgccaatgttccaattctaaccatttaaatgccaaaactaat

SEQ ID NO: 320363 - DNA, 584 bp, Cannabis indica
tactacaataaatattgaataattcgtcgtgattagaaaggaggatgtctaggtttacacgtatagaagatatatttatatatgtttgtatgtatatgtatagatgcgtatgtttatatagatacatatgagagagatcatcatgatcttttcgctcgtttataattatgtttaatttcaaccgatcgatctatacataataaaacaatatataattaacattaataatttatatataataacataaccgctgtcaattatgataatgacattcacatgcattgttatatcttgccttcttatttatgtagttactgtctactgattagacaacataaatagagccaaaaaaaaatgttaggacaatacatagtagttaattaattaatttacattaaattataattgatgagaatgaaacatattacaaacaaaattaattggaacatattaacaggaaaaggaagataactccttaatttatgtttaatttgtacattgtcgtaaggaaaggcgcgtgtactgtatggaacacaaacagaagtatattctacatattggagttaattaatatatatatatat

SEQ ID NO: 320364 - DNA, 652 bp, Cannabis indica
  modified_base (129)..(129): a, c, t, g, unknown or other
taaacaacaaaataaaatattgtttccgattattttatattttaacccgattgatttcttccattgattattctgattccaattacagtttagtaaacatgccagatagtatagttatttttttttttntttttttttttgttttcaaaacgaaagatacatagtatattaatttaaccctagctagaaagctagtttcaaaaacgaaaaataagatgctccttcgtctgtggatacagctaggaccaccaaccttggtggaaatgatataagttagaacttagaccacttaataattaaagcaatataaatatatatagatagtactcattcctgcctatatatggcaaattctgtgtagtattattcaacaaatataggccctccagcaaggcctctatattgatgctaaacaaatacttgtacaaatcaaagaaatatataaaacgtagagattatttcacaacaacataaaaataacaaaacaagaactataaaaatacagttttactgaattttaaatattcttacgatttttttgattttatttacagaaatacggtctttttatatcgtaagcttgttaatttgctgttaattttttgttatctgtatgttattttgtatgcacggaattttaaatatttttacg

SEQ ID NO: 320365 - DNA, 590 bp, Cannabis indica
ttaatagttagggtttgctaatccattctcttaatcttagggtattacatccattatcgattaagaccatggaaactcgcttgttggcaattttcgtgttaattaccaataggtcattgtgttcaaagtgcacattcttattgtcttcatccgtgaaggtaatcgagagattcatcatccttgggcgttgcgcaggagactgtaccagtgcacacatttctccttcctccacttcgtttagatatctattatgtacgttgcgtgtacttctcgcaaggtaaggtttgcccaaaattgttgcaacatgttcgtgtacgggtggcggagacaatctagggggatatgaagttattggtcctagagcaagtaaagccaccctaggcagagctggtggagcaggaagagcgggttgagattttccaggagcttcaggggggcgtaaccccttattagggatttacaacacctatctatccgagaataatcatgtgcccctagactaccccttgtccatgataaataatcgagatgcataccaactgtcccagatgccctgcccggaacaacatttcaatctcatctttcaaata

SEQ ID NO: 320366 - DNA, 559 bp, Cannabis indica
ctcatctttcaaatactcacattaatttgtgttgtggcctttttctccgtgataatcacattgtttgctttaggcccgctggttcctcccaccatttgatttgcgcacgggcttccaataatggaccatgttacacgtcgctttataaagattatcctcacataaaacttgtgtattcagtgtactttggatcacactcctttctcggtttcttcactaaatcattacgactgttactcttaccttccctcttaccccgtgaatgccaaaactagagtctgagccttcaattttagattgtcttggagccacatggcacccattctgtgcctccccgttccttgagaaatgggtttgcgtagggatgagactagaggcaggaggtccgtaaactatcgaagaaaactacagtctgggaagggatagagatggggtagcattttgcaatgaaaatctaggagcacctattgtttgtgtcagaatagggggacgccgaaagctttgatagaagcatcatttgtcgggttttgtgccccaaataaaacacatttcaatataa

SEQ ID NO: 320367 - DNA, 2159 bp, Cannabis indica
tcacatggagagtatcttgaagtgacaggggcaaaattagtacaatgttttaaaaaaaaaagaggtaaaaatgatagactttaaaaaagagagtaaaaataaaagagaaaaatatgaaaagggtatagagtataatttcctcataaactattaatttgtatttttcatgtaataattccttttttttaaaaaaaaaaggtttttgtttttaaaattaaaaaagtaaaaatattttctaaagttatgctatataccgtattttttaattaagaatacaaaattttgaaaattttaaaacaaaaaaataatcactttcaaatttattttaaatagctttatttttttttaattaatattttagactataaactcaactaagatattagaatccagatcctagccccgatccccaaattcggccttgatttcagcttcggatctagacccgacttaaataaaaatcaaacaaacaaaaattaaaataaaatttaacagaacattacttttattttttgtttttaaaaattgaaaaataaaaagtagttatagtaacacttttttatttttctaaaaacaaacttttcaaaacaaaatatttttctttaatttttgtgattaaaatttttttaaaaaaaaagtattaccaaatgccacttaaattacgatggatatcgcctttcgtacattaaaagtacttttttttttcttttctcttttcaatttttcacaattaattcttcaattttttaaaaaatttataatgcacctttttttttgatgcagttttggcatttacaacaatttttcaatctaacttttttttataatcttttaagttgtagaaatttaaaataacctataaaaaaattttgaaatttaggaaaatttaacacatcagaaatagatttcaaacaatttattgcatatatctcttttattttatacacgtatgaaatagactatttgaacttatattgtaaattattttgaatttctcaaaattttataggatgtcttaaatagctttaactttcttaaataactttaatgtacacgactataaaaagaatagactaaaaaattcttctaaataggcgtgcattgtaaaaatactaatttatatattttaacaattaaatattttgaaaaaacaaataaatgataaatcaattttaaaaaaatttacaatgtgagtccatagatgtatccctatttgtttcggtatttgcgaaaaaaattagtcccatttttttattgttgtctgttttataattacttaggacatcctgtaaaatttagaaaaattttaaaaaaatttaacatgtcgaaaatatagttcaaattaggggtgttcatcaaaccgcctgcaccacacaaaaaatgtagtttgaaaatttttacggtgcggtcgcgttttgaattttttctaaacctaaactacgtggtgtggtgggatttgcggttttgaattgttaatatgtgacgcattgcaacgtacattataaaaatacaaatttttatatttatttaggtccaatatgtgaatgtccaatctaaagcccactaattattgttttgttgaaacttaattttttttttcatatttattttcaagctttatggtatttttgacaattgttgctcaagttttgttgtatttgtgatagtttaattattggtgatagtccaaactgtaaaaatcgcaccgtaccattttttgcggcgcggtttctgtaattttttagttttgtgttgtaggtgcagtttggaaaattaaaaaaactgcatgtgcgtattggtttgaaaaaatgttcaaaaactgtaccacccgcaccgcaaacaccgttagttcaaacaatttatttcacacgcatatataataaaagaattctgcatacaatagactatttaaactctatttttgacgtgttaaatttttttaaatctctcaaaaaatttcaaaatatcttcaatcgttgcaacataaacaaaaataaaaattgaaactaaaaaattctttaaaatatcaaaacatataaaaatatgtatctgttataaatattattaattatgtggatgttcaaatcttttatttattaccattaattgtaatcaacattcatcttttccttagtttccctttttcttagtttcttaat

SEQ ID NO: 320368 - DNA, 688 bp, Cannabis indica
gaaggacatcaacaagagggacatgtccaagttcttctgatttcacaatgaattcggccatgacacaaacgagtgtttacatttaaaaagggagattaaattctggataagaaaaaacaacttgaaggcagtatcatccatctaccatcgatgcctaatgttcccaacaaggcatggagtgggatgtttaaggggagagcaccagtctgcccgacactactataacctggctttatctaaagccaagaggagaagatgcccgccaagagctctgaccaagagcacggtaaaaggcaatgaagtctagcccaaagtgaggacataaacatagatccttgctttggggatcttgcagaaagctttggacttgtgaaagaattggaagaggtggagatttaccccactcttccaaccaaaaaattaaagatttgaaagggtttagtgccagaaataaaattagttttgataaaatttctaagggcaaacattgacctctttgcttagtcacatgaaaacatggtgggaatacacccatatgtaatgacccatgcactaaatatagatccaaccttttgacctatacaacagaataggaggttactggataaggagcaggcacaagctttaaaggatgaagtcaatgttgggttttgtgccctaaataaaacccatttctatataatcagat

SEQ ID NO: 320369 - DNA, 711 bp, Cannabis indica
tcacgttagtaaaattgaacgaaattggacaaaatttcttaaattcagcaatcacaataatgtaagagcacaatttactacatatcaaaattccgaaagtaaaaatcttatttaattaagtattatatagtgtaacacaccaaataactatgaatgcacccatatgtagaatacatcttaaaattttccaaaataatatacactttttaacttatttatcgcatgcctaaccaatctcaattatattatactccccaagtgcacatgtgtaatgtgttactatttttttaatgaattatttgtgttttataaatgagaacataatacacatttataattatagtgtatatataggtatatgttaatataattggaagaaatattatatattattttatttatgaatacaatatgatctagtgcagttttttttaacaatatttagtgaagaattactaaaatatatgtgtgatagtttgttcgttatttaatatttttattttgattcatatatataattaatattcatgatgctacttttcatgaagagtaatttttatagtatttgacccttcaattcatttcttttttgtcaattattaaataatgaaaagaagtaagattgctttttatatagcctatcatttatatatatttttatctcatggttaaaatctttaataatgaaaaaaataattattaaattatatt

SEQ ID NO: 320370 - DNA, 772 bp, Cannabis indica
aaaaaaaaaaaacaaaaaaagtataacccaagtatagtattatagtgtcatacctctcaaatctcccaacaaattaaaaagtaaataaagatgaaactaagaatcgagaagaaaatatcttcacacttataattcacaatgattaccagttcactaccgccattagattttcatgattaaagcatatgatatatactttttattatggattttgattatcaatgacatatatataaatatatatgggtaattactcaattgttatatttttattgtaaccatgatagttatataccatgatggttatatttttgttgacctataataataggttaccaacatgtaaaaatttattttttagaattaaattagctatgattaactatttttttaaaaaaattaattttaatttatttaataagaccctttttagtaattaatattaataattttatttttatattaaagtctctattatattttttttaacagctaagccactcaattattatatttacaataaaattctatcattttaaaatttctaccccttctaaaataaatttttgaataattaatcacgaagtgtgagaatagtgcaaaatactagaatatgagaattcatagtttatacatcatatctaaatccttattttatctgtatatcttcaacttacatgttttagagacaacttgaaaatgaccaacaacttcacatatgtatattgtaatgaccgcattttataatatggattagtaagggcaattaaca

SEQ ID NO: 320371 - DNA, 2428 bp, Cannabis indica
tagatagagcttttcctactatggatagtgaacttcaagagcttggtgatgacgagctggagaggctctcatttgttggccttcaggagttagccttggtaagttacacatttagctttgctcatttctttttgtgttgttgtaggttggcttgccatagaggttgttgtatgaagctggcaggccattactgtgtatttgaaagactggccaaccttgacagcaccgtagatgggctggcctgccaacattgtcttctggcactaatcttgaccttattttgtctttaggcctttatgaagcttaccttttcacatggaaactccaaggggtcctcgagtgctctccgagagtaggtgaagaccttggaggctgagctcctgaagaggggcaacgctgtgacaaacttggaggcccttgtccaacaaaattgggacatggtttctggtttagagctcattctcaacaataggaatcaagagaatacctcattcactgctaacaactccaggttagggactgagctcaagaggtgtgaagataagctaaaggctgccctcgatggccaacatgccataaaggacaagtatgtcaacttgtcttcaaagctcatctacagttcaagatttacaacccaaaagctgatctttcttacatgggggacgcttctttccttgagatcaccttggctcaagggaaggaactgtatgagagtaggttggaagcaaaccagaccaccgttcagccagaaggatcatccttagggaaattcgacgaggagatggatatcccaccaattgaggagctcgctagccaagactttgaccaggtgattggccaacttacaaaggctatggtcggcccacactttgacgattcagattctacagcttctgattcaaccccacctgcacctacacacatgtagtttaagtttattagtattttagcttgatgatttgattagcatagaaattttatttcatgctctgtatggcctattggccttttacttttgaacactacttatttcagcctttggctttcatgtttgtacttttagcctataggcactttgttttttagcattactactgtttagccctaaagctttttattatggatgtgtgactgactaggcgatctttaatcctaaatatctccttatttccttgacatacaagtatcaggatttactttttttatgccaagctgaaatatgcatgcacctgaattagaggcagatttagtagcttatactaaacgttaaagtttctctacataaggtatgtgcgctagttcgatgcattgtacaaggtgggttccccccaagtgagcacgcagacttatggtctcttggtcatttgcaattcaccaagtttcataaaccttgcttgggaattttcttggggtgctacttgttgtaagcatgtggaactaaaaaagaataactttaagaagttaatcttgttagcaaatggtttagagacaacatatttaaacataaacattgttttttattgatcaattggtcattgttcctgtgcaactttcataaattgaacctactaggttacataaaagtctgcttctagatatcaaatggctacctctacttgacctgcaaaggagatgccatcattttttaacaataggaggccacgcctataggccgtgggtactagctcttttatactctaatgatgagttactagaactactactgctgagtagcattctataagctagtcactggtagtacatgtgaatgtactcttcatttcgatatctttgtaggagaactagctccatgttctcgttgtaccttcccagcttgtaggttcccttactagttattttgtaacttgataggggccttcccagttgggtccaaacacttctgctgttggatctttggtgttagggaatactcttcggagcaccaggtctcatatgaaaaatttcctatccatgacttgtttgttgaagtgacttgcgaccttttgctgatacgcttacaactttaggttggcttgatctcttctttcttttatttcttcaagggattctaccagtaggatgttgtttgtatcctggtcttaagtttgtcctcctataagatggcgacaccagctctacaggcaatattacctcgtagccataagctaaagcgaatgcagtttgcccagtggttgtcttctcggtagtcctgtgcgaccataaaacctctgggagaaattcaggcctattttctttttcctctacaaggttcttttcaaggtttccttaagggttttgttgatagcttctacctacccatttgcttgatgatgccatgtgtattgcagaaatcagtgaacatgtcactgtcaaacttctttccattgtctaacacaatcttttgtggaagtccgaatcgacatatgat

SEQ ID NO: 320372 - DNA, 1350 bp, Cannabis indica
gtacacaatcatgaaaataaaatgtactaaaaatagagaaggaaaaaaattaaacttgaactccttttgctatatttttgtatggcaaatctttcaaatctcacaccttcctcaacagtctcacaactcaaaactcaaagatgagtgtcggctcataataaacgtaataggaatttctatttatcagatatcatctacacatgagatttgataaatctagtaccctacgtttttattaaggaaaagctatatgagtgatctagtttttgggaataatgtatcgtatatattttttctgatctctcttaatatgtatgtgagtatttattaattgataaaactcttttaagtaacaaatgatcaaactttaattcaaaaaaaaaaaaacgcaatattaattgattaataaataactaaatataattagttttaacccattaaaaattatcagttagctgactcatttcctttaatcatctaaatgaatatttcaattttaaattttattttattaaaataatttattatttaacttgatcatgatcacatatgacccttccatttagtttattattttaattagttttattttgttaaaataatttattatttcaattagttttatttcccttaatttaaggcttctttgacgacatatgacccttctaggaagggcaaagtacttccgttatcgcctttttgtgtttaggaatactcgtcgtagcaccatatatacaggtttgaattttttacatctaaccttaaagttatagtactgtgcgaccctttgttgatacgcaacctcacagagcttagatttcttctatttttttcagggactcagccaataactggtggttggcgtgttgattgtaagtgagtctctaatgggatggtgttgtgagcttgacgggtatcactacttcatacccataagtcaaagcaaaaggtgtatgagcagttgtttttatggtgcggtaagaccataacaccttgggtaattcttcaggccaatctcattttttttagcatatatttaagagtttaattgacattgacagtctcgacttgcccattggcttatggaggagcgattgctgaaaaactcttaacgagttcgtgcctttcaagtcggtaaaaaggtcattgtgaaactacgttccattgtctgacactatcttttgtggaagcccatagtgacaaataatgctcttgatcacatagtcaaaccttattatatgtaatagtggccaaaggctttgctttggcccacttagtgaagtaatcaactaccactactacaaaaaccccctttagaggcggtttttaagccctttcagcgtcggtttt

SEQ ID NO: 320373 - DNA, 679 bp, Cannabis indica
atggtggacatgatttgaaaatctcgtaatgacatggttcataataattcgaattgtaacattaagcattgcataggttctatttctttgtgttacacagattataattcttgaattttttttttcaccggtgacggttgagcctcctttgtgttgatcgagagtgactcagagacgattattaacgtggtaaaggaaacttttttcgtttgaggtattagtaattatgttcttcaatgcaaataactttctaatttgtttatgagttgtaatctaatggtgcaactagtatggtggatcgttctactataccgtaacattttatgtagtgacccggaactctaatttttatttggttaatatacctacactagatatagtattaatatttgtttaaaagtatatatgagatcacatgagttttttgcactattttttgatagttttgatgccttttacgacttttgtacctcttttggcttttgtgccattttatggcttgtccctatttgtttagggtaatttcgtggtttggtcaatgggcaagagaagtgattctgctcatgatttctatttcaacgacttgttcttttttgacagataagtatttcaagtttaagtccttatattaaatatagttttttactattgttatttcacattatcttttcattatatt

SEQ ID NO: 320374 - DNA, 1580 bp, Cannabis indica
ccttgaataattttgaacctcttagtgatagagtagtgcccacacacagaaagtgataccttaatcatagtgaggaagatggagaagaaagacatttaacaagaaggagattcaacactaaaggaaggagagaaagagatccaggttcagagcttgataatactctgcgacagaaaggatacaagggttagagatatgaacataaggagacatttactccgctgcaccgatcgtaaggtttctcatactttatatgtgtttattttataatcgttttagaagttcatatttagggtgttaatcaacatacttgtgagtagatctaagatcctggtaaaataatttccaacagggtgacccatatctgttaggtaggcgagggatcgatgatcattttgaaagtaatgattgtgatgatcatcctacagaattgcttgatgatactcaagaagagtttattcatgatcctgaaaaatgtgatagcatggttaaagatacagataagttgttatttagtggctgtgaataatgtcgactatcaactatggtgaaattttataacataaaggggaagaatggagtaagcgataagtattttagtcaatttctatttgcttttaaagagatcctgccgatggaaaattgtcttccagagttgacgtatgaggtgaagaaaactttaagtttgatagggttgaagtatgtgaagattcatgcaagtccaaatgattgccttttgtatcgtaaagagtatgcccaaatggacacttgtccggaatgtggtttgccacagtacaagccaaacaagagtgatctggaaacttatttcagagaaagtcttgtggtacttgcctttgattctacaactcaagcggttttatcaaagtgcagaaacttcagaacacttaatatggcacgagaaaaggtgagtgaaagatggtaaactttcacatcctgctgattcacaggcttggaaaaaagtaaattatttgaatttagacttcgcagctgaaccaagacatctacggcttggtctatcagccgatggagtaaatccacatagatctcttagcagccgacatagttcatggcctgtgtttcttgttatgtacaaccttcctccttggttggtgatgaaaaggaaatttacgatgttatcgctaatgatttcagggcctaaacagccgggacatgatatcgatgtttatttggcaccattagttgatgacttgaaagagttgtacgaagatggtgttgatgcatacgatggttttaagaaagaagtttttaagttgaaggctgtgctgttgtggactgttagtgatttccctgcgtatagtaatctatcagggttgagcacaaaaggctatgaaggttgtcctatttgttgtaccaatacacgagctcgtcggttgtcaaatggacgcaaaatgtgttacatgggccatagacgatatttgcccctaagtcaccctgacagaattaaaaaacaaccatttgacatatgatattagagctgagcacccgagtcgtgttagagatgttgggtatgatgtttctttaattgagtcatattactt

SEQ ID NO: 320375 - DNA, 596 bp, Cannabis indica
aaaacttttgctcccgtagcaaagtttaatactctaaaagtcctccttgctcttgctgccactaataattggaaattatatcaaatggacaataacaatgctttcctccgtggtgatctaaatgacaaagtctatatggcgcttccccccgattacaaacactaaggagaccttcctcctaatgatgtatgtaaattacataagagtatctatggtctcaaacaagcctatcgacaatggtatgccaaacttagctccactttaataagtgaagggttcaaacaatcctcttcggatcactctctttttattagatcttctaacaacacttttcttgctattttagtttatgtgaatgacattttaatcgttatcaataactgtagtgaagctgagttgtttgaaagatagcttgattccaaatttaaactcaaagatcttggtcctttgaggttctttcttgggctagaagttggcactacaagaattttgataattaggggcggacctattaccggcggggaaggtccgcccctaataataaggttattaccggcggatttagggggtccgccggtattagtatttattttttt

SEQ ID NO: 320376 - DNA, 933 bp, Cannabis indica
gacatttaccctcgttatctcgtgtaaaaatcacctatagcgactggaaatttgatcatggttagtttttattagaagatccctaattttggcatcgtttacctcaagaatagttttaggtacatatgttttggactcgaatggaagggataaatttttaggacaatcgatctctaagaattaaagggttgtaagttctcgattaaattgggtcatacttatgaacgtatgtaataccaattactgaaaaaattaaatacaacataacccaggaaactatgaatctaatgacctaaaaattttctttaatcttaaaattatccagaaaaacgaaacaaaaaattacctaaaaattaaccaaataatatagataaggggagcaatcaatcacgaagataaaactacaaatatagaaaagaaagacattagaaaaaaggggagtgaaccacttactattttgctgaagatttttgggtagcaaagaattctgcgattgagattgtgatgattgagacgatgaactctgagagtctctaagattaaagatgaaatctgatgaaatacacatgaagtaggtcaacgacagtgagggcatgcaaatacggaggagaaaagcaatcagaacaatcttttgcagaaaaatttgaaagtttgacaagcaaaaatggtgaaaagagttgttactttcaatttttataccctagaattgttcaccattagatcaaaagaaatctgatctaacgaataggaacagttcagatacgatgagacaggtgatttaatgctaatgatatgcctcaaaatcctgaactgccaaaattcaaagcatgcaatttttcaaaattgggtgaagacaaaaatactgttgtaatcatttaaaagttctttttattaaaaaagtacattttatggagaaattgttatacccgaaat

SEQ ID NO: 320377 - DNA, 1040 bp, Cannabis indica
gtcattgaggcttggaacgtagttaagcaacacgcacatgccatactcaacactaactaatgcctatttgttacattttattacctttgattcttttggcaagtcaacaatgatggttgcttgcctagattgtctatttattcttttatgtacgttcccattaatgtgtacgaaagctccattaattctttataatgaatatttgacaaagactatttcacattttcgtttgtgcaattctatatagtaatgatttcttagtttgattatttttttctgttaatgttattctttttttcttaacataatattcttagttaatgtataactaaattactaaataaacaaataacaatattttaatattaaattctaactttgcactatttgaaaaaataaaaaaaattgataattttatgtgaatattatgtctctagtttagaggcaagaaacttgtagttaaatgtttatttaattaataaatttcacaattatttaaattttgaaattatttaattttatctcatataaaataagatatttttaagtcgtttatctttattttatttcacttattatttgaatttaaaacaaaacataataatgataatatataataattattcattttcggtaatatgtatgatttttagacaatatatgaagcaataacatttcaaataaaaattaggatatttacactatatattattttttttccaaaattttaacatttatataattttatatttatatttttcattacctatttttttttctttttttatttatttaaagtcttcctatattaatttttttccttcttaattatgtcactttatattttttttatgtaaatttttacattgtaaaaaatccttttttaacactaactttacttacaaaattaccctcacacgcctactactacaatttctacttacaaacgttatttttattacacatttaccacttactcatcataccatgcatacacgtgtgctctccccatgcatcatcaatcaaatcatactctcttc

SEQ ID NO: 320378 - DNA, 1200 bp, Cannabis indica
aataataaaaaataataattgaacaataagaacatgaatatgttatagtggttcgaccacatgatagtggtaatagcctactcccctttttacttgtattaacttgtgaggaaaaaaagcaagaagttcttgatctttgtcgaaagcttttatagagattttagcagcgtaaatactctattgaatgaataattttcggatccatcaatagtgtaatgactccactatttatagaaaaaaaattacattaggttaattttctaaaataactaggaaataaatgggaaacttgtatattttttttcatgtataaatcccatgaaaatagggatttaattgataaataaaagagaaaaacatctctgaagatattcccatgaatatagggatttaattgataaataaaagagaaaaatatctctaagatattccacctgcatttaccttgaccaatgtatgcgggcttgcgacaagatcgacgctggtaggacggtgacatttaccctgtttggatattccaagttattcttctaatcaattgtttacaaatgataaattattctagacggtacatcctggtgcgtattgcccatccaggtcatgaaatgttcctcatgtatcactcagataaatgccacgtcaccctgtgtaaattttgggataacattggtaatagtctctctcttagaactttgtaagattattggatcccctatatgaagcacaacaattacaaaacttcttttgcacctccttcaaatattgtttctttctttttatatatgaatccttctggtctggccattgggatttgcataaacttcaacattttttccatcttgatgtggttaatgatatcctattcattcttattttagacacctagaagtctgattcaatcatttggggatacgatccatttggaaatttttaaatttggttatcaccttgaaaacaatagatcattaccaccatctacttcatccctgatataattaaaaaatggtagacttttgtttgaatctgcataatataaaagacatttctttttgggaaatttgcggcaaaagtccccaaaaagttcacggtgatacagattagtccccaagctccaaaaatagcggcaatagtcctcaaggtcacactttttatttgtccgttggtctccaagttaacagattcgttaaatccaattcaaat

SEQ ID NO: 320379 - DNA, 635 bp, Cannabis indica
tataatgtatatataatttatgtataatgtataatgtatactacattatttatattacttattgagttaatttatgcatattgtatcatagttttatattatctttcttgtttttttaacacttttagttacaaattttgtgtattaattacatatgaaattttattgtaatatttaagtattagcaattattgcaatccaccccacaaaaatgcaaaccacccacactgtatttttgtagggtggtttgtgcaattttttaagatctatgtagtgagggaacaatttggaaaattgctcaaactgtatatacagtacgatttgaaaaattagttaaatatcatactacccgcaccgcaaacacccctaaccactaaggaagcatgaccaccaagttttagcatgattataaacaaagcaaacttagcaagggaataactagctcattcacagttttagaacaatgcacaaaataaatacaagagaaatcttttttgactataaatgtcctataacaccataccaaaagacgaaactaccgttattagcaatagaatcccatgctcgccaaccagcgacagtcaatttcaactacaacatatttgcacaccaaccttatgttggaaattatttta

SEQ ID NO: 320380 - DNA, 1527 bp, Cannabis indica
ccagatgtcggtaatagcctacttgccttgtgttttattaatctaagttgcaaaggtcaaagacaggctctttattacaaagaatgataagcgtttatttttttaagtgttcaagattgcagatccccgtcccagatcatgcatggatggccccttatataggggagggggtcagtgcttgtcgcttcaggagacgcgaccaatgcggagccacctcaaccttccccttgaatttcagaggtgctgaccgttccaatatcattgtactggtataaggttcatgttagagtcataatggccaagcttgtacatgccagggggtacaatttccgtaatctcatatggaccttcccagttgggccccagtacttccgctgttgggtccttagtattggccaagactctttgtagtactaagtcccccaccttgaagcttctttccttgactttagaattgaagtatctggctactttttgttggtatgctgctaaccgtatattgtgaagcctccctacgactctctaataggtcgaaggactcactcatcagttggtgattactgacttggttgtatgccgtttgtcgatgggagggtgggtctagctcaactggtatcatcacattatacccataagcaaggacaaaggaagtatcaccagttgctattctttccgtcgtcctatacaaccacaagactttgggtaattattctagccagtttccttttgcatcttcgagtcttttcttcaaggtatccttcaagatcttgtttaccgcctctacttgcccgtttgactgggggtgtgagactgccgagaagctcttcactatgccatgtttaatgcaaaaatttgtgaacatgacactatcaaattgggtaccgttgtcagataccaatttctggggtaatctgaacctacctataatgttattgactacaaagtcaagcaccttcttggatgttatggttgctagtggttcggcttctgtccactttgtgagaaatagtcaaccgctatactaccacatattgcactcctcctttgcccttaggtaactaaccgaagtctattccccatatagcaaaaggccatggactctgcattgtgttagctcgttgggtggagcccttggtatttttgcaaacttttgacatttttcacacattcgaacatactccatggagtcttctatcatggttggcaaaaagaatccttgccgtagtatcttcatggataagccactaccagaaaaatgagttttagtgacacaaattgagtaactctaaaactatttagtgacacttcaacgcgcgtcactaatgcaggtgactagaaagacagtttttagtgacactccacacatgtcactgaaccattttacattcactctctgcgcgtcactataggcgtataaagtcagattttgtctgactgaaaaagtaacaacaacacacatagagtgttactatatcctttttttatttttaattaatattttttaaagatatagtgacacacaaaaag

SEQ ID NO: 320381 - DNA, 784 bp, Cannabis indica
ttttgatataagttgtattattagggtcaattaatgaaatttctcatttagtatcactatgaagggtaattctgatggtaaatattaaatgtagtgttaaattaagggcaaaaattattttggactttatattttgtaaaaaatattaattagattatctattttgttagataacaaaatagattatgtatttttttaaaattttacaaataagacccctgagtttaatttttaacaattttattttttaatataactaacaatttttaacacgaacagatacagaaaatgtaaccagttttgtcataacatctctagatcggattattattaaattttattttgactaaaaatcagttcaggatcctattaatacaatttaaaaaaatacagggtctattttgtcatttaacaaaatagagggtccaattagtaacttttacaaacacaaggtttaaaatggtatttacccctattttggaccctatattcgttgttaatatattattttattaaattataaataaacaaaaataataaaatacaaaaaaaaaagtataaatataatatttaaatattaaaaactaatacaaaaatattttgggtagtatagtgtcactctaataatagtggggcaatatagacaatataattaataagataggttttaaagtgtggttagaatgaatttaatgtaaaatgtcattaaatttaggctaattagcaattcccccccccccccccgccgcgaactttgacatgtaccaaatcatatcccctgaac

SEQ ID NO: 320382 - DNA, 1722 bp, Cannabis indica
tcttcaacattaactgcaaaaagtttgcaaaagttataattcgaaacaacaacaaaaattaatagaatgggaaaaacaattataaaacagttaacaaactaaaattcacctgctttaaaggaaaatcaaatatcttatctttcaaaaccttaaaagttagatttttggccccaacatcattggtccaattgagaattctcgaaatactagatgcaactcgttcgcaaaaacattttagtatctcgggacaacactcataaaaccagacaataaacacccatggacaccccaaagctatataccaaccatcataagactcacctccctttctctctttctagtttttcatcttgataccatgattaactctacccttgaatgaatcaattgtcaactcaaacgacttcctaccacaacaataatcatcccaccgaccgctatcaatgatatctaattttgacctaagaagttccttcttaggagtattacttaaaaggaaacaatgaatgaaatatagaaaagtcaacttcaaaccaagagattcaacattgccccagctagtgcccaaaaaatacatattcaatagacttatggtcaatagttttagtttcaggaaagcatatatcgaccaactagtttgattcctggctaaataacattttattgcaatcaccaaaatattccaaactagatatcaaatagaactcctctccactaaagcaaatacaacggccaacaacctttacctaaaattctttcgggttgggttgattaacctctctcgataaaaggatgtgcacaatttgaggatggaatttgtactccagaatgtccaaaaaatgaccaaactatgtatctcagaacatcttcaacaaattgccagaaatagtgttccttatgttaagaataacagagtcagtgcatgtagtaacgcacttgaatctgtaataatctcgaggactaaatttgtaaacccaatcgtgcatacaaaaaaggagaaataaaataatgaatgagtaaacaattaaagttccaaactgtaataaaactacaaaacaaccatgaaaaaacagtcacacataacaaaagtagaaaaaaaatacataaacataaccttagatgaaaacaaaacctaatataaacaacaaaacatataaaaattaaaaaagcataaaaatcaaaaaaaggagtagacccctcacaaatatataacccaatttagctcgttcaagatcaagttctagggtagttcttatatttagtacttgatgttatcgatatatggattccacagagaacatatgatgaaaatatgtgaaaaatctaaagaaaaatatgatcaatactaaacaataatgtctatgaattgatagttttaaaattgtaaaaaaaattacaaaacaactataaagaaacaatcacaaagagcaaatgtacaaaataaaggtaaaccctaaatacatatggaaacaaactaaaatataaacaagaaaatatatcaaaaaattaaaatctagaaaaaccaaaaagaagaacataataatcaaaatataaactaaattaaagcaacggaatgattgcaaccaaaaacaacaaaaaaaaaaaggataaaaataacatagaaaatctaaaccctaaaaaaaatcaaaacaatatacacaaaccaaaaaatataactaaaaaaaaagaatcaaagttgggggaaagtaaatacgaatctaa

SEQ ID NO: 320383 - DNA, 750 bp, Cannabis indica
aagtctttagtctattttcctaaaatttgaacaataaacacttcgaataaattcattcgatgtcgaaatctctaacgattaaaacaagaaaccaatgtaaagttgttgctttcctaatcataataaactagcaaactagcattgaatcaatcaccaaaatataagagccaccacaattctaataatctctatgaataaccaagcaaaacatgaaaacgcatatcaaaaccaaccaaaatctccaatctatcaatatacaaacatagaaactacacaattcagcgagcattataatcatcatcaacagaatcgtaagaatttaatgttgaaaccttgaaaaaggaacgatgacggaacttggcgttgtcatagcggttgatatctttgttggagtaaggcaagtacttggacgacataatactctatcggatcggatcgaatcggtcaacttagggcttccacactcagcaacgtggctaattgggatcagattttctcgagaaagtgacggaaaaatctcgggctttgattttagttcatttatattttctttttcagggctttggttatttatatatggaatcggaaggtctttctcttctgggttgtttttccaagtcaacgaaacgttgtggcaaatttgtaaatattttcaacctggatttgctattgaaaaagatgatgatatttgttaaaactgttttaagttatcattttttttaaatgagaatttgaattttaaaaataaaa

SEQ ID NO: 320384 - DNA, 1084 bp, Cannabis indica
gctttataagttgaatgtatggatcgatgttgagagcatgggccgtcacggaggggtgggagttaagaccatgtatccatgtgaccatgcaaaaaggtactaggtttgcccttagaaaacttattagtaatgattttatttctggtgctaaacccttccttatcttcagtcttctagttggagaagagggatcaacctccacttcctctaactcttctacacgtctgaagctgcctgcgagatccctaaagcgaagatctatgtctgcatccctactttgggctggactctattgccctttgctgggcttttctttagagctcttggaaggcatcttctctttcttagctttggatagggccaagttgtaacagtgatgggaagattgttggtctccccgttaaacatgctattccatttcttgttaggaatttcaggctgaggtggtagatggttgttaacgcattcaggccgtataatgctagtcggactatcatggtgttgaaagctgggggaacatcgattatgaagaattgtgccatcagagttttggtggtttaattttctctgacattgacggggtaatctcatatacccaatgggtgtgatgccttggtcaaagaagccatacatcacttgactgcaggaagccaaacaagtgagttggagccccatcttttcatatgttgatatgaaaagaatgttggaggaggctccattatctaccatacatttttccacagtcatattcttaatttgtgtagtgattaccaagaggtcaatgtgcaggaaactgacatgagcagcatctctttctgtgaaagagatagtgggctctccaagtttttgactgccaagatattgtttttgggttcatgacagagtgtgcgagcatagttctccctagctttgttggtctcacctgcatatggggttcgccaatgatgacccctaagtgacctgccactagtggtggcattggatctccattttgggcacattgtgccttagtctggtcattctacacataacgacacaggtggggattattcttccttatgaggaattcaatctccctcttcaa

SEQ ID NO: 320385 - DNA, 854 bp, Cannabis indica
aatgaaaatgatttaccttttaaaaaaaaaatgagaaaagtgtagcttctgacattttaggtaaacaaattgatgttcaagttagtacacaactttagataggaagagcaatttcagaacaggaaaatacaatagatgacattaaagatattgaggtagaacttgatgatcaaagtgaagttttttatgactatcaactagctcaagacatggttagaagggagattagaccccttgctacgcatgctgaagctgatataattgtatatgctctatctatggcaatggaatcacaagacaaagtaccatagacctatcttgaagcaattaatagcaaacaattaagctaagaaatggaatgcagctatgaactcataaatggtttcattgaagaaaaacaagactgggtggtagttcttaagcatgaaggacagaaagtaatttgttgcaagtggattttcagggttaaagaaggaatgaaaaatgatgaaccaatgttgtacaaagcaagattggtagctcaagggtttactcaagtagaaggtgtagactacttagaaatattctcttcagtagtaaaaatgaaaacaatatttagaatgatgttagctcttgttatgcaatatgagtggagcatagagcaaatagatgtgaagggtgctttcttgaatggaagacttgaagaaactatctatatgagacagcctgatggattcaaggtggaatccaaggatagagagcttgtttgtttactgaagagatctttatagggtctaaagcagtcacctcgacaatggtacaagatttttgactctgtggtgacaagggtgttggaatttattttaccaggatct

SEQ ID NO: 320386 - DNA, 1159 bp, Cannabis indica
gggtcagacgaaggcgattccgggttgggcgatccggctgcagacgaagacgaatggtagtgcgccgatagatttcccatgctagcgctcttctttatgatcgacccatcggtaagtctgacgccgaaaagcttcaaaccgccgccggcgccgccagcgccagcgccaccgccacgtgatgggcaggtgcgggagttgtggccattattgctgcagtgcgagcagcgccgagtcatagcgaccgactcggccggttcacctattccaagtttttaacagaatagaagatcagagagaaaaatgagaagaaaaagttgaagattgattgtgtttattggtgtttgtgtaaagataaaaataaaaaaacagaaaagggatatatctggaatcgtaagggtattttgggaaatgacagttttttgaaggattaaggtggcttagaagaacccggtggtacgttcgctgggttttctttcctatgaaattacctttttgttcattccttggataacgtcctgctttcctatactaattattgacaatttatttttttttttgcaattattatcctcatttcaactttggtccattttcccaattaatggtcttgggagaaaaacataatatattagtttataagaacaaaaaaatatattttaaaatattttatatgagtgtggatgagcattgctattagaggacattctcgacatttcacgttgtgattggttagcgatattccctaaaagttattatattaaattatatgggacccgatacttaattgaaccaatatcgatactgacacataagagagtgctaggtaccattagtgccctttagcatttctcaagtttggatttaaatgttcttggagaacatttttcctattaaatatgggcagtaaataacattttgtcatcttgtacttcacctcccatttattgagtgtcatgtgtgtgtgacactcttgctttcattattctaagcaaaacaatatatatatatattttttatgaaaaaaatttatattcttaatgtatggtatgtatcgtacatgtaatggcagattcaaaatttaaagtaaggaagagtgtaattttttttataaaggcaagtggcaaaactaatttttcataattaattttttttttttttt

SEQ ID NO: 320387 - DNA, 1065 bp, Cannabis indica
atatcaaataaacttaattaaaaatcaattaaccaacaaaccataaaaactaaaagcaaaatcaaaatcaaaactagagagagtagagaacgtctaaattcaactactttcggtcaagattgaattttgaaaaattaagaaaacccaccatttttcttcttctccttcttcgtgaattaagtaagtttgatttgagcgagtaagtgaggaaattctctgagaattatggtcagggttcaagaagatattggtggagcagccattaaaaaaggagactgagaaagcgactttgtttatgtgagagagagagagagagagagagagagagagagagagagagagagagagcggctgggaagagagagagaggctcaggtttttctgattcagaaagtgtaattttcctgaagccttcactatctatttatagcattccactagggttagtttgaattatatggcattaaaataatgaaaaaatcaatttaaaaagcctacaaaggtggccggccatggcttagtggattgggccttgctttttgcaattttgcaattttaacaccttttgtatctgattttctcaaaaatgccaatttcctaattcaaccatttaaatgccaattctaactatttaataactataaataattattaaataatattgtcatttatcatatttattaattgaaccatacaaagtatcataattaacaaatatgcccctataaactctttctttacaatttcgcccttacttagtgaaaatttcacaaatagacatagtctaatttgagaattataattgattaatcaaaaccaattacatgagtcttacaagcaatattatctcaactagtggggggaccatgggtctatataaccgagcttccaataagtagatcaagaatttagcactaaaattcactaacttattaattcttcgttgaatccacgcatagaacttagaattgcactctcagtatatagaatgctctatatgttccaccatatagacacatcattagttatccattgttataatcctaatgtgatcaatgatcctct

SEQ ID NO: 320388 - DNA, 1367 bp, Cannabis indica
gtgcccaatagcaatgctcttatcgatatgtatgagttactttaagatatttttttatcatttgatgatccatatatgatttttaaatttgatgactattattgtaagtgaaactaaaaacaaccaaacttgacattaatttaaaaataaggaaaataataatgaaaaaatcaaggcacacgtgtcttactttttcttttgcttattcatcttatcatgctttcaactttttctttttgtagttaagcaaacatacttttcctatttgaacttttttgtattttattagcatcaatgaatagtagcaaagaaacacaatacaatttggtaaaaacactcccaatccaataaacaaacaatgtaccattagtgtaaacttatatcttctaattttacatttaagtttaattcagactctaggattagaaaaataaaaataacaaataaattacatttaaacgttactaaagagcaatacaaatagagagagtaatctttatattgtactgccaagctatttgcttcctgaaaaagctatttgaaatccaccaaaagatttggaataaaaagaaaaattgctaagagatctactgttagtttaaggaaaaacattttagtatataacatattcaaaaagaaaacctcagcaaaaaccccatgctacagttgaactcattactcatcagtttgaaagaaagacaagtcagatttttatacgtacataccattctctaaacttgttttctacaacaaataaatgacctctctcagtctcaccattcaccacactctcattccccatacatttacattctcacgtgaccatcctttgtttgttctttcttggatttggtatgtgaccatcattttcatcttatgttcataagcttcttgcaatcttttcatacaagtcccgaggccaattcctactcgaattagtcgcaataaaagacgcaatctgcaaaacacaaatcaatgcaagtgcttaattacagtcacttctcacattttattcatttttgcataacaagaaatattagtactgcaaaaaacacaaacctttgccctcaaggcccggagcgatccatcagaatctgtgacattatccagacaagtaagggcaactctgagaaggtctggaacacaagcttgaacatgaggagaagttttgtaaacacatcaggcgcaatgtcgggagttcttggatccagaggaagaaaggggagtcttgcaacctctctaagagcatcgatataatgaccaagtttaaccaacttgtgaactgagagtattgcctccagttgtcttaacactgtctgctgttctgtaacgctctctctttcttgaggactgcatatgcacatttt

SEQ ID NO: 320389 - DNA, 750 bp, Cannabis indica
gaatattcttttatttttaagtatattctgttaaatttaaacaagaaatgccgttagatagccacttttaatatataaagatatatatttatatatatatatatggtgttattttacatttacttgtttatttgttcaagttcttatcaatacttatcaaatttacaactatttgctgtggttgccgaggctcaataccctttaatattaattataattaatataagacaccagctatatattaattactagccaatccagaataaaaactaatacaattagagtcatcattagaaaatacgcaataataataataaattgactaaacaacgtacgtggagttctaactcaataaattgacacactgaacttttggctgtcggaacttgggttgacggcctgaggatagtggccgctgatcggcgagaccatgggagactatcgaaggtaacatctgtaatatttgaaattgaagaaggcaatttgaaatctgatcatttgggttcatagtcctcaatatgagaatatatacaaaaatatattacaaatatgtggcagaaataaaattaccaaaatgtaaacattgtttaatgtccatagcataaattacaaatgaatggcataaatttgaaaacacttaaaattttcctattgtatatgtaatttctagtgtattatagttaatatattatagctaaaattaaggaactgttataaatagtattaattatgtggatgtccaaatctttt

SEQ ID NO: 320390 - DNA, 1259 bp, Cannabis indica
taaaaaattaaatttcccatgttatattgcactcgccggagaacactatgtggcgtttggttaagaggaataaaatataagtataagaataaaatatcaataaaatagaaatgaaataaataaatttaattacataaaaattaatttttttatgttacattagaatagtctttcattctattttaaatgaaatagtcattctactaaatggtgaaaaatacattttattataatgacattccaatatatttaatgtaaccaaataaaaattgaataataattattattattttcattttattctattttattacttctaacgacaccaatttcttagtcaaattggtcgaaaagtttcaaatatgttgctcccgaccaatcctgcagtatcacgtgactcgagagtgtactgccatcaaattcacacattttaataattaagatatatatatttcatcagattaggtcccattaagattgtttagtagtatggccaaactgattattcctaagtaattaagccttgaacattataaaagatagcctaaaatgactcaattcacttgggtggtttgtgcagattggggtactaattgaagataacgagtttgttgattcaaccatgaatggacagccatggaaagctggaaaattttcttatagtcttcgatgcttcgtgtggtctgagcacctggatcttcatgcaggagaggtattgcattgatctattggtttaattcccacttggaaataaataatttttgagatatttaatttgaaaaatataattatgtatggtgaactgaatttgatgttgtagccttttaaattgttcaggtaataaaaatcaatgatcctgtatcagattccacttataaagatctatggttagcaactgcagaggtgagactcagacttatttgatgtgatttattgaaattatttagaattttattttatcattatttgttcttttaatttactcaacactaatgtgaattatgaaattcaatccaatctaattgtttaattagatgttacagagaaactagaatttataatgtagcactttcacttatgtaatatgtgggaaagtagtctaaaacttcactctaatgaattagcttaaccatatatttttatcttcttcatatttaagattgatataaaaattgtgttatattttcagcatataaaaatattttataatatattttgattattttttaatattgattttcaatgcaattttttttttt

SEQ ID NO: 320391 - DNA, 1439 bp, Cannabis indica
acacagttacttccaaacgcacataagattacaattctatgataaataatacaaaggataaaattataaatatttaagaatattacaacactaaataaaatatacacataaaatagaaaatatagagaagaaaaaaaaataacaactcaacacaataaactacacacaaaacataatatataaaggataactcaaacaattgattttctatacaaatgtttgtaaactaaatcaacttgttcttgttaaatagtataaaaaaattatgttacaccatcagaattgtatttgaagactgatgtcaaacacaaaaaaaagtaaagcaatgagaaaatatagattaagagagagaggagtcaaaaaaatgttaattaatatttttacctcttgaattataacatatgcattattgtggctcctaaagttttcagcctgtcacatcattgtatctctttgatttaaaaggaaaaaaaataagtatttttaataacattattatactaaaaattaattaatgattaaaaaattaagtaaaacttttaaataatttttttaaaattaattacacacgtaacacaattttattagaatatgttgtccaaattttttttcaaaatacgtagtagtttaggaggaagccaggtggcactgggacctacgttacaggacacgttgccctaattactcctagatccctttatttcaaaggacaatgacagattagtcatctccgcgagtattcggctagaccgcgagcgtccctcgtttgttcctctccatgagtaaagtatatccggagaacgatataggagaagtaatgaaagatgacgtgacattcaaggactaagacattgtacatgcatttaatgcagcatgagagagaacatcagacacattactctgacaagcgtattcgagggtttaggcctattattcctagatctcacgagcccccatccattaattgacgactgcataaatgagtcatcaaatcataaataagggataaattacatcccaccaaactatagacagcttaaaaacctatcataaaataggcaattatgccctaagtcaagtttgagaaattataccaagtatggtgtaattgaaaaggacaacagtgatattttaccactattacgagcccataaatactccaatgataaataaaaatggggggccaagaaaaagctctgtaacaaataccctcataaatacaataactcgtggactaaagctcattaatgtttcaaccacgtaaaaaatttctcttctaacttttattaaacacttcatacaaccttaattattggttgccgaaaatcttagttaatagaatatatatgggtataaattatgagtttttatgtttttttttatctaattaaaaaaaatctcttatttttacattgtatagctggctttgtttcattggt

SEQ ID NO: 320392 - DNA, 1066 bp, Cannabis indica
agaaagtaggatcaataggaaacttcagaggagccctttcatgttttttattttctaaaaaaaaaattaaaaaaaagaaaaatcttttcttttttcttttacttttaatgattcagaagcctgatatagaaaacagcaatctgaatggtctataataataataataataatatggtatcaaagtcttctcagctagaatccaaaatcaaaatcaaggtgtcaaaaaatgagcaactatttttattttattttgagtaattagttaagattaattctcggttatatataaatatttaagtttaatttttaatagtaattattatttttaatttttttttctttttaaatttacagtttgagttgtttcgataatttgtatgtatgttgctatgtaaattttaattgcgatttagattgcttcgttagttgctatataggttgctatgtgtatttctataaaaatatataaaaaagtgtaaaaataaaaaaaatccctaatacttaagtcatatttctaaaacatctatattaaatcttttatttatttgtatggtcactcatctatttttattcatttatacatttttcttatgttcattatattttttaaggaaatttccaatggcactcattatcttttaaccataacaaaaacaagggttatattaataatttcaccccaacaaatgtgtatcacacttacttttattttggattgataaaaaataaaccatattaatttcaaataaatgcacaaaccaaacccaacccaactcataaaacactttgattttaatttttgtaagtaagtggggacatacatgaatctagtttactagtcaagattttctgtctcatattaaatttttgatattaatttttcaagtgaaggctcaccatctttgttgataacaacataaaaattaaaaaaaaaaaaagagtttttatttatattttttcaaaaattaggacttggtgtacaagtttctttctggaaagaagaaaaagaatattgattgatgacaaaagttttagttgaaaagattaatgagcagcaataataaaa

SEQ ID NO: 320393 - DNA, 1149 bp, Cannabis indica
ttgtttctttgaacaccaacttatcagattgcccccaaagaaaatgcagtagcccgaagtagattttctgtcatcataacatgcccaatcggcatcagtgaacccttgtagatcgagagctttgaatgttaaacctctgtccaaagtaccagatagatatctaagaatacgtttgtaggcaccccaatgttcagaggttggtgattgcatgaactggctcaacttatttacagggaaagcaatgtcaggtctcgacatggtaaggtattgcaaggcgccaatcacacttcgataagtagtaggattttgcattggggtgcctactgaggaggacagctttgtggtggagcacattggagtggtttgaggcttagagtcaattaattgagtgttgtttagtagctcccttgtatacttttgttgagtgggagttattgtatcattggatctgttgacctcgaaccctaaaaaatagctgacagagcctaactttttaagggcaaactgatcatgtagctgtgtaataacttgttgtatgtgagtcatgttttctcctgtgatgagtatatcatcaacatacacaaggagaagtaatagttgaccattttgtctagtgtagaacaagcttgtgtcagatttgctattttggaaaccccactgcagcaaagatgtttttagtttgtcaaaccaagcccgaggggcttgtctaatgccatagatagcttttttcaacttgcaaacatgatttgggtattccggatcaatgaacccttgtggttgatacatgtagacatcttctttaagatcaccattcaagaatgccttgttgatgtccacttgttgaatgtcccagtcgaatgttgctgcaagagtaaaaatgatccaaatggtgcaaggtttaatcactgggttgtaggtttcaaagaagtcaatacccgggagttgttgaaaaccctttgcaactaatctggctttgtgtctatcaactgagccatccttattatatttgacccgataaacccattttttgtgaacaatggtcatatctgatgtgggaggaacaagaacccatgttttctttcttttcaaggctgttacttcagtcgacatagctgcattccaaataggactagctaaggcagccttgag

SEQ ID NO: 320394 - DNA, 1417 bp, Cannabis indica
ggatatattaggaataaaattcctacatatataattacaagatatataaccaaaatctaatatcttaattacttgatgataagtttttcttttaaaaaaaagtatagtatgacatcattaattaaaacttcaagagtactaaatttgaaaaaatcctcagaacaaaaaacatgtcaagagatatcattaatcaaatatcagtcagtacatcgataataaatgtaatataatctggaaatctagattaccaacacaatgatcattcaaagataaagttaattttattaaagagtgtacaatactattggcaagcttaggataatatgtttaaaagaaatatcactaaaatatttacaataattaatgagtctctaacaatgcatccttcaatggtttgattatatgagttgtttattaatttgctattatatcttagttatttgtgtttgcacataaacactacaagaaatgtcacttttgttagtatatttttgtgttggcaaaagttggtattccgctggtaaaatagaatttacttggaatgtgttggcaaaagagggttggcaaatcaatgttggtattagaacttttgccagcataaaatgaaaagtgctggcaaaaatgacttttcccagcgcgtaagtgcgctggtaaaagttagattttagccacttcaaatgtacgctgataaaactttaacctctttgccagtgcaatttgcgaaatgtgctggtaaaagttacttttaccagcacagtaaaagtgacatttcttgtagagaaatgcaagtgttagaggtatataaatcaatagaatagattatatcaaaaatacaactttatagcaaaaatattacaagtaaaatagactgattaaatatagttacaagcacaataaaattacaactaaatggaataaagaaaagtaaagaagattgaggggaaaacttgcaccaacttagaatttttttgttatgtgagagcttaattatcataattaaaaataagagtttgttcattcatacattttaaaatattttttttcttctatttatataataaacttgtataaattaaaaatatatggcgctttacaatgctttaatcgcaacttacgcaacaatttaaattgtaatccaaatctcacaactcaagttacaaccaaattacaactcaactcaatttgtaatccatatcacaacccacacattaaatattaaggatggaatggatatgatagttgcacagtgttatgagttaaaagattggaaagtaaaagaaagagtaatttgcggtataaatatttaagtttaattcctattgcaaataaatacctaagtttaatttttggtggtaatgatatctaagttatatttttggaactctaggtacctgaccgttaaatattaagtcattat

SEQ ID NO: 320395 - DNA, 557 bp, Cannabis indica
aattcaatacaacaatatatttaattcttttcttttattgattcctttttctttaattttattactcacattatgtttgtatattatcaataattttacagatcgatacccgccgatgattgaaaatgagtggtatttctattataaaaaagattcattttccacaacgtcaaagaataataagagattcaatcgaaaagcaaaaaatggaacttagcatggcaatgcaacaaagaagtcaatcttcaatcaacacaagatccaaataggttttaaaaggactctagattttatcgagccagacaaaaactaactctatggaaaatgaccgagtatcatttgcttcaatccaaggacacacaggtactaacaaatacccttgttaatgatcatatataattagtattcacttttataatatttagtgcatacatatctacctaataataaagtctaattacttaattttaatttattcttttgcagcaatgtacttggatgttatgcaagatttataaaatgaaatcaaaactaaagaagacgtttacaaataatga

SEQ ID NO: 320396 - DNA, 672 bp, Cannabis indica
tggatttttttttttttttttgcttctatcacatgcaatgtacagtactattaagaagatttgaaccttaagtcttatcttatatcgaaaaaaaaaattctgactttgaaatttactaatttttgtaacttgattagtagattaaacttaataaggagtatattacttttagcaatccatttatttgatgttgatataatagagatttgaactcatcccctcacagacacacaaccacttatggctattggctagttacaagtgaagtaatgtccttattgaagttgtcgcggctattttaataactttctcttttattttctttttaactttttattgtcttaattaacaataataatcccccaaatttgcaataaactaatttctctgtccttgttctctttctatgttgctaaatgtaggttatgtctcccatcaaattctaattttgtgttaggtagtgttaattttatgtgaattatatttataacctttaattttatgtaatatttttataggttcactgcaacaatatttgtttcgatttttatgtaaactatatgaatttaaaaatctaatggatatgatacaaatatatttcaaaatttaatagattaaatgtatattataatttgaaataaaattaaacattttttttatatatatttatat

SEQ ID NO: 320397 - DNA, 1584 bp, Cannabis indica
tggctcattccaatactcggtgtctctcccaattgtccatgtgtttatgatcacacgcgagttttggggtatgtggaagccgttaaccgtgcagtcttcgatgggtgcatgaggaagtaacaatggtgccactggatgaagcctcatggattcctttatcaccatgtctaagtagggtaagttttctaagtttgattcttcgaccattctttccattcccaccgtggtttcgagttctttttggagttttttcattgttgttgggtgcttgatgagttctgatattgtccattctattgctgttgatgatgtatccattgagcctaaaagcatgtcctgcataaccaaactaacccatgtcagttttgtatttttagagatatttacattgaaatacattttatggctttatatagaagtgtatcatttttggaaaaattccttgatgttaaatcacttaggttgcatgaatttctaggaataccaaaattatagctttgatatttgatcgttcaatgcgatactcagactcatcagatcccataattctcaacatgacatcgacaaaatctttggcttcatgatcatctttagccttggattgaatatgctcatcaatgatcccctcaaagaattcatcaaacacattctgaacaaccttcattcgctttgtcaagccttgcaagtcaagtggagcaaggaaaggaatgtaatctcccaagttaggagtggcacccaagtacatcaactctttgataatttcattaaaacccttaggatcgaactcttcatcagagtacttcttcccaaacaccgtccgacaactcatattggtattacatgctgtaatcttggcgctcaaatcaactgccacacgattagtagtagcattctttgtgaactcaataaaatgaccaatctcttctcttctcatcgctctaaaagtgcttatcttgagactacttagaagctcaattgtgcacatttttctcatgttgcgccaataagaaccatatagagaaaatgacaagtttgtttgctcccaagccatgtgcttcgcagccaagtgaggtggtctactagcgaaaacaagatcatgggtcttgagaaaaagctcggcagccttaggagacgacacaacaatagtgggaattaggccgagctgcatatgcataatcgggccatatttttgggacaacctttgcaaatcgcgatgagggtttttgcctaataggttcaaacttccaagtagaggatacccttttggaccaggtgggagattcttctccttttccttggttttattacttagaacataaccaactagaaatagtactaatgttagtactatccatagccaattagacatattttttgtttggtgttcataattgtggtaattgatttacttaaatgtagagaagctaagatacttttcaacacaagtggaggtcaattaacgctatgataaaagattagtttatttattttccctttcattacacctctattagaataagattataagtagacaaaagaaattagtggttgagaaaaattagtggtttaatagtacatgaattg

SEQ ID NO: 320398 - DNA, 1153 bp, Cannabis indica
agtaatccaatggcttaaaaaaatgtaaccatgatggttacaataaaaatgtaaccattgaagcctcttccatatttatatatatttttagcattaaaatttagtaaaatctgattagattagaacaattcaatattcactaaactaaatattttaagagattaaaccaaagaaaataaaattacagaaaaaataagacaggattttacgtggttgggttggaactttaaagaatcttagttcacgaggtaattttacaattcttgtatgtatatttttagcttgtgtaataaagctccggaacccctttcatggaaaatgatgccatgtttatatgcacacatgcttaatgggtcagactaatccaggctattctagggttgtgtataataaaactcactgatgcggtaaaatacattattttaacgttatagtttgaattgttgggcctggtgttagaatttatatcctgaaaattctgcaaagatatctctaattatataaagagtaaacttttgatatatgtgtgaatgttaaattggtaataatttatattaaatattggaaaactccttattcatatatgaggctgtgacttgtagttgtatagagaactaagaccacttagctatgaatacacagtcaataacatattaaagttacgaaatctttaatcaatagttgctagtacggttcactgatgcccgttcttcagtacaagtaatcttggttcggattacagatgtagtttgacatcaaagttaaggtgttgtatatattagagattatatatacaatgaccgatatgaataaagctgtctttatcaacatgtcatttccctactgtaaatctgggctttagaggattttttacggcctttcagcgtcgattttggtaaaatttgctacccgcactaatcgaggcaatagtgtagggtcaaacttattcgaggccatagtgtacactatgtcggttatttaataataattgatgttatatgtacattatggcatcagttattaacatataaccgacgccatatgcattaagaatcaacaataaaggcttaaaaactaatgccatatgttgaccgagtttttcggcaactaataaaatattataagtttatagagctgtaagaaatttagagaa

SEQ ID NO: 320399 - DNA, 843 bp, Cannabis indica
tttgtatgccaagaatggtgatcacctcgaccggtctagttcaagatctcctctgaggtaataaaaagtttgaatggaaagaggaatacgagaaagcttttcaagaatgaaaaagacaacttgcaaagagtcccgtactctcgaaacccttggacgaagaagaattaggaatatactttgctatcactgaatatgttgtaagcgccgtcctgataagagaagaaaacaacgtccatcatcttgtctactatataagcaacagtctcgatgaagctgagggacgatatcctttaatagaaaaactcgcttactgcctgatcttagcaacaaggaagttaaggccatatttccaagctcaccctgttcgagtgtacacttaccaaccattgcgccaagtattgaaagagcttgatgcctttaggcagttacttaaattggcaatagagttgggtcaatacaaaataatctttcaaccccgtacaatagttaagggataggccttggcagactttgttgttgagtgcacaagcaaaaaagaaacatatgggacaacctggagctagtacaagaacccttgtaagaaaacaacgaagactgacctacctagaaatttcacgtggacagatcagccacagaccagctttctggtgtaggaatctcccttgtcacacatgggggtaacacctgcacagaacaatcactactacgaatggtagaattcacgacagtcccaaaaatgccttttttagcactgtcgttaaaaagaattttgagtgttgaaaaccgtcgcctataatatactataagggatggtttttaacactcgtatagattaggcgacag

SEQ ID NO: 320400 - DNA, 1155 bp, Cannabis indica
atttttactaagcaagagcttaattgtgaagaaaaaagattgtaggtcttatttattaattgatagattttattaagtctaatctatatatataaaagagaagtataaagcggtgacgtgatgctctaaaatcatctcaaatgcttcgatataaaaaaaaatcctactccttaactaatatatatatatctaaactattatttattttttcttctcaccttttttattttctctcaaaaagaattcctattccttaactaatatatgactctaaaatactatttcttttctctgctcactttttctattttctctcttcgttattatcatctagaataactttctctcatactcacaaataattatataattaacaggtatatgttgaataatctcacaatcaattatcatatttacagtaatttctctctcccaccaagtcctggcatagtctatcacaagaaaagcattcgataaataattgaataaattgtacgtcacttatcttagttttatataacgtaagagtttttaatttttgtcatttttaatttaaaattgtatcaatatataatcttagattttatataattttatagttttatttttaactaaattgtatcttcccttctaaattctatgaatttttttttcggaaaagaatatacttctttaatttgaattatttattttttttataaacattttattttaattctatgattttagatgaaaatttttgtcaaaaccctcatcagaaaagaccatcactttagaggtcgaaagcttagccattattgagactatatatatattagtaattttatctcagtaatttcacattagtttttaattgttattttttttcccggactctactttttgtttggtatttttacttcatctattttacaaatggtttgcttgcatgtgttataaatgtacatttcattgtctgtactataattttttttaattactttgccttagtaatatcatttatttatcatagaaaatatatgatatgataaccatataaaatctgatttttgcaccaaaatttttaattgaaggaatataatagaaatttttacatgaaaaatcctttttacacactttattacaaaattaccctcacacgcctattactacatt

SEQ ID NO: 320401 - DNA, 580 bp, Cannabis indica
tcactttcaaaatttttttaaatagtttttttttcttaatcaatattttgcacttcgaccccaacatgaattttgaaacccgcattctagctctgaccctaattttaaactcttaccacggctccgatctagacttgaacctgaatccgacttaaataaaatcaaaaaataaaaattataagaaatacaagtagttatagagtatatttttattttataaaaacaaaattttataaacacaaatttacttttatttgtattattaaaaaattaaaaaacaaaaatatgactaatatccattaataattacatgcccccatgtatttatgtaatcataaagtgaaaaacaaaatcattaaatatatatattcaaacacaaatatatattaaattcaaaactaagagttaaaaaatagagaagatctaaaaaatgtgtaaaaaattatatattgtgttattatagttaaaaataatatttagcagataaatagagttaagctagatgtataagaatatttctatactgggaaatatatttctatttaaggaaataaattttatttaaggaaataaataaata

SEQ ID NO: 320402 - DNA, 547 bp, Cannabis indica
atacttgtgagtagatctaagttcctggtaaaataaattccaacactaaccccaagggaatctttacacatttttttctatgagcttttctgtgagttgatagaggggacatgtctccaaatttctcaggatcgtgttagaggtgtgacacatagacaccttccggaatggtaggcattgttatctgtcttagggttgttcatatattctgcaatctgtggttcgaaactccaaccaatttggaccaaaccattagaaatcgctccaaatgaatctagtgtcaatgggttggtcaattcggaccgtaataattatttggttcgatcatggttttgaacttcaagcctgtggttcaaaccaagccaaaatgtatgatttttttgtatatacttaatgtttacatgaaaagtagccctaatgatgtggacataaatatttaacacatagcaagaagaaaaatactcccgaagttgagtagtcccgagtcatagcagtcgacttgggaggggttgaaccatagagttattttttatgcttttaaactgaa

SEQ ID NO: 320403 - DNA, 868 bp, Cannabis indica
ttttttaaaaaaaaatatatgtctctgacgagacaaccaattctcccatcaacttttattaatttaagaaaaaataaaagaagacgtatattgaagtgacaaaaagcataaaagagaaaaaaaaattatactaattcagtataaaatatgtagattatacggtaaaaaagaaaatatatgtgtataacagtaaaaaagaaagttttatataaaaaaaaaaagcagtaccctgtgtagatatcccttttcatatctataccaatatcaaacttttaactcaagaactgttcaaatataatgttcatatggatcttatccgatcttagagcactcctaactagtgttgtaattacgggctgagttttttgacacgatacgaaaaccagtacaaattcaaaagacacgagtatgactaggctcgaaaaaatacaggtttgagcacgacatgacacgatgctacaaattagtaaaacacggcacaaaaaatatgttcttaaacacaacatggcacgagaagcacgaaaggcacaacaatatgaatagactagcctaaagagcacgatacacaacaaactcgaaaagtacggcacgacatattaaaaaaaaataatttattaataataacaaaatatgaattgattaattatttaataataataaaacttaaatgtaatactaaatattataattttataattagaattatttaaatatgaaaaataagattatacatattaatttatttataagatgtgaattaaaaatttaaatatttataagtaaatatttaaatttaatgatattgatgttaataatttttatatgattatctgtaaatattgtttagaagttatataaatataactaa

SEQ ID NO: 320404 - DNA, 1089 bp, Cannabis indica
ttgatcagttcactcctagtgatccaaccaaagtcatggtcacaactgctgattcattagtccgaatactctgcaagaacaatgtaatctgcaaatttaaaggtatgttgccaaattcgcctattcgggattctaagttttatgtaaaaatgcaatctttatgtatgtaaaggtgaaaccttttttgtttttcgaatcattaggtattcgaaatggagcaagccatatgtcggcttctttcaccccagacgggaaacacatagttgcagcaaccgaggattcaaatgtttacatatggaattacactagccaagacaagacttcttcacacacgaaaagcaattggtcttctgagagtttcctatctcacaatgcagtaattgcaataccgtggtgtggttcgaaaggtatccaagaaataatcccaaccccaagatttgacgatcattcggggggacagaaactgtctctctcgtcgcctgattgtttctccttaagcgggtttttagagtctttgccaaaaggaacagcaacttggcccgaagaaaaacttgtcaactcaaatccaatggcggtttcttctccatcaatgcgttcgtctaagttcaagttcttgaggagcgccttgcagagtatgtcgggctctccacacatgtggggtaatgtgattgtaacggctggatgggacggacggattaggacattccttaattacgggcttcctattcgtgtttgagaaaccttgtacagcaagacacacacacaaacacacacactcggtgccctaagaatcggcgaaaaaaggttagtttaggatcaaattatgctgtatatgcataatgggcaatgaagatatagatttcaagacataatatttatttattatatatatataaatatataaatatatatttatagttgagtcactttgtatttgtttgaactggtataatatatacaggtcaattatacaattctttgatttgttattctcaaggactattggcccctctattaggtgagtttcatgtggcaatggcccccttttgatttgtaatttgtataaaaaaaacaaaagaaaaaaagttg

SEQ ID NO: 320405 - DNA, 863 bp, Cannabis indica
tttttatctaatttttaatttttttcgatcagccaatgctgccaagactgttagttaatttactaaagggaaatttgccgcaaaagtccttaaaaagttcacgttgatgtagattagaccccaacctccaaaaaataacggcaatagtcatcaaggtcacactttttatttgtccgttagtcttaattttaaccgagccgttatcttttttttttttttaaattgccacgtgtcaaaatattattagtccaaattattattttaattcaaaaataaataaataaataaataaattatttaaaaataatttctttttctttttctttcttttcttcttcttcgtcttcttcttcttctcactgcaccctaaccctaattctaaccatctaacaccatcaacatcctttcccttcttcatcttctacccagccacaccatcgacatccttttcatccagccacaccatcgacgtcttcttcatccagtcacacgccgactcccaacccccacccacccttctctcgttaaattttgtggcgaaaccatatcatccatctacagatcgcaactgccctaagtcgcctgaaactccatcgtccaggtctccatatccagcttcgattcatgaaacccaaattgaaaaactcattaagggcaactcgcgagatcctaagtcaccaccatctttgattcgtgcccaagctctcatatgttaattttctctgtccccatgagcgttgggccttgtctatagccagccccaccgtcgaagcctcaccttgccatggcttcgatgtgggcattttcgaagcgcaacgagccaacctctatttttggattttggatcaatgatggtggaaggg

SEQ ID NO: 320406 - DNA, 1084 bp, Cannabis indica
aaagaattttgaaagtcaatattattaactgtacttatgggtaaaaaactatttaaagatgcattatttacttttattttatatagctatttaataagagaaatgctaaagggtaccagtggtgcttagcaccctcctacgtgccaatatcgctatgggtccaattaagtatcgggtcccatataatttaatataatagcttttaggtagtatcgctagtcaatcgtaacgcgacatgtcgcaaaggtgctgggaaccactagtgcctaataacacaatgctcatttaataagtacagcactatttaaagtatatatattttttaaaagaaaaatataaaaggtattatctacttgtcctcaaaagtgccacctagtatggctctactctcatgacaaagagaaattgtaggagattaattttctcacatgccgcatcattttttttttcattgatatttaaaagagtagtgtcaattataatcttctcttataacttctttcccaatttttgtctccaaaagagtggagtattttttttaaaattttttaaatagttcacagtatcgaaaacaaagttcttaataattcactttacacgcttgtttaaaatacttcaaagatatatatgttttagaagtatattaaaaatagtctcacgttactaatatgtataaataaaacatcatatataagataaatcagttagttatctcatagctaactagttttgagatagaaccccgtacgccttaaccacacaattctaaattcgagccgaactaaactctaacaagtatttaatccaaatccaaaaacctgtccaaaaagacgttgtaagataaatgagctagttatctcatagctaattagtttttgcgatagaacctcgtacaccttaaccacacaattttaaatttgagccatactaaactctaacaagtattcgatctaaatccaaaaacatgtcaaaaagacgttgcacattgctaaagtataaaaatataacaccgtactatatattagatacatgggctactcctttcattgccaattgattttgagatagaatctcatgcacctta

SEQ ID NO: 320407 - DNA, 2042 bp, Cannabis indica
attcatcaccattttgtaaggagtcaagcttgtgcaactcatatatcttaatacataaaatgtattaatatgacatgattatatattgttgaaacaaaagtttaaaatactctcattgtactttcttatgaaaccatgaagaaattttttttctatgcaaaatattgttgttaccattagaatattcttgccaggtcttctccaaatatttactgttagatgtgataatgtgaaggtacgatagagaaagagagaaaagaaaaacttaatctgtaagacagtttatcattgagaggtaacaaacttactctaaataagcttgtatttttggagaattttgaagtatgtaccactcggctttttcataaatgttatgatcaaaacagtttataactcctttggtcaagggaaaacattgagaattaaaaaaaagtaagagtgcgagagaaaacaggtgcatcttcattttgatctatcgcaccttttaaagtacattgaacaaaaggttacttcctcatctgcgacataaccttcggcgatggaccctttaggacgtgccttgtttcccacataattatttaaccttttcaggtacctctcaaaaggttcatccacctcataaataccaagccacctggcatagcttcttcaggcaaatgtaaaaccaaatgtatcattatataaaaaaaggcaggaggaaaatcaattccatcttgcgcaatatcaaaattagatccttttgagcatatttcatatcttttacatttaaagtttccgaacataattatttgaagaaactacatagttgagtaatagtagttgcggtattatttggtagaaatttacaaacactgacagaaagaactcatcgcatgatgacacgacaatcatgagactttaacgtaagcatatttgactcatttgcaaaaactttatagtttaaatttgaacaaaagccatcgagaaacttgattattttaataaattgacaaattgttgattttttcacgattcaaaacataaagagcattcagtttcacaacttccgtctcatcttcataaatccacaacgattgcctgacacccatcttttttaaatcatgtcttgcattggtgcttagatttattattatataatatggtgtcaagaagattgacacacacattcttctcaacatgcatgacttctatgttgtgcttttaaagtgtttgtgctccaatactccagcttgtagaaaatacttttttttcctccaattacaatcttccgcaacttttctacatttcatgcccccaaaatcttgatgatatcctagaatttgtggttcgagagcattgacttgttcttatatctcctcacaattaaatcatcttagaggaggtcttctttcaacattttcatcaaatcgagtgtcccttcatatttcatgattacttggcaagaaccttctatgaccaacataagaggtcttcctgattccttgaatggaagttgtgtcttcattacaagtgggaaaagctttataaccttgaccactctatccagaaaagctactattaagcaagaaaatcattcattgtctacaaaagcactgcacacattgtaagtatcatgttggttgaattatctctggtgggtactctattattccacaactcctttaacttgtccaccaatggtcttaaacatatatccatgtctttacctgaagattttgtaccaggaataaggacagttagcataaaatacatgtctttcatacattaccaaggtgggaggttatagttagccaacaccaccggccacatactgtatgcaagactcatgttgccaaatgcattaaattcatcagcagctaatcctaattgaacatttcttggatcgcttgcaaactcaggatgctttgcatcgaagtcttttcaagcaacaccattaaccgggcgtcgcatcatcccatcatcttttgatttaccagtatgatgccatatcatgctcttcgctataattgtcaatttatataatcttttgagtcgaggtgtca

SEQ ID NO: 320408 - DNA, 745 bp, Cannabis indica
aagagttattctctcttctatcatggtatcagtagaataaagaaaccctagcctccatcttcttcaaccttcttccatggctccaaggacaaagaactccattgtcgccgcctccattaacgagccgtcaccgcctcccgccgccacctctactccagacttctcctccgtcaacgccgctgccaccgacgtcgtcgttccgcccccttcgcttccgcctgaaactgctccctcgttgtcggacacgatcggagctcatctttaaatgttcaatcctcccacttctggtgtgttcggctccagtcacattgccgaactccccacttgtggaatgatcgaacaatcttccacagctccgatcggttccagcttggccccgacgtcgttcttcacggcttcaccaccttacattctgcttccgccattctcaaccataaccgtgaccccgatggttcaacagacgactcccttttttttcggcaccaccactatccccgccaccaccttcggccaaccgatcccctttaccaccttcggccaactgatcccgaaccattcttttcttggtggtaatattcctaaccttggacctcaaggccatgtgccttttaatgataactctttgtttactgctaatcacgacttttctcgtgccgttcttgatcgaccttcccatgatgaatgtactccgtatcatctaggaactggatcacccaaacaatctcatcgcttcatttctcttgac

SEQ ID NO: 320409 - DNA, 992 bp, Cannabis indica
taaaataatttccaacacgaactgcccgtccaggttacaaaattctctccatgtgacaaccaaatggatgtcgcatcactttgtgcgaaaattggaataacatttgtctcaagtttgcgtgggaacttcctgcttacacgtggacttattcagccactaagctggttaaatggatgacacgtgtttgctcttcgtaccgtccttgatccgatgtgacgtctgaatgaagattctattgtctctttggtatcgagggcatttaatgttaccttaagatctatgcctcgattggagtactgattgatactatatatggatgttatcgtatgtacttcccaacatacgtgatgattatattttcttaggaggaattccaaaatttaaattttggattaccatattacccttctaactgcctatataataggtcaaaaattattttaaactcttttagccagttttattctaaaaaaaaattagtgcaacctttattttctctctgacatcttcgaagaactctatgaccgaagctcaatctttagcatctattcaagcacattcacaaacttctaagttgtgagtaagtcctatttcttcttttcatgcattttctttaaatacatgcattattattttgaactgctctgggaaatctaaattcttgaaactgttcttcgatgattcgagactagaaattttagggcttttgatttttgactttaatacacgccgagaacatataggctttcgaatttttagcttttcctcactattttgctaggaactatttaatattatccattcagggcttatgaagattttctaggttcttcgtcacttattaaagctcttgatttggaaatttcatgattggaatgaaatttcttcctttctttcttttaaattggcttggtcgaaatattagacgtgtttttccctttcaaaaaatttgtatttctatccagttcttacctctttgtcttccttctttt

SEQ ID NO: 320410 - DNA, 870 bp, Cannabis indica
tttttttttttttgaaagggaacaaccactttctaattgtttgacattaattaataaaaaagcaaaatgttcaaaaaacgtacttagatttttggttctagaatttctaattgagttcaaatctccaacttttataggagcattcgtcgattttaggttttagttttacaatatgattgtgttgaagaccttattaattttatttagaacgtcaaactaaaatattaattaaatacacttaacagctactaagctatgaatatatgatatgttttcataaatataagatatgttttcgtaggtaattgcatgaatatgtctccttttgtactaagttttttccttctttcatgtgttgtaccttttttaatattagtaagaactgtaattttacggctcacaatgttgctaagtgggcttttacccaccaagtttatggatcgatcccgatcaattctgtaccggtaaacattttatgtaacgaccaggaggtctagctttacttgttataatataatcctacccttgttttcaaagaaaaaaaggtaattgcatgaatatgatgtttaatgtgattttattgaaaaaataaaatttttgtttgtgtgtgtttgtcttacattgctgtacgtacacttagtggctattaagccttaactctataataaaattttagtaatttgataaattaaattttgtgtgattttataaaaagaaaatatatattaatttatttaattaaatgttatcaaataatgtatacttccattttaattacaattagagatagagcattgcaataaagcatcagtggtgcatagcaccttctcgacatgtcgcgttgcgattggctagcgatactctctaaaa

SEQ ID NO: 320411 - DNA, 998 bp, Cannabis indica
aaacaattcttttaaaacgtaaaaatataatttttttacaaaaaaaaataaaatagtgtcttatgtaattatctcttaaatgtaaaaaaaaaataaataaataaataaacaaatgtaaactctaaaagtttcccaaactgccaaaaccaaaacaaatcctttaaaggggtgcatccattaattttaatagtattgccaaaaataccataagttttaatgctattgcatcacatttaatagtaatatatagatatatatatataaatatataaacaaaatatgattatggtggaagccatgtctcttcaaaaagaaagtaatatagggaaataaatcatgattggactaatttggtcgcgtaataataaaagctttcactaaaaggacaacgtaatatctattatctatcaataattcatgagatgagattgatgattattgttaattagattattaattaatcacaaagaagtatatactatcgtggcaagttttgatcctaacaccaattgaaatgcctccacaagttgatctgtctattattggtgcttgccttttaccaatcacatcaccatctttatcatcattatgtgaatgagctgtttctgtcatttcactaactagttagagagagagagagagaagaaagaaagtaggggaattaatcatttcattttataattaatatatctcaatctgagtaattttacttaattactattaattatgccattcttgttctcaattttatttgatttttctttagaaagatttacataaaaaaaaatacaatagctcatttttattgtaaaaatacatttatacgagtatatatatttttatacttaatttataaaaatacatttttctcttgcctcatactttctacacttatcatttggttaattaggacttttaacccctaaactttaacatgtaccaaatcaagctccctgaaattttatgtacgtaaaaattcttcctgaactattgagatt

SEQ ID NO: 320412 - DNA, 847 bp, Cannabis indica
ttttttttttcagaaccctaatttcgaatttcgaattttgaatcacaatgctctgataccatgtagaaaatagtgattcgaattgtgtgttgatttcatagaacaatacatatttatatacagagctaggagactaaatatctactaaatatctaactctcttacagctaatatacatctaatatctaacagtggtaaagaaaactgctatgcttaaccagtaaaattataagaattttgaagctcaatttaatacaagaatctacattgtttaccattaagaaaaggcaccaaagttgtctctttaattacattgataatgttaaaataaaaaacaacttgattgaccaaatcaaattaacatatctggtttgaaactgaacttcttcacctcctccgaatagaaaccaaactcttttcatacaaacaaacccaatcagaacatatatttctatctgaatcaacaacaacatttcttaactttcgggtactaaagttgcaagaagccaagcgttttatgcgcctatcatcttcaaagacttgcattagaatctcatcaatcttccaaaacgttattaagttatcgaaatacttttctagtggtccaatctgctcatatttggtccaagcataatcacctgactcgaattcatacaagttgaagacaaagaatatgctctcatcaagacttggggtatccataactaagggaaccaaagacagcacaatagaattataccacactgaaaggtgtagatcataactatcgaaccaatcttcaatggcaaataaaggttcaaaatctggcaaatctataatacgaaattcctcactactcatatcaaaa

SEQ ID NO: 320413 - DNA, 540 bp, Cannabis indica
tttgaaatgatgctaaacactgttagtttttattttttattttttaacaacagttcctattctgataattttttgtttttgcattaggaaaatgaaataatcaaacgtataactaaaatagcattgtcatgttctcataagtggcactttggcactttatgagtggttgcgatttttaatagttattaaaatatgtaaaattagatattaaattgaacaacttggtactaatgtgtaaacaaattttttgtttgagcgcaaatctatataatacaagtataagtataagggcttctccaatggaatactaaaatcttggagtttgtacacaaaataaaatgttatcctatatgtgtgggagtctataatgtcccactaaaactatagactacactaattttttttttaacattaaaatatatgtttatgattaaatttttatatttatataatgtgagataatttaagaaaataatataataataaagaatatatgttttagtgtaatttttagtattgtggttggaattggaaaaaaat

SEQ ID NO: 320414 - DNA, 1490 bp, Cannabis indica
attattaataactagcatcttataataatattaatgttcttgtttattattttcttaaatgaaaagggaaatgcaagttttggagatgatgatgaatctgaaaattatgagaagaagaacctaacaacaagatcatcaggagggtggaaatatgcatatcttttgctaggtataaatattagaaaatttcaatagtaaaccccttaaagggtcgtttcggtaaattatttatctattttggtatccagaaaattttattagtttatttttttttttcatgtagctatttagaatcacttataaattttcaaaaaatttcaaataatttacaatgttaaaaataagatttaaacagttacataccatgcgtataaaaaaaaaaaaaacaaatcgcgcgtacaacaaaatacataaatcttatttttggcattgtaaactactcgaaattttctgaaaatctacaggcaatcttaaataactataacatacatacagatagaaggtgatctaccgaaacaaccctttagggtatcttgtagacttaatacatatattatttcttttattttcttttattgcatatacattataataataaaaagagtatatatgtataaatatagtgaatcaaggattggcaacattagcattctttggagttggagtgaacttggtgttgttcttaacaagagtgattgggcaagagacagctgatgctgcaaacacagtgagcaaatggactggcactgtttacttgtgctcattacttggtgcttttcttagtgattcttattggggtcgctacttaacttgtgccatcttccaactcatccttcttttggtaatatataatatatatatatatatatatataatcattttttcaaaatagtaattacacaagatattatttttaagaaaaaaattatatttttacgttttaagaatttcttttacatttttacagtttttcgtagaaacaatatgaaaattgcataaaattaaaatgaaaataagatctaaataacatcaaaacaataacaaaaaataacatatagaaaacaacaaattaacaaaattacaacatgaaaggaccgtattttctgtaaataaaattaaaaaattgtaaaaatgtttaaaattccgtgaaactgtatttttgtaattttttgttgtttttgtgtatttgtgaaataattctttttttgttgttgttttaacttgctaaaaggttggtagtctttgacattagttgtttgagccctaggataaaaatgagtaattttttctttgaaagaaatatagtaagtttgagaaatactaaaaatatatatataaaaaaaaaattataatttttaattgagtggaccctagacacaggcttgatttgttttagcccatgattgttatttagatttaatacatttttacgagtacacatgtgttttaatttgaattaagtacttagaaatataataattttgagaaat

SEQ ID NO: 320415 - DNA, 805 bp, Cannabis indica
ttatatagaatagatatatatgatctaggcaaaagtttcatttaaacgtttcttttttctaacgaatttattgctttattccacagtgcataacaataatctgattgattacaatatataaatattaatatattaatatttacatatacatgagctaggtttagtttgtgtcccttcactcaagttttaattagctccacacgtcgtttcattatatgccaatccatgcagtctaattccaaatgagtggagaatacattttccatatatatataaaagaaaaaagaaaattccaagctataggcctttcactttaatttttattataatgaaaaatgttttgtgctccatgaccacatgaccacttacggtccacacaacgattgatatatagcaattcacaatcaagaaataaaattttttaaatattgcctctcctggaaattcaaaaatcaaatgattgtaagacaatccaatgtacttgtccaaagaaatcaaaaaggtttttggaaatattcaaacccttcttcatcttttcttacaattaataattaattaaaggtcagtcggattctgataccacaaatagctttcatctgtcctttcaccctataaatcctttagaaagaaaacattaatattggatgcgtattatctttctttcgatctatattatatatatatatatggtgttgttgttatccactcaagtggatatgaacaatataaaagctatacattacatctcttggtcctctttccaatgtatttgatattatgttctttgttctgttttttacgtacg

SEQ ID NO: 320416 - DNA, 1810 bp, Cannabis indica
atagataagcatattacatattattatagcacattgttatacccaattttcgaaaaattaaaaagtcaattttacgactttgaccaagacttataaatatacaaatgagttaagacatcattcttggacgggccccatgacacctactaaagaactacgaaaacatacaaccaggtgccgggactcacacatccaagtacgctcaaactagggtttttgggcctgtgtgagcgtttttaccttagagacctcaatccaacaagaaaaccaacaaggacttgactcatttgggcatgaaaagacatagatttgtgcataaagtcaaaatggcataaaacccccataaaatagagcctatgcgtccactgccatatggaaatggaagtgctctctagtttttggagaacactgccacaaggagatggcaatggtcgcctcctacaaagcatcaaagataaattgtccaaatgtgttctctcaacaccaatgagtgcaatacaagtgaaagaaaccatttctcaccaaggaacaagcctagtcgaccacaaacatctttgtggcacaacagtagttggccatgaaggagggggatgagatttcttgccaaaaatacattttcaccaataatcatgggaatttccccactacttctctgacatacacttttctcatgctctcatgggcagcttataccctcgcctgtcaccaccagtgaacaagtcttgtccacatacagctaccactcaacttgggcttggattcaaggcccaacaaagggaaaaaaccccctccaaataaggaaaaaatgaggaaattacattgtatactcactttacatgttttaattattacctttatttctatattatgagatatactcacttttataaatgatattctcattataccccttaagttaatgaaaattaggtgctagacttaagtggagggtgagggtatattgggcaacccactcacaaaagtgggtacattttaatgaaatataatatgaagatatttttgattaatagatacaaaaaagaggtatttctcaacttatcccaaaaaaatattttaaagataccacctttagagttatcttcagaagagggcccttcatcagtaaggcccataggattttttctataaataggagcactatttccattgtaaaaagggatgggagaatgaaagattaagcaaaaatgctatcaaataatactctaagccttctgccattattgtaagcttcaacattattacaagtgactcgtagactaggattcatcaacacttgaactacataaaaatttcactctctaaactcattttattgctcttaatcatatgtttaattggttgatagtattaatataattattaccaatttttagagtatattgattattgtttttttgttagtagtattagaagtcttcgtgattttatttttgtatatatatgaaattgatcaaatgaatgttataatgttgaaatgtgagtaggtggaagtttaaatttttgtaaataactaatgtactccttattgtggtcccaatgtgggtacttcaaattcaattatgtgactttatatatacctattaggagagtggaatataatcaatatctatatatctatatatttatataatgttgttgtttggacagatgatgtggcaacatatatgagctctccttgttgtcgagtgaatttcgcaacaccaaaaagtactatttaattgatataaaagataatttttagggaaatgacaagtgcaagtattcaacctagaatggcgagtactcgact

SEQ ID NO: 320417 - DNA, 2585 bp, Cannabis indica
gtgtgcctaattattctttacgacatttgttagtttgggaatcccgcagaggaggtttgatgggacattttggagttgctaagaccatagttgtgttacaaaaacacttctttggccccacatgaaaagagatgtttagcgaatttgtggtagatgtgccacttgtaggcaagctaaattgagggttcagccaaatggcctttacacacccctacctattcctagttcaccatgggttgatattttgatggattttgtgttgggtttacctagaagtaagtgtgggtcggattcaatcattgtggtgctagaccgattttctaagatggctcagtttatcccttttcataaaactaatgatgcttcttatgttgcaaatttgttttaagggagattgtgagattacatggtctgcctaggaccattgtatcagacagggatgctaagttcttattgtggagaaaacttgcaacaaaactattgttttctactacttgtcatcctcaactgatggtcaaacagaagtagttaatagaactttatccacctcattgagggctatcataagtaaaaatattaagacgggaagattgtataccatatgttgatttttcttagagtcgtcccaagcaacctgccactaaattttcaccatttgaaattgtttatggttttaatccattgactcctttggatttatcacctttacctgtttctgagcatttgaatttaggtggcaaaaagaaggcaaaatttgtgaagcaaatccaagagagggcacaagtcaacatagagagaaggaccgagcaatacattaagcaagctaacaagggtcgtcacagcaagtttttgagcgaggggattcggtatggttacacatgaggaaagaacggttcccatcccaaagacgttccaaattgcttcctcgaggagatggtcagtttcaagtgcttgaaaggatcaatggcaatgcctaccgactcgatttacctggtgagtataatattagtgcaactttaaatgattctgatttgagcccttatatgcaggtgacgatttgaggacaaatccttcttaagtggggggaatgatgaggacactaagactaaagatccaagtcaagtttcagttggtccggagggcgcaagcaaatagattcaaagaggaccttgacaaccttgttcataaagttctaaaacagaaggtgattgtggtcaacactgaaggagaataaagatttgtacttctcatcaaagtagactcaatttaggagcttgaacacatttttgatcatatttattggattttagaatctttcctttttagtcatgtttttctttattagtctttggtttttatttggaaagtctttctatttgtgagtgttagggttttcattaggaggacaaaaaggtcttttttctttaatgtaatttcggcttaaaaggccttgaaaactctttggaaagacaaattttgatgaataaaaatttgagaggttatcttcctgagttcttgaagagactattcgaacttatccagggtattccttatggcattcaatctcacttatcaaacggaattccaccacagtttgtggcgtctttctcataccaagatttgtgcttaactaagcattgggttgcgattcaacatcccaaagtcgtgagttcttagtggctaccatatgtagtgttaaatttcaccatgatcgttggtgtggttcgtatcatgttgtatcttttaaattttgaattcctattcctttttcaatatggaattcgaaaatcatgtttaaaaaagaagagaaaagataattctctttagcttataatttatgttttccttttgaacattaaattcaaaagtctcataattgctttaggacttaaatacttggatcactataaataagagagctcttattcaatttctctccaattctttgttcactgcttcacgcctattactttgtgagcttgattgattttatcttcatcagttctttgagtgttcttcaatttcttggatagaaaattttttcgattttttttgctttatttttccaaaaaattctcttttcttcttcttttgttgagttcaatttaaggatttgataactaattggaaatccttaaactgctttgtccaaacggttcccaaaatccatgttttagttctttgtctcgattccataagaatgtggtgcttacttgcctttacacctatggttcattttgattgcggattactttggagattacccctaccaaataaatcctaatggctaaagaattctatcaacctccttcatcttttactgcttaaggaattggtttgttccaactcctcatgaaatcaacttcgtttgtgatctaaaaagaagtcacactctaaaagaggaaggattctaccacttttgtaaattcagtttgtacattgagaatttgaccaagagttattggggcctttatcatcaagaatatttttatactctggtccttccatcaagacacatcacttttcagaacgttggacctttaaaaagacctactttgtttgattaacatgaagaaaagagttga

SEQ ID NO: 320418 - DNA, 1124 bp, Cannabis indica
attgccattagatcagtcttgccaaaaaatgttcgagagtgtttgacacatgtttgcattttctttaataagttgtgtgggaatgaattagaactggataagttagatgcattacatgaacatgtagtcaaaatattgtacaaccttgaaaagttcttttcgccatcttttttcgacatcatgatacatttaatggttcatctagtgagagaagcaaggttgtgtgggccggtttgggcgagatggatgtatccatttgaaagaaatatgaaggtacttaaaatttatgtgcgtaaccactatcggctagaagcatctatggttgagtgctacatatctgaaaaggatgtagaattttgttcagagtacatggccagagttgaggcaataggaattagcaaaccaagaactgacccagatgaggttgatagaggattaagggggaaagggacaatggtgacagtgtccaagcttgaactagatcaaactcaattagtcgtgatgaacaacaatgcaaaggttcggccatatataacataagtagcttttcctttgattaacatttcttaagtcacgatgaacaataactaattttttgagattctgcatcagaaaacagttcaccatttctggataaatggtggaacatttttctataaaaattccaaaaaacctaatttcaaactcaattttatcccaaatcaaatgcaactctccataacacctaattacaacatatagaacatatttcaagcatacctagcagctaaaactcaaagaatagaaaaatgtcattattgagccaagtttgagttcttgaactcaaacttgctcaactcccttatcagccataaaacccattcaaaatagcttcatacagttctaatcaaacccagaaatcaatcccaaagcaccccaagctcaggcagaacctaattccaaaatttgcatactcaaactaacacttttcttccaaaatcgaaaagaaaggtgctctagggttttcctttggtattgctaaccaaaactccttcaattgttgctgaatttccctgaaaactagttttgaattgttctgttcttgttggttctagaagagccgagatatagagagagagagagag

SEQ ID NO: 320419 - DNA, 1330 bp, Cannabis indica
atatctatagtattgatcattctcaacatatataaatatatataaaaaaaatatactcttgattatatatatatatatggctataataaggatgtatattcatatataagacttgaaagctctatatgatgagtttgagtttataaggcattatattatatcccaaatatatgtataaattaatatatacaatgttgatttttctcaaggattacccaataattaacaagcttgacccttcatttattgttagtattaatttctctatgagaactcttatctcttatatatattatatatattattaatataagacaaaacaataaggtactatactattcatttggagaggtatatatatcaagaattcaaattgaaccttattttctagagaactctatataatatacatttatatatatatgcaaaaacattataatttaaatatcaatcttttgcatgcaattaattcgattactttagatcgatcaaattctatatatacatgaatataattatatatttatattatatatgtatatatatatctacatgtatataattaaatatataaatatatatatataatagctagctatagttatgtacttcacatatatttaatttttttttttgaaagccatgttaattaatttagatgtacatatttctcaaattcatgaaataattaaaaaaaacagtagtttattaatagaaaactactcatattatatttacatttttcttttcataaatgaaaacaaagattttgattttgaaaagtattcatttggcagcaagtattttggatctatatactacacagtacacaaatataaatataaattaattaatttttattcttaaaactttaattttctttattaatatatatggactccaattcataaaagtattagtagaaaaaatctatcttctgtacttgctgtgtatatatattgaattggatatgattttaatttttaaaagttaattattttctcctgaaaaagattggacaagtagtatttaagtagtttgtattatatatgtttgtgtgtagaaaataattaaaaaaaaaagaaggatatatatatatagtcccaccaacacaataaatataagagccacacacagacacagagagttccaataaagccagaatctgtaactgtaaccgatcaaatttgctcactccttttgataagatagaatagaactcatctctctcaataattatccatattattatgtcacctctattttgtttatatatatatatatgtctattctatataaagtgtgtttatataattgaaattcttgattt

SEQ ID NO: 320420 - DNA, 1156 bp, Cannabis indica
aaataataaaaaaaaaaaaaaatgtaagaattaaacaaagaaattgcaatgtaattttcaaaataaataaacgaaaagataacgggtttcgctttaataaactcgagttgtgattgatgatgcaattgtttttcaaaaactatttaaactattttttcttcttaaattagaagaaatactttaattactgtttatgaaagtttttacattttgttttgtggtttagtttgaatgctttgtccacaaagataaatgtggctaaatgacaactctaaatggagttgcaaaacattatgtgtttttaaaaactaaaaaagtggaatttatataaaaaatgttagtggtagaattttttatatgaaatgtttacataaaaggataaattttaataacttatataaatgtaaaatttatactttaaattgtaacgatgagaattgaagtatgcttctagcactttttaataattttttaaaattacatatagaaaattaatttattaattatgaataaaacttcaaatgtaaaatttattattttttatgaataatataaaattatataatatacttataatttttttatgtggttagcagtattaatcataatataataaaaatcataagcccactttacatcatgaagttatttataataattaaaagctataaaaatataaatttatttaaatgagttagatattaataataattaataaaatatatgttattatagactacacattaaaatttaaaaaatattttaaaaaaaaaaaattaaaaaattaaaaaattataaatagttaattgagaaaaattaaaaatagcaaaagaaatgtttttttatatataaacatagataataaaatacatattattatagagtataggtcacgtgaatttaaaaaatatatatataactaattaattgggtaagattgatttaatcaattattctagaagattgaatataatatttggaccaattaaaatggcaaaaggaagatagtgtaaaatatacttacaaaattattacacggtaaataggagtagaggttggatgctaggttttgtttagctattgatttgtattattttggttggttgattaatgaaatttctcttcttgtgtttctagggttccactctctctctct

SEQ ID NO: 320421 - DNA, 993 bp, Cannabis indica
aagctttccaaggtgttggggagttctatcgctatgcagtcccttctgctgtaatggtttggtaattttttcttttttcaaattagtctttttaggtatattgtatcttcatttggatatttttttacttatttacgttgcacacttgtgaaatatagtcttaaatggtggtcatgtgagctgcttattctgctatctggtcttctaccaaatcctaacctggagacttcagttctatctatatggtattttctgaattcagtatatatggtttacgttgtttaaggaaaataatgtaaggataaaattggcaaatttgaagtatcaggggcaagggctagctgatacaatattattaggtgcatggtcataacctgtttaggtctatgagttttgagtaaatgaaatgagcctttctaattcttagtcatattatttactaggttgaaaaagccttaaatttataaactaagtttttcatggtgcccaaattttaatgtactataaccaatctgttaaagaaattgtgtgtcatgccttgtcaacagtttctagttcccacattatgcataaataccaacttatttttatgtcacgtaaaagttgttttaatttttataataaattatatattacaaatttaattacttatattgtttcttttggatctttctaatcagcctaactatctcaacattgcacttcaccatatcatacggtgttggagccactacaaggtttgcctcttaagtctcttaatgcattttaatttttgttcattttacttatgttcacataggagtgtgcataaatcatccaatctaatgaaaaccgatcgatccaattacaaccaatcgctaaacatttgatatccatttgtgatttgatcggattggatgttatttttgaacatccaatttgattggataggatgttggatggggtgtctgaaaatccaatacatccaacatccaatcgaactaattaatattt

SEQ ID NO: 320422 - DNA, 1065 bp, Cannabis indica
atcatgatcatgatcatgattatctacttattaaaggaaaccaacgttcatgaagagaagattggtaagagatcatgaaaaagagaaacacaagcaaaaccgcaactccccagggcgatccaccggctctatgaagagaatcttgttcggggaatggtataaggaagggaattccgccgctagaaaggcaatgaaccgcgaggagaagaagaagaggaacaatcatcaagaagagcttgacttgaaatatcaaatcttcaaacttgttttcatagtttatgtaccatgaaaaccctagcatgaagaaaaggatgagaatgaaagagcatagtggaagagggattgagaagtaatcccaataagaggtgtagtagtaattgttgttgttattgttgtaattactagacatggttttattttgagggttttgaataataaattggtgtttatataaatatatatgagagaactttttttttgttgagtgttttttctagaatgaacttggtttttctttgaggaaaaaagatttggtacgcatatgggattatatagggggccacaagtggaatattaattagtttaattataattattatttgtttaattggggtttaagttgagtagcattggtttaacttttgttcttattgtgatacgtgtaaaagtgctctattattatttgactctataaagactttgagtaaattaaccaaaagaaaaaggatttagataaagaagttctttctttttaattatatatttcactttttttttctctatttctaatcatttaaattagagggttttgttttatttatttttacactacttaaagaattaatttttttaaatattttttacgaaattttacaataaaaaatcacataacaaccaacaaagtaacataaattgcaacaaaaatacacataataactcatataaaaattattggaacaattcaaaccgttaatttaaaaaaatacttaaaaagtaatatatgagattaattctcttttaaattaggataaataccattttggactatgtattttgtaaaaatta

SEQ ID NO: 320423 - DNA, 2314 bp, Cannabis indica
aattgctattttttacattaaaaatatcaattgtatataaagtagccttctatccaaaaataaacttaggactaagcaaattatattttaatttagaggttataactaaattgagttacactacaagtaaaaaaaataaaagcacaaaagatatatatcaatgtaacaacaataacaataaataatctttaacagtaaataataataaaattattttttagtatatatataatatttatatatgtattataaattgggataaaattattagttgtacataaaaaaatttatgaactatatacatatattttattaaaataaaattattcttatatagaggtatgttttctaaataaggaagtatatttccttaatacaggacataaaaaataaaagacaaattacagtttagatgttgttcgtaataataactgtttaaacaaaattagaggttactcttgaataatgtattcttaaaaaaaaaaaaattgctatataataatttgaaattacaatctcggaaaacacatatcatgaaattatttattataattatatagtgaatgttttatgatttttttaaaactctgaataatttactaacattcaaaacttatgtttttgtaatgacaacaaagattataattctttgaaaaaatgataataataatagtaatgagtttttttatttttacacttcaaaaaagttttttttttgtatttttatggaattttacataaaaactcctattgcaactagcgctgcaacctaaattgtaacaaaaaatcgtatagaaacccttattgcaactacgctgcaactactttaaaaactcaaaccgtaaattaaaaaataataaaaaaaataatatatgaagtaatttccctaataataatgcaacaagaagaaaattattatttcattttgagataattattaatatggcaattattaaaaggaaattttgacaaaccatgcctatgatctcttaatatacgacccattttaaaattatatacaatacttctaatattttttaactttaaaatacctctaatattttcaaacaaattttctctctccaactctttaactccttcctctctcaaactcactttttctcactccagcgacacacccactaccccctctcctctcaaactcactttttctcactccagcgacacacccactaccccctctcctctcaaactcactctatcttccacttagacaaactcacccacaccctccaccgtctatcgcattctctcactatctatctctccattgctcctcggttcctcatgacaacccacgacaaccattacaaaattttttacttttagtcacaaatttcacaataaaatttttgactaaaagttaaaaagctatgactaactataaatcatcattcctatgttgtggctaaaatatctatggctaaaggtattagtcacaaaaattacaatttgttgtgactaaatatgtttttaacgacaatacattttgagtctaaaactaaattagtgacaacttgtatctaaacactatgttttagtcacaagtaactttttattgtgattaatagtcacatttagtcctcaaattgtcccaatactttcggtattgcttggaaactttaagaacaaatgtcagatggatgttaccactccaagatccattcaaaatggtcttcccaggatggcattgtaagtaaaagggaaatttactataacaaacgtgttgcacttaaaagatgatattgcattgcttccgggaacttcccaatttattataatcaaaaattgtatttttcccatggagatcaatgtgtctctgttaaaaccttacagttgaatcgggcatgataatagattggcttttaccagaccaatggcttggaaggctattttaaaaatgatattcaaagagcttccattatctacgaggattctgtaaactgttttatttgctatttgagcctctataactagagggtcattgtgagggaatggtacatgcctagcatcatcttttgtaaaggaattggcaaattcatcatccttggaggatgggcaggtgactatagcaggtggcaagcttcgttttggctcaactcattcaactgcctcttttgcgcatttcaggtgcttttggcaatatgaggttcaccaaaaatagttactacatgaccatctaagattggcgaagcagctcctagagggtacagatttccaggatcgggggctacaattattgaagttaccaaatcgttatgtgtcccttaaagggcttgtgcatttggagctt

SEQ ID NO: 320424 - DNA, 557 bp, Cannabis indica
acaacatcataaatcacaaaatataaaaaataccaaaatcaccaaagctgtttcctgaaccaccaccatagtcaccgcgaatgtttccttagtcaacaagaagataaaattagatctaaaactatgtagagtcgagacgactgaagagaaaaagaaagtgtgagagagagagcatgcaagatctacaccactgaagctgaaaaccacataagatgagagagattaagcgtttgagattgaaaaagagaaagaaatgcgagaacgtacataggcactgtcaatcagggtgtggctgctactagcactactacaaaaaatattattttcgatgatcctaaaaacatattttttgggagactgtcgctaaaaaattaagtgagtgtttaaaactgttaggaaaaattgggtactcctgacggttttaaacactcgtgatgtcccaacagtttttaagcgtgccttaaaaattgcaatttttttaaagcagaattgccgacgattaaaaattgtcgcctatagtgtaatatctcaaaaatataattatgaataattaggat

SEQ ID NO: 320425 - DNA, 1719 bp, Cannabis indica
gaggaggaggaggaggaggaatgggtggaattataggaggtggttgtggaagtagatggtgaagtttgctgtgattcgtctaaacgaatttccaagtctaaggaataagcagtggatgaggatgaggatgatgttgaaggaggtggtattggccaggctgagtaaatatcaggggaagccattgttaattaagtgagaagaagaaaagctaagaagattatgtatatatataaataaataaataaataggaggaaaggaatgtttaaggaaagaaaatagatggaatgggaaaagaatcagaaagagaaaaccccacaaattgaaattggtaagctatggtaaatgggattatctcatctcatttaattaacatttaagtaagtcagaaaggaaggaagaccaaagccagaaactttctctcttaattatcatcagaaggaagcaatgaaattgaaaaggaagaaagaagaaaatagatgtgtgtgtgtgtgtgtggctaaaaaggcagttacttatttggaaaacttgtcaaattagtataaagtcagaaaactcaacacaacacaacagcacagcaagagaacaagagaacaatagatgaggtgttgtaattgttcagtcttgattttcacccaactcttttttttttttaacttaattacacaaccactctcagtctcatgcactcaccactcaccactattattattattattattgttgtttgttgcaacatttaataatatcatgtcagattcattcatgccacaatacaaacacaacacaattaaaattaaattaatctttattgaaattatatggttattattattattattataaatagagagagggaggtaggattggataatataatatcattaaagtatgagttatgagttatgagcatgaagatgaacgatgaaagataaataaaatctcaaaaagaagccaaaaacaacatatggaggtgggtgggaccatgactcgtgccagtgtatccaatgggagaaggacacgtggagataaagtgtgttggggcggctgaagaaacaaaaaagatgtgatcatgtctcgtgggctccacctcaccaccccaccgtccattcctttttcaaaaaccaaattttgttttggattactaccaccattttttattttcaactaaatatcctttttttttctcatttcaacaaataataatttcaactaaatatccttctttctcatttcaacaaataataataatgaaagtaaaaaatccttcttttctttctgctcataaatttaaagcacgaccaattatgtcatatcctaaaaacttaattagaaaaatgccatatttctaaaaaaaaattatgataaaggacagaccaagtcaattgaggcttcgaataatcttcagttcaccatattgcaacctctaaacgatctttactgggaaatttatatacctataattttttcacatatatatgttaggattgatttagttaattctctaagaaaaatagtatatatcgtactttattaaaaaagaggtaagtttgtgtattgagtagataaaatgagggaaatttatatagtatactaacttttgttatttttctacaaaaatactggcagacggtattttttacttttttactgtgtttttttaagagtttcatactgcagtatactgtgttaagttttcactggtgttctactggtatttt

SEQ ID NO: 320426 - DNA, 1330 bp, Cannabis indica
ggttggtcagagtgttgatagaccctccctaatctatcaactagtcttccttggagtagatctctgatgagatcttggcctgttccattggttttctgattgaatctccttatcaggttactagcttctctgttgcggcgatgcagctctgtctagtgagatcgaaggatatactcttggtaatccatctcaaaaattcgcgtctctgctgagaaaacacatcacaattagcagcgcttgtttcttcatttaggtcggcttgacaaatagcctttctaagtttggctaactcgagatcttctcccaagtctacatggggcttgccaatagtaggctcaaaaattcctggtcccgtctctcaagcatagtaccagggatgaggttcggtttatgttctatgggatgttcccaaaagggtccttcttcaatgggaggcacctatggagggtcctcccttgaaggcaaattccaattgttcagatccaccgggatgtttttgtctttctggccagctgtagtggccagatttgtggtgcatgccgagtggcaagattcacaacatctacagtgttcatgggaattaatgtcatggctggaacatggacatcaggatctacagtcagggggtcttgaggaagactgatgatgcaaatggtgcaaccggagttcttctcgtgttaaccatggcattggatcagagatgatatcaactcgctctcaatgaaagcaccaaactgttgacctcaaaaattggccaaccatcagcgggatagtattaaattgatgcttgccacacgttacacaattagaactcaaaagtacatgaacataaggattttataaaagtttgaccccctcagtttgcgggtaataaccttctcctcgtttggttgtattgatgctgagagataatactatttagatcactataggtggaatcttatatagctctctttaaggttacagagtacgaatcagtaggcaaatctctaatgagagagagagagagggccttagaggtgtgtgagagagaggaagagagaaagcccttaaggcgtttataagagagagtgagaagaggattaggattttagacttagagctttatggcttaaatgagacttagggttttaggattgagttaaagatattttttataagagagattaaaccctaattagataaaataagagatatttacatgttaaattaataaatataaatgacaaaatcgccccttgaaagtagatattttcgtagcatcatagtgggctatcaaggcccaactcgtactgtaacaccctagctaacataggcgtattacgtgatt

SEQ ID NO: 320427 - DNA, 666 bp, Cannabis indica
caatcctctcttttgtatatgttgaactcatctatttcacatatatataaaattgttcatatgcttataaatttaccgtaaatgtgattttagatagtgtgttttacaaaagttatagattggattttctattttgttaaatgataaaataaaccttgtattttccaaaatggtaaaaataagactctaagcttaattttcgacaacttatttttaatataaccaatttgaatacaattcctaacacgaacaaatacagaaaatataaacagttttgtcgaaacacatttagatcgaattttaattaaattttattttgacaaaaaattagttcagggtcctattgttaccattttagaaaatataatgtccattttgtcatttaacaaaataaaaagtctaattggtaattttttgctaaacacatggtctaaaatagtatttactaataaatttattttatctaacacttaattggtactattttttgcaatatggtgaattctaatctaatacgtcatgtaaattttttgcatatatgtaatgactgcaaaattagctataaaaaatttatgaattaattaatcttatactaatttatgaaataatatgtgtattttataaaaaaaaaaaaaaaaaacgtacatattattagtgtaatattcc

SEQ ID NO: 320428 - DNA, 1243 bp, Cannabis indica
ttcaactttaaaatctagtagtaatcaccaccacaattcaagagtctttaatcttcaagtatcgaaatccataaaacttgggttctaaaataaaaatatcataaattataagtaaatagatattttaaaagaaaaaatagtaaacaaacaaataaacaaatgctaacttctgcttcatcatcttcaatatcattaaataatgtactatatgaagcctcattttgtgatgcatctaagaaataaacaatattggtattaattaattttttttaatataaaagaaattaaataataagagtaagttagaataaacatacctagtatctcatcccataaccaatcttgtgtacatactaatgtctctaacatgttcagatgaagcctattacgataagaagtcacttgtcttccactaatttcgaaagcagactcagaagcaattgtagacactgggatatccaaaatatctctagcaacttgttataatattgaatatttaataccatttgtcttccaccaagctaaaatatcaaactctccactcctaggaaaaattgcttccttcaagtataagtctaactcaaacttgtaagtttccacatttgaagtactactaacaaataagtcaaaatcaactaaatcatctgcacatccatcattatctctaccaactccagaaacattgaataaagaatcaagaagattttcttttccatcatttagtttatattgttttactaaatcatagcacatcattctaattcactcaactttattttgatattcaccaacataaattttggaaagtaatactcaatcaattttatcttgaatcttggatccaaaatagttgctatggctaatatgccatgaatggaagtccaatattgctcaaatttatctatcatatttgatgccataatcttaatatcatcatagaaatatttaagacactccttaagcaacaaccaaatttcacaaatcttagagaagaaatgattggcagtaggatatttagttctaaaaaatatcacagtgacattgtaaaacaatttcgttttttacacataacttttaccaaaagccaatctcgctcactaggttcttttttgtattttttctcagtatgtataaggcaactaaatgttgggttttactccatttcaatgtaatctattttattcaacatcaataaagaaaccaaagtatttttcattcatttgtgtatgttttggttcacctt

SEQ ID NO: 320429 - DNA, 649 bp, Cannabis indica
agagagttaaatataactgaaacaataattgaaagagtttagacactaaaaactcattttcttttcttcccaactaactcaatggttgtatacgaatttatacgattttgataactaaattatgagcattgttattagaggttttttaggttatctagaggtaaaactttataaataaggatagtttatatataattataaaattaaattttgtgaaatttaatatttaattagaatacactagagataaatagaaactgagatatatatgaggtaggttcatcgtgcattttcttcaatgtgtacattaatcctaattaatctatatctcttgtgttttttattcccctttctcaccaacttggaaaacgttacggaccctgacttcagcattaatccactgtacaagtataggcactaggcacacaattggtaagctagctatatagcttattagcttcataagttaaaattatagtaattaataaaccaatcttccccctacttcccacttatcaaaatagttggtgatatagaataatattaatgtttagtctaatattacaaaaaactggaaactcttattttattgataattttttagtcacaacataatttttttgtgactaaatgtaatttttagtcaaaa

SEQ ID NO: 320430 - DNA, 619 bp, Cannabis indica
attctaaccccataaaacactaaatatggaattaaactaataaaaggggaattaataagtgaaacaaaaaattaacgaaaacaaacagaaatgttccaacacataagaggagactcgtacgttcaagatgacgaaaacgaacggaaacaaaccaatctcagacggtggtcgtcgttgatcggcggtggcggccgatgtgaaacgaacggaagggtcaaataatatattagttattaaacaagcaacacattttttaactttacttttatattttacttttttttgggtaaggatctatatttcacatttaatagaattcaaatgtaattattttcccattcacgaaaatttctcatattcccctactccctttcatcttcgtctgtagaaatggaaaccagtagaaagaggtaaaaactagagaaaactattgtaagaaacaaaggaaatgcaatggaatcattgactctcttaatgagagtttctattatttatagagatagttcaacattacaaagaaaacaagaattgaaactaactaactttgacagttacaactgaaagtgaactaatctcaactaacaaataacagaatacacattattggttaacatccccc

SEQ ID NO: 320431 - DNA, 831 bp, Cannabis indica
aaaaataaacacgacacaattaataaacaaagaaaaagataaagataaacaattttttatatatattatttattttcaaaaaattactaaaaaaataaacataacacatgaagagtgatataataaacttatgtgaatattattattttgtttaataatatacttacacctaaataaaattagtatacgtgcctcgcacgtaatttttgctagtatatatatatatatataggttacttgtgttggatgtgtttctttcttatcatatggtcaatttctattatgtattggtcggtcttagatcatgtttcttctattattttcttctgtcttttccttcttcacaagatgaggtgggttcctttgatgcgtgcccataaaaacttcttcaaaactattttatttttctaatatttttttaaaaagaaagaaaataaaaatgattaattaattaattaagttgccctccaccataaatagaggtccacaatacaaaaatataccttcctggcttcgttgtttctcttacaaccaaatgatcagctaccctatatatatatataattatatgtcatgatcaataattcaattatatctttcgcttttgtatttcaatgagaaaaaaaaaataaaagaaaagaaataaatatgcatgtttatgtttatacctttatataattttagtgcttttcgaaccaattcattactaggttatagctagcaaaacgactattaatcatgtataagaaagagttttttcataaatgtacaacaaaaataacataattacaaaaaatgtgtaaaaaaaaattattttaaaaacttatacat

SEQ ID NO: 320432 - DNA, 921 bp, Cannabis indica
gcccgattacccacatcaatcggtttcttttgcagatcaagcttatgtgggattaatgctcaaagaatcaatggctggaggtatttcgatccttatattcatatagtgtatatgtttatttattccgcatgtcatatacacatacatatattttatattatacatataaatgtctaacataacagtcttgataactaactgtcagtgtcactcatattctcattttctaatattccaataaggtaattaagtaacactacaatatttatagttattagaggcgaaacattctaccgctccaatagttaataagataactattacattaaatgataaattgaaataaataataaattttaaatgaaaaaaataattaataatttgaaatattcaatataattataaatggtaataataatcaaaataacttaaataagtatgtagattttttttttcaaatttatggtttaggtttctaaagtggttgcaacgctagttgcaatagaaatttttatacgattttttgttacgatttaagttaacgctatagttgcgatagggtttctacgtagaattctgtaaaactgtaaaaaaaacttattttaaagtataaaaatgaaaaaactccaataattaatttgatttaatatagaattacgagtctcaattgtaagtattaaatgaaacgataaaactcctctttaaaaacaataaaaaacaaaactataaaatcataaaaaatcataaaacatacctataaagacaattaaataataaataattaagaaaccaaaaaataaactaattattgccaataaagtatatttaatgttattttatatattaaaattaaggggaattatctcatatactattttttttttcaaatttacgtcactaaatgtcacttttaccagcaca

SEQ ID NO: 320433 - DNA, 683 bp, Cannabis indica
ttgtatgtagaaaaaaaaattacataaaaatagaacatacatttgatcttttgagttttaaaatataattaattgtattatatgtattagatttttaaattattatttttttttacattttaattgtatatataatttattaatttttttataaatatgtgtggatttgattggatcggttacttttacatgtcaatcaacatccaatccgcacaagtgcggattttgaatttttcaatccaatccaatctgcacaagtgcggatatccgcactttgtgaattggattggattggatcgtgcagattgaattggatcgggtattttatgaacacccctagattgtgcaatcaaagatgttacttatttaactcccaatgttgatttcattaaatatcgagcgaacaaggttgcagtaaggcaaaatctaatcctaaaagaatatttatgtgaggaaagaaacttaaattattatgggagtctatttgcatttgatgatgggtctaggaatttagaccagttcccttggatattagtggttagtggctttcggaatgtgtttttggaggatattatgggattaccaccttgataggaaaatcgagttttactaggggtgtacatcaaaccgcccgcaccgcaccgcactgcaaaaaaaatgcagtttgaaattcttcgcggtgc

SEQ ID NO: 320434 - DNA, 1734 bp, Cannabis indica
ttaatttgtatttatggttattatatataatttatacttaatttaattatattaataacaaaataatatatatataaattatgctaaaatacaaaattggaagttgaaaaaaaaaatcataggaagatcctatggcgtcggttatttcataataaccgactccatatgtgtcctattgcgtcggttatatgaaacaaccgacgctataggaccactatgacgtcggttattatgggggtcctatggcgttcgttattatgaaataaccgacgccatagaggtcctatggcgtcggttgtttttaaccctttagcgtcactcggaacagcgtcggtagcgaatttcgccaataccaacgctgaaagcccttaaaaaccgcctctaaagcccaattttgtagcagtggaggtttaggcattaatgaggcttagtacatgagtcaatttatgaccttaagaggctttttataatgtttttacaatagtgtttgcaataaacccttataactctgcccgcttggtttctcttgaagaagaagaaagcaatttggcagagccttagctattttgttttcaatccccctttgtatggaaatcaaggggtatttataagctaaagtgcgggtatggacatgtctatgatccacctaggattttcttgcaataagctcactattgagataaaatatatgtactaatcttactgtttggcccccaagaaggtttttgctcatgcatagaagcagttgggcaatatgggaccacgattggtacaggacacgtattgccaaaaggtttcaccttaaaaagaagacgcatagacaaatcgtcaggcagaaaggtgtgctcaaaggtggggcgaatgcactaccatagtctgatgcaggagacaagatctgatcttgtgtcagacaaaaatataacaaatgctggggcgattcaggtctcttttcatggtagacgttcaacttcttttgggcgatcaatgttagtgacaggaacttcgagtagccttctgggtgtcgtttggacatacctaagcttaatcatcttcaaattttggagggatagtaaggctttcgaatcttagatggcaaggtgctgcaggacaaatctccacgtggcttttgagctcgatctattcccgtattcgcaagccttctccgtaacccgttctaattagggaaacttaattagtgaccgcttgaggttgtatttctcttttcatgccacgtgttccttgttaaaaaatacagataacaatattaattaattattactttatcatatttaattatgagatcattacaattatactacatattcaaatgtgttagtaaattcgatattgtttaaaattctcaaacagcaggaactcttataatttacgtattataagctaatgactcttaaacaatatgaatttaaatagtattattttagttacatgtaaatgatgaatgtacatcaattatttttcaaatggtttctaattaatatatgatattgaactcttgaataaaaagctacaactaaaaaaaaactctctcaattcttatttcaacaaaataaaattaaaaaacaaagaaagcacatgtggtacttatagacatatattctagtaatctctccccaattatcaaaacataaagggttaattagatactttaaatatgcaatatatatttatatctttatatattaaaagtgcctatttaacgtcaattcttggttt

SEQ ID NO: 320435 - DNA, 1822 bp, Cannabis indica
acaaccaaaaactaacaaatacagagcaaaacgattatggaggttagggagtttagccatcattttttcagtctaggagtttgaccgtgccaaacttcaaagttctgggagtttgaccgcaaattaccccaaataaaaatattttctaaaataatgtacatttttgtttcccaaagggcattgcaaaagtttttcaatagtagtgtgaccaatcttgtggcataactgacattgaggatttgcatttggtgtcggaaatatgggatagcctcttccagtacctaaagaacctctagggttaggagcaaagaaacttgtgaaaatttcttccaacactagagtaattagcctcgaggaagttaggatcataataagaaattacaaaagtgacatactctcacttggtaatcctttgaagatagctactacatgagctttggtgctaagaacttctccaaccgaagcaagaacatcatgttacttgactttcaacaggtaatcattcatagacatatttcttgagattttgcagtttggtttgaaattctaggatctttgcatagatttgcaaggtgaaatattttttgagagtagttcagatcttgtaactttgtagcccataatatggcaaattggacatttactcatcaaaggcttggttttgttccactatcaactattcctacaaacttatcatgtaatgaccgggtagtctaattctacgaatatattataactacgcttattatttaaaaaaaaataagacaaaactctttgacccatatgctcttcctatttaaaacccatatactaaactaaagggtcaaaattgtttctcttaaatgcccttagtatttaatttatttgaaaccctttaatctcttaaaatttctcaatcacaccaaaaattaacacgcattcattgaatttccaccttctttaccttctcactctatttaactctttaaaactctataagatagaacgaacaagaaagtagcaggtatttttgagacttttctgttttaaatttttcttgttttcctatattgttatttgaattcttcttatttttatttatttaagatttttactaatatgaactttgttatctaagtttacatgtaatttagagtagcttattgtttgtgataaatctcttcataattaattttaaatctgccatgaaaattcatgaataaaataaatcaccatttattttttcttagtgaagtctctttcatgaaaattgtgtttacctattacacaaagctaaatgattattttttggaatcagattttttattatcacagtaattattaaagttattgtttttgcttgtaaaggtcaatatgataatggataaaatttgtagattaatgtttctctatttgctatcctaaaatctcatgtgatgcatttaattatagttataaatttgattttaatgttgaatttctgtctacccaatgtggagatgaacatgatttatgctttgtttgctttattttctataacattcccaaaaactcattagaaacaacatgtgaagtagctccaattttaaggagtttgtagatactaactcatttattgtgtgaattaacctcttttttttttaaagctatttatcatttttttcagctcatcaccaattgcttattctttatcttttgtttttgaatgaattttattagggtaaataccattttggaccctctgttttgcaaaagttgccaattggaccctgtgttttgttaaatgacaaaatggaccctgtattttctaaaatagtacaaattggaccctgaattgattttt

SEQ ID NO: 320436 - DNA, 607 bp, Cannabis indica
gcgtctgagtaacggtttgcacgggtgcggtgagcaagcttacgattgagggtgaggagtgaggagttggatggcatctgagattgagttaaagcatttacacatagaaattagagaaagaatagaagctgttaatttcaggggatattgaaattttcaggggatactgagaagaacaaagggagtttcttttggtttggtttaaggaagaagagagtgggtcgtagagaaagaatagaagctgttaatttcaggggatattgaaattatgcctaacttgattttgaaattaactggagtttatttcgatttttagaagccaaacgatattcttagtgatgtacacatagaaatagtggtggtggaccgttcataaacaagtaagttgcagtttttttaagggcaccgttcatatacaagtacttgaactaggctagctataccattgtattagtggaggtatatataataataataagttacacataaggctggctaagcatgcaagagggcacgtgtgcaccacaactacccattcttccatatttttttttgaacccattcttccatatatttttttttgacaatgaactttcattgaatataa

SEQ ID NO: 320437 - DNA, 1895 bp, Cannabis indica
tatacattaaacataatcatgaaataaatcatgtgaaccatgcaacataaaatgcagtttctcatctttattaattagtaaatctgattatattgaaatgggttttatttagggcacaaaacccaacacaaccatctcggggtaggaattggccttttagtgaccgctgtcaacacaataagtaaaataagtaagtgactccaattttattaataaaaaaaaactcaaaaccaagctttcgagaaagagatggtacttacgtataatgcgaaacgctattgtgttgatgggagagagaccagtagtccagaagaagtcgtccttgaattcagtcttatttggtaacctcacaatgatcctctgatcacttgtgtgagtaccgaggtaataaaaacctcttgaacattgcttccttgcgaaaaaacttttacataataaaaatatacaattttgaggggagtaggacactcccaacccaaaatgtggtataggacctttaggcaggccaagattctgtaagaactctgaaactaaaaaggagcaattctgatataattacaaaactccttataatattccctcaaggggagtactgctccagccttgatgtgctcgaggctctaaccgccaattcctaacgaggcactagtgttagcttcaccacattcttctcgaattactctgtctagtggaaagcagctaaattcccttggagcgacggacctaatgtgacatccttgcttttgcttgataccacaagactttagaatattgccgacatagtctccaatagaccttactttggattcaatgagctctgcctcaaaagtgactgtaggatcttgggggtctttgatttacgagcctaggtggtcatgattttgaaatctaggtcacctggtgaaaaagcaatagtgactcgaggtaaaaacaagggtctcgctaaagggataaaagttacaattgaaattctggccaagctgcatctcgtagaaaatggcgattaccctcggtaatttcttgcaaaaactgtctataacgactgccagtttcagcttgataggtttctattaaatgatccctaagtttggtatcatttatctcaagtttggatttaggtttgtggattttgggttcaaatggaaaggctaattttttaggatattctatttctaggaaatccagggttggaatttaaaaaccagattgggacatatttgcaaaaaagaataatcccaatttctggaataaagtaaattcaacctaaaccagaaacctatgaatctaataaacttaaaatttttccttaaccctaaaattatccaacaaaacaaaaattaccaaaaaaatatccgaacaaaaatagataaagaagacaattaaacacaataatcagactgtaaatatcgaaaggaaaagtataaactactcattgttctgaggaagattttcaggcaaggaagaactttgtgattgagattgagatgaacgaatcaacgtgttttggaagtttctaaggttaaaaaagtaatttgatgaaacacgtaggaagaaagtcagtgacagtgagggcatgcaaggtgatgagaaatcagagatgatttttcgcagaagggcttgaaggtttgaaaggcaaaaatggagaaatgagtacttactttcaaattttataccctgggaataatcaccgttagatcaaaagaaattagatctaaaggatgggaacactacaaaattaaaaaagacgagacatttaatgctaatgatatgcctcgaagttctgaattgccaaaaccccaaagcatgcaattttttaaaattggtttaagacaaaaatacccttataatcatttaaaaatctcttttcaattaaaaaaaaaaactttttaaggggc

SEQ ID NO: 320438 - DNA, 1643 bp, Cannabis indica
gtcttgggcttgataatgagttcctctagaatggttctttgccttctatttagtcttgtgtatctggcttgtttctttataatacacaagatttattttcaaaaaaataaaaaataaaaaataaccatatttacagagatgtattagatttgtaaataaaatgatatttaagggagttttactaccaaaaaaaatgattaaatttattattattttatataaaaaacaataaaaagtaaatgtaaatagtttataattagatgcaataactaaacttaataataaaattttaaaaaatgatataaaagcaattataaatacagtgcatttattgtgatggaaattttacattatatcatattatgatttaaatttggatcaatttttggcacaccattaaagcaagttttttacaagttcgagcaatattttatagatggccaatttccatctctattggagatgctcataaaaaatttgatctaattgtgtgccaaaagttgtactaaaattggctcacaataaaaattcagccaaattaaaatacaacatgattcaaaatttacataactatgaatactatattttttttatttacttttatcctttttttatatacatatttagctgtagtattaaattatgtacttttttacattttgttattgttttacataataaaaatattattaaatattaaattttacatcaaattttgtatatttttacattaaaatataatactaaaaattatatttagtatgctttaatttttttttaccaaatataatttaatttttatatttctcaactttacatggtttttttttttttttgacaatgaacgagatgactttacatgttaatacttctattttttcttaaaaaaaaataggcctcatcaaaacctcaagggtaaatcgaatgggagaaatctcaaaagaaaaaaaagattgtttaaaatatattaattaagtaatgtcaacttaaattacattatgaatacgtgatcaaaccaccaaacgtaatcatcagacaaatataaagttagcttaaccaatgaatgaccagcactattatccatcctagaacaaaaacaaaaagagatactattaaaaagtcacattgagcaataatatccctaataatacatcgagggccatcttaacgtgttaggaggcctagggtgaaatataaaattagactttttcttgcaataataaataaatattaattaaattttgacacaattttcttaaaatgctactatatacattatatattagaataatttttaacaatttgtactattattctttatatgatagatatgagcatagttattaggcattagtggtgcccgtatcactacctaaaggtgacgttttatgattggttaatgatattccacaaaattaaattatatgaaattcgatacttaattacactaatagcgaaatgatacatttaaaagtattaaacaccactaatatcttttaatatttttctatatatattaaaaaaccaaataattaaatatatatataatgaaccacgatcttggataattaaaaacaaccaaaaagtggcaaagttgagttagtcattataaacaacacacacttgccaattgtgtctgccta

SEQ ID NO: 320439 - DNA, 939 bp, Cannabis indica
tatttctaaactataatttgagattcataaaagggtgttcgattttgttttctaagcattttttctatgtaatatttgtaatttgatggacaagaggaactaatgaccactttttgtacaagaagaaagagacgaagtgaaatgtaatgcacttgttactttggatatttgcttaaataatttgatcttgataaatagtattacttttcagctatctaaatccagctcttttttggtttattggaatggaggggctgaaaagggctcaaagttcttgattttcctattcagatgctgttttaagctttatttagttgttagttcacatatcctttatgtaatattttaatggaaattattcttgtatatgtctgtttttattcaattcaatttacaaaaaatatgggcacaggataaggttctttattttaaatttggagtgcattaagggatagctcgagctaattaaactatctttgttttggatagaaatgaaagctttaaaacagagtacagaaatgaaaaacagagagagatagatcaaaggagaggaaagcctcagaaccaagaatgctacttggttgaaactgaggaggaacactttatttatattgagatttgtacaaggcaaaagaattctgtaataacagaattggttacaagaaaacaactgaaataacaacccaaattaaccaataaaactaacacgtgtttattggttatcactttgagtttacctttaagataatgaaatcgttctttaggtagagactttgtgagaatgtcagcaacctgatcaacatttggaacatgtcgaattaagatttctttcctcattatttgttcacggacaaagtgtaaatcaatctctgtatgtttgcatctagcatgaaaaatagaattggttgcaagagcagctgcaccttgattatcaaccca

SEQ ID NO: 320440 - DNA, 2406 bp, Cannabis indica
tttgtactattttagaaaatacaggatccattttgtcatttaacaaaacacagggtccaattagtaacttttgcaaaacacaaggtccaaaatggtatttaccctaaatttaatgtttatttttagcggtataagtacccaatgtttgtaaaactgtaatttttttcaaattttgtcagtacagactctgttattatcttaaataggacacatgtaagacccgaattctagatcattgagtctagaaggaaagttgtaatatcagttacttctaaatgttcttttaataaattcaaaacagagtctgtactcacgaaactgaaaaaaaattacagttttataaatattaggtgcttattctgcaaaaaataaatattcagtttatgccacttaaaattttacttatgccgctatttacctaaaataattacacaaggacataaagcctaaaatcctaaaatctaatcctagacagtgttgtcatccacttatcgcattgcagttaagcaaaaaaagactcaccggattccaatttgcaaccctgaaaaaccctaaaaaaactcactcagcagcgacttcgtcttctcacatcgcagccttccctctccggtgcgtctctttctcggcaacggaagatgtctctctttcttctcagcagcgactgcgaggactagatcaccgtagctctcatcaacgattccctccctctcgctcatcgccggagtcgatctccaccacctcttctctccatttccctcttctctgtttttcccctcatccacgattgatacgccctccctcatgaatgtccaccgagtattgaatcattgtttgagtaagtagtgagtgataagcataatctcagttagactatctatgccttagttagtttcaaagtcttgttaatacagtttaattgttgttcgagattcatttcttctaattgaaataaagattaactttcgcaaatgcttcttactggatagcctttgtattgatacgctctttcaagtagagttaattattttgtttaatttgttgaggaagtatgagtttgatctacctatttgaattttgaagagttgggattgagttgattttgtctacttttgacttgcaagcagaatcattaccaaggatttagtatttgcttctgtttcagcaatttgggtaatcctccaaggtccaaacaggtatttaattttgattattttgagattgattttccctaattttgagttgtttaattatatgattgtcaataaactttaaattttgtcaatgtaatctgcctactgatagaatgagtaatttgaataaccatgttattgtgcatataattattttctcattatgacaatcaagagtttaaactttttctggcttttactgaaacaagttggacttttgacacttgagtgaaaatgtatctattctataaattctgataaacataatcttttagaatatcagtttcattgattcattctaatgagttctgcttctttttttttttaccaacatgaattcaaacattttatgtgtatttttgaaaggctttgatgtctattaagagaaggaccataattgagttgaatttgaaaaaaaaataattaaaagtttggtcggtttggtttgggcgggttaagccaaccaaatcattgatcggtttacacattttttttcctttatttgggtgggttgctcttagagcagcgccaaggagactgcatttctccattttgctgctccttagagcatctccaaggagtacactaaatttggtgtcacaccatcaccaaatttagtgtcaaaacttatttctactccaaccataacaccaaaaattacactaaaaaaatattccatattattatattaattttttaataatagtaaaaaaaatttaatattatattaatttaataaaatcagtacaattgttaaaagataataatactgtaaaatcggtaaaacttaatcatgccccacaagattataatccatattatgattatctcggtcgatcagaaaataatctttcacattattgaattgtttttgtctctcgattgccgaaacaagtaggagtatatcagtatatcacttttaaagatgtgcattgaaaatttatttttattaccataaaaataatttatagtattcatatttaaatttacacacaataaattaaaatgtgcttttacaatgcactctctaaataaaagagttacccgtgtaatagacagtttgaactttattttcggtgtgttaaatttatccgaatatttttaaaattttgtaggatgtcttaaataagtataatgtaccctactataaaaaaaaagtctaaaatttcgaaataagtagaagtacatcagtgtaccaattttaaaaaaacacatt

SEQ ID NO: 320441 - DNA, 553 bp, Cannabis indica
tacatgattaaaaaaaaaaaaaaaaatattttgtagttgtagtagaaattacaaaataaaaattacattatttgtgatctagttttagttaaattaaatatttaattatatatcttaatagacaaataataatattcatcttaattatattttcatgaatatatttctttatcagataataataagttgctaaatatatatacatataatgacggtacattacattaatttgttatatattatatctaaattaatacttatttataacactagttaattgaagttagctacacctatatattattgattgaattttttggaaatttcagggggggccagggccactttaccccataaaatacgttcgcccctgcttaaagcaatattaaaaataaaattacgcgtgtacatcttgttttgatattgatttcactaccttaaataatttataactttcaaaaaataattttttgtgaaatttatatgtaaaagtattatagggcaagattatggtaggacttagtataagttccctaccggtagggaagttttt

SEQ ID NO: 320442 - DNA, 891 bp, Cannabis indica
aaaaaaaaacaattaatgttaaattgctcaattttgctagttttttgtggattgcttgattacatgtgatttgtcattgttcttgtggattttgtggcttatttctggtgaattatatttttacagagttatcgatggtatatctatatgatatcaatctatttccccttgtatatgtggacggttttaatggtattttttacattgttattgatgaaatgttgatatgatatcgataggatatcgaccaaaaatgaaaatgggttgtttgagcttactagttttttcaatctttttactgtatatcgatagtatctcgacatgttgcctatggtttatcgatatttttaattaggatatatttttttaaaacttattgaatatgtcgatgtgttgtcaatgaaatgtggatatgttgtcaatagtaattgattgtttgagcataactggatttttcaattttttttaactgtatattgataggatgtcgacgtgatatctatggtttgtcgataatttttgttaagatatactctgttagaatatatttagtatgtcgatataatgtcgaccttttgtcgacattttttatgctttatctgatttattatatcctcaattatgttgacgggttgtcaacaattgtattatattttgttatttttttaattttgattatatgaatagaatgtcgacattttgtcgacaattttttgtgagggcgtctttgatattttttgttatatattttttcaaataactacaaaattcatagttctaacatccgaggattttactgaccgcatgacatatagaggcacaagtgctgtaatacccagaattaaaaaatggattagcagaaccctaattaaataattatgaataattgag

SEQ ID NO: 320443 - DNA, 606 bp, Cannabis indica
aaagtaacatcaaaataacaacaaaaaataacatacacataacaacaaattaacaaaatttcaacataaaaagaccgtattttatgtaaataaaatcaaaaaaatcgtaaaaatgtttaaaattccgtgaaaccatatttttgttgtttttttgttgtttttgtgcatttgtgaaattaaccctacttattatatataatatttgttttcttttcttctcttttatttatttatttatttattttgagaaatgctggttatatattattttgtgtagtaaaatttacttaatttattgcataatatttgtttatataaataaattcacttagatctcttatatataatatatatattacagatatgtacaccagtgtccaacttttagtattagtatatatatcaacttgatataaattttaggctcaacgttggtttagtaatatatatgaacatcgaagtaagtaacagaaaagacaaatgataattgtatattgcacattattacgcatgtttttgtgtcaaaaataaataaattaagatatcatgatacagtagaacctctattcaagaatagacttgggactaatcaaattatattctaat

SEQ ID NO: 320444 - DNA, 2116 bp, Cannabis indica
tcaccttgtcttgccacctagtgaaattggtgccattagagcggtccaatctcaccaagtcttggttcatcatcttgattgtttctccttccattgaaaaagaataagctttttgattgttaggaaaatatgagatatcagtagaagaataacaataagatgaacaaagagattaaaaaaattacaactctatacaacaagattacaaggactatagattagataaatgttacaatctcaaagcacaaagtacaaataaagagaaagaaaatatgaggacgaagttacaaccaaaagcaaaatatacacataaatataaaagcaataagagaaaatatatatctacaataaagatatatatatatatgatatatagtagaattagtgtatatataaaataaagaggagaagagagcagaaaacaataaaaaaatagaggatgaaaaagaactcaagttagctatgggggatcaccagacgctctaaaaaggtttaagcacctttgtccaaaaagtttatttccccctataacaaacacttagggaataaaatggaaatgcttctgagaataaacaagcctcttaatattttctagcttagtgtttagaagataaaaaattgttgttgtctacaagtgaaccaaagacctctatttatagtgtttgaggatcacatttgaaaatcaaatcctttcatcacatggttgttacaagcactttaatttgtgtttaataggataaaaataaagagagctggaaacatgcttaattgttttatttgcgtttatgaacattttcaaaaacctggttctaggtgtttgaaaaacaactatgaaacaacatattaacaaccataaaacaatcgtttctagaaaactcaatatttagtttttgtaactcctctctgagtcaaatctttctcccacgtctcaatacccatttaaatgatataattgagtattgtaccaatttctaatcgctagaaacttatcccattaatttcataacttccaaatgtaataactcacttaattacatattatcaattgtgatccttaggttacaatctattttcatatttgtaactctcatatgttatactttttatgtgtattattatactatatattaatacaacttccaacacataatatatattaatttcatattaatatataatatgctacattttaatctttattatatatttgttaaataacaaatatataatagttgttgatgatgatctaaatgtccacctccggtggacattcaagcgaactttgtgagagcaagcgaaacgttgaaagtgggtggttctgcacctcaaaaaggccaacaccaagggaactaagttgatgaaactcccatcgatgaagatgaccaagaaggccaagacgaggaccaaaaggatgactacaacaaaaactctgataaagactacgaggagtactacgaggaagatccagaagtggtgagattaaggtaagtagttgcagaccaacaaagaaacatgatagagtaagaacaagttccatgctagatacaagaaaccctcttcaagcagcaaaacatggtagcaaaggggaatatcaacgctgaaaactcacaggtattaaagtttaaccatcttggtgctagactcttcaatgcaacaaattagaatgggaaggacaatatggttgggcccccgaagaagaacttattagggtttatgccctgaaaagcctgtaaagatatttctatttataaataagagttgagcattgttatatatgcttgaatgttaagttatgaatatgtaatatggaatcattcatatatatcgaaaaatttcttatttatatatgaggctatgacttgtacagtacgtagaattaagattactttgcaatgaataaaataattgaaacatattaaagttatagaatctttaatcaacgtttgctagtgttgggttttgtgccctaaataaaactcatttcagtataatcagatttactaattaataaaagatcagaaatcattttatgttgcacggttcacatgatttatttcaagattatatgtttaatgtataaattctattaaatccagaatatatagttattcatgat

SEQ ID NO: 320445 - DNA, 777 bp, Cannabis indica
ttaaagatgttgttaaatgacttgcaagatgttgtatgtcaaattttattagacatttctgtaaatagtgttgctcatttcttagctcgagcattctatttagttgctgatcgtgttatcaggagtagtgatgttactccaaattttaatcatgtaatcactatggagtgtaattaataatgatgataaaaaaaaagtatatgcatttttctttttggacagtatttctctagtaattaatacacgtgttttgtcaatgatattgaatgttgtagaatgtcagaaatctcaaacatataaattcactttcctgaatcctggaaaaaactgcatttactagtctacacacatttttgacaagagggttagtaaccacaagcatctttcgtcaccaatataatatgtattttcaccgttattttttggtgtcgacacgacaacgctacttttgccaatgcaaaattaagctgtcctgcaaaaattacaattaatctaaggctttttgctgaccaaaatataagttggtaaaaaactccatttttgaagctctataactttgaaagatccaaaagtaactttatgactaatatggtcttaacaaacgaacaaccaaacactttgagaagcttagaggctgtttggctttatagttaaaaactgttttctgtctattaaaattgaaaacaatttttaaaaattattaggagtcgtttaacaaaattttttaaaagctgtttttttaaaacaatttttttttgtctaacatattatattata

SEQ ID NO: 320446 - DNA, 1505 bp, Cannabis indica
acatattcaggcccaccaaccccatcttggtggcgccttcttttggactcagtagaaagcccacggcctccttgtcctccatgtgggccgataattccaccaaggaaaagagaaggttgacatttcccacttggcacatgatttccaaacacaaccgactttcctctttcattgacactagacttggaaacattagtcttattgccattattattcaaattctcattaagaggaatattcccatcatccaccaaattaggaatatcattaaccacctttgactgaggattattttcaaattccaaacaaggtaacttcccaatttgcatggtcggccgatcgtcctcctcctcatgtcgcaccggggatgcatggccaaattgctcatcggactccgtacccgtacgcatatactgagagctcaataactaatttttcctccgtggttgcgcacacataaagctcccatagggtttaacgatctcgtcctcaggtgtatcaaataacttaggacaaaagttttccgaatgacctatcaaatcacatataaagcaaaacgttggagcaaattcatatttaaaattggcataaaccactcaccacccgttttcttaagcttcattcgtcgtttcaatgggacatcaatgttcaccgtcactttgactcggagataatcccgccaaagaccattatagttcttagtatccgattaaatgatccaatgtagtttgcagctgtagagacaatcttctccgtcataaatcccgtagaaaggccatgaagctgtacccacatatcaagttgattaagctttacagccttcggatctccacctcgtggaactctaccaaatatcaatggtagccgattgaaagtccaaggactgccattgataacacgcttgatatcgatctcatggtaaaactgaaataggaaaaggttcggccccaattccttgacaaacaagccttcgcccgacttccacaacccagccaacgtgtgtttcatagcttcgaaatctatcgatctcgcattcaaaaacctccccaccaaacaccaacgatcgtccaccagaatcgcctcctcaacgtcgtcctcaatcgagaaaccacattcttcctcatcatccaattctatatgcccgtactgatactccatgtcatccatggctgtactagtcgaagccatcaaaaccagaaaaacaaccccagaacccgagaaaattcaatccaaaaacgcaaccctgaaccttctggaaacctatgagaagcgacgatagaacctacacactcgacgccatgctccaccggtgaaaacacaacaaacggaacaatagaacaatccagtcgcaagaaccagtcacagacgcagaaaaaaccttcgaaaaactagagagaaactttcacacatgccagctggcaagactcattttaaatcaaattaaattattatatatatatatatattagtttttagtcatagagaaaataaaaaaataaaaaaaa

SEQ ID NO: 320447 - DNA, 821 bp, Cannabis indica
taaacaaaaccaatacaaatttattctcaaaccatcaggcagcataatagctttctggagaatgtaaaaatcgattactaaatagtgaatttgatccactatttatagggaaaatatgtcaaacatttaaatttaattatataataaagaattaaagattgattgggtcaatcccacgatatccttaattccctctaatttctagcaatcccactcttttaggcatcttgattgacctattttgtaaggattaggcagttgggatgaatttagaaatttcctctgtgaggttgttggtcggatatttgtctaagaagtgccttcttagttgttcgaaatgctagtcagcatgtcccgtttagcatatgtctgatgttggatggctccgtccgacatatactccgcccaacatcttttgggaagtcttctcgattgtcttacatccatcatgtaccttcaatacttgacatgtgtcacattattccatgccacgtcactaagatgatttttgggataacatttgctcctcaagtttgcgtgagaacttctaatcatacaaggacttcttggcttcactcctcgcacggtcaagtgacacatgttctcatctagatggtacgtactctaaagtaatgttcctacccaaagcaaatcatcttttcgtcctttcaaatattttgtcataatttcctttgccttgaaaattgtgcattggagatcgtgcttgacggttactgtaacaacctaaataattaggcacgctacccaaatgattatgaaaccctaatcccctaaccgggattactaattaaaaacagcgc

SEQ ID NO: 320448 - DNA, 1432 bp, Cannabis indica
gccaaggggaacccactatactagtagtagtgccatcacttataacccgagacgctcctagacgaaccacatctttagctccccaaatgttacgccaaacaaagcttgggttattgccaagttcagctgaaagaaagtcagtatgtgggaaatatttagctttgtaaactctggcagcaagagtgttggggttacatagaagccgccaaccttgttttgcaagcatagcaaggttgaaatcatgtaagtgtctaaaccccatacctccttcatccttaggaatagcaagtctctcccaagacatccatataataccacgacccgtgctagaatttgatctccaccaaaagcttgccattaacttctctatctctttacatgtgccaagtggtaggagaaatacactcattgcatacgtgggtaatgattgaataacagttttgagaagaatttctttcccagcacgagacaaaaattttccatcccaactattgatacgggcaatcactttatttttaataaagccaagcatagcttttttatttcgaccaatagtgttgggaagtccaagataaagactaccttcgtgggcttcattcatattaagagaaacacatacttgagtacgggtagagccatctgtgttaggactgaaaaaaatggatgacttggaggagttcactttttgacccgatgcctcttcaaaaagctggagtaatcttgagatgctagcagccgcacctacagttgcttggcaaaataagaaggaatcgtcagcaaagaacatatgagtaagtgagggagcacgatgagcaatgcggcagccttggataagtctattctcttcaaacttttggattagagcagataacccttcagcacagataataaaaaggtaagttgatagtggatcaccttggcggatgccacgagacggacatataggatccaaaatgtgaccaccatgaacaaccttgtagcgaactgtcgatacacaagccataattaagtccacccatctactagcaaaacccatacgaagcattaccgctcttagaaagccccattcaacccgatcgtaagctttgctcatgtcaagctttagtgccatgaaacctttcttgccttttcttttttcgcttcaagtaatgcattacctcaaaagctaccatcacattatctgagattaggcgtcctgggatgaaagcactttgagtatctgaaattacttggccaataagatctctcatacgattagcaagcacttttgatatgatcttgtatagaacattacagagagaaattggtctaagatcagtcattgccacaaaattttgcttcttggggattaacactaatggcacgtttactatacagtaatcagaatcggaataaattaatggagaaatgtaacggaataaatgaaaaataa

SEQ ID NO: 320449 - DNA, 578 bp, Cannabis indica
aagactgtaattcagtaggaacaatccctctcattgagaactcgatctggaaaagaattgtgcacaatcatattagcagatcgtttaactaaaaacaaataaacattgtttaaaatagatagaagctttcgacagttcatatcagagtcattgattttgatttcatgttttttaaaaaatatttgtcgaattcgatataaatcttaaactccaaatctcaacacaatattacataatataaatctaaccagttagattagaaaattatctcttattgcctattatgattttcttgtctcttttcatataatattttgatcatcaaatccagtaatgggcttgatgaagaatcataccatgtcttccagaccaaccttaacactcacgataagagtgggcttatagatttaacaggataaacaaattttctgatcacagtgtattctcaactcgtgatacactgtgatattgagattggaaaaaacctcaccccactactcaaggttgagtggcgtgtagcaagggaaaaaaagagggggagagagagatgtgtaaggttttagagagagagagagaga

SEQ ID NO: 320450 - DNA, 1134 bp, Cannabis indica
taagcgggctttacactttatatagaatagatatatatatatataaatttatatatatttcttatcttggttttatatatatctttttgtgaatgtgatttgtgaatacaacaataaggataaagtacttattgctgtaaaaaggtgataaatagatgttttattctactgttttatttgttctaatagaataagatttcttcttagttcttactacttagtgagacagtacgtgcctagtttactattattttataatctttctcttaattgtattgtatacgtgtggactagaaatagaatagttatattatattaattctacatctactatttccattgattcaaattttaaatataatattagttgttcaatatttttttatatatttgatggctggtattagaattttagtagatgtaagtttatttaattttgtgtaatgatttgtactttgtagtccaagtctaacaatgactgaaactgaaagttctccacaagatgctacacaaaattcccacttacaattgaagaaaataataatgaatctacaacagctccgcctactaaacttaattcttctcttccaaccgcagcatcccactaattatagatggtgagattgtggagaaaaaaataaaagaactaacttctatagtttggaatcactttaaaaagcaaaaaagtcaaatggaattgaaaagactattaattgcaactcttgtgaaaaacaattaggaggaacaagaaaaatagaactgcacatttgcatgaacattccaagagatgtcctcttaaaaaacatcgagacataaagcaaaaccatttgttttgaatccaaataagagaaaagatggaactactacacttggtgctcacacatttgtctaagaattttcaagggaggagcttgaccaaaatgatcattttacatgagagtgagaagaccaaaatatatatatatatatatatattgagcaacaatcaatgtagaattgtagtcacaattgatatggacaaccactaatcaaaaaaggggttacatggtggtaactacacactacatcgatgacttatggtttgaaaaaccgtgtttttgcaaatgtcagttgtatataagaaaatataaaaac

SEQ ID NO: 320451 - DNA, 1585 bp, Cannabis indica
  modified_base (179)..(179): a, c, t, g, unknown or other
atataaaaaaaattattaaaaataaaaaaatagtacaaataatcaatttacataaaaaaataaaataaaaaataaaacacaaaatttttaaaataaaaaattactaaccaattatagatatcatatcggtatagtattaaacaccttatatatattaaaatgatatgaaaaaaaatttntatgattattatagtttgtatcactccatatttttttttcacaatttgacactgttagaatgtgggaatagatgaatgtggttccatctcaaaatcaattggccatgagagagtactccattcattttatatatcacaatttattttcacacattagcaatgtaggactaactcttaatacatcctcctcacgtttgggcctgaaaagtgtgggtgtaatgaacgaccttttaagagaccataggaccgaacatgacatttgtgggtgtacacgtcgggaaatttgtggattttgatacagatcaaagacccgacactggaaactggcacattggccgaaaggtcccaaatggaggttaacggggagacagcggaagtatctatttggaccggtggcactttcgctcacaacgaattacaaacggctttttagatcggtggcaatttgggctcacaacggatcacaggtggctctgataccatgttaagaatcatgggatttaatctcaaaaccaattggcaaagggaggagtagcccattcctcttatatattctattatctttccacacattagcaatgtgggactaactcttaataacactagtcatgtatcgtccatctgtatattggaaagactatatgtggtgataacttaggtcatgacataataacacgatacgaatttaatacgaattattgtgggttaggattataaaaaatagacccaggtcaaacttagatgaaactcaaatgatacaattattatttgaattgaattagaatttatgcataacaagaaatcaatatgaatagacacatttatatttaatatattattaaaattattaattcatagtataaattactatttatttttattaaaaaatatataaattatatataaaaaaagtacttataaaaatataaaacatattatttatacttgatattaaaagttttattcattgaattgataattagtgataaattatttttataaaaattaaatatgtgataccaattatattgatcaatatgtattgtaatataaatataggatctacaagaaaatacaataaatcgacacgagaacatgacggatttgcttaaagtagagatttcttaatacaaaatatatatgagccggattagaattaataaattaaatatgttaattagagtattatacatcaacacaaatggtcatccctaaatataagagtattgttattgagcactagtggtgcctactactcttaagacgtgtcgccttgcgattgactagtgatactccctaaaaattattatattaaactatatggaacccgatacataattagaccaataacaatattaacacgtaggaaggtacttgacaccactgataccttttaacatttctct

SEQ ID NO: 320452 - DNA, 629 bp, Cannabis indica
aaattagaataactaaaaaacataattttgaaccaaaatatttcgtttttgagtggattagtttaatttggttttgaatttttagaaaactatgtactgatttggtttgaaaaaattaaaaaattcgaacctaatcaatctgtaaacacccctagttatatcatataatcattagtagtaaaataagtatgtaatatcacataattaatttaataattattataaaataactattgtgtattcaattttacataattaatttaataattattgtaagttaattatttacaacacaccagataccaatgctcattaaaattaaatgagtatgaagaagagtaattggcagttattaataagtgtacatattaataagtttcatttggtcactactactcataatataaattttttgtaataaaatataatttttaattacaacaaaaacttacttgaaactaaaacataatatttgtatgcatgttgtcattaaatttacttttattcacaacaagtagcgtgactaagaacacatttagcaacaataaattataatttttgtgactaatacctttagctacggactttttagtcataacataagaatagtaattaataattagtcacaa

SEQ ID NO: 320453 - DNA, 486 bp, Cannabis indica
ggtgactcacaactaccccaactaaaaggtgactttgtacacaaaatttatacccagccaattatatttgcttagagcatctcagacattaaactttgttacatttatcacaaaatttagttttaaaaatatttttactttaattatgataccaaaattcatactaaaaaaaaatattttttattattatattaatttttaaataaatagtggtataaatatttaaaattttaagtttgtaagtggtataaacttaataattttttttagtggcataagtacttaatgtttgtaaaactgtaattttgctctactttcgtcagtacaggctccgtttagaagtaactgatactacatatttatgtctagattaaataatttagaatttaggtcttatatatgccctatttaagataataatagagtctgtactgataaaactgaaaaaaaaaaattacagttttataaacattgggtacttatgtc

SEQ ID NO: 320454 - DNA, 1656 bp, Cannabis indica
ttccatctcaaaaccaattggcaatgagtggagtagcccatgttcttatatatggctcaattctctaccatttattccatgtgggacatgtccacatattcccctcaagatgatggctattttttgctcatcaatcttgaaccgtatcagagtggacatggtcactatctgtataggtgcggatcggatatgatcacttgcccgcaagggatatggctctgataccatgttgagaatcatggggttccatctcaaaaccaattggcaatgagtggagtagcccatgttcttatatatggctcaattctctaccatttattccatgtgggacattgtccacaatataaacttaagctttaacttgaaaaatactttttaactcaaaaaattaatcaaatgagtttacgtacaggtattgaagactcttgaggtgtgataaagtgttgggaatttgaccattgaagctgttactggaaagatcaagtgtggcaagcttttggagcctcccaagctcagaggggattggacctgttatattattgctctgtaatagtctgcaggcagagaaataataataagaataaacaaataaataaataaagggtcagtagcaaacaaattatgaagacataaaagatgagaatgacagtagtagtctttttttttcctacttacacactccggagatttgttaagttgcctatgcttggagaaagggtgcctgataagttttggcttggagttcctctgtaacaaccaaaaccatttcaactacataagtgtaattgtttaaagtgacaaatttttgtatattataagctcaaatttagtgcctttttttaaccatgaatttacttacaaactaacgaccaaaccatcaggagagcaagtgaccatattccagctgcatggatcaacagcagtatcatcccaattctcaagaatactgtggggatccttaaacgaatttttaatttccatcaaagcttgaactgcaaattatgtttgtagagagaaaagacagattacttcatctgtaaatttcttcatatacaaagcaaagacattaagagagaaaaaattaaacacaaaactacttaccttcatagttaacacctttggaagagagcacaccatttgtggaatccaacaaacatgaaaaggcaatgatgaagaaagtaacagcatactttgaattgatagtttccatttatgaaatttgagagaataaattagagataccccaaatgccaaaaccagcttctttgtagtgtagtggtagtagtaagtaaggagctggtagaaatgatttgaaaaacttcaatacaaccaaacttcttccaactcaatttatcttttttttcaactgggcatgtcttgtttttatttttatttttaagtactaataacatcatatcaaagagtacaattcgtcattcttcctaaaccagaattgcactcactcacttattcactctcagcttagtgtcagaaccttaaaccaataaaatgaagatttgttagtaaaaagaaaataataaaagagttaaaagagaaccaaacatgcctgccaccagttaagaaaagaaaatggaaaaagaatatataaaagccaagagaagagaaccactttaataaaaaaaaaaaaaaaatgga

SEQ ID NO: 320455 - DNA, 2017 bp, Cannabis indica
attacaatataaatttacgattttgtaatatatttattattatttctattttaaatttaaatttaattatattataaattttatttttttttaaaaatacttttgccgggagtacaaatgcgccggcaaaagggtttaatattttaaatattaaatgttttgccggcgggtaactcgccgaaaaaagtatttatttttttattattaaatactattgcctacgagttgatgcgtcggcaaagagtcggtgccaaattcgtgccaattcttttgccagcgcattaactcgccggcaaaagctcgtcactaggacctcagctggcagccctattgtcggtaaataaatttgccgctgtaaagtcttttgctggcgcacttactaaggtcgccgacaaaagttgatatgtcgatgagccattgccagcaccctttgccagcaaaaaaagtcgccagaaaagccttgccggcaaaaaaagtcgccggcaaaactttgccaacaagtttagtcgccggtaaatttttttttcttgtagtgttaggataaagttataataattgattatttaatcaattattatttaaattattattttgttaattttgagaatattttactaaattagtgaaaattatttcagaaagagatagtaaaagtttaattattaattaaacatttgttaaaaattaataaaagtataaaattaatgcttttatttagacaattatgttgatataattatttaattaaaattagtatttaaattatcttgatatattattttattattttattgatttattaaatgtatcgatgattaaataactgtgattatattattattcttttatattaatgagtggtcttaattttactattagtattttctttatagatatagcagttatattctactatttttaaatatgtattttgtaatataaaataaagattatttataaaagttattttctacaaggatcaaagtgtaatctttaactattacatatttactacggtctaaggctcgagttctgacacaattagtatcaattacaacattcgaccaagcctttcccattactccaacttaacactatccttaatcccattgatcacaaccacatctggttgcacaataccagtcattgcacgctgagccaaaacaccataaccataagtttcttctgctggtccttttgtcttgatcatattattaacaagtttagaccattgctccccactttgagtatctcctacaagtttatcttcatcatattattatcaggctttgatcaagaattgtccgacccgaaagaaccacataagtagatgaacgaacatgttggagccataaaagatcattccttgccccccaaatagcccatgccaccatcattgccttctccaacattaaagtcttattttaaagcctactaagggttcgtttggtaccaatattgtattggatagtattatattaaattatattttatgtaaaattatataaatacttaaatatataatattttagtataaattaaattttaacatattattatataaaaatataatatataatcaattcaatataatacgatttaatacgactatagtacataacaaaaaaaaataataaaaatagaagataatgttcaaatcttactttatattcataaacttaatggtgatcacttggagaagcgtgttttgaaacacaaatcaaaatttattttgcgaatatattagttattgtataaatttataaaaaatagttcaatataatttgaacggtaattatttatttaaaatcttaaatgaaatacactatagtgtggcgtagacagttttatgaagacttaaatatattattttaaaaaactagtagaatataacttaacaaaaattttacaataatttatagggtgattctacaatacactcctttaaaagggatgtattgatgcacccctacctgtttcggcatctagaaaaaatgtttagtctaatttttttttt

SEQ ID NO: 320456 - DNA, 1492 bp, Cannabis indica
tctaatccaatttactaaagcggtcattacaattcaaatgaacaccctgctaattaatcgactcgtcctcctcccccaccacgaggtccgtagaagaatgaaagggacaacatgtatacttatttgggcatttaggttcttacggttcgggcaccacggaccaaccatggaaggcagctccgtgagccaccatggccacggtggccatggctgctacaaaaagtgatgggtaggagcacacgaaggcagccgggtcaccatgacccgagttcagaccctcacgggtcacaccttcatcgcaccaggaaggcattgagggaggaggggacatgaaccttgaactaactccgtgaggagctcgacctccccgacatccatttgtcgttcatggttacccatgtaaacaatagatgtaaacatcaatttgcatggaggaggggaacggtacccgacgttgtgcatggtcagggtcaagagacccaagctccatacgagggtggctattgtggtcatgcatagataggtttcgagattcgaaaccgagctcacatgcgatgaatattacattggtaaataattttacataaaaataattttcataaaaataaaattatataaaaatgacctataccccacatggcttacattattttttttttaaggaaaaataacttaattttataataaaattaacgatccaccacctctcatacattcacaataaaattatcgcccattcaatacatatcacatatatataaaagcataaaactcacacaaaatttaatatatacattcatggaactcttcttgataccaattgttagttttatggtactaaagtatatagtaaaataattgtatatctgattatcagaaatacatacctcttgatgtctatcaaggtattcttaattcttctcgtaagttatatccttttgggttaattagaaactcacacctgtagtctttcaaatcgatccaccacacacaaggaatagtgtgggctactgggataaagagtatatgaagttcttgtataaatttgagcacatgatcaaaaacaacatcttatgtaaagagagaaaaaagtttactggtaaaatactttttaggcttttagaaaagttacatacaaaattttccatttagaactttattataagatatatgtaaataaacctagtataggtattatttaattaatcatttaattcaaatctatttactaaattttatttaattatttaaataaataatataacaaaatttggttatagatatttacatctaataaccgattgagagaatctctcaaccacttgagagaatatctcaactacttttcaaatttaaatatttatcaattgaattaattaattaacccaaaaataaaaaaccaatagggactccccatagcatggggcgcatacactgtgttggaaatattttaaggatccagatttactaacaagtatgtttcattaacatc

SEQ ID NO: 320457 - DNA, 728 bp, Cannabis indica
agtcatggtgatccccactaatctacactcaaggttgtgagtgagtgtttatatatatattattctcttattatatatatacatgttttatattgcatgtgttcttatcttcttctacatttcttatatataatatatatagtatatatatattgtatattatgttgttgttgtaacatttatttaatctctttgttggtccttgtattgtattacaatagagttgtaatattttgattttcttccattgtaataatatctctaacaactcccactttattaaagacaagtcctcgtagagtctatccccataaaaaatgtgcattcctgatttgattctaaatattatagtaaaacttcttaataatttatcacaaatttttgtatttattataatattaaaaaagtacaataacattttttattctttttactatatatctatatatatgcatttatattttatgcacaccatcttatttatatatcttttcttaattttcttagttttttctttcccattttgttcggttgcctaatatagaagttagttgtacaaatatagtactttgaagagaaagaaatacttatatgtatatatcatttacagtaattaataattaaaatttcaagcaaagaaattaataatttaaagggcttttttttattattttttttaattttttactacttcaaaactaattttttttgtatttttacggtaattc

SEQ ID NO: 320458 - DNA, 794 bp, Cannabis indica
atatatgtttttctaagcgactattaaacaacttgaaaacaacaagaaaacatccccttattaatataaacaaacttactgcaagagattttcttttatatgagttttacattatggatttcaatccctgaatcttttattatatgatgttgtaagaaaaatattaaataagcacaaacaaagtattgacaactatgtacgaatcatatatttagctattgttaagaaaaaatttaaccaactataattgaactgataaacaacaacttgtagcctgaggttattttgttaagaatcgactatataaacactgtaaatcaaccttaactcaatcaacgttaaaatataaataaacttaccatattaaattgttattataagagcacgtgttggattgtctatgtaaaatacctgtaaataacactaaaaatagtatgactgatcactctataaatattgatattgggaaactatatggcaatgatattgcaacaaaaatatcaaaattacgttgcaagtttcatgaagcgagatgatgtgaattcaatttattgtcatgattggaattgaataattttgagattaaaattttaaaaaactacgttgatgcaataattagaatttagcgatagtagtgataaatattatatggataatactgttgagttttatgccctaaataaaacccatttcaatataatctagattttaactaattaataaagaatcaaaaactgtgcatttttatgttgcatggttcacatgatttatttcatgattatgtttaatgtata

SEQ ID NO: 320459 - DNA, 1305 bp, Cannabis indica
tataaacccagaattttagaacccaaatccaaactagagataaatgttgcaaaaattagggaacagctagtgaaaacccaccaagatgacattgctagtcgccacagatgcttcttgcaagaaattatagaaggaaaatgtcatttcttgcgagatgctgcttagcctgatcccccaatttatcgtcaattcctctagctaagcctttatttttacccagagtcaccattgcttttgaaccagttgacttggattttgaaatcatgacctccaagcctcaaaaatcaaaggctccccaggatcataatgtcaccttcaaggccgaactaatagagtcgaaggtgcgatccattgaagattacgtaggtaataccctaacgacttgtggtattaaatataagcgagaatgtcgtgttagatcggtggctgttagtgagttcagttgttatccaccagaacgatttacttgcgaagcatcaaaggagaccagtggcaaggctagtacgagtggacaaggataggtgcttggagcgtcgaacacatcagggctagagccattatccccctatgagactaccataagaacttcctgaaccatctcgggcttgccccattccagttgaatcccatttcatacagaatccttgcaagtttgaaggttctgtacaaatcttgaactgggagtgccccactcccctggaaatagagtatctttactctgttaaggttgttcctgcgaggaagaatgcagtaggggttttttactatcttggaactcacataggagatcgtaagatcattgaaggtttgccaaataaaactccttttaaagatgaatacttctggacgactggtcttttcccaatcgacacaaccaccttccgcataatacgtaagtgattagtatgaagattttcattattcttagcaagttgcactacctcattaattagggactaactagtaattttttgacacaagtttttcattaattagggtcaatttggcacaactgtgtgatggaaaaaagtagttatagttgtgttgtggagaaaaatagttgtagcagaacagtagaaaaaagttaagctgagtgtttagtaaattataaattttaaagtgatccaaatagttaagattttattataataataatattttaatctaattttttataatcacaaatatatatttaaatatgttatataaatttttatcaaaatatatttaaaaaattttttacagtataaatttatatgtctttaataaaataatttttaatattttaaaattatatttttatca

SEQ ID NO: 320460 - DNA, 706 bp, Cannabis indica
aatgcttgctgtctgtgaatactgcatttttcctagtttctgcattttttttgcttggtccgatggggtccgatgcacatatgggctaggtgacagggatgacagcccgataggggcctgatggggccccgatgggtccaaaaaaatggtcacttttaattagttccgatggggcccgattgagggtccgatttttgttccaacatgggttttggaacattaattttaatgggatccgatataggtccgattaggcccgatgggtggtccgattatcgttgaaatatggattttgataccattaattttgattggtccgatataggtccgattgggctcgatgggagtccgattattgttgaaatatggattttgatgccattaattttgatgggtctgatataggcccgattgggcccgatggtggtacgattattgttgaaaatgggttttaaagccattaatgtttatggctccgatataggcccgattgggcccgatggtgatctgatttgggctagatttattgcattttctagaatttgcaatatttttctatgagatttttgttttatattgtaattgtatttttttaatgtatgtgagaggttcaactgttaatgcatttgttatgtataatggtgtttgggagcttgagagtggagattgggtttataatcgggccaaaaatttgacatttgacatt

SEQ ID NO: 320461 - DNA, 1038 bp, Cannabis indica
taaaaatgcaaaaaaaattgttttaaagtgtaaaaatgaaaaagccccaatagaataatatatttatatttttacataacgtatctatattatgtatataaaacattctataaaatcaggagttcaattctaagcctatagtgtagtggagtcatgaggaactataagttaggaaatatatttgttaaattttatttctacttattgaaagtttaattttataaacttataatccccacaatgtctaggatgatgtataacattaggttatactaattatttaattaaacaattagatttcacattattgattatctattttgaaattttttactaagttggtgaaatttaaaagaaagagagaataaaagtttattttttttgttaagacattttgttgtcataataattaaaatatttaaattgtattttttatttaataattatttggatacgattattacattaaatgtaaagaccgcatatgtttaatgctttgaattattaaataattaaggttcttaaatgagattaaattaatacttatgaaatgcatattttgaaaatatatttaatatatcatatgtgtttttctatgctattttatgttatttacctaatttctgtgtggtgttcggaagctgtggaacgttgcgttggggcctttagagagtcatattttatattttgatgtacgttatttgttcggggtattttgctaagtattgaattttcgggtttaatattgaccaaattacccttgtgggttaatagctatttgaaaatttgtgtgaattgttgagttttattgcttgggattggtttagtatgatgtttacaggtattctggaagttgtagaaaagtttgggcttgatttgagttaaaggggtcgaatttttgtccccagctcagatttggtcgaccggttctgagaagccccttgcaaccggtcgaccggttggtacccaggaactggggttccggttgggaaccggtctgccggttgggactttttcccgagccctagttttcccgtt

SEQ ID NO: 320462 - DNA, 1222 bp, Cannabis indica
atagcataaaaaaagagaaaaacacgtaaatgtgcgaaacttgctttccaaaatagatactttatttattaaaaaatatttgattggttcagtatgatttgtcgcatatttattaaaattagaaatttcgcattcttcgcacatttttgaagcttcaccactgacagcttattgattttttatagttaaaaaatattattagggttttcttttcaattgatttggttgatttttgcttgataaacgatatcatgatataatgaattttgtctaatttacctcttaataataatttcatttttctcaaataaaaaatagatacatttttttgtaaaattttattttttttaagaggaataattaaatccataaaaaagtaatttattaaatgaaataaatatatggaggatttggcaacaacacaaaagatatccataaaaatttataaccattttagtgctttctatatttttcttttttctacataaatgtatattatgttccacgtggattcacttaaaatagcaaatattcttaaataattatgagagattatgttgtaacattgcattaatgatttttctccattggcaatattttaggataatctctatatttaacaccccaaaaaaaaaaccatttatatatgtaatgctataataagtgaaattcagccttaaatttctctttaggttttagacaaaaatccactaattaaatagaaaagaaaaacaacagaaggatttattttccaaatcaatctaatccttttggccataattatcattaatttgtttcaatatttcattctctataaattcaaaccatactccatattcttctccttattattagaataaaattctccattaaattattataaggtctaagtattttgaaatttaaaaaaaatggccaagtttatgacatttttttacaatagcccttcttcttagttttgtgacattcatctctgctgctcgccctaacgattttctcgtacctcaagaaaaggtatgtttcgttttgtttttgttttgtttttttttttttgttaagattacatattttataatttttttttgaattttttcaataaaataatttatttttttttcgaaaaaaagtaaatttttataaactttgccaaaaaaagcaataaaaataaaattaatttctttgggattatttcacaaatacacaaaaaacaacaaaaaaaatt

SEQ ID NO: 320463 - DNA, 1779 bp, Cannabis indica
aaactaatattacgtagaccactaaaaacttgccacgtgtataagtgtgtacacgtggacagttcaccgtgacgcttaactgtgatttttggatggaggtgtgcagagaaaaacgaaaccagggtttaggtagtttagctgccaaaaattcggtttttgtggttaagtgttacacacagtaaagtttaggtggtttagctaccaacattctaaaacaaaaatatatattatttttttatatgttattttataaatagtaaaatttgttcttatattatagtattgtggacctggatccggacccggactttgaccctgactcgggatccggacccagacctggaccgggactttgaccaggatcgggacccgagaccggtcctggaccggggatcgggaccgagacctggacccggaccttgacctgggactaggaccctaactcggactcggactcgagacctggacccgaacccgaacccggacccgggacccaaactcgaaatcgaaccgagacctggacccgaacccggacccgggcctagatctttacacaatctattaatacatgtcaataccaaacatagtattgtatttaataatactaatacaaaattaaaatggatataaaattataagttaatatcaaaattcttaaaaaaaaaaaagagtcgggtcgaattagatccgatttgagtaactgatctaccgggcggggcaggacagatctttacataatttggatcaggtcagatcatagccggattagatccgacccgacccgtttacactcttatgaataatatataagattgttttgtaataatagcctttatgaattttttattaacaaaataattttataagaaaatttgttattagcaaaataattaaaaattacactgtacacccataaatttacattgtgcgactacaatcataaagtaaattaaatgagattatttacaaattttattattttacattgttagtttaacaaattctctaaaatataaataataagatttaagttcttaacataagacgtaaatttttgtcaatatttatgtatgtttttttctttttttttttttttacttttatagtataatttgttaacataaatccataataccataacataagaataatatatatgagtgttttgtaataataatcttaatgaaattttttattaacaaaataattttatcaaaaattttgttattagcaaaataaccaaaatattacgctgtataatcataaatttacactgtgcgactacaaatcaatcataaagtaaattaagtgaggttatttacaaattttattattttacattgtttgtttgacaaattctccaaaatataaataataagatttaaatttttaagataagacataaatttttgtcaatatttatgtatgttttttttttacgtttatagtatacatatttttccatatatatcttttattattattattatttaaaaaaaaatactttaatactatttttatttcattttttactaattaatattattttacattgtgttgatttttataatcttaaggtgtgaaagattgggtagaaaatctgtttataaaacttatcccataatattttattatatattaagtatcggagtttgatcaatttattaccataaattacatctatttttattttctccccataaaatatagatatctttatatattaaaagtgcttatctaacgacatttcttggtttaacagaatatactttaaaaata

SEQ ID NO: 320464 - DNA, 591 bp, Cannabis indica
tcaatagttaataggcttagcattatctgtgtgtataaagtcgagttgaagcaaaagtatgggttattctagttgactaaagcctttgatgagtaggcctagtcttattagggttatgtagctaagttcttttcccaactctatgaatacgtattgtctcattataattatatatttttgataattagataaataaaactatcttttgatttagaaacttagagagaaagactattcatattatttaattattattgtgttctaaattatatataaattagtatattatttttactaattttttaaaaaaatttataactttattttaccggaaacgttttaagttcattatctcaataacatagtaagtataatattgaaactaaataaataaaaattttctcatgtttaactaatgttattttcttaacatcgaaaattgtttatatatatatatatatttaatttcatttaaaaaatttgtcaacaacaattagcaatatactattgattggaggtaataaaatagaatgaaatagaaaggaaacaattttcattctattcctttatttagttgcattttaaattatt

SEQ ID NO: 320465 - DNA, 667 bp, Cannabis indica
accccgatatagatatatataattttttttgtttttttttcaaactttgacacatatttagtttttattttctattaggttatgcttttttaagtaggtttattttttatcttttatgaattatgaatgcataataaatatttgtgagaatattagtttaacttatttttttcaattattttaaattaatttgttttttcattttaccttaatggatacccgatgggttccccataaccgatgggtattcccctaccccgaatccgttggttattagacggggatggggcggggatggaggtataaataggtaacggggatgggggcggggattgcattccccgtacattaaccgaccaatttccatctctaattacactatatgtatgtaattagaagtaattgatagactttaattacactctataatttgtatattataagaattgggtgtaattatactatcaatattaagtactatttttttttttttttgtaattattcactgttttgtaaatattaagaatttataaataattacaatttcatatccgaaaacttcttatatttaaaaatataatctaattataattagatgagatgtagtccacccaaaagtttttaaaaggatacaataattaaaaaaaatatatatgttataaatat

SEQ ID NO: 320466 - DNA, 561 bp, Cannabis indica
gtatctcaaattatatgatatacaaataaagtttttttatgtaaagttaactaattagtttcttatcaatactattagaattagtaatcaaaatattacttttaaaaacacaagaaaaataaaaaaaaaaaaacgttagatttagttgacgtgacgtcaataaaaatagtaactttattattataaattagatgaaaaaatatgtatttttgtaaacttcccactaatatatttatttttaattttagttttggccattaatgaaataaggtggtattccctaagttaatagtcacaaatgttgtaaatttgtgtgtgtcaactcgatctatattttttgtgttttttaaaatatggataatattgtgttgtatcaaaaatttttaaagagtagccctatagatcttgtattttcatgatgtatacttggactggcttactttttttaaaaaaaacagaccaacttttttcgtatacaaactcaaatttgtgttctactttttcacatttttttttaattaatgagctaaaattactaaattatatgtatttttttttata

SEQ ID NO: 320467 - DNA, 762 bp, Cannabis indica
gtattatagttttgaggagaaccacattaaacaaatataattattattattattattattattattattattaaaaaatacagatataatattatagatgagtgctaattacaaccctttatcataatttgttatttcacgctcaaaattactttctgcaatgttttttctattttttttttcatagtgacattcattaatagttataatactatctctgtaaatatcaaacttagttttagcactaaaaaatatttatttctttttcaaaattttaggatgatgttgtaactataacaaataatgttacattttaacacgtgtttttgggcacataaattagctaaaaaattgtaataagagattttttttttatggtgattaaatcaatcaaaaaatatatataattttttggtcattaaaaaaaatgaagttggataattttttaagatgggtaaattgttcaccctaattattatattatttattaaataatataatatataaattaaatacataaccaaataaaaattgatcaatatatattgtggggttatttagcattttataacttctacaatactattactgattaaatgtgtaaaaagaagttacactactttagaaaggtatttgtatcctatataattaataaggctctacataaatttttgtaaaccgcccaattcgaataacctgcgcaaactaaattgagataacatgacgaaaaatacaaactgaaaaacccgacagaaatataac

SEQ ID NO: 320468 - DNA, 1283 bp, Cannabis indica
atattaggaattcatatgtaattaccacctcatatccaaacacaccttgcattttaaaatataatgtaattactaaattgtgtaattactaccctaataattatcctaagtattttcatagtaaattacacatatatttatacatcagtgttgatgttgttttcatctctctttattgcggtggttgggaaattatagataaaattagagcttatacatttttttcgaactataaaatttacacatatattgataaataaagtgaaaaatgcaacaactttgactaatattaattattgttagaggaatgttaatacaacctcttattacaatctattagttaatttcaatgtccgaaattatatgccagattattttttacaagaatttttaaaaattcttgactatttgaaaatttttaaaaatttacaagaatgatgttatgagtataacgaatatcactataaaaaaatttgaaaaaatattctggtatgtattttaagtgtggaggttgactaagaaattataatagaaagttgacggtaacacttctctctttttattacagagcttgtacacttttacataataattaatgggtgtaggaaaaacttgatacattaattaaggtttttaggctaaaaagaatttttgctctttgaattttgacatgtaccaaatcatgttctttgaacttttttaactgttaaaaatttctcctgaactattgaggctgttgaatttaaggatttttgtcaaattttatttaattttactagtatgtgattgtccatatactaaatcatcctctttagattttaatatctcaaaatcatgctcctcaaactttgccacgtaccaaatcatgctcctcaaactttgatatgtactaaatcatgtcttgtgaaatttcatttatgttagattttccttactaaaattagacaaaaagacattaaatcaaataatctcaacaattcaaaatgaattttaacactttaaaagttaaatgtgcatgatttaataaatgtcaaaatttggagcaaaaaaaaatcataataagccaagtttgttaaatgctatttatatagtacaaagtaattaagggcccgtttggcacatcttttaaaaaagttaaaaaaaaagctgatttttgaaaaaattgtgataataatgtgtttggaagccgtcaaaaaacggcttttcgaagaatttttagagaggctaaagctgctccaatccaacttttagaaaaagttgttttgattaaaaaaactataata

SEQ ID NO: 320469 - DNA, 664 bp, Cannabis indica
atacaatacgatttttatacgaccaaaagaattttgtaggtatgttacaataaaaacttgtttattttagtattttaaaccacttgagccataggtaggtgtgtgttggaagtcatagattcgagtcccaagtaaataaaaaaaaaaaagttatttactctattctagtcattctagtcgctgttatttataattttaacatgatatacaatgaagaggtatgtatcaagtgattgttatcccaaaatgttagaattaactcgactactgaaaaaaaaaattaaatattaattattttttctttctaattactaaaaattgaacatcacactacatttttgtggtgtggtctttgtagtttttaggtttgcgatcctaatttaaaaaattacaaaagttacatatacagtttaatttgaaaaaataactaaaaagtatactatctgcacccaacatatccctaaacaaaagtaatttttcttgtaatgaatgattttccaaacttttgaactctttgaaattttaaccaagacatattgtttatctaaatgaagatacagtttttccaaaaaaaaatagggaaatttacggtaaaagtccccaaaaagttcagtttgatacagataagtccccaacctccaaaaatagcgacaatagtcctcaa

SEQ ID NO: 320470 - DNA, 1949 bp, Cannabis indica
atttatttttaaaaattatttttttttgaaggattttaaaaattaatttactttacttaaatttttatattactcttacactaaatacaatattaatttatgttgctttttgtttcatcaccgttgatggcacctgcaatggggctcgaagctcagtgataccgaccatggtccccgaccatcctctgattgtcactgctactctctccggcgaaggccacatctccattaacgaggtgaggatcaacgagaaagtcattttctgtgatgggttcgtagctctgtacggtatagacgagttcattgtgtggagagaccttacgttcccaggtgctagcaagaatcgcttgaattaaaggtcgaggtggcgctctagagcttcgtttatgggggcgaaaatggtgatattatgtttacccactacctcttctaaggtctgtagactgtagcaaaaaggctttctcgactaactcggccaactcagtataatgcgagtcgagaagcggaacaaagtaaacctccctcacttctctaactcttgctttttgtttggtttcccacaaaatataataaataaaaataatatttaagtagagaagaattccgcctcaattttcaattcaatccatttgactttttctttctgatagaaattatatatatttaagttgtttgttttgttgaattttgcttgtgtagtggctgagaaaaatgtgagtatgaacatgaggaagaaattaagtccctgaaggggttaagataccctctagtctactcaatatttttaagtagctgttcaggttgttttgttccttttcatggaaatcttgaaaaatgggttgttcaagtttctgtagaatattcttgataaatgtttctcttaatttagtttctcataattttcattgtagggtgcgcttttgctcaatgttgttttcactggtaagagtaacacttattattaatattgttgtatatgaaggtgttcaccaactaactttactgtaaagccaaagagagacaaagagaaacttgctctctaaagccagaagaaaaaaacataagagagagaaagtgaaagtgagttatgatgtcaccaaagatggcgatgcgagcggaggaggaggaagccatgggaggagaagaaagaaggacctaggcttcgacaaggaaagagaagagcagaaagttacatcaatttcagtcgacttgggcttcgacagggaaatagaagagcagagaggtttaaagttaattatagtctttttttttacaatcaatttataaattaatatttttttttaattgtttcattcatttggaaatgagaatggaatacaaagattgggatttcaaaaataggatgactgccgtgtcatcaggtaataggtaaatataaataatattaatttgaaaaaggcaattaataactattaatattatccattcgattaaatctaatggtcaataattaaatacccatttatgggtaatacctattaagagcacacacatacatatatatcatatacacataatatatacattaatcttatacaactatatatgttacataccttacacatatataatatgtatacactttaatacacatgcatgatctatattatatatgcatgcctcatataaatacatagaaataattatttctacatatttaatctcactaatatatattatatcacatgctctatatatataatatatattactcatatatacatgttatatatattatatatctctcatatatacatataaacatgttataaattcaaaatacaatattatatatcactatatatatacatatatatgtcacatatacatatatgggtgcacttttaatgggtattatccatgaatgggtaatatgagaaaaatttgagtttttatgattaattttctatttaattaaaaaaatttct

SEQ ID NO: 320471 - DNA, 1140 bp, Cannabis indica
tactctacttttttgaaaggtcacagtttaacgaattatcttgtattttaagcaatgctctctctcttttgtaaataattattcgtgtagtttgtggatgaatctaaaaagttggttttgttttactcataggggtttgcttggttcttcagtattactatacggatatgcatattatgcctacttgatgtaaaagttgaaagaagatggttaagttgagtttattattatttttttcctgtactttactttggttggattttgttacaagcaaaatggattctgaaagggttaatgctttgttgaaggattatcaaatttgccttcacattttgatttctttgaaatggctttacattttgattattgttacctaattccacattttctggctgcacctacataatatcatattactctttacaagttgtgtgtagtctggaaagatcttgttttgatttgtactattaaaaaaaaaattatatattatgtatattaataaatttgacgtgcacaccattattagttcagtactgactgggacccatgaaagcgcgagtggtggtaaaataatttaaaattgaaaaaaatgaaaaaaccaatccttgcttagcctccctaggatcatgaaatcatttcggttgctgaccccatgagtggtccaaagaatcctatgggccgggttgtccacgtcacgtgtcaagaatctaaactattgggccttcaagtggacccatagcattttctatgtgggtccacacccaactcaaaacagttatctcatcaatcctacaaaccctattgggaaacaccatacaaaatttgaaggaaaaatacagtgtgattagattccaaggacactccctaacatatactttttatttctagttttagattttttttttgaacaaacttaccaccaccacgatatgtgtgtgtacgtggcatggtcttaatttttttgggtcacgcttggtacagtattagcagctgtagcctgtagtagtagacaataggcagtgtagataaatattcatccctcaatgtctttactttatctgactctacccatgtggtggtcagtgggcctggcccactccacttttgctttttattttttgtttttttaaaatttttttt

SEQ ID NO: 320472 - DNA, 941 bp, Cannabis indica
acataagctagatatatatcacattaaaaaatttatccaataacgtctcttaaatgcatgttttatttcgttaaattaattagccctagctagctacatccatatcaaaaaattgaaccctacttaatcactccacctacataacatatacttaatcactacaccttcataacatatacattagatattataagtagcaatgcatgtttgcttgtattagagttataattatttaattattaatttaaataataataataaaattaaatctaatacaatttaattatatttttaaatatataaaatttaatttaattttaaatttattaataaaaaatatatctaactaattttatcaaaacaataaaataagaatataaatttaaatattttaaataatataaatgataaatttataataaatataattaaataaaatattttattttatttaaatgttctttttaatgtagttggaatgaacaaattataaaagaaattttagtcaattaatagtttagtttttaagtagatatttttatcataataaaacattattgtacttggtttaataattttagttacaaaatttaaacaaaaaattaaccaagtaaagtagtattaattttattctattctctgtatgtagaataaaaataaaaatatgataaatatcattcagattttttttaatagagaattcgttcattcaaccaccacattagattttaaatatgtaatatattttctcaaaagaaaaaatgtaataacgaagttactaaattttaattaattctaaacatttaaataaagtaatatattttctgaaaagaaaaaaaaaagagtaatatacatattaatttaatttattattatagtgtttggtaacacttttattttttaattttaaaaataaaaaataaaagtatgttctataaatt

SEQ ID NO: 320473 - DNA, 1180 bp, Cannabis indica
atttgccacacaattgaaagactcagctcaattttggtggggttctatggggaaaggatctaaaattcattggaaaaattggcgttctctctgctcatccaaattctttggaggattaggctttaggtctcttatctcccataaccaggccatgcttgccaagcaagcttggcgtgtcttctctaaccctaactcccttctggcctgcttattaaaagcaaaatactttagatttaatactttccttgaagctaagctaggccataccccttcttacacttggtcgagtcttatctggggaagagacctcttaactcgaggcttgctttggaaggaaggcaatggctgctctatcagaacccttcaggatccctggattccaggtatgcaatatccaagcttgattagcagtgatcaacctccagatgacaaggtaagttttttcataactaactctgggttttgggataaggaaaaactgcagcaatattttgacgatttctcggtctccactattctcaaaattccaattggtggccctcaaaaaactgactcactcatttggacccaagacaactctggtattttttctgtcaagtcagcctaccacatagccaacaatgcatccctgcctccctcctcctctgattattccctatctaaaacctggtggaaaaccctttggaacctcagtgtgcagccaaagattaaaaactttgcttggagagtttaccaccatatcctccctgttgggctgaatctattcactaggaaaaccattccccaaccttcctgctccttctgtccaaaccccactgaaacagtcacacacgcccttctagattgtcccagagcatcaaaactctggaaggcctcgcctctccgggaattctatttgtcaaacaggcatactgatgtaaaagaatttatgatcattggttttgagcagttacataaagatcagctagttctcttggtcacaactctttgggccatttggttctcaaggaacaagaagttatttgcaaattttgatctaaatactaatgatactattgcctggattgattctcacatttcagattacaatgcagccatggctatgaaaaacaggtatcatggagttccgaatttgcaagcttcagacaaaatgccaaagctggttcagccgaatcagtac

SEQ ID NO: 320474 - DNA, 1199 bp, Cannabis indica
taacatattgatcaacataaacacaatcctagaacaataaagaaataaacaataacaaataataacctacaaaattaaaaacaaataataacactaagaaacacacaaaaatattgaagaaaactccataaataaaataggacacgttacaaaaaaaaaaaaaaaagtagaaacacactgtggatctctatagtacttttcgtataagaattagaactattattattccttttgttagtgctactactaataattatagtgttactcttttttaaggaagaaaaaaaaaggttgagatgtttttgttttgagatattcattaaatattagttgttgataatttttttaaaaataataataataatgaagatcggtggtggtggtaatagtggtgatcttagcacactacaaacaattattaattatttttattagtgataattttttaattataattataaaggttttctttttaatttgtatagtgttatattataattatagtttttttcgaatttaacaaaattatttcatgttagtttatgtttggttgatgtttaattgattttatattgttaagtttaatagttttagcgattataactccttaaagaatttaagctaacttgaggcatagatgaagaaattatattcctaagaatacatgttgttgtaatgttattttattgttgttgttagattttgtttattgtaagggtgttttaatttacttagaatatttttgggttatttattttttattgtttaacattgcatatacattgttgctctacttttgatgagatatgaaagtagttttgctgtaatcatggtttcatttataccatatgaacgttgttttccatccatattcgagcagattttgggccagtttgacacaatttttggaaaaactaaaaattacttcttaaaaaaagttgtgcaaaaaaagtgtcggtaaaaagttaaaaaaaaagtttattgaaaaatttatagaaaaactacaactaaaaactaaaattaggtcaaacctaactttaaaaaaaaatgtttaaattaaagactataataaataatttttttctaaaaaatttatttaattatttattatatattacaaaaaaaaaattaaaaataagtttttttgtaaaagtaaaaaataatttaataataaataatatttatattttttattttta

SEQ ID NO: 320475 - DNA, 3152 bp, Cannabis indica
ttgtaaggttaaaattattatagatttattttcattccatttttccgtttaaattttaatttccacgcttattttattagtaatcctgtttaagggattaaggtttcttaatcattttgggtagcgtgcctaaatcttagggcaatacacctgttttcttaagaagcaaagcaaagtgacttggctccaatgttgtgaggataatactacatactttcattcttttataaagaaaagaaagctggaaaataaaattagaacttttttgttagatgatgaagttgtagatgactttccaaaagtggtggagccttttcttaatcatttcaaaggttttgtggcgaggagaagcactgttacacagagaattgatgttcaatgcttaaaataggggaactgtcttgatattgagcaacaggttagtctcataaaacctttttataagaaagatgtcaagaaggctatgtttgggattcattcttcaaaaagtcttggtttagatggatttggatccgggctctttaaatgcctatgtaatgaaataagagatgatatttctaatgctattctgactttctttaaggaggggtccatgcctttttccttgaatgaatctgtgattacacttattccaaaggttgaaaatcctaaggatgacagtgaattacgtcatatagcttgttgcaatacttttggcctcaatattttgatttttcgtgatcttcttaaaggctatacaaggaggaatgtgtcttctcgttgtatattgaaaatagacttgagtaaggtgtatgatacaatagatttccagtttgtggaagacctcttaaacaattttttctttccctagagatttatccaatgatcattttctgcttaagaggtactaagtactttctgttacgtaatagattacaaggctcttttaaaggggaaaaaggtcttcatcatggtgaccctatttctcctattttattcgttttaataatggaatacctttctagattgttagctcattatttgaaagaaaaaaaaaagaaaagatttggatttcattctctttataagaatatgagattaacaaatctttgctttgtcgaagatctcataatattttgcaagggaaatgtgaactctgtgaaattagttttgaagctgttgacctcgcttttagccaatgacagtgagtctaatttagtaagcgacaagtagtttataacaattgaaatataataaagcaatataaagacactgaaattttatagaggtttagtcccgagcagttcggtaatagcctaatcctcattatttgtattgactcaagaatatggagaaaggttccttctcttatagctcttacaacaatatctctgaatatgaattcttagataatatctcttaagtaaaatctttcgaccctttgcccagtgaatatgcatcactatttatagggctatgagcttagagaggaagtatttcccttctcgttacaatggatttaagcagaaagattgcataaaaaatacagaatacactgatcgtgggatctggacagcttgccatatctctgcaatcagatctccaagttatagggatttctttgatgactcacaatgcgaaagatgaattcgcaaagtgttggtcacattgtgcggattgctgattgctttgcttcgagcatgcatatgaggtatcttgtttggactatattctatgagcagatactcgaagtcgattccatgtgtcaccatcatgtgatgccacatcagagtgcaaaaatttggataacatttgcccccaagtctgtatgggacttctaaagttgcgtgtagacttcattcgagtttcttttgcatttggatgggtgacacgtgtcaagcacgtctgtttgtgactcgatgtgaggctgactgggcgtcccctcagtttttggctaataaatgctctgacaataaatatttcgaaatccgattttctctcaccatggttgacagctatacttgattatttttgatttcccacattcgcttttaaggggggaactgaggcctctgaggttcttttgaatgattaccctttttcgttgtttgcctataaataccaatgagcatttgtaaacaaacttattttcatcatccttcttttctaagtaagtttagagcgaaaagagagatttttggcttcgagtttactgaagtgccttcatcaaacctactcatttgcttggcgtaacctgaatccagacatctcatctttgagtaagctcttgatttcctttatgtttactttgcacatttactttttgaatacaccttcgactttgttgtagaagatatgtagaaatccctaattatagaaactctgcaattttcctttgtcatggctcatgcgatttcactgtccgtaatgcttgctttttgaactgcataatgccagtctttcatcttgcttattctaagcttcatgaaattttttttctaactcaagaaaatttcaaacttcttgagttttgactctttgctgaatattcttaatctttaatctgttgagtactcctggtcggcattttttcttgttttctcgctcgatattcggaccaaacactcatcttgtgtgttgtcatttgtagatgaacccaagtgagttttggggaagtgaacacgaaatcgaccaagacatgcttcaactcttgcacgaggatcatcctcgtctctgttctagcccaccttcttcgagtgtaaggcattcttccttaaatattttgtccagccatagattatggctcgtaccaaaaagacaatgcgcagggttgatgcctctgaccctcaagtggctcggcacgccaccttatcgagcaccgaacaagatcccaccgtccaagaggaggaagatcatgaaggggacactgaggtccaagagattgaggagcaaaacgatgtctgtcctagcagtcccttccaggcggaggaagaggaggaggtcgcacccctaaactatgggggatacaatgaggccggggagctagttgatgctgatggcgatatcctggttgagggcgtagatgttcggttttgtgccctaaataaaacccattttaatataataagatttacttattaataaagaccagaaataatattttatgttgcatg

SEQ ID NO: 320476 - DNA, 1625 bp, Cannabis indica
tattgtggattttgattgttcttgaaatattggggagttattttggtgatttgggtaatttttgaatattgtggtgtgaattttggtaagatagaaattgaagaaattaggggaggtgctgtcaaaatttcccgaaaatcttttgttgtgtgaaattgtgtttgttggtaattatgggaccaaagagagcaagggcaagtgaagagggtggttcatcatccaatccttcttgggccaatccaaggcaatcttttgacaggacccaatttgtaagtgaagcggctcaagaacggttccttaagttgaaggatatgcgctacattgagacgccaaccaaggtttgaaacaatccggagtcaaattgaaagcatgaattggggtagttttgtggatgtcaaagactgagccaatgtcaccatggcatgtgaatgcatggccaactggccagaaaggaaacatggactggttaaaatttgcaataaggaagtcctagccacatctgatgcgatcaacgcactctatgaattgctcgatctcactagagatgaacatcgattgagggtgattgaagaggatgaacatcttgacttagtcgatgtagctaaaacggttgggttcccggggttaaggttcaatgatgatgatgggcaggatgggtcaccaaatttgttgcatctgtgtgaaataaaacttggggcaaaaatatggctatattttgtgatttcccggttggtgcatagcaagcacttttctgatgtgcaaatggatcatttgaaatatgtgtacgccatcatgaaagggtacaagatcaatgtgggtgaagttgttcggggtagttttgaattgatcgttcagggtgccacgggatgtggacttgggttggttggaattattaccgatcttttccaagcttatgaggtaaatgaattgccctttgacaacaaagtagtgtcgcagagaaagatggatgtgagcatggtcaataggctcaaggagcctcatccttatttgcagccaccaccagaagttcaaccacaaggcagaaggcgccctggtgaacaaagtgcagaggaggaggaaaatgtgccacaacaatcgcctggcctaattgatccggcgatgcagtacacacatgcccaacttaactacatcattcaacaaaacaatcatatgcagaaccacatggtttagagaagcatatatgatgcgagtcaagtcactcaacttaactctcttatcactcgcatgaacattgggatcgaggaccccaattatctagcgccacctcctcaatttcatccatatgatcagccgccccgaccgtaccccttctgatgggggtcttagttgggtctctttcccttaagttttatttgcacattagggacaatgtgaatttcacatttggggggggggggcgacgttaaaatttttaattttttttttttagttctttagttttaggttctttttattgatttggtaaataagttgaagatagttgtatgatgttcttgattgtgaaatgtcctaaaatttgtaaattgtgtgcttaattctttaactctttgggatagtttggatgcttataaagcctgtgtatggatgcaatccgacgatcgtgt

SEQ ID NO: 320477 - DNA, 829 bp, Cannabis indica
ttcaagcgtttatatattacacatacataacctaggactcgaaccccaggacctccaacacaccttcctatggtcacttgaggttaagttagaaattcatatttaattagaattgaaaaggtctacatatgtaccaccaccattgaatgttcaaacaaataatcacattaatctacttcaattcaattaacaaataataattacgatcaatcggttctgaaaataaacaataataaaccaagatcaatgggtttctttgatcattgctaattgggggaggggcattcttataaattaggttttcttattattattattgattgggcttatatcttctagttcttctttggcgcatttagtatcgtcaaaattattgggttcatgaccaaacgcttcttgttttcaaaggtatatagagcttgatcttttcgtttgctcggacctatcaagaagctcaggtgagaattggatttgtggcttttggtcatatatatttcaactgttgatctgactatatagtcagcccccaaaggcacacatagtctccaactgaagggcaaggccggcccttatggtgtgcaagttggactactgtacagggcctctaaaaaataaagacccaatacattttttcttaatgcatttcagttttgattaatgaaactaacttttcaagaggttaataacttgtcattaatggacacttccatcctgatttctaaaagctcattttcaattctattactgttttaagcataaaaaaaattattatttattacttttattaataatttatatttcatttttttcttatttatttttttatttt

SEQ ID NO: 320478 - DNA, 998 bp, Cannabis indica
tattaattatttatatttattttatatacacttaaatatgtacattatttcttgagaatttgagggggggccatggccactctaacataatgagtggctccgcccctgatcatagtcttcatgatccttatcaggttgaggaagctttccatttacaaatttaatcttgtttcgaggaaccagagcaatcagcattgctcttctcttggtactgtaattcccactgtctttgagaatttttggaacaagaacaatacatggattatcgccattggagagaaagtatggattcgaaaaattattagcattagtggatcgagaattctctccaagaatagagaacacgtacgagtaattagaattattttcagattcacgattagcacaagtatgaactcttcctcgtgcttgagttcctccatcccgcgccatgatttaccaacaacaaatcagaaccagaatcaagaagaagagcttgctagctctgatactatattagctcgaatgagcttgaaatagagtaagaaagaaagagagaaagagaggaagatagaattaaattaacataatttcattcatcaaaaactgaactgatacgaagtgttcatcaacttatttatactggctgagattacaagagaaacaaaaacactaaccaactaactaacccgtgagccaatgtcctaactaactttctaactaactaatcaattcactaattaagtttaatagttgtttataaatgatatcttcttcgtactctagccagcaacggacctactagtatcaatgtggggctatagccccactaataaaaatattgccttttaaaaattaaatgtaatttttttaatatgataattatagaccaaaataataaaaaagtccccacaaaattaaataaatctagtaagagtgcttataatataaatataaatatttttaatgataagctcccacaaaataaaaattttaggcctgtccgactctagctgagt

SEQ ID NO: 320479 - DNA, 1077 bp, Cannabis indica
tatcctaagtttaaaaattttattgttgggaaaccctaaaatatctattcaagccttggcaagccaatgttggctttggctggccaagcctacaataggcagttattcatggccgactagacctgcatagggcatggtctggccgccgtgattcctcagttggctgatgttgtcggtgtgttgacaagaggtagattgcaccggttcttggagtttggtggatctagatgtctaaagtgattagtttcacttctcagattgtcattttgggtgtttccacctgctcttggtccttctcagttgaagattaacctttaagtggctcgctcccctcggggaaagagtgctcctctagccagccaaagggactcttacatgtggttggccaaccaaaggctggatgacggggttgttgctgagcctaagatccctggctggccccccatgccgttggttgccaggatatgactgttcttgtcgtttgacctttgttgcaaggtatgtcctctctttggaaaggaaagatttgtccttgtccctgaggaaccaggttggtcagcttgttaatagaacctccttgatctatcaaccagtcttccttggagtggatctctgatgatatcccgtcctctttcgtcaattctctggttgaactgccttatcaggtcgttggcttctctattacagtgatacagctccatttggtgaggtcgaaggatgtaatcttggtcatccatccacctcaggaatttgcgtctctgttgagtgaatattgttggaatttattttaccatgatcttagatcaaccaaaaagaaggtggttaaaaacccaaaatatgaactttctaaaacgaaaataaacacatataaagttaagaaaaccttacattagttacagcggaataatatgtctcgcccgaatgtccttcttctttgaatgtgatccttcacagtcttccaatctatgattgaggtaccacttgctgtgtgtcggcactactctatcactaggaggtttcgaaattatgaagaagaaaagagagagagagagagagagaggagggtcggctatagag

SEQ ID NO: 320480 - DNA, 686 bp, Cannabis indica
tttctagctttgttctacacacagaaagccatttacccgtaactaattttagattattacaaaggatcactatggaaaagctacacttccaatccatcaaaatcgagataattattgttcaacaaaagaagagggatggataaacttaccatcttctgcctcaattcccagagtcttttcttcctcccagtaaacttttggaagtcctcttccatgacctcttcgacagggtcagcatgatcaccatcatcatcagaatcttcaccagaatctggccttttatcgttcaagcaatcctcctggtgtgtagcccctaaattggactccccactcgccttttggccttctgtcatattgtagaatgagcatcacaaaagcataaaattttattatccaacattgtactaataaatgtttaaccatcaatagaaaaaaaaaaatatctattacaaggtaaagcaccaataaatttaaaaagagaacaaagagtacagttctctttcaaaccctaacagattaaccctagagtgcatagacattgattataaatgcataaacacaccaaaagtagagcaatatcttaagtcatccctttggagtcactaaaatgtagtgccttgcaagagtcaagagtaaaggcagaatatttctgctttttaaataggatttccctgcttaatgaatac

SEQ ID NO: 320481 - DNA, 1711 bp, Cannabis indica
aaccccatatttcagattgcacaaattacccaaaatcatgctttaatccaacaaaactaaagctcaagaacttgagcttcaactcaacccaactcaattaattttataacaccttatcaccaaataatacacaaattttgacctagaaaatactctacaacctaatccaagaacacaacaacataatccacatctaaatcaagaaatcacactcaaactttatcacaatcaacacttactcctctaacatgcaaatcaagagcaaacaatccaaaacatgctttttccatcataaactcagcaagaatttcagcaagaaaactcaattaaaatctgtaaaaactacctcaaggttttaccaagaaaaacccccaaaatcaagctccaaaatctagctccaatccaagtgattctctccaaaatcaaaattgaaaaagaagagggtttgagagagagagaggggttcgggtttagggtaaagaaaccagaaaatcacatttcatttccttaaaaattcaactcttttattaattatcaaataaaggtcaaaatgaccattttgcccctagggcttaataacatacccacacacaaaggtagaaatatcatttcacatacacataaatccaaatatattttcagattattcaccaatatttaaaatgccactaaatcaattccaattgcatttcgggcccgaacccggttcgacccgaaatacccagttgtgactataccgtgccaacttgtcagaacacacctgaaaaatacaacacagatatactatataataatatagtcccatcttgggtcaaaattactaaaatgcccctggctcaccaacggggtcttaacatatcgttaatcaaataaattctcatatattaaattatataataatataattcctcaattattcataattatctaattaaggtttttctaatccatttaataactctagggtattacatgcatatgaagcatgagaaatttttttagtcacattatctaagtgggacttaattaataaaaccataaagcataatcagcttgcacgtgtacacttatggaggcatatacaagttaaaatagaggagacttagtctaatactaatcattagaggtgttcatgtatggttgttgagtaatgtagggatttaaaaaattagaatatttattcatggcatattaatataagaaagtaattttctacttagtttcaatcttttaaataacggaaacgtggcaacaagggagtgatagtccaacctagataagaaaactaagactaagttgttagtctcattattcttttcatgtgtagagaaaaaagaaaaacaatttaaattttgaattattggttaggtgtcatggcaagcttaagaggtggagttttccttctaagctcttattcaagtattgaaagaaattacttttgaggaccgaacctagttacaaggatagaggaacatactaagtgagtgatgtggatagtgtgtacgtggttgttatcgatggcagtcaaataagttggagagaatagaggagggaatagttgaagaataaaggttctttgagtttgtaaaaaaaggggtaagaatgaattttcagtcctataaatagaggactctagtcttcacttattcactcattcacaacccaaaggagcacccggcctgtagtgttggaatttattttaccaggatct

SEQ ID NO: 320482 - DNA, 3587 bp, Cannabis indica
aatattattatattactatcaatattattattatactacatgagtcatatattaatataacatatgtgttaccaattaacatcttataggttcaaggcaaagtatatgtaaccttggtccttccaacatggtaagaatcgttctggcagaccgatgtagtattctgtaactgcttgtggccaagtaaaggtgctcctatcacccgtgtgtgcctctcaaattccttcaaaaaattgtggtaatgtggtgtctagaactacacctggctgagtgtacgactctaggtaaatgtgccgtctcctcctcagcatgtgaatagcggcatctatatgctgcatcaaaagtgaaaaaaattataaccagaataaaaaatcagtaaatgtcgacatatatcgatattgttcgcgacatttgtcgatatctaacacagcagaacaataagagcaagagataccattttcacgatgtatgtcgacactagtagcgatatatatcgacatctaatgcaatttaatgcaaaaaatgccaattatgtcgacaagtgtcgcaaaacatatcgataaaatacaaattttttgtaatttttcttttcatcgataaaataaattaacatattaaaatatactataaaaaaattacttacatcatcttccaaccattgtccactcaccaacaacttcgtaaagaatgtcacattatcgacgccagtgtggagatttcacggacgattgtttgggatgtcaccaaacaaccacctcttcaatgtgcgcagcaatctatgctctgtggtcttttcgggtctacattctccgaaagaagttgtttcttctttttctcctctgtgtagtccagtaaataacagggcttcttcctctttctcacaaatggtaccccttctgggggtcccgtcaggagcaaaacatcattctgggattgtgtgtcagttatggccaagataatggcatccgttggagttatcggtacctcattatcatcttcttcccaatcttttgggaactcatcttcatattcattgtcattaggtcgttcatctattggttgggatggtgccggtgccccctctttctccttcaacatcgttatcatgttctccaactgagctgtgcaaaactctttcatctctttctgacaatccagaaaagactgcctcatctctttctgactatcttgaaaggagcgcctcatattggtttggctagtcactaactcagtctgggagagaataatggcagcctgtttagtctcaattctatccaacctctccacaagtgctttaatgtctgatgtattagctgcagtcgttggagcggtcaaagtagatggctactctacttctggaggtggtggtggcagaactatatttgccttgcggacggcttcagcaatggtgttggcttgcatttcaaataccaaattttgtgtaccatcgacgtccaccatctcatcaacgtccatctgaaaacaaagacgaggtttaccttcattgatggacttgaagtactcctcctcactggatcgaggacacaacacttctttataaccaactgaaaacaaaatattaaaaaatgttaggttttgcaaattacaatcaatcagtaaaaatcaataaactaagaataatgtcgacattgtttccgacatatgtcgacatctaacagttatttcaataaaaatagcaatattgactttatcgatatatgtcgacattaatcgcgacatatatcgatatctaacagaccctgcaagcaaaaatttaatattaaaattatcgatatatgtcgacattaatcacaacatatatcgatatccaatagactctaaccaaaattctaatattaaacttattgatatatgtcaacattaatcgcgacatatatcgatatcatcaagatctattataaaaaattcagttaattgtattattatattataaatgcagtgtaagaaaaaattaccctttggttgaataattgtgcaatgccaaatgctttcaagtcctgtttccgctggtcctccttagctttccaatttatcatccgagggaaccttgtgccactacaattaacatacttttttctcacttcctatatggcttcatatcacaatattgtatggtaggtacatagccatgtacggtataatttgcctcctgagtaaccttcttgccctttttcttatcaacgttctgcttgtaacgcatcatgtccttactcatagaccatattaattaacttccaaaaattatgctcgtcccacgaatatttgaagaagaattcgaggtcctcaacaaatttcaacatctctagccaaaattagacattacctttttttacaaccaatacaccctcaataaaagcaataagaccaagcttgtacacatcatctgctacatcccatctccctaattggagcaacagtgtatccaactgcacaccactcttcccttcaaaatacgtcctcactaaacggtcactggacttggcttttatctcttcctttgtagggccactacccataagtaagccggttatcaatccaaactctagccggctgaatctcagtctgttttaccaacataaaactatatctcatcttctttctctgattcaactttcatcttccgcaagagtagactatggactaatgcgctcgagaaagtcaattctcctgcttcccagaatggttcgaaagggctggccaaaaccctttcagtcaaattcattgcatacaacttagctttaatatggacaaacctatctaagccccgataggtaagacaacctgtgaaatgctcggacactggcagcttcaattcagaagccatctgcaaaatttatgacaaaaaaacacaaactattataacacatgacaaacatgtcgataaatgtcataaaatacattgcaacatatcgtataataagtcggcatatatcgatagtcatcgcaaaaaaaaaaagcatataatctacacaacattccctatattgtcacaaaatttcgaaaaatatgtcgtcacatgtcgcaaactataccaaacatccaatcaaaagtacctaacaaaaaataccaaacacaacacaaaagatttcacgacaattttcacgacatcgtcaaacacaatacaaacttgtcgcatcatgacatcacaagatgtcgtgaaacatcgcaaaaataacgactgtctaaattttggtgtgtctgagaaagaaatcgacaaaatgttgcgaacatagtcgagagatgtcgataacaggcaaaatggcagatctttgttcgtaaacatggaaactcaactcgaaacaaaaaaaaatgaatctaattcctaaaaatcaatcatttaagatccataacccatttaaaatcaagtagaagtttagttgtttctcaattttgttaaattttgcgatttagttgtgcgacgtggtgatctctagtcgtgggtctcgtcggacgttgtgggtctcgtcggtgtggctaggtttcaattgggttacgtctgatggggtgggggtggtggagtcggtggtcgtgggtgggtttgtgagatttagagagagagagagaga

SEQ ID NO: 320483 - DNA, 537 bp, Cannabis indica
ccaacataagtatgatatagcttcctaaaaaatttcatattaatagatgagtatccattcttatattctcatgattctatctttctatttttaatcaatggattttgattacatatttttccaattatttagtatgtgactatacttaaataaaaaaggaagaagaagagaaaaggaatattgtgatcgtgtggtgtgcacgtatataaaatacataagaagaaagaaaaagtaaaatagaaaaaggcatgatgagtttgcttaacccctgacatgaattgaaaaaccataggctgaccagttaccgaccctttaagatagggacaaaacatagttgtcaatttatcaacaaattttctccatctctattcaaaatggggccacacccaatgcaattccaaagactagccagctaagtgtaaacttcctttataaaaggtacataaaaacacatatgaaaagaatgtactctaattctattattcataacaaccctcaaaatattttgtcatagaaaaaaaaatgttgatggagtct

SEQ ID NO: 320484 - DNA, 1196 bp, Cannabis indica
ttgtgcacttttgccactaaaaaaaaagattgggtacttaagtcatataaatatggaactttgggtacttatgccgctattttcccatttttaaagggcatatttgtctttttgatttttaattaacaaaattaaaattaaaataaactaagttataggaatggaaaatgtattctctataaaattgggaggagaacctttctctttattttctccctaacttgtgtgggccccactattttctctctttctaaaattttgtaaacaatttgataagaatcaatattataccattaattctcattccttttaaataaacatgtcataatatttttttacattaccctatttacctttttataactacaatttttcctttacaaatcgaattaaaatattataaacaataaatattatacttcttaataagcaactccaaactataataattaataaaattgtgaataaatatattttttttttctttttatggagttttatcatttaacaaataaaattattaatcatattataaaatggcgaagttgaattaagccataggagaccaactgttaatctgtaattattgttgtcatagggtccctataatgtcagttatttgataataattgacgctatatagaccttagttgatcttcaatagagagctataaatatggtgtattgccattttttagaatattttactaaaagttaactccaatgatgatgtaaaatgtgttctaaatttggcccaaagtaaaaattgtgttctaaatttggcctaaagtaaaatgagaaatgtaagtaaatggccatatttctaactctatagatagttaatgtcccttttttaaaataataaagcaaatatcctttttaactttttaatacctaaaataccattcattatataaaaggtattagatgttttattcctttaatagaaattatgaaaaacaataaatcaaaacctctctactgaatttttttcaattattttttcattatataaaaggtattatatattttattcgtttagattttgttgttgttgttgttgtcgaatatgttatttaaccatataattaattttttattaatatatcgtatgatatacaaacaatataccttaaactaatatacatatatcacaaacttaaactaatatactattaaatgaattgttttccaca

SEQ ID NO: 320485 - DNA, 1366 bp, Cannabis indica
aaaatacaggatctattttgtcatttaacaaaatacagagtctaattaataacttttgaaaagcacaggtccaaaatagtatttaccctattattaatgacatttttcgttatcttacacatcgttgaaagtggagggcatattagtcatttagacgagtctgactcattcattcataaggtagatttacaaatacctaaaaccctttcgtcctccattccaattgctagggcttccaatttagattgtgcagaggattagagtcaactcgaatcgaatcccagaaacgaaatttgaatatatatcaaaaataaatatggggagagaaagagatgttgctccagttccaaagcaagcaccacagcaacaagtggctcaaatggtggagcagcttctcgctgtcaatccctacaatcctgaaatcctttccgagcttgaaaactacgtcaatgagcaggttttctcaatacatatttatctttatctcttgccaaaaagagtaacgggctaatttttgttttgcattatcatcaggtttcatcgcagacctacagtcttgatgcaaatctttgcctccttcgcctctatcaggtatgtatgttccacattttcatgcctcttaaagactccaactttagattctgctgagtattatgtattcattttggtgcagtttgagccagagagaatgagtagtcagattgttgcccgcatattggttaaggtctgtttttttattattattattttatttttctgaacaattttatgattgacatacccaagtaatgttattttgttttctctatcttttttatgtaggcccttatggcaatgcccgctccggatttcggtctttgtctattcttgattccagaaagagtggtattatttcgtttcctatcttattccatttcttagtgtatttgattttgcgatattacatgtggaatttgagtattgtcaaacttagttttaatcccttgttgctttttcttgttgatcagcaaatggaagagcaattcaagacactaattgttctgtcacactatttggaggtatgtttgtactactctgttcattggttagtatgcttggatcggaatagatatttacttctttcctttacagacgggtagattccgtcagttctgggatgaagcagctaaaagtcgtcatattgttgaagttgtgccaggtatgttgaattgtaatggcgcacttttctcatttattgtggatattgagcttgagcctatgtgcagtgtgctccatgtgtggtaggtgtatctgaaagctgttgttttagttattagaatttcgttgtaagtgataatgtgttattgtctaataacctttaggattt

SEQ ID NO: 320486 - DNA, 1193 bp, Cannabis indica
ctttaaatatcaattggtgcagacataaacaatagagatgatgtgctaccaatctatataggtgatgataggactgatgaagatgctatttaaggtactaattattttttttttttttttgaaatgaagatattactaataattaatcttagaagttttttcaatttttttttttaaattgaccttttttttggcaacagttcttgctattaactttattttttttcatttcagtttttaagggaggaaaacagaggttatggaattctggtgtccccagtacccaaagaaaccaaagcattctactctctcaaagacccatctgaggtttggaaccaataataatactcttatttttatgattttatttttgtataattttggccttgttgtattaatgaaccctcttattaaattattatgtgtaggtcatggaattcctcaagtcccttgtgagatggaaagagaaggaagaggcctaaagtgtgattgattgttctgagaatatttatatgtataggcaatttgcttagctttgaattgttcttctttgaatagtaatattaataataagcaagctgctgatcattattatctgccaagtgtcttcatttttttcagctgttagatctaaattaatgatggtggattttaccattgtaattatagttttttttttcttttgaaaaataaaataaaacaaaattctatatcctagttaattgtgctccccctattgtaattatctagctagttatctttttttattttcattctgttgaaggataacaacaattcgattttcgagagctctaaattaggaggttattttttttcctttaaagaaaagtgtgcttaaaattaataaaaagtcgttaaatatcacggtcattacataaaaagtttacagatatggtagaaagcgggttataaccaaacttctggtgggtaaacgcccacttagccacattataagcagcaaaattacaagtcctactaactttaggaaaaaatacaactaataaacaaaggagaagacctattacaaaaagagacagttttcaattgcccaatgggaatccttccatggcttgggtaaggcaggcagatttacacgagaaacgaccattactttctagagtccaaactgttggaagttattttactaggaacttagatctactcacaagtat

SEQ ID NO: 320487 - DNA, 1352 bp, Cannabis indica
ccaggaaaaaaaaaattaacgtacgctttagaacctcaacttggacttagaatctaataattgtgattaattaatttatttaaattatatgattatgtttggctttttatttaagtttttataatacaagtgtgctaataataatcatatataataataataataacatggatcttaataacataaaattccttttcaaaaaatatataaatttattataaaaaatctgtaccaaccaaaataggtaaaacatcttcctcattatcattttgataaacgtttattgtgtataataatttgttataataatatatatttttcagaagtctaaataagatcttttgacgatccaataccaacaattaatatatgaaacagttttttttttttaataaaatattcttcgatctgcaggaataaatttaccatataaatttattttttgtgttgctaaaatttatttgtaaggacaccacgtgacatctcagtatgaaataacatactgaagaagatttatactaagaaagcttatttatttatataaatattgaggggttatttagttatattaatatatataatattatataagattatatagaaaggttcatatcaatttataaaaattcccccctcatcatataagaaattttcatgagtagtaaattattgtgtgattaaaattgtaaactaatagaatattaatgtaaatatctaaattttatgtatgtgtttgtatttaaatacttaatttttatttaattataaccgttgtaaaaaattagaagttgcgaattgcaacaaattaattagaattagataaaaaaaaattattcatatttaataatatggaaattcagtacttattatatgtttttattatttggtattgttgtagtatttgataaaataataaaactgtaatttggtattattattaaaatcaaaatttaaagtaaattaagcaaagcaaacgtttgaatctttataatgtaggacaaatttttaaatgattctgttggagaattaattcttttccttcgattgtggaaataatccttattattattattattattggcttggcttggtttactaaccacgctatatatatatttttttttgagagaaaacttgtgctttaatagatgaaaccataaagtacaaagcaaacaagttaaagggaggacaaagatgttagacttttatttgggcttacattaaattttattggttttattaaaacttgggttgattggatagttctttgctgtgttagcccatgttgttggtgatcaattgttaatgggcttagcatctgtgagtaaagtctaggtgaagcagaagtgtgg

SEQ ID NO: 320488 - DNA, 1350 bp, Cannabis indica
atggagagtgaactactataaattttgtgtgtgtcactaaattatttacttaaaacttattaataatctcgccaatctagtgagttgatgttggttactttttagcgtcaatattttggtactttcattgagaaccacaatttgagttccccaactacagttagatttctctactaagaactttgttccagaaggaattcataagttcaagcaagcaatcaacaatgaacatgcaaaataacattaccactcctaatagccacaccactactcagcaagcagcaagcactgagattccccataaggaagcgaactacgagtgagaaattatatctctaatgcctatttcttgaaaatagaacccacaatataaaataatcacatataatcataaaatataaataattaatgttaattgcctttctaatctatattctataaacgcgatcattacattgtacttctgtatctcccatttaatctctccgacacttaggtcattatattttgaccaatcatttaattgaacaccatgtgttactatccctaatgctacgtcacttgggtgatttttgaagaatgaatttattaatatatatattttcaaatcactaaaattagttgaatattaaatattaaaaatataatatttttttttcaattctccaaaataaaataaaacaaattatcattgtctccaacaacaaattaaactaaataaactaaaaaataacaaatttaaggttttttttttagtgaaatttcactgttattataaattagaaagtatgaggaaattctcccatttaacaaatatctccatccaactttaaaatatattttgctaaaacatgcacaactcgattaacatttctcttaatatgaaaagcaataacaacaagtaaaacaatggaaacaggcaaatatgagtttcaatatgggtaatcagactctataaatgaggtcttgaaaaagagcctttcctgtcatctcttcccacctgaaatatcattgtactgactttaataaacgtacagctacaaaatcttcatggttcttgttggaacttttatgaaattatataaaaattgaaaagtgaagtgtgtgaatgattggagtcccacatgggataggaacacttcattagaagtgtataaatagtgcatgtttgagaattaggtatgagccccaaggggtacctagttttgtgcacatgggtgaggactcacacaccggaccaccacacacgtgcgccgccgccgtccgaccgagccgagcttggcgggtgaggtgtcacttaatttcttaaggaaatttttttttattaaataaagatttatttttatttat

SEQ ID NO: 320489 - DNA, 783 bp, Cannabis indica
aagactgtgaagaatccaaacaacaagaaggtgaattggggtcagatcttggtgatactctgctatagaaaggatacaagggttagagatatgagcggaaggagtcatttaattcctctacaaccactgtaaggtttctcataccttttatgtgtttattttaatctttttagaaattcatattaggatgttaaaaacatacttgttagtaaatctagatcctggtaaattatattccaacacttgctccattagaaagttcaaaatcgcgtctctaagcctaaaaaattgtgattagaaagtggtggagtaacaaagattaagcgagggttatctcctgaacttaggtagtaaggactcgaactatcttcatgagcagagcgatgtagaagattttgattgttgttgttttcaacagtaattgaagaagctggaggaatgatcgaatcgttgtttgttggagcatctgaggttgtcagtgaagtatgtggcagaggattttggtcagaactcctagaaccagtagcgtaagttcgaaccatggtgaatatcaatggcagaaccgagtatagacgatgaagatgaagaagaagagagagaaagaaaatttttaagaatctgataccatataaattgaattatctttattaatgaactaatggtatttatacaaagagtgctgaatacatcatcaaccaactaacaaacaacattagttatgaatataactaactgttgggttttatgccctaaataaaactctttacaatctgattagttatc

SEQ ID NO: 320490 - DNA, 559 bp, Cannabis indica
gataactaatcagattgtaaagagttttatttagggcataaaacccaacagacatatgagagtctcattaattatactacattttgaattattatttaggacttccaaataggctgcaatcacattagggccaaccaggtcctaatttttttttgaaagaaaaggcctgggagaccatctttgccagaagcttttaatgggttaatttgaaacaaagccatttttaagtcctcagccgtgaaaggctccaaaaggaatctgttttcagcaaggcttacatggtttgggacacaacgataaagtatggccttgatgttaaatccccggttgcattttcaataaagatggaaaaaatactatatagcaatagcaaagatatcctcacctttggtgctaccattgaagcttctcataaaagcccaaaaatagtgttttttttttcaacatattgaacttcaacatagatttattaaacttaccgtaatatctattcaagttaatatcgcctagttaatcctagatcaaatgatcttaatcctgatatgattaggttcaatct

SEQ ID NO: 320491 - DNA, 1210 bp, Cannabis indica
ataataataataagtaaggattgctccacttcaattccatcttattaaaaggactggtacgacaattcattatgtgattgtgcattctaaattttgagtagtctcccgaatcaatcaattcattatggaaataaatatatccagcctagaaacttttaatcaactaaaataaagcacatatttagtttgtgttttcagagtcccttggtctgggaccaagtttaagtgtcatttgcgaagcaaatcagtctgatgaaaaacaggtaatatgcttctctcaaaattattttccatcattatttactaaaattttgtaagtgatttttaagtgcagtgtacaatcatgctgcaacaaataaagtacttcttcatagcattggaataattttatgtcttctgtctttttcttaatattaaactttgctttgtcatgtgatttaagtgtcacaatgacaatgatgatattattgttttgattaaactagattaattataatttggattaggtgagaaactaatttctgttaattttttatcaaatgctaaccatttctatagtatagttattcatgtttatagcgattgcattgcatttggacattattagaaagaaatgaggtatttcattggtctacctacatggtaattcgtttgttctataaaattattaatccgattatttgtgtcgcaactttctaatttatagtcttggcattttcaggcacataccagaaagtgaatattcttttattggtgtgtaaaatcttaacattaatttatcacctaaaattttgaatttttttctcttaagaaacatgttgtatgaattattgaaagagggagtcatatggtaggtgtagataacaagaaatgctaatagacactagatatatgcactgatacattgcaaacatttcctttcattagtaactttgaaaaaatattatatgtatctttctataatttttacaatctcagttttagatatgtatataacttttctattaatttttattgtaaaacaatatttttgtcatcttaatttttactaaacaccaaattgtaatacaaaatcatctccaaagatctctgtcaaagcaggcatatgccaaacgtgaatacccctgaagctacagacagaacacctggtaaagagacctttttcgtacttatcctaattgttggttcaatttatgcatggcgaaaagga

SEQ ID NO: 320492 - DNA, 896 bp, Cannabis indica
aatttgtatgtaagtattttcttaagtatcatatgctccaaaatatgtttagttttcctccgttgttcttacttttattttttaatttttctacttcttttttacttttgatggttttttcctatatgttctcttgttgtatcccagctccccacgtttgctgcatttgttaagttatagttttccctagctagcttcgatcctctttttttgtcttccaaattttaccatttcaatgggaggtaagactattactgtcaataattttttcattctggttacctcaaataaatattcagtggttggtttaatatgtgtaatttgaaaccaatatttattaaatatacaaaataaaagtggaaccacccaaaaataatattagaaaaaccatgacagcccaagtattaaattttttaatgtttctgcttcatctcgctggatttaatggttatttttttttgttgtgttgctgtggtggttcagtctgtgggtgtgaaagatggagacctgatttttttattttcagtgtttacagtataaaataaaaaaggctcaggtagtaaaaaggtaatttttatcgtaaaaaagtataaatataaaccttcgtcaaaaatttggtatatttttgtaaaaatccttttaatataggcttgtttaccatataatatattttagaatctgtattatggttgaaaagaaaaactttaaaaataagcacaaactaaaattcctatattaaaatatttaaataaaagaatatagcatgtaaaatattgcattgatatgacaataaaacacgatggtctaatatgcaaacacttgggcctcctctatgatctccgcagaacccctcttggacctctagcataattttcttagcttcagggtccgataca

SEQ ID NO: 320493 - DNA, 745 bp, Cannabis indica
  modified_base (702)..(702): a, c, t, g, unknown or other
gtgaggactacgtcatcaaggaatacactaaggccatacctttgaggaggaggacttcaccaggagatcgatggatttccccaccattcgtggtaaccatgaaaaatatgacaaatctgctcaatcgtagtctcctcgagaatggcgaaggcttccttccctcccccggccagctggctactgacctaggaaaagattactatgcttggtcaagagctcacactaagcagggcgcgatgctgccctcactcccaagtgtcttaaatatttatcctctctgttcgtactccacgccttaaagggatggggtgagccatccccacatgataccaactggctcttcgacctgaaattaagtcccaagcaaaaacaggtcatggtacttctatttctctcaaatcgagaagaaatggttgacggacaccacaaccactgaggtgaaaaagatagggggcttcgtcaatgagtactattttttcaaggggatggataccattcacactagttttagtacagacgccttccattcacactagaacttaagaatagggctttaaaaaattcttcaactctctcctgctaaaacggaatatctcactcttggatacggatgctaacttcaccaagtacaaactactatctagcagactttgtaccaaaggctgaggcactagaggagactagtccaaacaagaggctcgngcaagagaagaagaagaggaaagccctccccaaaatctaagta

SEQ ID NO: 320494 - DNA, 1070 bp, Cannabis indica
gggttttgattttttttttttctggataattctttatggtttaaatgctttgtaggttgtgattcaagtttgttgagtattgcaatttggtatggcttgtctgttttttttttttttttttgtatctcaagtgttgtgttgagctttgtttgatgctcaaatagataccaaagttagtttagtttaattttggttaagatttgagcttatgcatgttttggttaagttggtagggattgttaggtaaaaattcgaagttgtgaaaaaatggcttttgggggttacaaggcccctcgccgcggccgcagctgggcttgcttcaaggtgggcaacatgtatgttgctcgccgcggccgtggccttgctcgccgcggggagacttgctttccttggagaatttttgggtttttgtttttgtcataacttttaactcgggattctctttgggacgttcttgatatcgttggaaagctcgttttggactcgatatgcttatttgtaattgaaatgcaaattatgtgaatacgtgaaattgaattttgggattaaccctatttgtgaaatcccaggaatgtgtgactaggaataccagtgcttgctcaggaagaccaggaggttttgaatctccacatacttgggataccaagtaagacaatagttagcacgtagagttaagcactctggcactcatatttgatattatgcttgtgattaagtgagaaaccggaattagggttattaccctaaagtgagcaattatatggtctaggattattactctagtgtttaaataattttgaatgcaataccatgctctacatattgagataaagaattatgcgggtaaggcataattaggttagactcggtaattagaaccgagacaaaccaatctaaggctttattgtaaatagacgtgtgagcgcaacacgtaggtctatgttaaatatacaatagatgcgatggcatcagtatttatttgaattgagaatatattgcatattgttatttatactgtcttgctgggcttggctcacgagtgctctactacgcaggaaagggtaaatcaa

SEQ ID NO: 320495 - DNA, 771 bp, Cannabis indica
aaaccaaataaaattaatgagaaataaatagacaaatattctacaggctagatagtattcaaagaatggagacagctcaaatactagctaaccaaatgaaatatggttagatcaaatcaccaaccctaagaaacaaagactataaaccctaccaaaaactaaagtgatggttaattatgaacaacaaaagactaaaaggcatatatcgtccccaattgattttgtagttcaagtactacacaaaattgacataagcgccaaagtcctcgaaggacaccctaaaactacaaacacaaaactagaccaaaaaataaaactaacataataaaactaagcaaaaccaaagacgagagaacaaaccactaaatctaggactgaaagaataataacttaagctcctccacctcgccacccaggtttggccccaagaccaccaaacaaagaaggcgaaaccaaaaatatccagtgcccaccactcatcatccacaatgccaagacaagataagaagcgaggagatctggccaaccccgaactacaagcccaaggttgacggaaatcaatgttccaccctcttgccgatgtgattctatgaccattaactcgctatagagaattttatctcaattgtgatttacatcttagtactcaatttttctattaaaaattagaaggtagtttggctggagagtaataatttatccctcttctacttattgttttctctctagttttttctttttggatataatgacacacatatatatatatat

SEQ ID NO: 320496 - DNA, 882 bp, Cannabis indica
tatgcgtgacttgtaagattacttaccatgaagggtttttcttcacacgcgacacacgtgtgtacatatatatatttatatatgtacattttattttaactttgtaataaataaagtctcgtaaggaccaaattgaggaaacacgtgtgtatgtcgaagctaaaatgcacgtttttaatgtatatatatatatatgtgtgtgtggttatggaggtgactacgtttcaaattttcctgagtttatattatattatatgtaataaacttgaatttaattaattaaaagaattattaatggttctttcgtctttcaacctccattgatggcgtattcaataaaatcgatatgtctttgtctcacggcagtggataaagaatttaatgcttatttcttatcatttaatttacatagctgtactaacaacagaatatataatgagataatatattgtttctatcattttaagtatttatttgagtagagaaataacagcctttttttattgccatttagtacaagaaagtcgaacttcactcattaattatataaatataatatatatatattgccttagattggttgtataattattgtacgaaaaagcactgcgtgatattttgttataaacatattttatttatttattctgcgtacccaccaatcctatcctacgtactcattcatataatttattttactttaaaaaagtccatttaatatgatctttctttcttatataattcatatatcaatataaatacttgcccagttttaaaattgatgggaaatgaacttttaaaagtcattaagagtgttcgatgtcatacaatatttttgaaagaaaatggaaaatattattaattaacaggtaattcattaat

SEQ ID NO: 320497 - DNA, 1064 bp, Cannabis indica
ataatttatatattttttaaattaattattaattaatcaataattaaaaataacttgtactaactttttcttgacatgttaaacttaataaatcaaataagagtaaaaatattttgaaactttaggatggagttactatgcgaatatataattattaagtaaaatttttggataattgcaatttttaaaaataattttctttttaatattgatatacttaaattttaaagttttaattgtttttatttagctgacaattttataactaattgtattatctttttattcattaaatactacaaactcatttgtataaaaatgagtttaatgtctcttataaaagttatattaaggtatattcacgcctaataaaaaaagtattaagtttgaaaattaattaatatatttttgttcatcaattatcattaaatatattttataattttttttaatttattttgaagtaaaatcacttttataaaccagcaaatacaggtaccaactaaggaagcatctcagttgggacatcccccaaactgaaactacgaccaggatgtaaaatggaaactctaacaagactatgagctaccatattagctgatcatttagtgaaacaaacagagacatttttcaactcattaagaatacacttacaatcatgtataacaataccaaataaagagatcattttgacatgctgcgaagtgcttgtaccaccgtaagacaatcagtctcaacataaacctgctgccactttttcctctttaaccaacttagcacttcccaaattcccattgctttcgcaagagcaggtttagaggctgttggaatatgttttaccaggatctagatttactaccatgtatgttatttaatatcctaaatacgaatatctaaaacaatgtaaataaacacatataaagtttaggaaaccttacattgggtgtagcggaatattaatggctccttccgcttagatctttaacccttgtatcttgtttgtagcagagtatcaccaagatctgagctcggaatgtccttctcttgattctggattcttcaca

SEQ ID NO: 320498 - DNA, 2176 bp, Cannabis indica
gggggaaaaaatcttgattagcctatatattattatgttttttttaaaacataacagtatgaacaaaatcaaaaccctccttcgttgttcgaacaaaactcttagcttcccatgtccattttcttcgattttcaacttgaaacctagcgatttaggctctggtagttgtaggatagcgagtcattgaaaagggagagcttaatgtaagaattagtttcattttaagtcaaatacaattgattttatatagtggttttatgaattaaaataattattgagattctgaccctataggattgttctcaggttgtcattggactagttttgatatttccttgctaaaattgaggtaattttgggttaaaaattgagtttggaaatagcttaagtctgaacattagtggccttgacaaattaagggctcgattttagtttctattacgtaaatatggtagtatgtaatgtatatatgtgtcccatgaagtttagggtggtgtggacaggttttggtagcatttcggtgagtgtgtaaacttggaaaatcacacttttgtgcccctaacaaaccgatcaacagattgggaaccggtcaaccgttctggccaaccagtttaccgttctggcagccgcaagaactctgcgtatttttgccataacttttcacttcgatgtctatagttgaagttctatatattgttttagactcgcaatgatctttaaaatatgatacatgatttagagccagaatataagtttgattttattgcatttgaactacggggtcttgtaggaaaccttaagttgtcctttgaaactattaagtagtgttttgggaaaaatactcattggtttattattgttatgacatagggcccgggatcattgatcataccttatgcaggtcagccaacatacttgaagtgaaatatgacgtaagaaaagtataatgtaccacatggcatgacaagttctgaaattatcgatgttctaattaggcaatgacaatgtgatgatactatggacataatatatgggctcaccagattaggtgatgcaatataactggtgacattgagcataggtacaggcgttaatgacatacgatgagtactgagtgtaggtacagggtcacctgattaggtgatgcaatatggctagcgatggactgggcataggtacaggagtcagtgacatatgacgagtaccgagcataggtacaagctcacctaattaggtgattcgatattcctagcaatgtatcaagcgtaagtacgagtgtcagtgatatgaaaatgccttcttttggcatagatcgaaacaattattaggtttcttcctaccgacataccttataaaatacgggcggcactaacatatgaaatttcctattatggcatagatcaaaattgttgttaggtttctccctagtagcgtaccttattaggtacgggcgatagtgacatatggcttcacttacatattttttcatgggagatggcttcttgtacgacaccatagactgagttgtcgcgtagattgtctctatgtcatctgttaagaatgagaaagatgtaaatttagaggcacttactctggggtgctgctcagcattgcaagtgaattttcctttctttccattaccctgcctgttgctgttgttagacctcttcccatttgaatccaaactattgggatattgtggattgtggatggacatccccgtcgatgcggtgcattgttgatttttcttttgcccaatagtatccacacgtcgaacaacttctttgagcttaatgaacccatctgatcgatctagaaaatcaaccattgatcccacagttagccttttaatgtctttccacaattcactgaaagtctcaatgcccccagtattgcagctagtattccttcttcagtcagtcgcttaaccttcgtggcttcggtcatgcacctgcgaatataagcgctaaggggttctcttagcattgtctttacttctaccagttcttccaagtgtgagcgaagctaacatgaggaggaaaattgtgcatggaactccgatgagaaggaattccctgagttaaaatcttcctggaggcaatttgaaatacaattgtaggccgacctctatcagtgttgaaagaaagattctacaccgtacattgcctcttacccc

SEQ ID NO: 320499 - DNA, 750 bp, Cannabis indica
ggaaaaataataaattgatgtaatgaacattctttaagaagaaaaaaaatcaaatcctagaatttatatatgtttttcttattagaacacagaaggatgcaagcaagagcgttctgagtttcttagagcatctctaatgttaatatttttttaaaatgttaaaaattttcatattatttaaaaatgtaatattttattttatttttctttcatattaatttttacactcttagttttaaaacttgtacattattatttaatatattatttgttttaattataaatattgtcacgttacttatatacttaattttttatttatttattttaaagagatagtatcaatgtcatgtggtgacatcaatacaattttttatgatagcacatatttaactccaataatatattattcttatattttgccaaataagaaatctatataagtatcatctaaaatttaatcattgaagatgatcttatgagtagcaaaaaattcatatttactgaggctacttgagattcttaacatcaaaattatatgtatattagagtaacttacgataaaaatacttaaattttcacatttgtagcacttaaatatctcagtcatttttttagaggttaaaatatccaagttcaccatttattggcagccgttactactctcaattatttgtcagctcttagttggtccatgtaatataatggtgccatgtcatattttttttaaaaaataattttattttattt

SEQ ID NO: 320500 - DNA, 1296 bp, Cannabis indica
agacttaatataaacataaatataggagttatacaaaaaatacgaataattttttagttataaaattttgttttaagtaacaataaaatctctaaatataagaaaaattaaaaaaaaaattgaaaaaagttaaaaaattgaaaaactctcatatatatgatgatgtgccatatcactttttataaaattcacattattaatttggcaaatatgaaaaggatagaatatgtaaagttgaaaagtttggattttatgatatattaaaggaaaatatgaataaagatagaatatgtttgagtgattatagataagtatgtaaattaaaatgctaccatcaaaagccatctcaaaagtcaattaatgagtttaaacaaataaattaaaaaaaataagaataaatcaaaaaattagaagataagagattacaaaataatcacaattaggctgccacatcaactcttaaaaacactcctttatatatattgatgatgattagtattaattagttaaattattataactaatcctaaattttttttaaataaaggtcattactagtttgaagtttaatcaaaaccaaataattatgaataattcaaaataaaaatttagtaatttattaattttaattataataagtaacttttaatttaaaaaaaaatgtattacgtaataattagaaatgaaacatgtacattagcaatataaattaaattaacaaattatttacttaaatttaacagttagtaagagaaataatttgaatctatatattaatctcaattgtaaatttaaataaaaagtaattgatagttaaaataatattaaattaataattgaccaactaaaataataagtgaaactattatcttaatttaatataataatttattaataattaatagttggtaaattttaataaagtgatcttattaattttaaaaaaaattcgtaatttttaatttaaataatatgtgacataaaattaaaagaaaatgacatatgacattttaaaattgcaaaaatgaaattcttctcttgctttgttctgttttgttatcaacaaaacacaagatacaaagattgcttttgtcttatgttagtgataatttgaatttattttttacacaaagaatttttaccttagactcgtttcgagaggtaaagtcagtaaaaacacaaatatgcttctcaaaattatgaaagatatttttgcattcaaatttgattgtttcattagtaaagatttcactgtatattggtctgagtagtattatctcttagtatcaatacaac

SEQ ID NO: 320501 - DNA, 1500 bp, Cannabis indica
accctaaaacctcttttcttcacgagtaagccctagcttagtaaaaccaattacctaagtcttacaagcagtattatctcaactagtatggggaccatgggcctatacaatcaagcttccaataagcagatctataattaactatgtaaattccctaacttattaattcttccttgcatcactatagatttggaattgcactcttaattatatagatcagtctatatgttccacgctatagatatgctttaaattatccatcattctaatcccaataattaaagaccctctataatttatttacatcaagtaggaacaaatttaccgttccaccgctcaatgtattttatccttcaaacacttagcttcctataaatgatatttcagtaaactaatatagttaccgaaataagagctcttccacttatctctattaggccaagctcgaaggaaatcatcatgtcagttctacatccagatagaagcaatagattccgtctctataattagtactcccactcaattgtactatcatgttcctaagatgtatgtgttacccgaatcaattggtaggctttaacgaacaactttaagaacataaataacactcttgagatcgaacctaacaatattaggattaagatcttttgatctaagatcaaccagtgaaattgacttagaaagatacaacgataagattataatatctttaccaagatcaatatttgtctcagtcctatgtatactccatacattcgatactagcatactttgccaatatcatggaaagaatataaaacttatccaaggtgtaagtatggaacataattttttgaagcttataatcacaattaccttccactttcttgatatcactgtaattgtgaattacaatacattctagatttaacagaaattgtatattaaaccatagtcatgaataatacatataagcataaatgaattctaatctactattgataaaaaaaaaaatatgattgtattcaaaaggattttatttagggcataaaatctcaacaaacccccacttgcacaaacataaaactagaaaggcatttcaatcaatctattttcttgatatccgtatcaagtgtagtacatctgatcgtaccttagtaatagcaactataacgctttggtaagcaactgctatctccaccattacttccttcgtgttcataaaaatattatgcaacattattttttttatatgtgttactcctctagggatattgaattctttactacttgattagtgaatttgaatatacagaagacgcatctctaattctatcggaaaaaggaataaaaatgtaacaataaggaactttctccagtttgaataactttctagtgccttttaaaacaactaagttatttatcttcattagtgaaactaaattcttatagatgggtttttacatccttctagaataatttctccaccgccagagtaaccaccatctctgatattaagtt

SEQ ID NO: 320502 - DNA, 544 bp, Cannabis indica
tgttctccaccaatcattcatcgcgatgtgtcattgaataatgtattacttggctccaatttcgttccaatattgtcagattttggtacagctcgattgttgatcccagacttatccatttggacaaatgtagctggatcttatggttacatggccccaggtaattactattttactcgttactaattagtgtttgcatgaattttttcaagtgttcttatttttaaaatttgtattgtattgcagagctagctttaactatgcgtgtgacagagaagtgtgatgtttatagttttggagtcgtagctttggaaattatgttgggaaagcacccaggagaactgttggaatctttatcatcagctcgaccaaaagatgtggagaatattctattaaaagatgtgctagatcaacggttgttacttcccactgggagattatcagctgttgcagtgttagtggtgagcttggcattgtcatgtactagaagtagaccagattcacgacccactatgcattttgtggcacaagaattatcgacaag

SEQ ID NO: 320503 - DNA, 886 bp, Cannabis indica
tttttgtctcactagaaaatatttaataaagcaaggtttaaataagttacgtatgtagtaattatatacaaatacattacgtaatagctattatatactagctagataagagtgtatgaatgcagctcatgtacgtgttgtactaattagcaggctaaattaactaattaattaattagcaatatttctgtggtgacccatcatatataggaaatgaaatgaaatgaaatgaagtgcattatgtatgtattaattacttaaatttgataagtataaatgccaaaacatttattcagaaagtgaccattcaaccttacacattaccaccataattaattaatttattatttcattaattgcttgttcacttaaaacattttctttgctgatagagactagagttgtgttgtgtgtatgagaatttatgagaatgataaaaaagtgtcttgattgaaacagatggaataataatgttaattttatactcaataattttgatgttaaagcatatttgacaaaagaaaagagcatcaaattatttaacatcaaagattatatacattggaaaaccatagtagtataaattaatgaaaaaatatataaattataagtccaatcttaagctaaggtgggctacgttcttgcgtaaggcccatccaaactctcatccatacttcaacccaataatactcaagcactagttttattgaaaaatttataccaaatactatttttctttttaaattttataattatactttattacatttatattttctctacttaatttttttaactatttttttaaagttttcaattcttttttatcttttttatatttttttagtccagctttggctgacatttttttctttctatttttttt

SEQ ID NO: 320504 - DNA, 709 bp, Cannabis indica
ataattttaaagaccatgcatcaattatagagactttatgtatagtctgtcttaattaggtcatttggtaactacttacaacaagctagtttttagaaggaccaagcttttaatcccatttgagagtggctatagtgagtttcaaactcttaactcaaacaatgaattataccaacaagtgagacaatttatatcattatactacacaacatgtagtataaataatattattaagccacatgatatattattacactctattagaatcatctcattggataaaaataaaataaattaaaaaaatatagaataaaaattgaaccacaattattggggttagagaataagaagttttaaggttaggatgacaaatttttaattacaataaaaatagtttgactggaatcaagcttatggtattattatttttctttttgtaaaatattgaattcatattgtcatttaataaaacagaatagtataattttttaaatagtaaaatactatatatagtaaaaattctatttaataatactctatatttaagaataatttctaatttattatgaaaaattaagttctaattttgataaatataaataaaaataattcttaaattataattagttttatattttttaagttatgaattaagaaagtatatttaaataaaagatataaatttataaatttatttatgtaaaattaa

SEQ ID NO: 320505 - DNA, 1081 bp, Cannabis indica
ataataataaaatatggtagagatttcaaacattaacttcaatatccaaatacaataaaaattattaactataaagtctaagttttaagttaaacactaaaatgtctaaactttaaatacaaaaaagtttaactaataaatgtaatttatgtgatataatatatacacttctataaaaaaaaaatatataaatcggtttaattcggtttatttgggttaattgggcggtttagaataatttgtaaaccacccaatattcataaggcggtttggattttcattatattatttcgggttatattttttgttcggtttattcgggttgggcggtttgtaaattttgttcaacacccctactagttacaataagaattcgtatgtagaattctgtaaaatagcaaaaaaaaaaaaaaaaaaaaaaaaaaaaaaaaaactaattttaaaatataaaaatctatgcattattatgtttaagagaaatactacaagatatcagtagtaacactaattattagtgcttaatagatgctgtatgcttaatgaccattttgttattgaacagaaagatgctgtatgcttaatgaccattttgtattttttctgttcaaaaataaaaatggttggaaaaattataactgcgtgtcagaatgaacattggctattatcgagcctacatgcatttgaatgaaccctagaactgaaccaaatacattcttacgaacaactgccaatatcctgggcaggtttaaatggataatattaatatagacaaaccaaagacaaatgatacataattggattggcatcgtcagaaatttgaggttctgtgcatgttagtaaactcatttaaaaaatatgtcaattttactaataattacctctcattatatgtttgggaatgagaataggaataagaatggaatgaaataaaatttaaaatgcaataaaaaaattgataaaaaataattaattttttttcttgttacattggaatggtcattccttcctttttaaaatggaatagtcattctaccaaaatagtggaaagagcattccattggaatgtcattccaatacttta

SEQ ID NO: 320506 - DNA, 2901 bp, Cannabis indica
aacgcagatttttgttaactataattaagcctaaatattaatagatttgtacagaaaataaaagtagtaacagtaagatatgaacacaaaggtttttacgtggttttgtagttaaaattctgcatagtccacgagtcaattttgttagatttctgatacaactccaagccctttttttaatgattttttcgtccatttttcagtgtatttagcctctatttataattacatactaaggcagtcaattacatagtcgactgatttcttgcaacaagtatcccctaaaatcgtggggcttgattacataccacgtaaaataaatatggctaatatttgaaaactacacagctgtgataggtccgcttttaccgagtcaaggtaaacgtgtattaaatatgttgtaaaccagaacgttctgggatatctcactgggagaacagtcacaataaccttggtagcgagctgaaacttttttcatgtctttccggggttaatgatgtaagcctcgtcgtttctgcgcttgaagacataatgctctatctaaaaatcgcagttcttggcgacaaggtagacttcagcagtcaacatcatttgtatgtcagcttctatctgagagagctgactcgacggagctgtgatctccattgaaaggtgtctggagctgattaatgaaggtaccatgagcgtgccttcctattgcgagatgggtgcctcggtattagttgtttggatttacccgaatgttatacttagtttgtataaggtgtattatacactaagtgtcttaccagtcaccatgtctcgtctcctaatgcgtagcgaggtttatgcctcgccttgtacatttaaatttgtatggtttctcgttaatgtacgaatcgacagttgacatatctttatcttgcatacgaccttccagtcagcaagttgtaaatatactctatcaattctgcattaatgaattattctattttcaaatataccgttacattcatagattcgtattcttcccgatttgacacgtgtcctcctctgaaatgatagccgaattttagatataacataaaatatgatgtatttataaatttttggggtgtaaataaaagtttcctttttagtttattaaatttagttattgtattaaattataatttttttacattatttttattcttttacacaataaattaataataaaattattgataaagttatagtttttatatttttgataaaaaaacattaattaaatattaaagcttaattttaaaaaagtattaaattttgtaatttctaaacatggatttccttggtacttttcaacacttaagtgagaggtaatttgtaattttcttgtgttattgtatcgttacttaaagtggtagccaaagtaagttaacaacattcttattgtagtaaacattagctagttagacgtaaaaaagatgcaatatgcgtttccttcttgtataggaattttgtgttgtttcattgaatcttattatggattaaattaagtagtatttttgttaatctattttatttcattttgtaatttatttttggaatttttaattaaaatttgagtaactgaaattgagattagtaattgcttaaaaaattgatgaaggtaaccacaattgcaaggtaaattgatttggtggtacattaattttttcaataaatgtattgatttgtttaatatgatgctaattgtggattgaaactataatttgtggtagcatttgatggttttttattaaatgcgttgtaaattctataatatggaaggttgtactgattggttgattttgttgtagtttctgttagtcgggtttgatatctttaaatatatgtagttttgttggttatataacgtattgtggggtaaaatgtaagtcttattagtgtaaatgtaattatcggtggtcttatttgtgtttgatctctcttcagtatacctaattgtgttggttatgtaacataattttgattattgattaacgtaaagttgatagttttgtaacgtaatggtagtgtaaaagtgatttaagatgtacactagtatttgttatgaaagttttttcaaacaattactgttgatggtagttgtttattgtttatattgactcaagcggtgaattgaataaataattgtttaatactatatacatattcagtggcagtaattttagatttgataatgaaactaaagtaaaaataaattatgatagttgattctgcatattaaaatttaatccgtaaaataaaaattaaaatgtacaagaacccgataaatatgtaggctagtgtgacataaattaattttagagtgggtgccacattgagaggtggttagatgaggaaattaatatttgttattggttgcatgaaattttggatgatctagttgagtcgtgtcgatggtgcggatgtgttgtattggtggtagtaagacgtctaaaatcatacttgtgtactctatgttagagtgatggtaaactaaatgtctagattggttaagtgctaagactttgacaccaattgaccatacttcatgtatccttatttatgattctatttcttttgtagattcttgtagcgtgtatgttgtcattatactcttgggttgttttatgtttatatcaatgatcttgtcatggtgggggtaatatacggattcagactttgttcgtacacccaacaacgatagagagttttgattgagtacggtgctatacactttatgaatttggttttgtaagttaacaatattgatggttggactttgcaaatcgagaaaacacactatgctatcaatacagtacattattaagttttgtgctctaaataaaatccatttcaatatagtcaaatttactaattaataaatatcaaaaa

SEQ ID NO: 320507 - DNA, 1337 bp, Cannabis indica
aaaaacaaaatataagtataaaaaccaattttgacttggaaacaaaataataaaaagatacttaaaataaaatatataacaacatcataaaatggagcaacctcattgcaaaactttcaaaacctgtgaaccatgtgaagctattttcaaactactaaaccctatgaaactagttttgaacctataaaaaattataacaaaatataaatgataaacaataaaaataactaaaaccagtttcattaattagtcaaccaaattgaaagaaaaaaaaacacacacaaaaaatactcacaaatataatcaaaacaacacacaatgcacaacaaaaaactaaaaataaaatatacatgtgaaaaacaattttaaatctagaaacaaaataataaaaagaaacttaatgaaaatgaaattgcaaatgactatcatctacctccttcaaggtaaattgtaaaactatgtagcaagttttcattaaaatgctttaagtggcaggaactaaacttggtgcaaagtaacaatgacaagaaaagagaagaaaaaaaataccatttcatatatgttcggactaaaatgaaaactattgacgacccaaattcaatcatccattcttttataacactcaaatagatcggcataccatcaatagcctgtgcatctacgctctttgaaagatcatcatcaagataaaatccacttccatcatcaacaatcataacactaggtccgtatattgtaacatcaacatcagaacaagatttcataggaagaagctctagtgaaactaatctcaagtctgaattgtagagcgaccaattatgaagcatacttcgaggaagctcattaggatagcacatgtccaagtcactatcaaacagaatgaactcatcaattttgtcggtaaaggtcttgtaaaaagcaggtagatgatagtcatttgtaaaaagcaggtagaggaaagtcatttgtaaaaagcaggatcgcttgtagccaaaaatgcaagaacagggacagaaggagggagctagtgtcggccattagagagagaaagtttaggatttgtttaggaagaggctcatgaatacaaaatatgggatctaaagaaagtctttacctaaatatgacatattcaaacccatataaaagtttaaaaataagtattaactgtaaattgattattagattatttgttaattgcttgaataatctgttgttggattttgtgccctaaaaaaaaccaatttcaatataatcagatttactaattaataaagattagaaatcgttttatgttgcatggttcacatgatttatttcatgattatgtttaatgtata

SEQ ID NO: 320508 - DNA, 1404 bp, Cannabis indica
taaaatttataatttcctcaaacaagaaaaatatgaggtctctaccgcatgataattcttttgacccctattagtgaaacttatctataatcaatttaattaattggaaaaagtcacctagttagtgtatagaattttggtgtaaaaattgggtatatatatcattagtctaaaaaactaattagaattgtatcaactttaatttcagccctataaattataaattatttgaatattcttaagaaatttcaaaaaaaacttactaccatagtcacaattataaatttattttttaaaaaaggcattataatttctttttaaaagttactttatcataaatgctaaatgacattatgaagtgttatattattattcctgtaattttatattgaattctatttattttattattattcctgtaattttatttatttatttataaaatactacttcatagagaggtgctagatagcattcatcttattatatacttttagtttggttttgatcattcaaaatcaatgatttttctaaaaattcaaaaatcatgcgaacatctcaactatagaaaagagtatttttattattagatactagtagtatttaacactacaataaaatgacacattataaataattagcgatattttataaatttattatattaaattatatacaatgagatatttaattatacaaatataacacattgagtaataatactaagtactattagcgttatttagcatttctcattagaaaaatgaaaaaattataatagtgtaattttgtaaaagaaaaatactaagaggtaccttaaagtgctaaccactaacacgaggtactatattgctatgttattggtgtaatttatatcgggtcctatatattttgatttaataaataatatagggaattgctaaccactcacaacgtgccacatgttgggtactttatggtacataatacaatgctctttgcaaatacataatttgttgaggtgtctaaaagtaggagtgacaaaacatgttatacgtgtcgtgttcatgtcatattttatgtgacccacttctatatttgtgttatgaaagtcgatccgttttttacttgtgtctaattttcaactctgactcgacctgtaaaaagtcgtatcgtgttcgtcagtggcagacctaggattgaattttagggtgggcttagttatacatttaatataatctaaaataataaataactagctaaatttaagtggaatgatagtttagcagcatcccctattttagtggtttaataaataaaatgtagatacaagtagaaaaaaaaatgagcaagaaaattcaaaacatagtctttcatgtaaatttgaagaatcttaatcaattgttctattttaactgcaatata

SEQ ID NO: 320509 - DNA, 864 bp, Cannabis indica
tttaaaaatttataagtgattagacaaaaaataaataaaaattatttggaaacaaattggaaacttaataaaaagctattttaacgttcatattcttgtccggtaatttctgtcctatatgaaggaaaaagggaaaaaaattggagagggcaacagataagataaggatttgaaaagtaggcaatagtacaataaacgataaaaatgccttgcaaaactaaaagtaaacgaaatatgagtaattgttttacgttggacgaatgaataaattcgtttttaatggtcaaaatctccaattaaaatatataaagcgatgaattgtcaataaaaaaagaaaaaactacattaaattcactattaaaataaacgcacacccacagataaaaaattaaaaccagacttttttttttaattaatgtaatctaattttaccatatgggaaaagatttttcttttttaattttttacctgtccggtataattgtaagaacaaagggctcttgctcggagttcggcggcgaccgtgtcccagtcccgagtcccatggcggagtacggcaccgcccaataagagctcctcccacgtgccccactccccttccatcaccgccgttaccatttttacacgtgtacgctcctaattcaaaaacccaacgccaccgctaatgactcgtcagaccgcaagaaccagaaaattaaaggaggaatttgaaatttttttttggatattgggtatattggttttgtaaaattggaaaaataggaaacaaattgataaaaacgataaaagtggttttggtggaatgggaaggtgaggtggtttttgtttgtttttttgttagttttttgggctttttggttttaa

SEQ ID NO: 320510 - DNA, 1197 bp, Cannabis indica
tcaaattagtaatttattgataaattaattggttatttatttgttttagttctatatgatgcataaggggagcagggctaaggcaaatttgatttaagctatgaatatttattgtttacaatttacttaattttacttaagtaaaagcttaataattttttttatttatattcgggcccccaaaaggtatgggccctaggcacgggcctacttcgcccatgcctagggctggccctgcctactacttagggcagcttctcccgacgactagacaaaatgtaggtaggtactttaaatgagtatgaacattttatatatgagaaatgttaaagggtactagtggtgcctagtactttactatgtgtcaatattattattcgtttaattaagtattggatcccatataatttgatataataacttttatgaagtatcgctaaccaatcgtaacacgatgtcaagaaagtgttagacactgttagtacctaatagcaatattactctttatatatactcatgaatgacacaacattgccaacataatttatttatttattttttttccgaaatggacttgtgaatataattagtagtaataaaaaaaatctttagatgacatgagaaataatgattaattttgtcttttggatagtggagccattaggaaaccgaacacaaatatgttgatatagtaatgtgaacgtacacatgacattaccgccgaagaagaggatatctaaagggtttgacttagttataaagtcgccatgtgatatgaagtggttattcgaaataaaaaaagtcaattaaatctcataattgttgtatgtacacaaactatataattagcaaatatttctaagtcaatacacaccatataatcaaagtctaatacataagcaattctttactgtctatttatcttttttaactttcgataattgcatgctattttattatcgataattgctgtaccataaatatgtattaaatgtgggatgggaacacaatttcttactttaatttttacactaattttaaacctttcaataaagtttaatctaaaagttcaagttaaaagcatatatatatactaggtgattgttatgtgccaagccacgtagtgttagttttatttaatatttagtttttttatttgaattaaaaattaaaatagtataattattagaacaattt

SEQ ID NO: 320511 - DNA, 1761 bp, Cannabis indica
aaggtggcagtaaagtttgattacttcaaaattggaggtcttgtaagtatttttcttcttcttatatatttatttatttttctaattttggagaagggaaattcttcttcttggtttataatattatgtctgaatgtgatgtcgaatcattctaatttgtgcccactattataggttcgaccacacttagttttaaaatgagtttgtgcctagcattattcagttttatagattaaacaaaatcatatggcaataccattttcgcataggggtaaaaaattggtaaaactctttcctagggaatgctggaacttctagacacctattttaaactttaataaattactttctttaactaatttcaaatttgtgtgctctaacatattttagttctcctacaacgttccaagttttttttctctccaatacaatagataagatttcataaaaggtagttcgtagtctgatcttgatgtctcggttatataattactgatacatgcttaattcttctaataatataatggcttcagccgtaaaaaacaatgtcatcagtagaatttttttctattcattgctatattgtaagtgattaatgatggttgaattcatatttgcttatttcatgatatacagattccagttaaagctcctgatagagcccgtggagaattagaaataacatacttggatgaagagttacggtaagtaaaacatccttgaaagtcaaaaatacatatgcatatatcaacctcaaaacaaataagacatccaaagagtcttgctaaattgatttcctgaaatttactgttacatacaaaaggacctcaaacttatagttttgcttgaaaaacacaaactcttactgtgtagaaagaggtctggtaggttggttttgtgtaattttttgttcatacagcttgaaactcgtattcactatcttctctgctgagaactaagtcctatagatgctaaaaatacatactcctaatgttctttagggaaaataaaataaaataaagaaatagataatgataaagaaaacagcctttgtgtcatcaatgatccttactattccaaccatattaaaattatttgctcaatatattgatgatatggaggaagacatctcattactttgttttttagtatgagcactacttcatggtctaatagcaaagcaagagaatttatgatattgatagccaagactaatctttctaatcacaataatttattattttgatttactcagtagtaatttataattataatacacttttcaagtggtaaatatatcttatagaataaaattatatcacaaatgtttttttccgaaagaagcaaatgaaaaaaaaaaagagagaaatttttacttgtacggcagtttagtaatcagacttcagaattacatcttatcaaattcctcacttcagtcaattttcaattgcaataatccccatttgtatttctgttctaggaatgagtggcctaaaaggagaacaaagttctttactaaacattgtgttttaatttctttttgtctcattcgatattagtgaaagtgctaaattctttctactagagtggctgttgttcattaacatgtcctcaaacgttgttttgacagaaaattagtagaacttgaaaagatgccattttcctttgattttctgttatggaccatatgcaaatgataataaataccaactcattaaaggtgatatgtcttgtttcattggcagtgtgtctagaggtgat

SEQ ID NO: 320512 - DNA, 1465 bp, Cannabis indica
gggcataaaatccaacagttgaggtccaggagatagaggaccaggacgaagaacgtcctgatagcccctccgaggctgaggaggagggagtggctcagcctctacgttttggaggatacaacgagtctggagagttggtgtctgaacttggttacgtcttggttgaggggtaagactatgtcacccaaggttatgctgatgctgttcctcataggaggtaaggtgtcgtgggggccagatgggtgtatcctccatccatcgtaactgagggccacctaaaatatttggagaaggtcgggtatctgggcaaacttgagtgcttcctcccttctccaaataaccgggcgacaagtccgaaggaagggtactgtgcttggtcgggtgcccacacaaaataaggggcaatgctgcctttgcacccatacttcaagagggttgcggactacttccacctttgtctgacccagttcacatcctagggcatcaagtacttatatgccctattcttcctctacgctattcaaggatggggtgagctgtctccgcacgacatcaactggctttttgattcaaaatctacccccaaacagagcaggtcagggttcttttatttctctcacctggacaacaagtggctgacgggcactgtggagacggaggttagcaaaatttggcattttattaacgagtactacttcgtggccgatattgggactgctcatactcgttttcagcagatccctgcatactggcgtcctcccttcacactggggcttagggaaagggcccagaaaattctccaactgctggaggctgcccgaaatattaatttgtcgaccacagaggccaactttgtgaagtacaagctttatccagccgattttattcccaagtctgtgaaggagaagaagaagaaatccaggtcaggccacgctgagggagtcaagtaagagaaagagctcattcaattgaagcgtgaggctaagttgaagggtgatgctagagccaaacagtatgctcaagaatattctgagcaagagatattcaaagtaagagaggccgcgcaagaagaagaagcctctcctgactgagcaaccgcccatagagcatgttatcactactacaaaaaatcttttttaatgtctctttttcatgtccaaaaaaatggtgttggacataaaatattttttggaagattttatgtccaacattgatggactagaaaaaaaattatatcatgtccaataatgttggacataaaaaaataaaaggacgttatatatctaataatttaattagataattattttttaacaaatttttgggtataatttttgtccaatatgttggatgtggtctaggtgaaccacgtccatcagtattggacttgagtgtaactttacaaaaaggctaattaggatttttgccccttgaactttgatatgtaccaatattgccccctgaa

SEQ ID NO: 320513 - DNA, 1251 bp, Cannabis indica
atttttttttttaaaataaaaattcaataacctagactaatcagggattaccacgtgatcttacttaacacttaacagccaagtacctacagaagttccagaaatataaattaagaattattaccgcaaaaaattaaatttaggtatttatttataactgaaaattaaactcaagtacttatgccgcaaattactcaaatatttataaatattagttataaattttttattaaatattttaattaaaaaattaatttattttaaatatataattaattataattatttaaagtctaacttattatagtaggttatataaaaatgtaactagttttatttttaatataattattaaatagtcacttatatatatatatttaaattttataatataaaataaatggtaaaattgtttcagttagatactttctttttccaaaattgaatctatttatatatatttagtaaaatacctttttttcgaatcattattaatcagtttactgtgtgtaattaaatttatatatgtataatatataagtaatttgcagtataaatacctaaatttatctttcaattgtagtttaatacttaaattaaaatattgccaataaaaatactttctgttatacttttagaaactccgtaaatatcttgtattgtgttatgttaaagattttagctgtaatttattctatcttatagtgtgttatgctaggtttaattaaatcaataaatagatatatatttatattaatcagttttagttttacgttggacgagtatatggtgaccataataaaaaaaatctcaccacattctattactatttattatggttctcaatatatagggacaagtaaaacgtttaatatctctacaaaagaaaaagaaagaaaacgttaaataaatatatagacagagaaaaaaaataaattgagttaatagtcagtatacaataaataatgtttatagataccataactcctccatacatacatcatctatctaccaaaatacagatacataatattgtgaaactatatttttttttatattaaatatgtcatgcaactaagtatgtcataaatttattgcaagcgtttcacatgaatttactgaaaataaaatatacatggaacagtaactttgaagagatggtagcagaataaatcatgatttaatgctgtaataagatttaagtacgtaaaggatatataaatatatagggtaatattatggtaggaccta

SEQ ID NO: 320514 - DNA, 664 bp, Cannabis indica
aatttttatgacaccatcaaaaaatgtatcatatgagagagagagagagagagcattttttcgctgagtaaaaaagaagagagagagagttgataatgagtgaggtggttgagtatatgttggggtttttgtttatgctaaaaagtggtcaattctgtatcgtctgataagtgatagtggcaataaatagaaagaaaagaaagtaagagcgcaccgcaatttatagtagttcactccccgtcttgtaacgataatggagctacgtctacttcgaacttttattaatttcaaaaatgtaagttgcgcacaagaaattttgactaaggagagctccctctcacaatttcaagaaagagaaacacgtgagttctagagagagaagctattgacgctaaaaaatagacaactgtacatcgtctgataatcgatagcgataaataagaaaataacgtaaaataaagagaacaccacaatttatagtagttcacttccccatatcgtgatggtaatagagttacgtctactttgagcttttattatcgcaaaagctaaattgcgttacaggagaactcgggaaaaataactaagtctagcttcacttcacaattttagagagagaaagtgtgaagagagagaagccttgaccttgtagagataatgaaaa

SEQ ID NO: 320515 - DNA, 1384 bp, Cannabis indica
ggtttgtttttgttttcaggaccacatttcaatcctaacaacctcacacatggtgctcctgaagatgaagtccgacatgcgggtgacctgggaaacataattgccaacgctgaaggtaatatcatttcaatcaccacattggatttatgaaatccttatccgaatatcagtacttattatttacaaattttatgaattcaggcgtggcagaagcaacaattgtggattcacaggtaaaatactaagtttagacttaacttgtggagtagaaaagtgttgtgtagttattagtactaagtttttttagccaaaatttgtagattcctctgaatggtcctaactctgttgttggaagagccttggtggttcatgagcttgaggatgatcttggaaagggtatgtattgatttgtactttttatcttaaatattcaacacctaattcgaaccttagccatggcccatatagctgtttacatagtaacttcactcatgttttggcaataatgtgatatgtgagtatgaaatttcaatgaaagatgtaattcaccaagttcctttctttatagtaaagatcacttttttttgtttttggatgatctccaagagatgtctttccgaacttttgactcttttctaactcattcggtcctccatttgtaggtgggcatgagcttagtttgtccacaggcaatgcaggtggaagattggcatgtggtaagcaaaaaaaaaaattgatttttcatctcaaaactcaaataacacatttaaaattgtatcatcttttgtgcacaggtgtagttggtctgacaccagtgtgaggacaagtaatgtatcgggtttcgggccttcgatatttgctttggagacaacccggcccgtgttcggttgaatgggaggcaatgtagaactctctgctaataaagtttttaaagctgttaagctatgctatgcctgctctattaaattttaataagcatttgaacatgacaatagaataatgtttagatttgtataacaacaagttcttaaatcagatttgtaatcaaatttgagattatttagttttctctattattattttagtccttgaattgaatgttattgtcgttttaaaattagcgtcgttttaaagttgatgtcgcttactgactattattgtcgtttttctcaacttctccttttatgaacttatcttgtcgtttttgaaatttttgtcgtttcacttttttttttcgttttaatttgctaaatagtcgttttcttatattaccttcttctattattgtcgtttgcttcaattatcctataatatgaatagggaaatttgattttttatgcttacatttggttaaaaaaaaatttctaaacaaataataactaat

SEQ ID NO: 320516 - DNA, 1096 bp, Cannabis indica
cgaatcagcagatgatagtttatagcttgccaaagagttaagtattacaagctggtttggaatagaataatagtgccaaaacatagattcattctttggcaagctataaactatcatctgctgattcgagatttgcttggaaaattcttagatatattgattctactaactacctcgtttttgagttggagagtgaatcacatccccatcttttctttagctgtattttcactaaaaaatgtattgcttgagatcactaagtagttcaagagctatgaatggcctaaaacttattggaagtactcgattgggaccttaagatggtaaaaaactagattgatttacttactatggctataatggtagttgtggtgcaccttgtttggtgcaacaaaaatcagtgtcactttgaagcggcctgtgtatcatctttatccattagtcatcaagtaaagatggtagttaaggctagatttcagtttattaatgtataaaaattatccaaaagagaaatggttgtcgtggagatgatgtcagtttatttattagtaaattcttaagttgaattttctctctcttctttttctctttcggtgttctcaccggagctacgacaaaaggtacaaatgtgggtaggaaacctaaggtaaaacagaagaagataggaccgtcttcttcagatcgaatcatcaaaactaggtccatggatgctattttgggtgtgaaggagctgaaggttctagaagttgtcaaaatagagcaaaattggggtgagaaggtcttatcgcctgagaaaatagaggaggaatttaggaggtgaagtgaaattcgtcaagatttctttgattggttgagcatctccaatagagcctcacaagctgtaaacatagggattaagactactcctccaatcttgagatccaatgttgtttgaaatctggagagcaggtttggagattcagttgtggaagaagacaaagctagatctgcgaatgccacaccgaagtctaaagtgaaaattaaattttgataatattattgatgaggtgaatttctggcaaccatcgatagtatgccactgttgggttttatgccc

SEQ ID NO: 320517 - DNA, 1139 bp, Cannabis indica
aaaatattattttttattttaaaaacaattgttatttttttgtctaacatattctttttaatattttcggtctcttacctagacttggaccccgactccagacctgaaaccagacccgaccttagttattagatcaacacgagaccggggtttggagtgagtttaggtccgagtctaggtctaggtctcgagttctaagtcttgggtttgggttcgtgtccgggctagggtttgggtctgagtccgcacctgggatcaggattgaggtaagggtctgagtttggggtccagggtcaggttcgaggtgggttagattcatgttgtggtatggtgtagaatattgaaggttttttagtaagaaaaattaaaaataactttaaaaaacattagtcaaactttttttatttttatttttgaaaatttaaaattgaaaacacaattaaacagtggtttttgttgatatttttaaaaaatagcgtagagaaattaattgtagtgcttttaagtaaaaatttcaaaaaataaaataaaataaaataaataaatactaaaattactgtttatgaatttttcttttcttaaattggtttacgagtttggtgacaatattttgtggttgacattacatctccacagtgacaacgacacaacgtgttgaatatttgaataacctttttaacatgtggcaatagcactttatcataatatgtatatacacgacaaaaaataataactaagttaccatgtatgcaaagccactagtggtgggtgaggaatgtaaaaaaagaagatgttatggacttaaacccagcacctttaacctattaattgattgtaaaatattattacgttatattttacaaaaaaaaaaaatacatgtatgcatatatcctaatttgttctatatatatatatatatgtatatatcatagtttgtaatcattgaaagttaatttaagattattgcttattgaactttgacatgtaccaaattatgttttctgaacttttaaggttgttaaaaatttgcaatcaataattgaagtctaattaggatttttgcccactgaactttgacatgtaccaaatcatacacttgaacttttaaggtcgttaaaaatagctctataaactattga

SEQ ID NO: 320518 - DNA, 1966 bp, Cannabis indica
ctgaatcactgatatactgtcaaaatctatcctaccgaaattcaacattcttagaattctttgagaaacaatcatgaattcatataccaaaatataggtacaaagagttatggtctcttcaaacaataaaggatataaaatcaatggccatcaaccttagatgtcacatttgcagcaaataaaatgcacctgccattgtgatgggttagggatagcacctcaactttaattaggaacacagaacaagcagcaaaatctggcatgatctagattctaacgaaacaaacagcagcataatttataacctgataaatttgccaaaccaaaactaaaactgtattggacttccatttcattcccagtcaggcaaagatcagaggaaattatgctacacaatctcagggctagaaactggcaatgcactcatctgcagtgttctaccatttccagttgaaagaaaccgaacagtaggcaaagaaggatcggtgacggattcaatctcaagaaaattgaagtcataagcaccagagcgcttcaaactgaagacaaaaacaagcaaaatccatcccaacatggaaattgcccaaaagttattcatcccgtgaatcaaaccccacgcaatggcatacccgacaatgattcctgacaaatgtcctagaaaacttgcttgtggaacaataatagaagtaaaaataagtgattcaaatggtgcaaaactgatagggagtgaaagaaacccaaaaagatccaatttcgatgatggttgtcttacagagagaattgtcatccacccaaaaacaacacaagaatatccaacagctgttactcttctaaagtactcaatcttgaatctttgaattaggacatggtacatccccaaaactagaatgccagatagaacaaccaggacaagtgtgtaatgaagataatattcaactccaagtcccaaaggccccaacttctcaaccacaccaagactccaaagtgcactcatattaaacacaagatgaagaatgcttatatgcgaaaaggccgaagttataatcctccaatggtgcccttcaatggcgttttcataactcaagcccacatgggaatacccaatgtttttcttctgaatgtagaaccagattgcactgcatagtcctatgatacagcttgtagctggcttttccaaaatctcataaatcaaaggccttcccatttattccacccttctttcacaaaatctttactgactctccacaattctttgatgtcgattacggaaattcaatacaataatcttcacaacaacgctaaacccgtaacagaaaaaagagcccttttcacttagaatcaagatatagaccactcataattaggtaagtgtccctccaaaagcagtcaaatttaaatacctgttcgatctaaatcccctaaaaataacttaaaaactcatactttagtgcatataaaggcttaaaacacttttctgtgaaataagagtcttgcataacatcaattataggggcaactttctttgagaatctagaagaagctacaggggaaacttgtttgggcaaaaatggaaactcaaattcaatgatcgattatcttcagtgttaagcattaaaaagaaagaagtgaagagatctacttcaagtaatcaaagaatcaatatcggtgaagaactttctcacctgttcggcttcaaatcgacttgttccggctttgattttctgggactttcgagtattttcgcattccatacgataatattgtaaaaaaaaaaatgaaaaaatgtcggttttgcacaaaatgcctgtttttttatttttattctcgacacctgagaagtttctttttcacatcgaaatttttcacgatgaagttttgtgaaaattatatatgatttatgctttcttttttttttttttatttttttaactttaaaaaataaatatcattttagaccctgtgtttt

SEQ ID NO: 320519 - DNA, 556 bp, Cannabis indica
tctctctctctctctcaaaactcaatctgatcgttgtgtctaaaaagataagtgatggttatatttataggcttaggatcaagatcctaaagtcggtagctgcaagttaagttgttaagttagttaggacttagcaaactctattatgagaaagatctccacgtcagcttaagtataggtgcttccgggatcgtgtatgagagcttccggaatcacgaaccaaagcactcgtaggaggagcttctcggataggaaagagctagctggagttgactatttggaactaatttttaggagaaacaactagccatttataacttctttttggaggaatgctaacttttctgaggacccttccaggaaggacaagaaagccttccaggacctacttaggcgagttaaaaaatttctaagaaaaacttttggagaccttatactttggaggaactattccacaactttcacatagtttcttcaaattaaaagtacgatgatgatgaagaaagaatgcatccatcatggttggtgttccaggaatctcagtatactaactttt

SEQ ID NO: 320520 - DNA, 1929 bp, Cannabis indica
attttatagtttatttatagttgttgagaggtatttctcgttatcgtttacaatttattgagcaaagtgtatttttacaattttaaaactttacaagtgtatttttgtaaataaaaaaatttggccgaaaaattataaataaaacataaaagaagggtatttttgaaaatctcccctataaaattattaagatatcataattaatcatatacctagaatgccaaaaagaaataaagtgttagggtatgtcctgaaaagtctgtaaagacatttctgattattaataagagttgatcattttgatatatgcgtgaatgttaaattattaatatttaatattgaataatttatatataaatattaaaaaatttattattcatacatgaggttgtgacttgtattgtatagagaataagatcacttagtcatgaataaaatagtcagtaacatattaaagtttaagaatctttaatcaatagttgttagtgtgattcactaatgccgttattcagtgcaagtaatctcgattcagattattgatgtagtatgacatttaagtggatgtgttgtacgtaatagagattatatatgacaaggactgatatgaataaagctatctttatcaaacttattgtttactataaagaccaaattcatatcataaagatgatcaatagtagattggcctacttctgagtaatcatgaactcatgttcttgttactagtttctttgattcactcgttaaagtttctcagagaagataatttttagaacttctgtttaaggaatctaataatgttgatatatggctaggaacataatctaaaattatagaatcctgactttcctaacagattgaatgttggttccctttatgtgttaattttgaaactggaaagttacacacaaatttagattgaatctaaattatacttccactagtgatttaatggtagtataagataaagaagtaattagaatcgtaaaacggtaatttaaccaaaattaattacgaaccaacacaaggatgactaatcactggaattgattatatcaattgacactgcagtaaaactcggtaaatataattatataattactaagagtttaattctatatttatagtggagtaattatagaattaataaataggattttttggttttatgaaactcaataaataatttagtttattggagcttagaattataggtccatagtcttctaatcgccatcttgaaacactatcaagggtaggtctaaagagttgtataatattattcgaaaaaatctattttgaattgaaaaaatagtaattatttatctttgtaataaataactgtttaaatttaaatttagatttaagaccaaagttgtctaaaaaagacactattcttgtcttaattaagacatgataggcgcctaccctattgtagagttatcccttgattttgtctttttagttaattaattaattaattcttttttttaaaaaaaagaaagataaatatttgaatttaaaaaatagttaaatatatttttagttggttgagatattctttcaaagtagttgagatattctctccaagttagttgagatattctctcaagtagttgagagattcctcctcagaaatatcaataaccgattcgattgtggatattttatttgaataattaaatatgatttaattaattaaatatttactactataaatatatgtctgatttaagaaggaaaatttgattttttatacttaaatatacctaatattttatccctaaactcatacatatcaccattgaaaatatatgactactttatctaaaacccaaaatacccctctcataactcaaccccatctctctctctctctctctgctcttctacaacccaaaccgaaccacaacccaaacccccctcacc

SEQ ID NO: 320521 - DNA, 2679 bp, Cannabis indica
gtgtgtgtgtgtgtgtgtgttaaccttaaaaatcgacagagttgattttcgagattagtcaacaatcaaccccaacagtcgagcgacatcaattgtaagagtcggtcgaagaatgactgagtcaatgcatatggtttaaggatcgttaatctgggaaatccatgcttacaagtctccaggcatattcatgcaactcgaaggtcatccccgtaacaactcatgtgtaaagttagtaagatcaacttactaggttacaattgctagaggatttttgtagtgatatgctcagaattggatctttccataggcataagattcaaatatctctttcttatctttccaaataatcttaaattgtccaattccaatgtatatcgaaaaagttatggctgaaatgctaagaatactgaattatgacaacttggtatgcgagctggtgactctcatgcaagccgacgggctgttgtgcagccccctagctattgtgtgaccccatggggtgttgtgagagcccatgggctgttgggtgaaccaggaggcatttgggtgggtcgtggaacccctatgcaagtggtggagcatcagttcgacctgcagtgaaagaaggagaggctatacatgtgtggatatacgtcatgtgtggaggagtgtcagagcatgtgggcttgcatgtaaacccatgggggtgcacattatagccgtgagagagagtgtgcaagtggagggagtgtgtgtgagtgggggctcgcatgtgagccatgtgtgcatgtgaaagagtgtgtgcgagtggagggtgtgtgtgtgagtgggggactcgcatgcgagtcgtgtgtgcatgtggaggagtgtgtgtaagtggatgtagtgtgtgcgagtggggggctcgcatgtgagccgtgtgtgcatgtagagggagtgtgtgtaagtgtggggagagttgagtgtatgggagaagggcgccaagtgtaggatggcatgggtgtattttttggcgtgtgaagataaggtgagaggtgaatgctttacgataagaatgacattgggagagaaatcaaaggacgaggcatgcacgggaagagtacacaaccacgccttttgaagactgagaagaaagaggtacaagtagcggcaacaacgtagctataagacctaaagacccgaccaagggtacgctgcaaccactctctaacactctatacccggggaccacctcgcgtgaagttagggaccatgctcatgtacccgaagaccatcctcctacaatctgcaactggggaccatgtgcatgtaccacgagaatatccttctacaccctgcaactggggaccacctaacaccagacaaggatatggggtgccaagctacctctagcacctagatcatgctctggaaaagcgacatctggtcccaatgggacaactttgtacaccaggccattagagcctataaataccccacatctcagatgtgaaagggggggaatcatttggtgtaacttagatattgaattcaatgtagagagaaatattcagacatcttttcaccttcatctttatcttatctttatcacatttcttggtaaccttgcattatctgaccactaacttagttgacgagttttcaccatcaacagtttggcatcgtgtgtgagaaggacaagattaagccaagttgtttctttacacacaatcgatacaaaatgcctagacgctctcatcgccttcaggatgtggagatcttccttgacaacaaccagttagtcattttgaagcaagacctccctctacccgccatcaaagaagaaggtgctaatggtcactggccttaagtaagagaagaaaatgataacgttgtccagcctcaagtaagaggacagggcgtgagcaggagggaacctcaagcaagacaaggagattgtcatcgcgaaagaccctagtggacgagcagcacaacggagttactacctccatcacgaccaaaggtaaaggtgtgacacgaaagaaagagatctcgtcatcacctaggcatcctccaccaccaacactgcgagatcccagtacctcgcgacatcatcctggaaaggaaaagatagttaactctatgagcccaaaatcccaaactcgccactatgaagatgaaataaaaaatctctagtggaagaggcgaagggtagaaactacaatggctggcatgcaaaaagtaccgagtgccattcttgaaggcaaaactcaaaattcacactttcagtacaaaggtcaccgacaagagtgcagaatgtcatctgttcacaatggaaggaagagctccatgccatcaacgggtggcaccgcaaaggtgagagaggaaggggcctatcgcaaaatgagaacccaagaggtcaccaagagcaacatgaatctatctgctggggtaagaccgcaatgggagaaacatcatatattcttatgaaggggcttcagccaaagaatctcatgcaaggggacattgcactggcaccccacccctcacaagagcaaagcaagcagaaggtatctcccctcaatcatgatggagagccacactatgatgggatgagaggagtactgtaacgtccccgctccaagcctccattgggctcttatacacgagtacgccattctagctgcttcctggattgatgactggccctacagaccaaca

SEQ ID NO: 320522 - DNA, 556 bp, Cannabis indica
tttctaattttaaaaatagaaaattaattaaaaaaatattacaaaacgtcaccttaacttttttaaatattaatttgtaaatagttacttatatgtaatcactaattattattactataaagattaattataaggaaaatttattttatcaaaaaatgaaaagtattgttaataattagtaattttttatattatttattaaattatacaaacagtaatatatcaaaacctttacatttttcaattattttatattattctcttaaaccctttgggaagcggattgtctatgtgctgtctacaaacaaaaataggataagtgtcaattgaaataaggctttgtttgcctaaatacttttaaataagagcattgctattggacactaatggtgcctaacattcttaaaacgtgtggtcttaccattggttagcgatacttcctaaaaagctattatattaaattataaggcacccaatactaaattataccatatggtaatttatatattataaaaaaaaaaaaaaaatataacgtcttgtcttttgacatggtagt

SEQ ID NO: 320523 - DNA, 1381 bp, Cannabis indica
tcttcttctttcttctcatctactttatattatattatattattttataacagtttataaaataaactaaaattttacctcatatggttacaaaagatattaattggtatagaagatagatccaccataccagttgcattattaacaaaagtctaattagccacattatggactgtaaaattataacttttaaaaataaaacgaaaaattacaactaatcataaaaatggaaagatatttacaatgacacacacagttatcaatcccccaattagagcaagtcctctttaaagttttgataactgtctcagaatcactctccattaggacaaaaggatgatgcagcgagacaacagtctccatggctaaaagacacgccgcaacttatccaatgagggggttagagaaattgagcttgcttgttgccacccacaaaatagattcattgtgatccattgctatagccactgcgcacatggtgtcgctgccaactttgacatcacagctgatcttgacctaaacatctagcggtgaggacaagctggaggcccaatagcctttggagagacaaataaacatgacccataatttgtgtaacaaaatgagatagagtcaatataatatttaatgttacctagtgagttattgtgtaccttgtcattttgggccctccaaattgtatttaccacaatcgaagcataaagaaacaacttttcagtatccacccctctatattttttattccacaaaaaattagtccaatcccacacacgagctcctgaatccattacaggcatcacctcccaaggggaggaccaccaaaggtggaaagcaagactgaaatagaggaaaaagtgttccattgtctcgtctccctctccacacaggggacaagacatctcctcaataagcattctcttagcgagaaaatttcaatcttatcattttttactttactataggtgagaagatttcagtatagttaattccacctgagtaaaacccttagccactaacctagctttgaattgcactggttcattctcattgattccctctttcaccttgagaatctatttgcactccataatcttttgttctccagctttggtacagctacctaggtcttgttcttttggagtgagtccatctcctcacccatggcctggaggcattttgacttgtttccacctaaaatttcctcttcgtagcttttaggccctttaatttcagtttttgtagtgttgccagtgcaaatgctattaaatcagcttctacaaaccttgctggagggtgaatctctctcctagttctatcacgtgtcaactaagaaccttccaaaccagcctgtctaaatccttctggaacctctatttggtct

SEQ ID NO: 320524 - DNA, 1220 bp, Cannabis indica
taatacacacatcaaaatgttattttttagattatatcactcattcaatatataatatatatatatatataatttacaaaaatttagcaacatcgcacgaagcgcaacttagttgcctagtattattatataaatataatgtaataatcttcaacacatgcaaaaacgaaaattctatacaatctgtttttttttttaaattctgactggcttaatttgtttccctataccataaggtaagaatactaaatcctacaataaatttaccgtatatattgcaaaagatagcttttctatttcatatttttgggatgagaaaaatgatggtcattttttcaaatattacgtcccacgcatattagttgatccctcatatgcacatccacaaaaggtatttcaacaaattgttttccctcttacattatatatagtctaactttttattaatggaaagtatatttttaacaccttttaattaaataaatcattaaattaaccgacaacttttgacctttgtttacatgcttatttttactcacaccaaatacttcttataatcagcgtcaaaagtactaatttattatgttggccttttgattatgcaaggaagaccaatacacaactcatgataattataagtctttccattttatattgttctctattgtttcctacccattccttacctattatgatcaccaattttccatttttttttttctgtttttcaaatgtcggcatatcctataaaattattatagtactaacaaaaatacatggtttctaatattttgtaccaactgattaaaaaaatgtcatttagtaatattggttaatatatattatattattatattatatatagggatgcacattttttttaagcgaacgggtcgactattggaacccgcttctaatagggtgagaattcctcatctaaatggggaacagggtggtaacgaggattatttttgtccccaaatgttaaatgggacatgcatgcggatgacactccccgccccgaggggacccgttaagtatttgttagttatggttacaagttttgtcattcaggagtagaagctgattatccggagagagtgatattggaagcttagtgtggatccggaaagccctgtgcaaaaggtcttgtagaatccggaaggtacttctagataagcttgtaccgtgtatagaatgtctctcccggatagcttgtt

SEQ ID NO: 320525 - DNA, 765 bp, Cannabis indica
tttttaaataataatattagacgtatcaatataaatgtgccacttatacacgagtgtacatataaacagtatatgttggtagttaattgtgaaaaatagataacaccttaaatttactaacgatagtagtttagagagttttaccatcaaaatttgagcttcgatggttgagtgcaagtggagtgatatttaagagaattttgccgtaaaaaactctaaaaataatattgtttacgagttttagctaaaaggcatcagtagagcctaacatcctcttatgtgtcaatatcgttattagtccaactaagtatcgggtctcatataatttaatataatgaattttaaagagtatcgctaactaatcataaggcgacatgtttagaggtactaggtactaccgatgcccaataacaataatctatttaaaactctatattattaaaagtaatgaaatgtacactaataatttggagaaatattaaaagacaccggtacctagcaccctcctatgtgtcaatatcactattggttcaactaagtatcgaggcccataaagtttatgttaggccccgttgttctaccttatcgggccactacctcacattgactctcatattagtatgatattgtgtgctttggggctagaccctcacagttttgtttttgggataagttaaattacccatttttattacacattaaccaaatataactctaaaataattttaattgataaatatcttcttttataatcaaagtaccaaa

SEQ ID NO: 320526 - DNA, 1267 bp, Cannabis indica
aaataatttccaacaccaacaacttggatgggctatctatgttcaaaaaatcccttgatgcctaattaaattaaagaccttggaagtctaagatttttttttaggtttggaaatagcgcggtgtgaaacggggatttctgtatctcaaagacctttcacactcaactcctaaaagaaaccggtcaattaggcaccaaacctgcctcaacaccaatggagccaaacctaaaactcaacaaagacacaggtcctcttcccacaaatccaactcaatatcgaagtctaataggcaaactcatttacctcacaatcacaaggccaggtataaattatgttgtcaataaacttagctaatacatacaacaaccaagacagccgcaccttgatgcagcctgcataattctgcagtacctaaaaaattctacttgccaagggttattctatcatgccacagccccaccaaaactcacacttcaagcattttctgatgccgattggggtgcctgccccgacactagaagatcaatctctggctattgtgtgttctttggacactctcttatttcatggaaataaaaaaacagcaaattgtttctcgttcttctgcagaaggagaatatcgagccatggcgaatgcaacatgtgagttaacttggcttatatcacttctcaaagacttccagatccctatatcgcttcgtgctcttctattctgcgacaacaacgcttctctacacatatctgaaaacccagtgtttcatgaacgcacgaaacacgtgaaaatcaactgtcacatcgttcgagagaagctcaccaccgacatactcaagctcaaccatgtaccctccaagatgaacctggctgatatattcacaaaaccaactttccccactgttttcaacgaccttgtatccaagttaggtgtaaaaaatttgtacactccaacttgaaggggttgttaggattagttagttaattaggttcagttctttatcagttatttctgttataagtcggctgtacattagttgagcctatatatatgctcttctcctcactttgtaaattcattcaatattgaataaagacagagattttctttcccctgttttctcttctaatatacttttacaattatttaatcaatgttgaaaaaccgtgtttttgcaaatgtcagttgtatataagaaaatataaaaactgtacgcgcttgcagcagcagaaagtaattctgctacagcaaaactgaacaggcagaatataaaat

SEQ ID NO: 320527 - DNA, 873 bp, Cannabis indica
tttagggaaaaaattttaaaattttctaagtatagaaaattaaatttcccttatataattgaattattgtgggtaggggtggactcacatagagacgagaggtactcattctctaaaaaaaattagaaaaaaatatatatttaattagttacagtatatatttataattaaatgttgtaattattactaagccatcaattttggttgaatggttaaggtgcctcatgcacatataaatcctagctttaagattagaactcttatttatatttagtggatctgatgcacattataattactcattaaaattaataattttattgttcattttttacttcaaatcatatttaatattataaaatataaatttatatcaatttttaatatattatattatgcttcctaactaaaaaaagttcactcccttcaatttcaaatgatggcgggacccatgattattgtaggtgccaacaatggacactcttttttatcttctctttctaaaatattatctataaattattattttacgactatttgaccccaaataaaggaaaattaccaatatagacaatctaatggagatgacctaagatttctcataacaatacaactcctaataagaataaacggaaaatcattttttttaaattaaaacacatgaaaatataaagatcacccaaaaattgtatgcaaatattgtcattttctttccttgtttttttcttgtttatttcttgtgtgattagattactcaaattatattttcactattttgtttttgtcatggcctgaagacaataattattttggatttttctcgaataatttttgcttcttatgattttgttttttttttgcaaatgagcttct

SEQ ID NO: 320528 - DNA, 761 bp, Cannabis indica
tatattaaaaaattaaattgttgaaaattgagctcagggtcttatttttaccattttagaaatatagtattcattttataatttaacaaaatagatagttcaattaataatttttattaaatataagatctaaaatggtatttacctttttatttttcgaaggaaataaaggctacaaaacctagtttcatttagtaggaataggtaagatcctcaaaatgcacttaaatatcattaaatgatgtgggccaatgaactttgaaataaaaatgttgccaaaaatgatgtcataacgttgaatgtaaggattcttctaactgctaaatttgatgtctctttactattactactactattttcatttatttaagttaaagaccacttttgaggcttcaactataaatgacctcaaaatagtttaatataaatataatttttgctccgatctataaaaccatattctataaatttttaagttacttcaaatttcactcgaattattacagttatcaaatcgtgtctctctatccaaaattctgaaggcacaaatagtgtggtagtagtataggtgtaattcaataaatttgaaataatttaaggagcacaattctacaataacatactatatgggttattaaatagttacgagtcaatttcttaaaatattacattagttcttttgaatagaaggatccgattaggttattataataatttaaaagaaatttacacacaaatttgatacatacttatataataag

SEQ ID NO: 320529 - DNA, 1042 bp, Cannabis indica
tgtacgttataattatttaagatatcctgcaaaattttaagaaatttagaaagtttaacacgccgaaaactatgttcaaacagtgtattgcacgcgtgactattttattttatacgcgtgtaaaatcgactgtttgaacattgttttctgtaaattattccgaatttctcaaaattttgtagaatatcttaaatagctataacgtacatgaatatgaaaaaaaattgattaattttttttttgaatgacgaaataagttaagggtgcatcaatacatcccttttaagggagtgcattgtagaatcacccaataatattttaggtaattcccatcaactgtatacggtaagaattgttaaaaaatattattggtatctagtttatttttttttttttgtattatactgctattggtgtaattaagtattggatccatataattttaaaaaataacctttaaagaatgtcgttaaccaattgtaaggtgtcacttataaaaagtattagacaccactgatccttattagcaatgctcatatttggtacttggtaaaagtttctcttaacttatttgtgtggcaaaaatctcatactttcttgccttagccactattgtggaagagaaactcatagcacagactatccttatcagtgaaggtagttgatttgatacaacatacctttatttttttttcattttttttaaatatttgatctaaatcttattcgtgccaattttccctataaaacaatagaaaatcacctctttaatgaatgtatgtgcttttgattagtacccgaacgtgacctttttgaacttatggtctgttgtcctggagatggtaagttttatgatatgttgggatagatacttcgtactgccaaataaaacttctacaaagcaccacaatgagataaggtgaggtgagtgaacaacgaaacgaatctctttattgtaaagaaattcattttgcaagttgttgctataattttaaacactacgcaagtatacgcaatcaagtagtaaatctcacacaggtga

SEQ ID NO: 320530 - DNA, 937 bp, Cannabis indica
ttttaaaattgtaaaaacaaaagcaaaagtatgtttagtaaattttgtttttatttatgttttttgttttcatttgaggaataagaaagtgggtcggggttcggcaccagggtctagggtcaatagcattattgggtttggggttcagttggggtcgtgttaagtttcggggtttaaggttcgggctaggtcgaggtttagggttcgggtcggactccgggtccaagtccaaatccaaggtttgagaacaggatccgaggtcgagtccgagtctgggtctaggtccgaggctggggtttaggtttagggtctaggtccgaaatcgggtttgagtttgctaaatctcaaacgagacccaacccagacctagactcgaaccttggatccaatcctcgaaccacagactcgaacttcgaacctaaatccaaactcagatccctaactctaagctccgacgaccggacccaacaaatagattaattaccacaaaaaaaaaaagagaaaacattaaatgaatttattatataaaaaatgctaaaatataatagtccatcacaattccataattttggctctataacaacggtcacatttatatacttgtcgattaaatatgagttattagctaaccaaatatagctcgagccatgaagaaatcttttctaaaagattttctttcttggataagacgctaaatgcttttatggtcgtatctgctgatacgttttgcagtctctcagttttgagagtttagttctgagtttttgtttttgttcaattctggttggttcgaaggtcttcaatggcgtccagtagcagcgaggaaagagggcttgatgcagggagagaaacgatctctttggatgaggaagagacggaggttctacagcttcaaggtatcaatacagaggaagtgtcgattgacaccagatggtgc

SEQ ID NO: 320531 - DNA, 1424 bp, Cannabis indica
atagaaactaagtcaaataggcccatatgtatggtagtttgtttacaattgtccatcatcttaaagaatagtgtaagatagcaatcctcaattccaaagatatataagataagtcctctcttcatttagttttattttagttttatcttaacaagtcttctcttcataattttcttcctttttatttgaccaaaaagttgcaattttattagatagataaatattctaaaataattgttttaaaagcagtagggacaagccccccaccataagtacaacctgtatcagaacaagttgcagtggctaaacaattagcagtcttattagccaatcgtttaataaagacacaaaagttgttgatttcagaaattatagtacaataatctgaaataattaaacccaaagaggataacatttgagttgaactaataacagcatcaataatactcttacaagctgactcaaccacaacttgagagtatccttattgtttgattgaacttagcatttccttcaatccaatcgcatcggtcaagacctgctgaacacgaccaggcatctgtttcaaagagtgaaagaggacataaccatgatagtcacgagcaagccacccaatcccataaaagtccactccaagaatgacaaaggcacctacattgactttaattttattaacactcagaaccaaccaatgctctacactaacacatgagcaagaagccaatgtgtttgctgaatttctatgagcatccttccattgattaaagtaagacaacgctgcagtcaccacaccattagtaacataacttttactttgccacgccagaccatttcgagcccgccaaagagaccaataaattatggcaacatgacacacttttgacttagaaaacccaacaaaacttgatgaaaccagccataaaaatatggagccaaaagcagccttaaagcctcatcaacccgctaccaacatgcctttgctaatggacaatcgaccaatatgtgaagaattaattcagccatgtcatgacatactgaacaaacaacaggaacatccacatgcctacccttaagctgagtcaatgttggtagacacccaagacaagctctccatagaagatccttaacttttggagggattttgagattccataaagctttccaaaaatcaaaattattatctttagaccatcttccgtgtaaaacttgaagatactcgtaagcactcttaacactatacacccctaaattctcttgaaactggtactaatgatcttgaccagagttatcattcaaagtaatacttttaataagatgacgatcataaacattgaataaatcattaagaatatcatcaatctgttgagttttctgccctaaataaaattaatgtcaatataatcagatttactaattaataaaag

SEQ ID NO: 320532 - DNA, 1664 bp, Cannabis indica
ttagggcataaatcccaacaggtattatgttgactactttaattgattttggtgctacgcattcttgtgtgtcgagtagagtgaattaaatctgaataagcctaatgatgttttaccaagtggttttggcaccttactacctactagagaattggttatcttcaacaggtgggttaggtcttttccagtgcatgtggagggtagagaattgttagtagatttaattgaactaaatctagaagattttgatgttatattgggaatggactgcctaacaaggtataacgcaaccattgattgcaagagaaagatggtaacttttgaacctaagggtgaggacccatttgtgtttgtgggaaggattcaaggatcgtgaattccaataatctcagcgcttaaggcaagagatttgttgtgggatggatgtatcggttatctagccagtgtggtggataccacaagggaagtaccaatatgacctgaacacgttctggtggtacgagagtatctggatgtctttctagaggagctaccttacaaccaagatgggagattgacattgaaattgaattgataccggggggcaaaacctatatctaaagcttcgtatcagatgccacctacaaaattaaaagaattgaaggttcaattacaaggtatgttggatttgaaatttactagaccgagtacctcaccttggggtgcacttgttttgttcgtaaagaagaaggacaaaatattgaggatgtgcattgactaccgagagttgaataagttgacagtaaagaacaagtatcctttgtcaaggatagatgatccgtttgatcagttacaggggaagactgtcttctctaagatcgatcttcaatctagttatcaccagatgaggattcgagaggagaatattcccaagacagctttttgtactcggtatgggcactatgaattcctagtgatgtccttcggattaactaatgctctgacaacatttatggacctgatgaaccgagtattcaaagactttttagatgattttgtaattgtcttcattgatgacattctaatcttctctgatttagaagaggcacatgagaaacatcttcggatggtgttacaacatctttgagagcatgaactctatgctaaatttaagaaatgtgagttctagttgccccaagtaagcttcttagggcatgttgtaaacaaggatggaatcttaatggacccggtgaagactgaagcggttcgggattggccttgacccaaatcttctaccgaagttagaagtttcttgggattagcaggatactacaaaaggtttattgaagtgtttgccaatatttttacaccattaatggaattaacttgaaagaattgtaaatttgtttggactaacaagtgcaaagtagcttccaggagttgaagcagaagttaattaccgcaccagtagtaaccttgccgatcagtgaggagaaatttgtaatttactatgacgcttcaaagcaagggttaggttgcgttgtaatgcagcctttaaagttatttcctatgtgtctaggcaattgaaagagtatgaacaacgatattccacacacgatattgaattggcagcagtagttttttgctttgaaagtttggcatcattatctgtatggaaaaaagta

SEQ ID NO: 320533 - DNA, 541 bp, Cannabis indica
ctaccaaaaatttgcaaagtctcatctccatgctaggttgttacaacgaccgttcgccatgacttaataagagaagacataactcgggtttagggcaattgtgagaactaataagattgtgatcgtagcgaagattgttgtcattgtaggatcaaacgatgatgctcttgaattgtcaacgttgtcggggattgttggggtcattcctggtgttaatccgttgccaaagaccggcgtgtttgtcgtagcaggagtcattgtagtagggttgtttgatgatgctgtggctggtgaagtccctcctgcagtgctgcaaaaatgagttaacttgttagacaagtaatgccataaattaagtttatattaattgttaattatagaatggttaattattttgagattgatacacttgggtttaagagtgtttatccgatccgcacaattttactcatagtgtattcgatctgcactaagtgcagattttatattttggatctaatccaatctgcatattcactcaaattcaatccaatccaatctg

SEQ ID NO: 320534 - DNA, 1691 bp, Cannabis indica
tatatttttttcccgattttttttcaggaggggcgactgccccctctcactacaatgtgggtccgctaatggttgtatttatgttttttaaagaaagaaaaagaagcattaaaaagttgaattaggcagcagcagttgagtgctcaatctatgagattgaatgaagtaattactgcattgttgcaacagtttttagttttttactgttatgtcttttgagtggtagatgaaactgaatttaagtgtttttaaagttatatgtgatgctacaatctttttcatctaattttatttttagtttttttgtcaaacgatttgaaaatgaggcagctgattatttgatttatttttctaattttaatcctagtcgtgtctccaacgagagaaatattctaattaaattgtaaattattattttaattaattattattaataaaattgcatcatttattaaaaaaaaaattagaagtttctatctagccataatcttttttttaagttgacaaatgttatgtatccttaattttaaaaatagatatacaataatagtgaaatctcatctaggcataaaagactactattatgtatgtctacaagtatttaaatgatatatgtcttgtatttaaatggtatatatatatatagaaaccacttattaattttgatacttaattatatttttataaaattaatttactaacaccgttaaatttaacgaaatattttttatttttaaaatattttgtcatatcaacaaaaataattaaaagttatattttatatataaaaatatatatagatttgtaattaaatgatatattattcaattgagaaaagaaaactgtgtgctttatttttgtcgctccataaaagtataatgcgtttttttctctcttttttttttttatatatatattataattttaagaaattattaacaatatatataaatatatattatacatttatttgttaaattagtggtggatatgttacacaaaattaattcaccaaattttggttagacatatgcaataatttaaattgacgtttaggtattgattgacaaagttagtatagctagaaaattatgtctaacattatttggaaccaaatatatatgtatatgtatttatatatacttagaattgttaataaaagtactttgtttaagataaaagcaaatatagcaatcatatatatatataggatgaatttagaggcacttctagtagttctttttttccactattataattggttattagggaaaaaaaaataaattgaaatcatctttgacactttttatgtaataaataattttttaaaaaaattaacaataaattagtaaaagtataaaataaaaatacattaaaagacaaaagaccgtattttttataaataaaattataaaaatatttataattctatacaattttattttttataatttttgtgtatttatgaaataatacttataatattttcactcagtttatattaaagaaatataattcccctgtcataaaactcaacattcatgtattatattatagttgactgatgataatagataattatatttatctactagtatataaatatattaatatattattatttctattctctcacaattaataactaaattcaaattctcacaactcatattatatccagaaaaggaaat

SEQ ID NO: 320535 - DNA, 1947 bp, Cannabis indica
acaaactgatatcagtgtcccgaaaggcaatggttgattcttcatatccactgagatgtttgggtcgacctagaaaacagtagtggctagattcatgttgtttgtccagatggcaagattggccacatctgtagggttcgttcaaattccagttgtgattggaacacaaacatcaggatctgccatcatagggtcgcaagggagacttgatgaggaagaggcttgagctaaagttctcctcgtgttaagcatgatgtttgataagataaattacgaactcactcttagtgaaagcaccaaactgctgacctcaaattttgccaactgatagtggagtcgtatttaatacagatgcttgtcacgtgttaaaaaaatagaacaataaagtaaatagacacatgattttatagaggttttggcccccttagttaacgagtaatgaccaactccccttttagttgtattgatacaggaagataattctacttagatcactatagtgatgggatctaaagttactctctaaacgttagaatgtaggaattagagttaacaaatctcaagtatgagtatcgcagtgggcttgtgtgggagagattagttattagacttagagctagggtttgcaactcaatgacttatgacttagaactagcacttatggttttagggttttggttaaggctctttatatagagcttatacccttcaaatccttcagaaataggtaaaataagctattatttacatattaaattagtaaaacacaaatgacaaaaatgccccttgaaaatagatattttccctactattttctgggctgttaaggcccaatccatggtgtggcttgttgtccatgtatgaagctgcgcaccaaagtcctgccaagccaaggcaaccttgccatgcacctacaaaatgcatgttggccaggcatgggatgtgtagaacctactcgacctatgctagccataggcctggccagagccagtcacccccttgaggtggctggttgtcacttcgttatctcgcttgagtatttgggcttctaattggttaaagtgctaagtatatgacttagcctccttgttagcgagttgtactaccacgtggcactactgttggccacatagacatgccatgtgtggtgggtaaaaatattgataacaaggtccaaatagtaaagaactaatataaacaacttaaaaaccagttcataaaactataatgctactaaaaacaatgaaaatactaaaataatattcaaactcgagcattgcatgaagctctgttgtggcttaagccacaacagtttgaataatggtgaggttctacaactttatcactactagatggatatcgattactctatattcttcccgagttgctcttcctttgatgacctacggttttcttctccactggtaccccaactctcatgttctacatgtgttctagaagcacccaatcgtcctccttgccaatgaactctataaccgttaaacaaatgtaaccattacattggacacttctgaacctaccatccttgtgtggccctaccaaatcatccccaaaagtaattacaaaaggggtagcacacttactttccttttcgagacagttagtaaaccaactttgtagtgtgaaccttatgaactcaactagagtagttattggatatttccttaattctttcatcacgttgttgaggctttcaacaacattggttgtcattatggtgtatctatcgcctagacaataaggatgcgcccacttttccaatcctatactctcaacgtatgaggtgatggtatgatccatccatataagtacatgaaaatgcctatcatatttgctttttgaccatgcataaacaaccaaccgtatttacttgtgacatacatcagtcttaaacttgtgggcaacattcatagtaatatgtttata

SEQ ID NO: 320536 - DNA, 1182 bp, Cannabis indica
tgaaaggggtgaaccactataaatttttgtgtttgtttttggtgaatttctttttgcaaaccggtttactttgattaactattacttgtgttcatcttgcttgttttacgatcttcttagatccgttgacgaaaaaccgcgtcaactcttacaactataatccaaaatacaattataatcttaaaatttatttacaattttataacccgactaaacccacctattatacatatccaataaaaaaaaaaaaaaaaaaatgttgagtctctttataataaatgaggacaaaaatagaatcattatgttactaatattatatatatctcacattatttataatatatataattattagagtaattaaatacccaatctcattatcattagtggcttatatcaatgatcttacttcttatatgaaccaccaccaacacttaagacaacacaacttgtatacatattaatgaagtacacatggatggactttaattgaagagacatcctagatttttgcccatattgttatgtataggttgaattgatataattgaaaggctatatatatttatataaattaataatttaggttggcaatcaattcaatccatacatccccataatgacaactcaaaatagtgaaaaatatttcaaaccccatagtccacgctttctagtgcgttcatgccatatcacgttcatcacacaattcatcccaataaataataaataaataaataaagtagttaggggcaaaacaagtttcacacattcaacgagaaaacaagtatcttcataattcactaaattacataaacacccctattcatgagctactttgaatattaattttacaagtatattggaatattattaaagagaatatgattgtttagaaatttgtaactatatttaattttatatgaaaatatttaattagattattattaattaaattaccttgtacgaaactagtttaacattattaatagataaatttattgaattaagattgaagatagtttttgataagtagtattaactattaagattagagtctacattttttcaaaccattattaacattagagtgatgtcctttttctaagtattattaatcaatctaaatcattttaattttccaactatgtttagagtgatgtcctttttctaagtattattaat

SEQ ID NO: 320537 - DNA, 1220 bp, Cannabis indica
aataataataagagagagtactcagagtttttatttggttaaggcgataaagattcttaatccaggagtcagttttattattgtaaaactaaaaaagccaaaaagattacaatgagtatagttcctctattctcttctcaagcttgtgagtaagaaattctaactctttgcatgaagaatttattgagcttatcgcgtgaagcccaacccatgaggcagtagctgtatgctaacttggcaggttgatcacggtgataactattcatgacatgcatgtcttttgattgttgataattaattgtgcattaattatttgatcttcaatcatgtagttttccttttaaggttgatattattcttggttcgagattcgtggaaggtaacttctttaacctgtgcgagcgaataggcaaatgggaaactattgttggcttccagataaacgctgataagtcttttcggctatgcggagcctgaagctctccggatacggagtgcatggcggaagttcacttggttgtgcactgtgattgccttcgaagccagcttgatattgggcttaactcaattcttgtcgtataggactcacggatatgtttcaattatttgtcttgtgtccacgtgcatatcccttgtcgaatacacggataccagttataaatatataaatttgatttatttattattaaaagtatcaataaaattaaatattattttttcatataaatcttaattttaatttaaattagacgttaatttaattaattaatcatactttactaataaagttattagttataatgtttaaaatacataaaattatttacttaaatatattttttataaataaatttaaagttaaattaaacttatatatttaaaaaatataattaaattgtattaaatttaattattattgttgtttaaattaataattaagtaataacaacttattttttaaaaataaaattatcattttattaaacgattaaatcggttaccaaacaaggtaacaactcaacaggaacattgtccaagttgaaacgacgatcagggtgggatacagccgctctagcaaaagagtgagcaactatatttgctgatcgttttacaaaataaaagaaaacattacacaaagcatgaaataaagttttacattcactaatcactttgccaaacatcgaaaccatggacatagagcttcgcatagcttgaacaac

SEQ ID NO: 320538 - DNA, 1058 bp, Cannabis indica
ttatcacggtttttaataattaaaattctactagtcttaaactagtttataaaatcacacatgtggggtatcgtaaccacatcgggtcatagctccttcgactggtacctatacctctcaccctactccgtttgtgcatggtgagatggtaagcgatctgagcctaaggatatcggtggttgatctttccctcaaagagttgcttggccagatttgagcttataaggacggacgtcgatgcagcaggcgtgttagggtcgcacgcagccatttttgccacctttcctaagtagactgaggcatctcgtcttgttctgggaaacacctcggatctctacatttttggcctttgcccaaacctcgatgaatcgttaagaggtctaccttcttttcttacacgggccttttccggatgggcgtgtgccagtagctgccatgcatatctatttcctcagctctcaataaaagcaccaaaatatttatcaagatttttggaaaccacataatattagagcttaagaaagtaatagaggtataaataataaagtaacaaacaagaggttttaacgtggtttgggcattaattatccttagtccacgagtccattttattaggctctttggctagtggttgtttatacaaatacaaacagtatggacttttatcctaatccccggtgttcctcttgaagaagaggaagcttagtagggatattctgaagctgataatgggattatagtaggatgttttttttttacaaagggttagcctttggtctcaaggtgaagagccaaagaatggaaagtgaagtcaagcctctgaatctgttgtcgagcaaatttcgacaacaccagttttgtgcgagtattcaagagctgcttcaataccaaataatagatatgcgagtactcacttagaatggcgagtactcaaagaatatagtgtgagtattgtaaatagtataaaatagacacagaaaagtatagtggttcagcagaagcttcgggcttggcctgcctaatccactgttgaaaagagtactctagctctgtttctt

SEQ ID NO: 320539 - DNA, 1907 bp, Cannabis indica
acaaagctaatatagtacctataaccagacacagagttgattggggcaggaccccataagtcagagtgtaagagttgtaggggtgcagtatagacagtagtggagtgaggaaaaggcaatttatgtgtttttccaagacaacaggctttgcacagatgagaaagttcagtgtttttattgctcactttgatgttacaagtattgagtacatgttgaacaattctagtatgaggatggccaagtcttttgtgccataaagaaaaagaattgtttacatcactaatgctacttgaatgacactgtgcaggatctggtgtagacttggaattgagagatggactggaaaaggactgctgtcgggtgtttaagaggttgagttgttgagaatcaaacttgtacaagcctttttcaagtttcccaacaagtaaagtcctcatagatgcctgatccttaacaacacaatggaaagggtgaaattcaaaaaacacaccattatcttgacaaaactgagacacacttaaaaggtttttagttatagaaggcacatgtaaaagattgttcaaaacaagatgttgggagtgataaggagaaataaatgaagaggtgccaatgttaagaatgtttaaacctgttccattgcccatgtgcacttgttgttcacctagatagctgctgctggtgttgagattttgctcattcggtgtaaggtgatttgtagcacctgaatccggataccaatcaggatcattaaccacttcaggagaggcataataggcctgaacttctgcaatattggtgctattgttgccttgaagggcttgaaaggactcggggccagtaaagcttttatcaaagcgataaaagcattgctgcacggtatggccgagtttgtgacacagttgacactgtggtttttgcccccaaatggtgttaatgccgcggccacgagagagtcctcctctgaaattgccaaattgaccacgagatggtggattaccaggtctagggccagtaggaaattgacctgaattcgggtagggtggtctttgattggaattgaatccaaaatttggattggttgggtaagaaaaggtgccacggccagtttgtgacttagtgtgggcaagattagcttcagttttggcaacatcaaggtctttagcagctttatcgagttgaacttcttagccattagtaaagcttctatctaagctacactgtatgcttcagttctggtgttcacggagtgatgaacacattgtactccgatggaaggccattgaagatcgcttcaatgtgatcctgaacagaggtggagtgacctatcgatgccaacgtatccgtgatgttcttgattttgaggagatagtcatttagtgatgactgcattttggtgttgcgaagtaaggtcttgtattgcccgatcttggctcgattgtgagctgtgtagtgttcccgtaggttgatccaaatctgagcagccgtgtccgatccaaccattcttgtgagcactttttcagacatggatgagaggagccaagaaacaagaacgttatcttgctgttcccaatcttcgaattcgggattgactttgttcgtggctcgatcttcagctgtgagaaattgcagtggtgcttgatttggttcaagatacttctgtaatcgacttcctttaatggcagcaaggacttggtgcttccatggaagatagttaaactcatccaatcgaacagagagagagtgagaaaaggaaacaatattagttttaggcagagtgatttgttgagacgaacctgatggtatagacgatccaccattgtttattgcagaagaattcttcatgaaagattacagctctgataccatgtgagtgtttagacaaaaagagattgaacgagagagaaaga

SEQ ID NO: 320540 - DNA, 1078 bp, Cannabis indica
aagaactcgttcaagatattcaataaatcaatgatgatgcaccttttacttaacctgacatacaacctaatgaaccacctaccacatttgagtttattagagaagctactccatttgaagctgatttacacaaagaagttgaaccagaggctaagcatgaagagtttgttggagaagaatacaatgaaatagaccaatgtgaaatacaagaggaagagtatgctggttaggcagaagttgaaagagagaatattaggaaacctaaaaccaacaactggtgggatgggattacaaactttaatgttgaggaagatgtagatgatgatggacatgaaagagaatttgatttagaaagtgtgggtagtgatgaagacaatcctatcaagacaaaattggagtacaatctaaataccaaaatagttgatttcaagtttaaattagggatggaatttgggactatccaattacttagaaatgccttgagatagcattttatacacattggaaacgagtataaattaacagttaatgatttgaaataattcagggccaagtgtagagcacctggatgtcctttcctactctatgcacatgtgaaagaaagtatttttctagtttatataacaatgtaatattatagtaatattaattgtagaatatgatttatttaaaatatttaaaggtacttagtttggtgtggacaacttaattgtttttttttggttctgctagcttttaaaaaaacaaaaatatgttttgattacaaggaaatttaatttgattattattgaaccatctcctccatttaataatgattatatctccttaataaaaagatggctaattaggattttttccttcgaactttaacatgtaccaaatcatgccccctgaacttttttggcattaaaaatttcccctgaactattgagattgttagatttaaggacttttgtctaattttagtaaaaaaattctaacattgataaaagttcaggggcataatttagtacatatcaaagtttgaagggcatgatttggtaaatatcaaagtctgaggagcatggtttagtacata

SEQ ID NO: 320541 - DNA, 622 bp, Cannabis indica
ctcattttaagggatattaacctattttgaatctagatctttttataagctctaacctatataaagagcattaggctagaccaaaaatctaagctctaagtttcgatctggagactatactctttctctcacacacacgagtgcccctagtattgacactaagtcagtctccttatctcattcgttcaagatctgtcttacattgttctcacttttgtagaattcatagagagccatactataattttcaaggtaaaagtctgtaatctgtgtggtattatctctcgaatcaatacaacaaaaaagggagtaggtcattacccactaatcaagggggtcattacccactaatcaagggggtcaaacctctataaattactgtgctattttctttacttgattttattatttacacgtggtgattttgatcataaataaggctttgctgtcagttgaccaaatctgaggtcagcattttggtgctctcattaagagcgttatttatcacctcgatcaatcatgatggctgtattaagaacaatggcaacttctaattcttcgggtattccttaggaccccatgactgctaatcctaatgttcgtgttgttggaaattatttta

SEQ ID NO: 320542 - DNA, 2001 bp, Cannabis indica
atttatgccgcaatttatcctaaaaattaatacccactcgattggtccagaagtgtgcaagcacatgaatagtattgtttaaatataatttcttaatattattttatataattttaattttttaataaataaatgtatgaatttgaataaatcatgaacttttttccattaagtaagatgtaaaaatttaatttgcaaaaattagtaaagtcatatttattttgaaattttttgtgaacctcacgagcaggtcccatttaattaaaaaaaaaatgtatacatttttatagattactttttaaaaaaataccaacacaaatatttgtaggtatttttacaaaaaaatattattaaaaaataaataaaaaataaaaagttataagcataaattaaacaactaaagtagggagagagagaggaagctttgaaatgatttgatgtcaaattattttaagtggccttttgttaaaagtaataaaatagaatggaattgataaaaaataatttcacttacatttttttgtttgattacataaatattggaatatcattccaataaaacttttattttgaaatggaaggaaaaatcattctaatgtataatgagaaaaatattaataattttttatcattttttatgcatttctttttattcttatttctattatcattctcattctcatttatatgtttttattcctcccaatccaacgtcaccttactatttaaatttatttggagaattactttatatactatttttttttaaccttttgttttaaatttacggtttaggttgctctactaatttttaagtgagttgctatgtgaattttcattgcaattgaagttactagttgagttgtaactcaaacgtccaagaaaaaaaaagtcttgttaccatttactttgggtaatagtaaggtgttgtagcgctgattgtttgcaactaggatttggaaaatggaacttgcccaaagtgaagaagcttaattaatttcctagtctttttcagatataggtctttagtgggttttgaatttttgggagatggtgcctagtgtaataagatcactactttatttttagttttacaaatgtctttttctattaagagttagtcccacattgctaatgtgtgaaataaattgcgatatataagatgaatgagctactcattccatagccaattggttttgagatggaacctcattcatcttattcccaaattctaacatgatatcagagtcactagtgatccgttgtgagcccaaattgccactggtttaaaaactatttgtgatccgttgtgagcgaaagtgtcgctggtccaaatagatacttccgctgtctcccctttaacctccatttgagacctttcggccaatgtgtacatttttagtgttgaggtctttgaccggtttcaaaatctacaaatttatcgacgtgtacacccacaaatttatcgatatttggccttgtgggattcttttaaatgtcacgttcagtccagtggtctcttaaaggtcgttcgttatacttacatttttcaggcccaaacgtgaggaggatgtattaagagttagtcccacgttgataatgtgtggaaataaattgtgatatataagatgaatgggctactcctcccataaccaattaattttgaaatagaacctcattcatcttatcctcaaattctaatattttctgatcaaaacaaaaacataaacgatgttttttattcataaaacatgttaaatccatacaatccataaataacatgtaagattaaaaaatataaattaaaaagttagagtgatatgatatcatgtatattttttgataacaaagaaaagaaaaaaataaaagaaatcgagtctcaaaatataattacgagatagcttatagggtatttgcggtgcgggtggtgcagtttttgaccattttttcaaatcaatccgcacatgcgatttttcaatttcccaaactgcacccgcaccg

SEQ ID NO: 320543 - DNA, 921 bp, Cannabis indica
tctggattgatttcgatagtactcgattaacgagttgacaacgacaatcttgtttaaaaataatattttaagccaatattagttgatgatattgttagcaacatatatactgtgtttgttttgtctataagcacctttcttggtttgaacaatcaactttgttttcattattattgagttgatttcgacaacttgagataattcttcactattatcttggagcaaagcaccccaaagagtcaaacaaatcgggttgaaactataacttagattgaaaagagaaatggcattattgttttgatatgtataactattttaaattcataataaattaagaggtgtgttataatgaacatgaccattatgtatttggatattatattttatatacctgtcatcgattagatataattcttgtatggttcgctatccataaactatattgaccattttcgttgggtttattttgacaactacaactatggtatctgaaaattgaatgcaatgttagttaaaactttataaattatttgttatctgttatattgtggagatcatgagatactttgtggtttgttggagtatttgtcagatgacaagttcttaatcagaacgaattcatggattagttcagagattctttgccttcttcttggacttcaacaatttttgtttttgagttcagcgtccagctataattgtaatttgtgtcaattttaaggtattttgcaggtattttattgacacgagcatctctaatgtagtaagaatgtagctcatgcaaagtgtcttctaaagcttcaatatcttctctaaaaaatcactacatcaatttctcgtttcctgtgtaaagtttattaataagccatgcagtaagattttgtattagataattattatatttaaaagtaatcaaagtgc

SEQ ID NO: 320544 - DNA, 755 bp, Cannabis indica
atcaaatacccaattctctccttcaggccatattacaaacaaaagaataatcacaaaaaagaaagtatagaagaactcacttcataacgaagcttttcaggccatggagctgaaaaaactctcttaaacccttgctttatttcagtagtagcagtcagacttgaaaaaaaaaactcaaactttaacattttggagaaaaataaaaaaccccaaaatgataaaacgattaaactcaccacgtttggcaccaattgtggcataagtctcttcgactggctttgctagctgtaaaagggtaccccaacatccaataacactctatcatataccctcctagccctaacagaagaacctaaaacatcatcttcaccaaatttaattaaattataactaattttacagactaacataattgtacataataataaaaaagagggagtaccagagttgagacagggagaagagatggagcaaagaggtgggtttgtaagtttaaattagagaggtttgagggcttcgaatacaacaccattattactaatactattagtgcagtatctcatcaaagtatagaaaaatatacaaacttatacctgaccatacgatcctgagaggaggacgccaagaggaagagtggagttatcggagttagagtttgggggtgttctgtcggagctgctgctggtggtctgaatggattacaaattgttatagtgagatttttctcacctagaaactcgagaccagactcctat

SEQ ID NO: 320545 - DNA, 1173 bp, Cannabis indica
ttgtgtgttgggtagtgatggtagtggtggtaatgtggtcgtagtgatagtggtcgttgtgttgtggttgtgtgtgggtagtgatggtggtggtggtgttgtggtcgtagtgatggtagtggtggtggtggtgtggtggtgtggtggtgtggtggtcgtatgtggtattgtgggggttatggttgtggtgataataatggtgggtgatttgatggtaaagtggttggctagagaagaacgaaaaagaaagaagatgaagcacaaaaaaaaagaaattatttatttaattgtttttaaatgattttgtaatttttaattttgttataatacttaaatcattaatgtgggccactacaaacgtgccatgtgtatacttgtgttcacgtgggcagtaaaccgtagaaattaactgagacttttggataaaagagtaatgaccaaaacagaactacgaattaggtagttttatcatcaaaaaattaatttttgtgattaagtattaaaaaatataaacttcaagtggtttttctgccaatatccataggtatatagatatagattactagaattagcaccatttgatattgataataattttttttattagttacatgttttgtagttttttggttctatataatatgttaagttttaacataaaaatttaattaaatgataaaatttagaaaataattatgacaaaagtgtctacataaattgtattttttttaattaaatatatagatatttataaattattgtgcatatttatatgttaaatattttaaacattgttaagaattttagatacttattaaataaaaaacacgatttagaaaagtaaagtaacctaaattcaataaaatatttctgtttgttaaaaataattaaatgaattttaaagttttgaaaaaacttgaaaaaaattaagaatatgtgttaaatttatttaaaaaattataactaattaagcaagaatcatcaactacatatcaaaaactatgtaatattaattttgcacaaatcaaattgaaagaaataagtgatctataaatagtctttaagagttcgtttggtatgtcgtattacaccgtattataatgtattgtattatattgaattgttattttatactaatattttatatgaaactatatgtggtattaactctta

SEQ ID NO: 320546 - DNA, 943 bp, Cannabis indica
ttagtctaattttttcatattcatgtacgttatagctatttaagatatcctacaaaattttgaaaaattcagaataatttacaatatagaaaacaatgttcaaacagtttattttatacgcgtataaaataaaatagtcacgcgtgtaacacactgtttgaacataattttcggcatgttaaacttttccaaatttcttaaaattttgcaggatgtcttaaataactataacgtacatgaccatgggaaaaaatttgattaaaaaattatttcggatgctaaaatagatagaggtgcatcaatatattcattttaaggaggtgctcgtagaattttcctaagttgtatttgtgaaactataaataagtgtaattttgataaataaattattaccgtaaaaaattaaatttaaatatttattttggatatttgtttttaaaaaatatttattcaaatttaaatttaaaatttcaaaaacttatttgtttactatttaaattattattatttataaatattgaaataatgttacaaaaaaaaacatgttatgttagtttgtggaccttgcataattatggttttgctcgatagaattatttttaattttcaaatttctaaaatcatattcataacctaaattgagcaaatatatacactttttctaatggcatatagattgaataaagattttttagttgaaactttttatatttgacatcgatattattagtcaagtccattcaaaaataaaaaataaaaaattatattaattacatataaatatactttcttttaagttaggatttgaaattataatatgaggactaatccttttttttgacggattaattaataaaattagggctcgtttgaaacgccgtattagctcgtatcgtattgtattgtactatattgaattgtattttatgcaatatttttatgt

SEQ ID NO: 320547 - DNA, 829 bp, Cannabis indica
gtttctcgataccgaaaaaggtttaatcgaacgcgtgaaaacgtaggacccacccaagagaggaacgacgtcgttttcgacggacgttaattaaaaagaaaaggtctggtcacaccgtcacggactttggagttttagagagtatttgattgtgtcccgtgattaacgccgttaagttcggggtttattgagaagagaagagaatgaccccacgaaagaccccactaatttacgctgctcgaaaaaactccctctctctctctatttcttttatattaatttttatttacttataaaaaaaaaaaggggtgagtgaggagtggagtgggacccagtgataggagtatgaggtggggtataagatatgaattttgggtggcaacggctagtttggtaaaagtgaagagaagaggtgtaaatagaaaggggacaagatgtcacctcaccctgcgcctccgctgcctcactcactcacttctctaccagaacacaattagcaccatgtttggtagtgggtacaaaaatagcaaggaagagggggagagaaagaaggatggaagaattcctttctatggattatacttatacaattctcaaagaaatgcaaaaaaaaaaattaataaaaaaatcattaaacttttttttcttgttacattgaaagggtcattcctttctttttaaaatggaatagtcattccaccaaaatggtagaaatagcattccattggaacatcatttcaatacttttaaatacaaccaaacaaaagaatgaaatgaaaattgtttcctttccattccatttcatttcattacctctaaccaaacgcca

SEQ ID NO: 320548 - DNA, 1317 bp, Cannabis indica
ctcctcgggtttttgtctggttcagccactgcaacggtgtcaaataaatgaaaaaaaaaattattgagaataagttaaaaaatacttcttttttgtatccattaatcaaaaatatcctaatattattttttattaaaatatacccacttttttgagtgggttgcccaatatacattcactatctacttcagtctagcataaaatttacattaacataaagggtctaatgggacattatcttaaaaatagggtcggccctgagttgagatgggctataggccaaattttttttgggcccttactatatagataaatggtatttttaaaaattattaaaaaaaatgtatattttttaaagggtattttttttatttgggcccctaaaaggagtgggccctaagcgcggacctagcccgcctatccccagtgccggcactgcttaaaaagtgggtatattttaaggaatatgaaaatagaagtaaaaattaaaacaaataaagtaaaatgagtatacaatgtaattttctcaatttattgcatcaatacttacatggtttagtttgttgctaataaatactcaaattctaaaaatactcaatcatttcttataattccataactagtatttattttataacagttttcttaaatgatgatatgagtaccacctctcaatattctattcaactcaatttttttattaaaaattaaataaataactcatttaaactacatgtcaaagaaaaaaaaaaactcatttaaactaaatgatgaaaaatattaaaatttaaaacatttttaactaaaaaaaattatttaacaatgttattcctattcctgaatgaagaaacacatggtatagaagagaagtatggcttcaaatagtcaatgagtaagtcccctatgtgaaactaaattacggggaggctccttgaatctaggaataaatcaaagacaaaggatacgtagagagttacctagcctcattatgtcttttgggacacagaaggtttagcttcactctgggatccaaagatgccaaggatcggtgtttgcccctagcgatacttagaagctagttactagaagtgtctaacatagatgctgactatccaaaaaaatgcagatgtctactttggagatgaacccagattgccctacgacgattatactttttctaacacagggttagatcttgtcccttgtgtcaggccatggttgtgcgcactgttgggttttgtgccctaactaaaacccattccaatattatcagatttactaataaagatcggaaataacattttatgttgcatggtt

SEQ ID NO: 320549 - DNA, 1333 bp, Cannabis indica
gtaaaataataaaaatcgaagtctttttcttttctttgctttgtcctttctttaagtttatatatatatatatgccattttttatttgtttatttatttattatttttattactattttggtttggtacatgaattagattttgcaaaaattttagaatgctaaaacgaatgtatagatgcatttgattctgttttggtaaaaataattttgatggtgatgacttttagttatttaagaattataataaaatttaatatgtcgaaaacaagatttaaatagtctatctatattgtgattttttttttaatatttataaaatattttaaataattataacgtatatgaaaatgaaaaaaaaataattaaaagattattttgaatgtcaaaataggtagagaatatatccgtgcatctcttttaaggggtaagtacttttagattttttttttggtaaataataattccttttttcttaaaataacaattgaaaattctataatgtactttcctaatacgggtgcattgatgcacttttagcatctgagaggtttttgagtcattttttatggtcgtatttattatttaagacattttataaaattttgaacgttaattaaaattgtaaattcgtatacatgactttttctttcttgctatgcctttctttaagtttatttatattagcactctacaattcatccccttaaaaagaatgcattgatgactctctgcatgttttgacattcaaaaaaaatttaaaatgttgagaacacgattcaaattgtaagtttgtatgcatgattttttctttcttgttttgcctttctttaagtttatttatatgatcacaacaaaatagtctaattttttttttcttctacacaattttgagaaatttgaaataatttacaatgtagagagcagtgttcaaacagtctatttcaaatgtgtataaaataaaatagtcacgcgtgcagtacactgtttgaaccttgttttcaatgtgtcaaatttttttgaatttcttaaaattttgcaggatgtctttaataaccataacgtatataccatgaaagaaaattgattaaaaaattatttcggataacaaaaacatatagaagtgtatcagtacatctcttttaagggtatctattgtaaatttttccatttatgtatgcaatttttatttatttattatatttttttttggtttggtacgtggaattagattttttttttttcttaaataataactctattagaaaattctacaatgaacattcttaaaatgggtgcacagatatactttatctgttttggtatttgagaaa

SEQ ID NO: 320550 - DNA, 1835 bp, Cannabis indica
gtacttgttataattatcctctgaaaaagagataatatccccccggagcgccttctcagtcccaagattctgagcattggggtaaggaaccttcaacagattaaagtcatccactgattggctctcgaggataagcttggccctcctgtaattgacagttgtgaccaagtcccccacgttcaactcctcctttttgtaaccatcaaacacttgtgcgtggtttaggaagagttgagtgggagcggcgcgatgcatgggcaaaaccctgacctagtttgtaagcaggtccgggcgctcgaaggctttgaagccggaggagaagaaaaactgatggctgtactccttcacattcttttgaaaattgaaaggcaccgaaccctcattagctgggtgggcctaaagtttgtagaaaccgtctttaaactcgtctccctttttagggaccgtaaaggagttcgtaaaagtatagaatctcaccgagactgggcgggacccagttcctggcaacataaaaagtatacaagcctgacatcaggcggtaagcttgtggaataagctggtagggcgaaaggccaacaaaactaaaaaattaataaagtagcttggagcgggagcatggcctcggacatcaaatgggtttggctccacgccccgaaaccgttgtaattatggttgggtgtctctcatcccagggaggcaatggtaaaccccagaactggaaggtttgattccagcaacagtaatgatcttttccagctggtgggcgcacgtcagtgtcgaatgtagctcatctgcttcccaaccatttggagctaacaggtgaactttttgtagatcaccgggcccttcattacttcctccaaggtgaccaatttctttggccccttcttcgaagattttgctccagtaggggtgggggttgacatggtatggacctgatggagatctaggatttcttggtcgaactcgaagaaatcgtgagagtaaaggtcgtggagaacttcactcatctgaaaaagaaaatccaaccgttagcccccatatcaaaccctaagattaaaaaggggaatgggagtcccctaaccgctggaaagaggccccctccggatgccttccaaaaaaagagaattcagagattctccaaggcaagcatcaggtgaaaaacatcctagcaaaaagaaagaaaaaagagagagggaaaaaagagtatggaagtcgcttcaaacacccagaagtaagcaaacaaaaaaccaccactttctagtctcaaagtaagatgacagtgcacatacagataaaatagcaaacgaaaaataacaacaaacaacggcgctcatcggacgccccattttggggaagcgtcaccatgacattcaccgtaaccttcatgccacaaaaatcaagcacagccaaataaaagtatcaccatttttattttgccctaacaagcagaaaagaaaatagaaaacgtttgaattgagacttacacaaaggtagtaaggaagaggttgacggttttcggtggtaatattttgtctgacagcggcgaaggaaaagcaggagatagtcggaggtgtctggaatttttccaaatgtgttggatggactaaaaattgcaaggtggtgaaagtaacccagtaaaggaaagtgttggcttttataggccattaagggtgcaaggcagcattgatcaagcaccatcgtacggtgaagattcgtagcaattcgaattctgtgatccaacggatgggatgaacgggtgtgaacagaagaaagggcggttgaaacgtttgagtacctctctgacaccagcattaatagaaaagtctatcaat

SEQ ID NO: 320551 - DNA, 1545 bp, Cannabis indica
gcttgctaatccaataaaggaaaagaaaagagtgcttggatgaaatgaatgtgtaagctttgggtcatctctaagctcgaccaaaatagttcttaatcttaaatagtcacactggtgttatataaatatatataaatatatatatttatcttaattgatttgaattgttgaaaatagtttaaaaagatttgaagttggtttggtgaggataaactcatttctcgaaaatgttgctttttcctcactattggccgtcagtcgaccaatttgtttgttggtggtctggtggagaaggttgcaaggccagccaaacttcatggtctgaagtttcatctgcatctgcttcaggacctatgtcctcaattgtaccatcatttctctctggagcctgttcagtctgatccttctccaccttaaaattgagcttcttcatccttttcctttgctgatatgacaccactttgagttggaaacatgtctttatacacggttttctcatcaaaaaccacatacatgcttataaaattttgttggtggttgtcatcttctatgctccatactttgtacccttttaacttttttagatacccaaggaaaatgtccaggttgggaatgtcaatttgggcactgggtgaaattataagtgctcaggttgactttcagagtgtaggttcgtgtaattgcagctcttgagacttgaatttgattgctccttattttcatggtacaaaatactgaaagatagtgggttggattcaagttattgaattctaaactttcatcgcggagctcccggagtcaacatgggcacaatgctagggtcccctcctaggtcgactactataactcaagtctactcaactccgtgacgtcatccttcttaccacgtgtcaaacattaatgtccacgtcaccagaaaaagtttctaggttaacattactgattatcacgttagtgtaaatcaagtgcactattaaatcacgggactaattagtttgaataatcacaatcatcttatattgtgatgacattatcataattgtgaataactatatatttataataaaacttatatattaaacttacaataataaaataaatatgtgaaaaaagcacatgccaaggtaaagatatgctttttgatcatttttgatggtaaataagaaaatattaaaattgagttttatttaaagcataaaacccaacattaccatggtgtaatcgatgcgagttattgatcagaggagtatttaggaaaaatgttagacttttatttgggcttacattaaattttattggttttattaaaacttgggttgattggatagttctttgctgtgttagcccatgttgttggtgatcaattgttaatgggcttagcatctgtgtgtaaagtctaggtgaagcagaagtgtgggcttttctagttgactgaagcctttgatgagcaggcccagcccaactagggttttgtagctaagtcccctccctaactctataaatacatattgtctcatcacaattgtataccttttgataatcaga

SEQ ID NO: 320552 - DNA, 1312 bp, Cannabis indica
accacatatagttttacataaaaatattgtataaaatacaatttaatataatacaatacaatacaatacgacctaatacggcgttccaaacgaacccctaatgtttacctaaagctatatatattttaatgtttacaattaatgacgtgatttatacgtaaactttaacatgtaacaaatcatgttctctgaacttttctggcagttaaaaaatcccatgaactattgagattgttagatttaagaatttttgtctaatttcattcaattttactattccagtgattgtttatgtactaaatcatgctccttagagtttgatatataccaaactatgtctctcgaaatttttacatatagtaaattatgtccctgaactttcatacatgttagactttttttattaagattggataaaatccttaaatccaacaatctctgtagttagttcaaagggtatttttaacgattttaaaagttcaagaaacataatgtggtacgtattaaagttcggaggtaaaaaattaacctatttgtaatgagaagagttgttctatacgattcagtggctttggtgtaaaacatactagtggttataacttatatgagtaatttgcaaacctgagtcttgttgaggaggtcaaaatagtaaatgattgtacgtgtaggaaaaaaaactgatttgtataaaaagccattgtacgaaagatcatggtcccaagtatcaatcatatcagatcagttatgcaggcagataagggcaatttggtcattaagctaatataattatttttggtatatatgtataaataagtgacattccactactagttattacaaaattcagtaaaccaaggtcatgccttgcccctaaacgacagccgtacacgatcagctttattaaaagatcctaaaatttcaagatgatcaattttcatttatttttttaataaacatcagccgtactatatatatatgatttattaatttgttcattatttttctgtccttttttttttcaatatattatttatgttctttttctttcaagatattagttttctgttaattaattatccctaataacaattttttaattctaatttatcacaacaaagatctgatatataagtatattattgtggagagtgattcgagaataactatcaatgctatcaatgagaagaaatttcattgggctcttgataactatgtctccttttgtattaagttatctccttcttttaatagttgtaatttttctaatgttagtaggtcttgtaattttattgtccataatgtggttaagtgg

SEQ ID NO: 320553 - DNA, 1396 bp, Cannabis indica
gatgcagcaatcaaccagactcagagcagatgggctttggagcagtgctcttgattggcaggtaaagtggtggccggtctttcagcactgtggctgggaatctgcagccactgatagctgaggctttgtctctgcatgctagcttagagtggtgtgtcactatacaaataccactagctgtgatagagacagattcaaagttgctagttgacaaagtccttagcaagaaagctgatctttcagcactagcagatgttgttgaggatatccgttgttctttatctgccttccctgatgtccacctccgacatgtcaagcgatcccataactgcagagcgcataacctggcgcaaagggcattggggcaagatgaagaatgctgttggaatgccttagttccaactttgtgttagcttctactggagctctctcgtcaaaaaaaaaaaaaaaaaaattagcttcttctctataggataaaataggattttattaaggaataaataaggaggacaatagaaacatgagacttgtaactgcctaactaagaaagcaattatacagatattatgaatttaaccaagaacagatgacttcctttgatacgtaagtgtgatagcatttgaaagatgataagttcatgaagtccaccatttatattccttgttctgtgtaatataaagcgtaagttattttgaaccctgatcaaatgagtgttgttatcagtacatttctgtgatacgtgcaatggtgttatttgatatagaaaattcctctattattgttttgcattgtaattttggatgatctctaatttgcgtgcatttacataattgcattgtacaatgtagttgcgcgtctattgacttagggtgaagtttgaacacaataaattaatcattagcaactagataaatgtgtaagaactgaaagaattttatccaaattttataattgcctttgtttgtttcttaccattgccttcttttctttctttcatactttctttgattaattacacctgttttattaattcataataaattatatgtaattattgaagctgaatttaggttttgatgaaatcatgttatgcacattttgtttaattactaaacctttcaaaggatgtgattcgctaggtgccggttggtttataagtgaatattaattttttttcatttgatgttaagtggttattatgaaaattatttgtctatatcaattcactaatgtctaatattttaatgtgtcactgtttaagaaggccctaaatgcaagtgatagtagattggtaaagccataatctatatatatacataagcacataaaccaacatgaaattatctaaatcaacacaaaacatataaaacatcgttttaattcatattacattaaa

SEQ ID NO: 320554 - DNA, 1195 bp, Cannabis indica
agctatgaataaacagtcagcaacatattaaagttttagaatctttaatcaatggttgatagtatggttcattgatgcccgttctacgctgcaagttataattgttcagattactaatgtagtgagacatttaagtgaaagtattgtatataataaaaattatgtatgacaaggaccgatatgaataaaagttatctttattaacatgacatttatcataaagacttaattcatatcaatacgatgttcaatagtagattggcctaagtcgtgagttatcatgaactcctagtcatgttattagtgtttttaattcactcattaaagtttcttagagaagatgattcttacaacttctattttaagaatctaatagtgtagatgggtgagaacatgatctacagttatagaatccttactttcctaacggatctaatgttggttccttttatgtcttaattctagtactagaaagttacgagtgtaaatttagatggaattttgaataacacttccactagtgaattaatggaactaaaggatatataaagaagtaattagaagggtaaaatagtaatttaaccaaaaataattataaaccaacacattgagggctaatcagtggaattgattatattaaaagacactacagttaatcttactaaatataatcgtataattactaagagttcaattctatatttatagtaaagtaatcataaaattaataaacaataaattatttggttgatgagactcaataaataatctattttactagagcttattataggtccatggtaatatgcagagaaataactattagcaaaatatttatgcaatattaaaaatcaaaacagtattttcacgtacgtaactttatctccatgtctctttatgatttaatatgaacaaattcaccattagaaatatataaaacaacaaaagtacaccaggataaattattttactatagtattgatgtaatttttttttggattatacccgagttagattgtttggaaactccagttctactttattttgagatctgcatttcatgaatctgaaaattgaagtcaggacattagttttatgtgaattaaactggatttctagttgaattttagtttcatagtagtttttctgtacttttttttttcatgaattcaaaacagaccatgttttgattgat

SEQ ID NO: 320555 - DNA, 1426 bp, Cannabis indica
taaaataatttccaacactttgcacccgtactttaggaaggaggcgaactttttttccgtctctatctgatctagtttactcctaagggcatcaagtatctatctgccctgtccgtcctctacgccacccagaattgggctaggccttctctgcatgaggttagctggtcttttgacttgaagtctactcccaagcaatgcaggtcaggatacttctatttttctcagccagacattaagtggttgacgggcactagaaataagggcgtgagcaaaatttggaattttgtagacgagtattacatggtggaaggcatgggtgccacctatactcggttccagcagatccgtatatattaccgtccacccttcatgctagctcttagggatagagctcaaaggatcactcagctgcaagatgatgcttggaatattactttgttgacctcaaaggccaattttgtggagtacgggctttatccaaaggatttcattccccaacctatgaaggagaagaagaggaaatctagtgctggccgggctgagggagctcatgaggagaatgaacccattcaattgaaatgtgaagctaagttgaagggaggtgcgggagccaagcaatatgctcaggagcattttgagcaagaagatgatgttgaggaagagcaggagacacggctcaaaaggaagaaaaaacttatagccgagcatagggctatcgaacatacaattcaggtcaaggagcctagtgtacctgctcggacgtccactcctgtagtaggataggggaaagccttcttggaggagcaagaagactcatcggtgacaatgcttcatcaggtcttggtcgggcagatgcttctgccgatatgcaagatactccatcttgcttttaactttcgtgattattatgctttcatatttctcatgctttttcctaacaatgttgctttcatttcgtacagacatgttttagaaaatggtcgatgctttgaagaagagagtgggaggaagcttgggcttatcccctctggccaaaaagtccaggggcggtgagacaaccccatctagagagaaggcaccggtcgaagaaattattgatctctccgaggaaccaactatcgtagacccttctgccccaagaatgactaaatccaaagactctcgaggagggagcacggacaggccagagtagtcgaagggaaaatctaagctactcaaaagcggatctaaccagatcagggccccggccccacctctggtgctgcatcgataaactaaaagaggcaaagatctgcttacccaatacatgactcaatcggtccctgaggtgaatgagcagctcgctagggctcaatgacctttctctagagcaggttatgggatgatcctgaaggaatttacgagggtaagtctttcctgacag

SEQ ID NO: 320556 - DNA, 2037 bp, Cannabis indica
aaagagttttatttagggcataaaacccaacacaagacatatgcgaggactataaaggtctttctgcgaagaggaaaggatcgcttctgcatttagtgagttggtccggatgacctaacaacctcgataacctaataagaactcgcatgtcttatgttatcgatttattgcaggatgtccatatacgcgacttgaacaggacatagacatcttagactcgattagtcttctgcgcatcccaagcctgcgagcttaagcaagaatatgaataggcaactcgtactatagaagtcgcatacattgatatatttagtgaattaggctgaaacggttctttatttattatatttacgttttatacagatttaattgttataatttgatgtacaaacgaatggataatgaattaaatctctgtgtaattataggacacttgctttgtatataaaggagtgatccaacatgaaatggacaagacatacaactcttgcaacagtggagtaagtagaccgtgatctgactgaaccactatatttctttgtgatcattatatttccagtacgtctgtgttttcatagcttgaatacttgccattctaggtcaagtactcgcacattttctatttatatctttcttatattatttattttggtgttgtctaaattcctccaataacaatgcagaattttaactgcaaaaccacgtaaaaacctttgtgttcttactttttctttatttattttattttctgtgcaaatccatcacgatttgggcattaacatagctaacaaaaatctgcattaacagtttggtgctttccttaagagccttcgtgaaaaaatctcagtaaaaaccttcctggtataaaaaaaacaactttctccatggctgacaacggagaaaacgttgacactccacatgaaaaaaccacccaccgtcctagaaaacagccaatgggctcctagaggcctcccaactcacaatctaaatggaccactcgttccacaaggtcccaacctgagggtggcccaagtacacggaccacacgttcaaagaggacctagaatctgagaacaaggtatgaagagcctgaaataaacattggtagagcccatcctagggcaactggcgaggatggcgcctacgatcgaacaagatatgtgtcaatcgtcgagttagaaaactgccaactcaagcgccgcttggaggagacaaaccagtggaatgctgagttggaacgtgaggcagtcgcggccagggcggcacaggagaataatactcaaaatcaacctaatcctggagtgagaagaccacgaggcagacctcgtggctcacaaactaggaggcaggagaaagctcaggaagaacaacctcaaaaaactgaggttccacctgaaaacgagcaaccagggaaactgagggtccccctgaaaatgaataaccaaatgatcggccaaaaccttctcattggaatgacaaaagaaggcgactagaaatcagggaatacgaaatgcctcgtggaaacaagggaaatcctggcactcaacctagagcacgtgggtcaccaatgaggcaccgccaacgttcttcccaaacaaatcgggaaggggcacgtacaaaccccactgaggggcacacaacaaaccacacccaaggtagaagaatggggcatgaagaggcaagtattacctcgaggagcacaagaacccataactcgccaacgcgaggaggagagagtactcgtcgcaacaatgatcgagaaagctcatgcactagtaaaactacaagtcagtcaaggacaacatccgtaaacaggatgaggtccatgagtaggacaaagtccgtgagtagaacaaagtctgctagcaattataacaacactggatttgcgagaacacttgaactagaaaaaacatgatcttcgccaacaactcggtccatagaatgggtgtaaagaccccttagtttagtttggaaattatcaaataattagggcttaattatgaaaattatttattaattttgaattgttaattt

SEQ ID NO: 320557 - DNA, 1475 bp, Cannabis indica
gtgtatactattgccttaatttaacttttcttttttcttctcttttcaaagggatttctttttccccttagatggagggtttcaaatcacgtaatactatttggttgttgttctttgtgatagggttcgcccttctatgctttgctcggaacgtacctagtacaggtaatttatatctatatatacatgtcaattttttttttaaaaaaaaaaaatcatataaaaaaaatttacaaacatgattttttttatttatttatttttatgttttgagcatttttatttacaaaatacttctttagtacaaatactaaataattattatcatgcactaattgatttgcaaatatatataaatctagaacaaagtaatgcgatgagctgaatctaaataatttagtctagttttttcataatatttatgaaactgcattaaatatttgattataacatttataatatatggtagggaatactgaaacttattataagttggtgatcaacgattatgaaccgcccggtcctaatcgaccgatgccaccttatgagacacatgcagaagacaataaagaatacaattataacaatggtcaaaggacgaaccttcaacacgagaccactttaccatccagttaataattctttcactacttataaattattcatgtatataaaattttattttatttccctttaattatatattttatcataacttaattattctactttgttaattaagttatatatatctatatttttataggtacgttatagggtgatgatatatattaatattattagtttaacatgatgcattacaaaaatgtaataatgtgcagaaatattattgttttcagttattatatgaaactgattaattaattattgttttgtttatatacagggaataatactaagtatatcaacgactatgaagaaccccatcctaatcgaccgacggcagctaatctgcatgcgtgattagctagaatgatttagatatattattagagctaataataagacaactatgtatgtttcatatgttcaaatatgcatgaaataatgaaagcaatatatttatatatatatattattaatattattattaacttggattgttacacatggtctcaagaaattcatatattatttgcaaaaaaaaaaaaaaaaaaaagacacatgagatttatttagaaaagaataacacattaaattgaattaattatgatttaaaaagatatcatttaaatagttttaatatctcgaaagatgttcaaccttcccaatcccaagcaatatcactactaatattcatatataaatgcatcatttattagattttgtaggggaatttgaatttgtatcgggaaatttgagaaattatgcttaaatatgttgtatcttctcataatattcaacccttttaaacattatactaaatggaacacttcttaatgggtattatccat

SEQ ID NO: 320558 - DNA, 667 bp, Cannabis indica
ctagccaaaagtattaccctttgactaataacaacttactaacaccctactaattcaaaactcttgaaaatcaatatccaatagattgcatttaaaagtcaaacttatcaacaaaatctctgtaatcgtaggtcctccacaaaacgaacatacaaataacaataaataaaattctatcaccataaatataatgaaaaaatagataatgtgaaagaacgtaataacccaaaccatattaaatataaaaaaaagacttgaaaaacttatctgtcaaaactaaaagtcgttgaagtaggagtcatgagtacaaaaggatcacctctcttatctatcgaccatatcacaaaactactctgaataaaaaggcacaaaaattgtaaaaaaaaaaccatacaaaaccatgaaaacatggtgcaaaaccaacattatcttagcaaattagtaattgaattgaagcggatgatgattttcaaaattcaattactaattggattaaatcagattatatgacaaatattagattagatcgaaagtcaaatagttggtcccattattatttttttattttaggtttaattttttttaaatatttataaacagtttgattagttttttttttggatatttttttcatttcttaaaaaaaaagaataattacataagacac

SEQ ID NO: 320559 - DNA, 1062 bp, Cannabis indica
cccatagtagtttaattttttaagaactagaaaaaaacaaactcagatttagatctgaaagttaaaaaaaatgacaaaacatataaactgatgttgtttaatttttattaaaaaaaattacatgtagattatccctgagaaacgactaaaaatgtttattcgaaaaatcagggttgttctaatgttgttttggcgttattaacacaaattcattgctaattatatggatcaaaaaaataataaatgagaacactagtaaacaactaatgtaaattgttttgtagtgttgttttaaaatgaaaaaaaaaacacataaatgtaatattctgaacaatggcaggtaatggaacgtataccagttctgataaagagcaatggacaatgggaagaagaatataataatgtcaactatgaggctagtggagaattcataccaacaaaatgcaaatatgaagagctattacaaatactgcttacttcattggggttcgaaaacatcagaacaaaactgcaaatacaataccaagctaaagaaggaataccaccgatcaaaatatttaacgatgccagcctctacttttacttgtaattgaagatcgaaaaaatagatttcaccagatatccattatgcgtcaaccaacaaaacaacaacacaacacttgctggaaccccaaatataacaaccacaacaacaccatttgaagagaatgtgacaatgcttgaaaataacacaacaatgcttgaaaacaacacaacaacaacagaatcacacacagcgggaaaccaaacagaagaaggggaggagtcagaaacaagagaatcagaggaaaaattcgacataattgactatgcgaatctggctgctgaagaaatggtagaaaaacttgaaaacacaagtaaaaaactagatccaaaaatcaacatcaacaactggaagttaataacagacaagcatcactcagaagtagaaaaaggacaggcatacaaggacaaggaaactctgaagaatgttctcaactactacgcattcaaaaacaactttcagtacaaagtgtggaagtc

SEQ ID NO: 320560 - DNA, 1289 bp, Cannabis indica
catagcaatttattgtcatattttttaaagatagagatgtgtacatctcaaaattcaaatacatacctagctaacttatcactacaaattttagttttagtcacaacaaaacttgtgactaaaaataaaataattgtgactaattataaattatattaatcatacaaatttaaatttattcagccaaaattaaaaaattaaaaaaaaaatagtgtacatattggcacactatgagggtgactggtatctttacattcggataatgtgggactccatgcaaaaaggtacaataacgtgttgtgaaggactctaaaaagatttagtgacccaacagtgtcacaaaatacaatctttccactcacgtagtgacgcgcggtggagggtcactaaagactattagaatccctcaacatatataggtcactaaagcttatttttatatagtggtggattgtaatagattgaaatctaactttgaaagttgtagcaatactttattatctgaggcttctttttcatatattgaaatgaaatgccttgcttaaagcctgtctagagtttttcttaggggtaggggtgcaaaatgggtttcaacacagcacacgaacacgaatatatgacacaaattttacggccgggatatgtaatatttcaaaaatctaattttaattgattatgaccagattactcctaggttagagtagttttctaagtgttaagttatgaatgaaatggtcttttttctttgaagttaattcttttgttttattaatgagttaggggctggtggaaattaatagattaattagtttaagtttcattagataaacttcagttaataataaaaaaaggaaaataaagaaaatctatccttacttcctctctctctcttttgcttgggtaacaaaggaaccaagaaatccaactctaacttaaatagtttagaccctttttcatcaatttcttaaggttttgagttagctctacaaaaagttactacttttggtgataactgtttagtcataacataatttttttgtgactaaatgtgacttttagtcacaacaaaatgttacttatgactaaaacatagtttttagatacaagttgtcactaatttagttttagtcacaacaagtattgtaaactacatttactcacaacaaattgtaatttttgtgactaatacttttagccaaggaccttttagtcataatataggaatgatgatttataattagtaacaactttttctcttttagtcacaagttttgttgtgcctaaaagta

SEQ ID NO: 320561 - DNA, 1316 bp, Cannabis indica
tataataaactaatattaaatttttaattttttaacagtttgggggtaagaagcaatacgatccaaaaacagaattgttaccactacagcgaaagtggatcgaacaattgatggcggtgattcacggtgacgattgaggttgaaaggtccaagaatttttcttcattatgtaatttttatagattaacttgtagttagatttattaacttattaatatttttaactaattttacattagtgtttgtgtaatatttaattacttttatgaaattaaattatgtattttacccaaatttaaataatagttaatttacattgtaaaaaataaatatgtaatttaaattaaataaaataatatataaattaataaatatataattaaaattatataattaaatttaaaaaaaaaattgaaaaaactgaaattcgtgtacctatggcgtcggttgctacgctacatatggcgtcagttattagctaggaaccgaagccataggggtacctacggcgtcggttcctagctaataaccgacgccataagggtacatatggcgtcggttcatataaaccctttagcgtcgtcctgatcagcgtcggtagcgaatttcgcgaaaaccgacgctgaaagggcttaaaaaccgcttctaaagggggtttttgtagtagtgtgccactaaaaaaaattattgagtttatgctacttacaaactcaaaactttggcctttggatacttatgccgctatttatgatgtggtattgttttaaatgacttgtcttgtcatctgttattcaatatgtcagaaaacgataaggtacttacgaaacttttgaaaatataaccgaaagtatttttaccactaaaattttaatttaaatattaaactgcaactgatagataaacttatggggtaaattggtcattatcaaatagaaagtttcaatttaatgtgaaaatgtactaggattgaaaagttattatattaattttgtgggacaaggagtggaattgataaaactttatcaggtttctttctttcttttaatgcaaaattagtcagaacgactttgaagtcattgggaagttgccaggaacttaattggaggaattatccgtcttagacctgtcagaattcaaatatacaaatttattatataatatatggaattttcaattatatcatgcttccaacttttactgtccattacaaacgaaactgccccgaataggcccttatatatatactagcaaaaattacgtgcgaggcacgtatactaaattttatgctagtttttttctatgttatttgaaaatga

SEQ ID NO: 320562 - DNA, 4399 bp, Cannabis indica
ggtctgggatcgagtcccgtgttcaggttgggttcgtgttcgagtctcagtcctagtgtggatccgggatcggactaggtccgagctcaagtttcagggcttggttatggtaaagtttgggttcgagtcctgagttccgatctaggtctgggtttcgaggcaaaggtctaggttccccatgaaggtccgagtcctagatcccagtctaggtacatgttcaggtttggttcctagtccaagtttcaattttgattcggtgtctgggttcgggtttgggtctgagtcctggtttgagtctcggttcgggtttgggtctaggtccaaatctcggtctgggtctgggttcgggtccaggtccgagtttgggtcccaggtgcgggtccatgtttgggcatgggtcagggtctctgtcaggatctaggtcctgagtttcgatcccgatctgggtccagatcagggttcaagtccaagttgtatccgaatccctatgtaggtccgagtctaggtccgggatcgggtccctgctctaggtccaggtccgtgtttgggtctggatcttggtcccagtctgggtacacgaccgtgtcttggcccgagttccagtctcgatttgggtcttgggctaggttcgagctcagttataggtctgggtttgggtcctggtcacagtcctagtcttgttcgagggtcctggtctgtcggttcttgtttagcttcaagtttcgggttctaggtttaggtcacggtccgagtttgggtcctggtctgagtctccgatctggatccctatcatgtgtcccagtctggttctggttcaggtcctgggtcccaggtctgagttttgtttaggggccttgattggggtgcagttctaggtcctggccccagttctgtgtcctgagtctggttccatgtttgggtctgagctgggatctcgagtctaggtttgggttgggatcctggttggggtctatgtctgggtttgagtctgggtcctggtctgtttacggttctgggtctaggtccaggtccggctacggtgccttgtctaagtccaagtcctggttccggtcccgttctcgggtcctagtctacttccagtttcggttccaattttgggtcacaagttacgagttcaggtcaaagtttgggtctgggactaggttcggatccgagtctgggttcgggtcctggtctgggtttgggtacggggctaggtcccagatccagacattgagtatgggttaggtccaagccccgggtccagatctggatctcgatctcgggtcccagcgtggttgcattttgggtgctgggtcaggagctgggtactaggttcaagttcatgtcaaatttgggtcttaggtcccggtcctagtaacgttgcacaggtccctatcctgattttaggtataggtcctgggtctggtctgggtttcggtcgcagtttgtgttttggttctcgatctgagttcacatttattttcgattctaagtcatgggttccgatcccagtttatgttccgacttcgagttcgggtgcaggtctaggtttgggtctgattctgggcctgggtctgagttcggttccccggtttgggttcgattttgggttcgggtccgagtttaggttttgtcctggtgtgggtgcgtgtctaggttcctgtcttggtttgggtccagggaaggtttcgggtctggttctgggtcaaaactttggattcctgggtccaggtcaggtcctagttcgggttctagtcctagattcagatctgggtctgggtttcggggtctaggtcccatatccatgtcccgttcctaggtcttggtcggggtccaggttcgggtttgggtcttgagtctatgttttagtccatgtcccagtctggatttgggtccaagtctcgatcgcagtcttggttcgggttcaggtgcaggtcctcatcagggtctggatcctggtctgggtcgcgggtctcaggtctcagtgagggtttaggaccaagtcaggtaccagtcccggtttatgtttgggtccaaggtctcaggtcccagtcctagtcaaggtctcagtccaggttctggtctgagttagggttatggtttgggttcggttctggtcttaggttcgagtcctagtcatagttccagtgctaattttgggtctgagtttggttgtgggttcggatctgggtctaggttggggtcgaggtctgattcatagttcgagtccgggtgccagttttttggatcccagtctgggtccaagttagtgttcgggtccaagttcgggtcttgggtctgggtcctaggttcatatcagggtctgcgtctgggtctgggtccaggtcccgtgttttgatcccagtctgggtctgggtcggtcttcgggtccgggtctaggttcatgtccatgtcaaggtctaaatccaagtttaggtcatgggattggtctgggtgcgggatcaagtcccgagttcaggttttggttcacgatcgagtttctgtcctactctcggtctggaaccgggtccaggaatgggtttgagccttagttccggggttgggttctggtctagtttcggttcctggtctaggtccaggtcatgctcccggtctcgatccttttctattgtcctggtcacattctggttcaagtttcggtttggggttcagtgcttaaggtttaggggtaagtataaagagttagaatttagggtttaaggtttagggttcgagtcacagggtacgatttaaggttcgggtgtgggtctgggtccgagtcctggtctgtgtctaggtccgtgtttgtgttcaggtccgagtcatgttcacaaatccaaacaccaaccacatgtcgagtcttgttcgagttctggtacaagttcggtttctggttcaggtctaggtctgggtctaggtccaattcaatgatttagacactgactatgggtcgggtccaagccttgggtcttgggtcccagatccaaatcaagatcctggtccatttttagctcatgtcttgggtcttggttcagtctaaggtccaggttttggtctaagtttgggtcttgggtccgaggtcttaattcaggtcagggccctaggtcccggtctaggttagggtcccagtctgagtgtaggtttcggtctgtgttcggtagtgatgcttgtctcgagtattggccttgtttgggtctgtgtctcggttcgtttcttaggtctcggtcctaggtctcactcccagtcccgggtcttggtctctgtcccagtccgagttctcgtcccaatccaggttcaggtctcggtcccagtccgggtctaggtcccaatcctaatctcggtccgggttcgagtcctgtgtttgagtccgagttctagtacgagtccaggtctaggtctgggtctgggcccgggttttagtctgtgtccggttcgaggtcttggtcagggtttgggtttgggtttgggttcttgtacgggtctcggttctggtccaggtcctgggtaatgagtcctgggttcctggttcttggtcgtaggtcctggtaaaattctgagtctgggtacgggtctcggttctggtccaggtcctgggtaatgagtccttgtttggtttcgcgtttagatcttgttttgggacaggtccaattcctgttccagggtcttgattccggttcttgttcttattttgggtctcgggtccaagtttgggttttggtcctgatctagaaattgttccaagttcaagtcttggtaaaattccaagatctagacaccgactactggttgggtccaaggcccgggtcgtgggtcaagatctagatgccaatctggggtctcgatctcatttcaattcggatcttgggccatagtccgtgttccttccgggttcgggtctgggacagagactgggtcgggtcgtgggtctagtaccagtattaggtctcaattctacttctaattttgactttgggtcctcaatctaggtcagggtcctgggtccaggtttaggtccttgtcctgctcctagtcctagttctgttatagttccatttgcgattctgagttcgagtttgggtttgagttcgggtcagagttcgagtcctagtctgagtttgggttcgggtccaaatttcagtctaggtccagatcaggctacgggtatgggttcgcgcccaaggtcttggtctaggttgggtccgagtcccaagttccaatccttatctaagtctggattcagttcggggtctaagtcctttgttctgatcctggtctaggttcgagttttgttccgggtcagagtctagctttgggtctcattctaggagtggttgtttgagttcgagtctgagtctgtgcctgggtttgtgaccaggtctggaccccgatctgggtc

SEQ ID NO: 320563 - DNA, 1095 bp, Cannabis indica
aattgcatatattaatttacatttaaaaaatctgggtgacttaaacatttatgatgtttatttttttaaaatacaatttactaaaatagtagcttactggatgacaactcatgattttcgaaaataaacttaaaagttactcaaatgtattaatataacctaaataattaattaattattagagtgtatatatataaattttagatgtaactaaaatgtatctaaaattatataatattaaagtgatactttttatgaaaaaagttaggtttcttatcaacattataagtaaccaaaaggttactttagaaacgcaggaaaattagaagaaaaaaaaaagaatttcgggattagttttatttcaggcataatattttgaaattaaggtatttttcaatgacgtggcaaggtattattgtaattgagatttgttaagttatttttgtaattattttatattttacgtatattttttaaaaaaatcccttttatttatgcttattgcatataattaattggctaccttttgtatgatttatgattccaatataaaatttgaaaattgaatattaattatgctataattgattagtcatagatttcaatacaaaatgaaaatatttatgacttgtgtagcattcgaattattgctcattgctgattatatgtgtattataccataatttaagttctttatgtcttaatcaaaatagagaataaattataatctactaccatacaaggtagaagaagaaaactgattgtattagtgaagtaaaaagtaaaagaaattaaaattaatttctctaattttctaaatcactactatttgtttttattaataagttgtttttttttcttctattaattgattaaattctattgtttgtaaaatagaactaaaaattcaattcaattaattagtaattagttacggttcgtgtggaatcaatctctcttgtgaatttattatttgaataattacataaggtactattttttgtaaaataattacatttttacgttcaaagaatatatttttttacatttttacggttttccaaaaaataacacgaaaacaacataaaatcaata

SEQ ID NO: 320564 - DNA, 642 bp, Cannabis indica
ctgacttagctcatgcaatgagtatggtcagcagttacgtttcagactcaggccgtgaacattgagaagcactaaagtggataatgaggtacctgaaaggtactttggacactggtattgtgttcagtaaggagaaacagttcaaggaagagatcactgattttgtggactcatattttgcaggaaacctagacacaaaattaaggagcctaataacagggtctgtgttcactgctgttgggggttgcatcaactagaaacctaacctacaaaaagtagtagccttgtcatctaagctaaatacatggctgctatagaagccatcaaaaaggctatatggcttaaggggttgcagaggagttaggtttcaaatctgaggatatcacagtttattgtgataattaaagtgctttatatctcataaaaaatccaatatttcatgataagtcaaagcacattgatatcaagttacacttcataagggatattgtgtcatccaagaaggtgaaagtgaagaaaataagcacacatgataaccctgcagatattttcgctaaaagggtaactagagacaactttaggcactgtctaaacttgttgtgcattcaggacatttaatgttcccactcatttcttttggat

SEQ ID NO: 320565 - DNA, 551 bp, Cannabis indica
tcattgaggatgttttgactaatctcgactccaataaaaatcacctgtcccaacaataacaacttgacatttgtctattttatttatttcatatcaactacacaactttggaattgttaggcaaataataataattatcactatttcgaaaatgcaaaaaagtaatttgcttttttattttaagtatccgtttgttttctttaattattttattttaagaaaatatttattagttttgtctagttaaatatttcttatattttaatcactatttaaatattttattttattttcttaattaaaattgaaaaatacctctatcatttattaattaactaaacctatctctaatttatatttaattgaaacatgcctctttttatatgtaatgtactcaaaacatcctgatataagggagtcagataaagagtatattgaaatgataaggacaaaattagtaaaagtgtttaaaaaaaaaaaataaaaataaatagaactcaaaaataaagggtaaaaataaaaaaaaaataaataataaaaaaagaatgaaa

SEQ ID NO: 320566 - DNA, 1487 bp, Cannabis indica
tttctacccggcttgggtggctaaccccgtactagtgcccaagctaaacaaaaaatggaaagtatgtataaaatttatcgatctcaacaaggcatgtcccaaggactattttccatttccaagaatttatcaactcatggatgcaacagccagacatgaaatcttgactttatggatgcttattcggggtataaccaaatcaaaatgcatccaaaaaaccaagaacacataagtttccaaacagatatgggtctatactgttataaagtaatggcgttcgatctgaagaatgctggagctacttatcagaggctagtaaacaaaatgtttaaaaatctattcaaacggaatatggaagtatatgtggatgacatgctcatcaaatttaggaaggctgggggaatacagaggatctacatgaatgcttcaaaatcctcagaatatacaacatgaaactcaatcccttaaagtgttccttcggggtcaactcgggtaagtttcttggatttattgtcaatgctcgaggaatagaagccaatccagaaaaaatacaacccttttggataggaagtcaccaacaaaaagaaaggaagtttagagcttaactagttggatagccacactcactagattcgtttcaaaatcagcggacaagtgtatttccttcttcaacatcctttgaggtaataaaaagttttaatggacagaggaatgcgagaatgctttccaagaattaacaagacaactcgcaaagcctcctgtactctcaaaacccctagcggagaagaattgggaatatatttggctatcaccaaatacgatgtaagtttcgtgctaataagagaagaaaataatgtccaacatctggtttactatatcagcaaacaacttgttgaagccgaaggatggtaccctctaatcaaaaaactcacttactgcctaatcttagccacaatgaagtttaggccctatttccaagctcatcctattcgggtatataccaaccaacctttacgctaagtgttgcaaaagcgagatgcctctagatagttactcaagtgggcgatagagttgggacagtacaaaataatcttccaaccccataaagtagttgaagcacaggccttagcagacttcgtgggggagtgtatacgaaaagaagagagcaatacaaggatacccaaagctagtacaaggctctctactagaaaagaacaaagacaaacctacctagaaattacatgtgaacgaatcagctactgaccagctttctagtgtaggaatttccctcatcacatctgggggcaacacctgcacggagcaataaaatttgggttcaaggcctctaacaatgaagcagaatatgaaggactcatagttgggctaaaacttgctcgataggtacacgccgaatacattgaggtctgtagtgatttacaattggtagtaaatcaagtctcaggagagtacatggcccgtggagaaaa

SEQ ID NO: 320567 - DNA, 1452 bp, Cannabis indica
aaatttcttatattgattactaatcagattgtaaagagttttatttagggcatagaacccaacactttcttgattgatgtgattattcatgatggagtcgtcaattatatccttgattatcgcataattgctaaagatgggtttatggcatctgacacctcctcttatgcgcgttcctagatgctcccttcatgctgcattaaatgctacataaaaattcatcttcgataccacaaatccagaggagttaaattccatccaatgctcggagaggaagttcagcaggacttcccatgaccgggacctagctctcggaataattactgacttctccaagggggttgtcctaagtaattgttcttctttactcatttctgggtaggaaagtctaatctgccacgttgataactctatggtgtagagttattttttatgcttttaaactgaaattattgtgagaagagtagtgaaaatgtgtttgtttgcttaattttaattagttttagtttcattttctatttagtaagctaacttttaagtcttgtaaaaattattatcttaattgtgttttttaattaaatgttgcttgtttgttatgggaaagaaaaattaagttgctagaaaaacggaaatgatgcaaagaaaatgttgaagcaatgctatagcattctgggcagtttcggcagtgacgtggaaaaagtccaaaaaatgaattttagctgtccacattagcatcagcgtgtttgtcactaaaaattaagctagttggatgatgtagagaggaggactaaacctagtgggccaaagtgcaaaaggattgggcttctatttttagggtgtcattttgtacccaatttactcaatagctaaaagagactaagtactgcaccttcttctacacatgagggcaactgtcattttgaagggaattaattgcacaaagtccagagatgaaaaaaaaagaagggggacccaagtccaagagaagagaaggacaaaagctctctttgtttgcatttctcttcccttttcttttatattttgttctttcctttcttgtctttaaataccaaaaacttgataatttgtaaaaagggcagcagccatggaagacaaacttttagcttggattttattttttgatttgaacatcagctaaactttttgaggcttgaatggctatgaactcctatgttgggtatgataaattttgaagcatattttagcatcttgcctttgttcattcaagtgagcttgtcattttatttgattgttatttcttggccatgagtaacaatttgttaagctagatcttgttccgaaagggctagatttagtagttaaacttgaatggaacaagaggaattctagatttaggtttttctttgtaagtggaattaggaatatttcatttaccttgcgtaacttaagaattgatgcttaattagtgtt

SEQ ID NO: 320568 - DNA, 1041 bp, Cannabis indica
ttttttgttttttttaaattttatacacgtgtgaaatagatgatttaaacattgatttctatattgtaaattatttagaatttctcaaaattttacagatcatgtcttaaataactataacgtacacgactactgaaaaaatttagactaaaaaaattcttatagatattgaaacaattagaggttgtatcactacacctattttaatagagtgtattgtagaagcccttgtagtttttatgtttatattaattaattgttattcatcggtccatttacgcacaaaccactttaaacacgtgaacctattttacacttttcaaattcgctcggtaaaacccgaacccaaaatcttataacgggtgtgttcgatatgtgatttactacacccgatacccaaaaacctgaacacaatcgaacaaacccgcctaatgtgcaactctaaaggacaacctccatttatcatattcatattcattaaatatttataaaggtatcatattagtattggtgcattccaatattaaatattcatatattgatttaataaataaatttttttaatataaatgaggcttgataattaatgcttgaaattaatatgtaataaattatatctagattataatgaaaactaaattgagttaagaacttttatgtggttttgtaatcactacaagaaaaggtacttttgccagcacttaagctcgccggcaaaagtacgtgtaactcgtcggcaaagttttgccggcgccatttgtcgtcggcaaaagctgtcagcaatggctcgtcggcgtatgatcttttgttggcgacatggtgacttgcgccagcaaaagtacttacaccggcacatttgtttaccgatatatgggactcaccggcaatacgtccgccggctgatgtgtccctgacgacgttttaccggcgaggatttggaatttggcgtcttatttttgccagcgagtgtagtcgccggcaaaactaaaattaaaaaaattaaaaatttacctatgctggcgacatatgcgccggcaaaag

SEQ ID NO: 320569 - DNA, 1097 bp, Cannabis indica
tagtttttttagggtttaagtttttggtttaataataaatttttttaattttttaagtatataaaatcaaatttccctattgttattgggtaccaatagtacttaatatctctaaacatgtcgttttgtaattagttagcgatactctttaaaaattattacgttaaatgatacttaattagaccatagccatattaatacataagaaagtattagacgtcactgataccttttataatttctcttgatctcaaagagtctattgaaacaaatagtactagtttttcgatttttaaatgattaataataattattatttttttatatcatttattaaattaaaatatataaaatttatattaaaataaatatattatattttgtggtgcttaaaatacctcttaatatttttctctcaattgatttgcgcactttccaaagcttttatttttaaaacttaatattaaatgacaatataccataattatgggactcgatacttagttggatcaataacgatactccctaaaagttactattttaaattatatgggactcgatacttagttggaccaataacgatattgacatataagagagtgctaggcaccactggtgccctttagcatttctcccataaattatatgaaatcaatttgattaatacattacatgtacatgcatcatgcatcattaatatatggttttttcaagacgatgattacatgtctttataatattattggcattagaaatatttcataaatttaattagagtaaataccatttcgtaataatttgtgtttttgtaaaatactactacaaaagtagtttttctcttcatttttaaacagtcgtttaaagtattcccgtcagtttctataaccgtcgcatatacgaccgtcgttaaatggccaaactaggcgacggtttaaaaccgtcgctaatgtggacttgtcgacggtttaaaaccattgcctataacagggtataggcgacggttttaaactatgccctatacaataggcgacgattttggcagaaaaatctgtattttctcccatttttttcctgcattagctttataattttaccta

SEQ ID NO: 320570 - DNA, 1589 bp, Cannabis indica
caaactcccaaaaacccttgaattctttatctaagaccttataagttccaaaacacttatccttgtgaattgaaaatttcctctgaaattgcttggccttttcacaacccaataagacttctcttgagttgtatgcaacttgaaatcatggataggatgatgagaagtagaaggaatatgatccccatgtagctcaattcattagagcgaagttaactatgcctaattctaaaaacttagacaaggggtgtggtgggaaggtagtggcaaatgagcttcttaaagctaccattgaaaatgatgatccaagagattgggcattcaggctaggacctcttgtgtttagcactcttacagaacgtcaagctcaattaatctgggatgattacactcttcctaaaactgccaactagaagccatgatatggtggtcccaatggctcctagaacacttgcagtactgcttggttgagatggacatgaatgtgggtgcttacttgcccttgaatccatggttcatataaatagaagaattctttagagtctgtccctaccaaataaattataatggctttagaatcattgctacctttttcatcttttactgcttgagaagttggcctgtcctaactccccacaaaataaacttcctttgtgacttgaaaagaaatcctactagaaaagaagaatgcttctataactttacaagttcagcccatacatagtaaacattaccaaaagtaactgcaccttttaccaccaggaatacttctatactcgaatacatccatcaagacacataactttcgaaaagaatggtcctttcaaaagacttgctccactaattgacgtgaagaggagagatgatgccatgcttattgagattgatgtatgggagaaagatggaagaactctattcaatactgagaatctttaaaagattggactggtaatgtcctgccagcgagtgtatgttggtactatcttccctaatgaatcctggactatgccactcaagcaatgtgatgagaatgctcaaagtgcaactgccatcttatctcaaaaagtgtcgaaagacctgatctcagttcaaaatgacacaaagtatttagggagaatatctttgctcttagaccaggaagatggagaagttacctccactcgaattgctccatagaaggattgggaatcagttgctagctgatgctccatgctgtaaagtttaactttgctattttgcttctcttatgttgtactaaccacttgtatatttactttgtagacaatatgagcttcttggctggtatgtcatcttcttctaactcgaagcaaaaagttccagcactgaaggaatctgaacctccagttagggaagttgttcaaggtatacctactgcttgtgttgctttaaagaagaaagtaagaaagaggagtatacctattgatgtttctcctcttgcctaagactctagttgttatacccaaaatttagctggcattccagaggatgacacgtgtcaaccttggagaataagaatcaacaaatatcacggtaattaaattaaaagatattaaatggaataactcatt

SEQ ID NO: 320571 - DNA, 1213 bp, Cannabis indica
aacttattaattcctctttgcaccactatagatttggaattgcactctcaattatatagaacactctatatgttccatgatatagatacgctatgagattattcatttgttattatcccaataatcaatgatcctctatcgatgatttacattgaatagagattaatttaccgttacaccattcaatgtattttatctttaaaacacttagctacctataaaggatattccagtgatcttattgacagttccaataccgggagcattcggtggccttcgagaaaaagtggtagagctggttctggtgcctcctctttgcacgtgaggtgtaggagtagttctagtcccaggtttagtaactggtgtgcccccaattgtttggctatatgtggggattcctctgtcaacactagaagaacgtgttgcagccatcttgaaagtaactttcttaagccgtggctcttaatgaaagtaccaaaatattgactaaaaaatctagacagagttcactctctacatcgcgacactaatagagctacgtctacttaagtttttattttttacgagatgatattatagtaaaatagataagtgtttaagctctaatttttagagagagaaactagagagagatgccctccccttatgggtacttttctgaatatgaaaaatgagctagaggagctctgtttttattagtgaaggaggccattgaaaataggaataaaataataaaaaattaaagttgtcttattgtgaccatagatgatgatttaaaagtaaaaattaacttatgagcttgttcatcaatttttggagtcccaatcacgataacgggacccacttttggcaagttgtagattatttttgtaactcccttatgggtaaaatttggattcgataacttcagaattgcatttgaaggttagtaatgtgggaaatttggcaggatgaatttaccaacgaaatgtaaaagtaaaacgaaatgtctataagcctatgctcttagtgtttataatatacaaggggtgtaggcccgagagttgttgatgatatcgttcttacctaatacttttgggaacatgtattgtttagtgggggtggcaaaatgtgtcatcgtgtcttgttcgtgtcatattttattgacccgcttttatatttcgtgtcaagcgtgtcgacccgtttttttgactcgtgtctaattatcttaacc

SEQ ID NO: 320572 - DNA, 1248 bp, Cannabis indica
tctaattttggcgcccgtgatctctatattctctattttatgtgtatattttatttagtgtatattatttaattcatgatttttttatttgtattatttttcatagaattgtaatcttgttggtttggtatttttattagagtacaacaatttctaacaaaacatcctcaagaaacttcatggagaaaacttgttaatgagctgtggcaaaatgataatggctcgggcagtagcggacccaggatttaaagtaaggggtgtaagttttttgtaagatagggggaaaagtaaacttaaaaagaaaaaaaaaataactctttgtgagatttgaaccttgacctttattatatatgcaatctaacttaacaattacactgcaactaatattatgtttataaatattatattttattagaaatatatattgtaattaattaaaatatatgtatatatattttttctctttttttagaaagggcgactgactccctagcttctatgaatgtgggttcgcgtctgcctccgactgcagggcaagttgaattaagagaatgatcaaactatgcatacattacgtagatatgaacacgaccagggacggatctattaatattaaaaatattatcttttaaaaaattaaatgtaaattttttattttactaattataaactaaaatagtaaaaaaatcactacaaaattaaataaatttaataaaagggaactccacaaaacaaagtaaaaattctaagtctcctactagacaccacactttaagcctcttaaaaaagtaagtaataacgaggtggaacgttgattgatgaaattgcatgaatagttgtgaattcttctagtcttagtcaagttttatactttattcggataatgtggactaaaggcattctgttaatttctagcctttccaggtgcaagttctgactattttcatgtactcagtaaaacattataaaaaacaatcttgattcttgaacagtcttatgcttattttattctacaatactcgatagtccttgttacttcagccttaagtaccatatttaactctagctgatttttttataatgccttgacataagtatcattgatctatcaatataatatatagggatataattttgtccgtgatgtacttttaatgtattctgtgatacattaaatgggtctcagggtacattaaatgagtgtcagggtacgtttctactttttaaccctaattacccatagatcaa

SEQ ID NO: 320573 - DNA, 1687 bp, Cannabis indica
agatcctggtaaaataaattccaacagtatgacccttcattggtaccttcaactggcggaaggactcatgggcgacagcccccaggaacaaaaactgtatcttgtctccgggattaggctggagagacagaataaggagttggcgagcttgcggttgacgagccccatgtcgacttgggagtagatcttgagttaaccagacttagagaagctgtaggccaacctggcctaattgaaaaatcatgtgctgctaattgcaatgtattcactcagtagagatgcaaattcctaacgcgggtggatgaccaagaatacatccttctatttcaccaagtagagttggatcaccgcaatagagaggccaacgatctaataaggtaattcaatcaaagaactaatggaataggccaagatctcatcagagatccactttaagaaagactcattgatagatcagagagggtctatcgataagctgaccaacatggctccttagggactaggatagatcttctcttgccaaagggaggacacaccttgcttcaaaggtctaatggtgagaacagccgaatcccaacaaccagtagcgtagggggttggctagggatctcttgtttagtaatagccctcatcattcagcctttggctggctagccttctacaggagttcccctggctaaccagaggggagcactcccttctcgaggggaatgaagcacctagaggtcaatctttaaccggaaaggactaggatcgggtagaaacacccaaaacatcgattcaagaagtgaaactgatcacttcagacacctagatccaccaaactctagaaattggtgtgatctaccttctatcaatacacaaccgacatcagtaaattgaggagtcgtgggtggccaaatcctgccctttgccgttctggctgaccatcgaggcattacgggtggccagacccttctctatgtaggcttggccaaccataaaggagtcacgggcagctggaccctgccctttgcaggtccagccggccatgaaggagttacgggtgaccagaccttgctcaatgcagatatggccggccatggatagtagttaagtgtaggcctggccggccaaagccaacacccatacctgagagtggccacccatggtctgcaattcaacagagtctggtcgacctcttccatacactttcttaaattgtggctggccagaccctatcgcactagaatctgcaaaccctccaaggagggccagtcagtcaagtcccaacaataacagatccttcttggaccaactcttcgacatgattcaaggcatagctggtccgaagccttcagatcttgaactacaccagtcaaggggatcaccattctttgcatacatgaatgcctccaccattctttgcatacaccagtcaagattccaatgtggatgatgtatatcatgttagtgttattattttgtgacagtgtatgttctgttaaatgtctagtcgtatctggatttttagactgttatatctgcactaacgtttgtttacgagagtctctttgaagtgttagttagtgccagctggacttatcgttgtggtcatatatataatcagtttctgttagtaaagtggttatcgattattcattcagacagttatttcggttgtttttagagagatagtcgtatcttg

SEQ ID NO: 320574 - DNA, 533 bp, Cannabis indica
aatgtttcacatggaagattccagaagcaatggagaaaatagatttgaggagtaaagacaatggaattatgtttaaggctatccctttgtttgctcatgcaaaacctcgtttcatttcttctatctatgtatgagtcatatttatcatcatgatatatgtatatataataaacaatgctcatggcttgcatgttggacatgctagatcatagagcagtagtacttaacttactgatattgtctccttaatttggttattgttgtttgtggttgttttataaatatattactaataaaagggttttgaggaccattatcaacgatcatattttgtattatcgtcgattcttatttgatgtgatcaatacatgatcactcacctcgcaaacaacacaaaacaaagaaaatgatcaagaacagaacaaaacaattgaaaatcgagtagtgcaactatgaactaatgcctataaaccagtaataaccagtggcaagaaccagaatttaaactaagataaataagcaattaagagcaa

SEQ ID NO: 320575 - DNA, 1053 bp, Cannabis indica
aattattttattatatattggtatcacttaaaaaaaaaacctaattgctttcataatgataatttttaaattttctaaataattttaaatctttgtcaaaactattctcctccaaatattcttacacatcatattctattgaataatatgaaaataaaaatattaaaattttttcccaatgacactcgtaaaaattttttcttgaatttttttattgcaaatattctctcgaactatacaaattgttacaaattctcccactcatatgttacatgtatagttgagaatgatggtctacttaacaattttaaacacccgaaatccagtgtattaacattaaacatacaaacattagcactaataagtaataatgcatatatgtatattttatcttaaattttgtctacctgacatgacatgtccatgtaagccacacgtagaatacaactttgtcattagtaggacaaagtctccttacaaggcatggcagaaccgtcagcaacaaatgagagtcaagcaagtcgttaagaagctgcacactcatgtttggccagctaaaggaagtgcataagctggctacgatgagcttgtatggctggccaggatttgagcacaagctgaccgaccaaaggtgactttcaaactaaggaggggtccgatcgaccaagaaaacctgaccccagtaagaaaaagttgtgcataggctggccaccacctacgaaggttggccaacacttgccaaagttgacaggaacatggtcaactagaccctggcatgagcatggccgaccagaccccaacctgcatgcattgtatggccagttagcctgcacctggtaggcttttggtgtgtagccttcatctgtggacagcaagctaaactgtgagttgggccttgacagctcacgaaaataccatgaaaatatcagcaactttcctattttaagggataatttaataatttaaaccttattaattaattatgtaaatataactttatttacttattttttaagggtatattagggatgtaatctctactatataaagagc

SEQ ID NO: 320576 - DNA, 1744 bp, Cannabis indica
ctccttcctgctgtagctcattctaaaaaggagtttcggttcgtatcctggcatggaatagtgctaactgttgtccgtcatcaactttttaggtttttgaggcctcttctttgaacttttttatgaagttctttagggttttcgttggtagttgcttgatgttagtcaaggcgcttaccttgaggttaattttcttagctgccacgaactgtcgtcgaaagctgacttgtaacttgttccaacaatctacggatcttggttctaattttttgaaccattcctcggcggatccacccaatgttaacgggaaacacaaacacttcgcatcattactgaccctcatgactaccattactcgattgaatcgagacaagtggtcgctagggtccctatctcatgcgtatattgccatttcaggcattttgaaatttttagggagttatgcctctaggatgtttttggcccagggctcccggtcttcataatacaactccgaatcatcccctttttgccttcgtgagaccttggcaatatctttttggaggattgctagttcagccagaatcccttcattcaaggttccctccgacactggtattgcttgtttctttttctccaagtgattcctgaggtcaccgtgtttattattgagcttttgtcttaagttggcagggggatgcttgcgactttttctacctttttccccaagttcttggtgtacgaatacactttttcggtcctcccagtcctgagggccagtgctctctctgaggagcctgtctctctgcgggcctctccctttcaggaaatcggagcagactttttgcaaatcctgagcctttttgttctttttagggaaagacgtgggatttttctttaggcatccctttgagggatatcagatagggtttggtcccctattcttgtgcttttgggtactcggcgaagactcttcctgtgtttcacctggtcttggaggcatagccttcgaatgcatgtggattctggccatctccatagctttttgcatggcggccattatcttgcatcctcctattttgctctttttgagctgctagtttggcctcgtgatcgactaccttttgccttagagcaagtaattcagtgtaactgccatcatcatatgcatcgtattcttggttttcttcgtattcttcgtcatttgtttcatcttgttcttctgcatctacgtttactcgtgaaactgcctcttcgtcccctggattctaaggatcttaggggggacgaggttgacgtgtgtggtttctagtctccaccattgtaccttggatcttctcgtatcgttgttttgtgagtaaagctttccacaactctcaatgaaagcactaaaatgttgactgagatttttggcaactaaatcattaatgtaagaaggatatcttaagaggagtaaatgcaaatatttttacatggttggggcattaatgaaccttagtccacgaatctctgttattaataggtgggtatttcttatagagaatgttctactacccccctttttttttccgatccccttattaattttgttgagaatatttatagcagtgttcaaaagaagaaaatgtctcaattgtctcaagtgcttgccttgcttaagcacaagttcccaaatctacaaaatagggcgtgcataacctacgtggtaggttgcgcagggtttaggtgtgattagccttcatccttcctgttgggttttgtgccc

SEQ ID NO: 320577 - DNA, 1746 bp, Cannabis indica
aaaattcttgaatgtcactacagcccctgactcccgtataccaaagtgtatgggacatatatggctctcgtgtaacatgatttctgtgaatgctcatgtaacgtgcatacttctcgtatactatgtcttatttgcacccgagtgatcaaagaaataccttcattgttcactttccataccaaatcatgtttggcttgcttgatcatgggtcttagggagtttttacacgtgtgagaactcatctacttatatggagatttttgggttggtagtgtttaactcactaaagaaataacagtagttaccttaagacaaattctacaagctttgttcagcgcttgagagcatcgtcaggtctatgacctacaattggttaaaaataatgaagtaccaacaagcttcagtcaacgctcttattcattagatatttaattaaatcaccactgtgagctaagttggaagaaaaagtaatggttgaagacttttatttttcaccaaagcttggctaaagtgatccccactgcactactgcccttttcgaaaaatagtgtaacgtcgatacctttttagttcaagaggcgattgattcacttgcaaaaggtaaagtgaatctcactatgaagtaaactgtttagggaacattttctttattattatctaagatgctccccattccaataccttggtgctgacactagattctagtggtagtcatagcaaattccaacatatttgtcccaggttcaaatgcttctgtgacaatgtgaggttcctccctctctcatcaggattcttcaatgttgctttcttggtcacgatatttggaagactcataagacacatcttcactgctgctcccctgttcttgataattgtttgaaatagaggaagaatctttatcactgccccatctcttgagtcatgttgggaagtaaggggagattcttcatcattgatttctttctcgagatcttcttgagaaatagcaagggactcatcatcactatctccctgctcgagttcatcttgggaaatagaagatgagtctgtatcagaggacacattagttattgatctttcatcaccttcctggtcaatgtctattcaagactcaggaaatattgataagtagtttaactagtttctccttaataagcaactcctataaccttcttgacaacttcttcgagcttgatgaaacggtcaactctatctagaaaaaattgaatgatgggtattggtttaagcttcaagtctttctagaattgacacattactattagtctagatgtcattgccatgaccttagcatcttcacttagtgtctttgtctgcatggtggcctcacaaaatcattgaaggtaatctttttgaggtttctcttcttgtttcttgataaagatcaaatcgttaggctcgattggtttgtgccgtgatggagagaattgttcatagaatgctttcttgaacatcttccaagaatcaatagatcccagggataacttgagataccactactgtgctgtttctaatagcgtggctagaaagactcaacaacgagaatcatctcagatatcttgcaagtcagtttgtacttcaaagttgtgtatgtgaaagagagggtcttctttgctagtgtatgtatgttgttggattttatgccctaaataaaactccattttgatgtaatctttatcttttaaatatcaataaagaaatagagtattttcatcacttatttgtgtg

SEQ ID NO: 320578 - DNA, 1207 bp, Cannabis indica
cgatatgaaacacttgcaaatatgataaaatctattgtatcgttatcagtttgtaataaataaattattagaaaagacttgttgcattctcaaactcaaaaaatcgttgaatagtatattgggatctaagattgaaagtagaaaagaaaaaatatcttaccttgtttcttggtcgatctcgcatcggatggtgaagacactgccacaacgtcacaactacttaatgaagcaaatgaccagtaagtaacaaaagaaagtggaagcagagttccatggtttgatccatctcgtgacggtgatctcactgtaaaaattgtcgatcatgcacaatagtagattgtgaaaagtgcagaccttaatttaaaaaatttgtcaactcactcaatttgaaaattttgtcaaaatagccttttgacaaattaaaatttataaaataacatttatttttttctttttttattacttttattttgtacaggtggcacccaattaatctaaaaaattagattattattaaatatgtgaggtttaaaacctcatgaaacaaaaaaataaataaatcaataaataaaaaccctaactatagagaagaatggttttcttcttctttttctcctctgctttcttcttcctactggtaagaccaaaaagaccagccaatttacctttcttcatggatggttacaagtgcacgattcttcttcttctcctcctcctcctctttcttcttcttgttggcaagaccaaaagactagtcattcttcatgaattgtcgcaagtggttgcagccaaaaaataaaaatttggcaatcattccagcagagataaactctaaataatttacttgtattttctcatgtttttttttttttttaatcttattcacttgtagtcattaatatttttcttctcttaatctcttatttgtaacaattaatcttttagaattataatggaatcaataagtgatacatcaaccacaatacccacaccacccaataaacatgaataaataacatatgtattttattatagtcttttggattatagttttgatttttgtaattttgtggttaaaaagaccttggatttgctatgaatgaccataaacgatcttgaatttacactacgcgaccattatcgtcttttatgttcttcaacaaacttcaaagaacttaaattttctctgaacgaccataaacgacct

SEQ ID NO: 320579 - DNA, 1768 bp, Cannabis indica
tcatgaggatgccctccacataccaaggccacacaatgaccctctggcgataacattccaaatttctaataggagggtaaggagaatattggtcgataacaagaatagcgtgaacctattgtacaaaataaccctagaagaaaaggggttaagtgtgagaaacttacaattatacagtactaatttggttgggttcacaagtgacagcatagcgagcaccaaaaacatctcccattgacactgggggaggcaccacagacagccacccaaatgatggagtttgtgatagtatacgttgggggcaattatatctttcaagcatgtaaccctaatgttctaactactaccaggaatgggatagttaaaggagatagccatgagggtacgatcccaaccaagagctcagatgttatttgtgtctgaagttaatgaagtggaagtggaagagataaggtgatgaccgggttgacttgggacctatcgaggagcttgaggaggttgttctcaacccctaggaatgaaccaaaacagtaaagagcttttaaataaagatattaagaaggcccttatccagttcctctgtgataatcaagaagtgttcgcatgggtgcactttgacatggtggtataagtcctaatgtaatgactcacgtactaaacttaaacaaggacatactcgccaagtgaaaaaagaggatgttacttgatgaattcagatctgtagccttgaaagaggaagtgagcaagatcttggccagtaatttcatccaagaaaccttctatcccacatgggtagcaaaacccgtattgagttctgaaaccaaacagaatgtgacatacatgtattgacttcaccaatttaaacaaggcatatcctaaagattcttcccacttcctcgcattgaaaaactagtagatgctactgctagccatgaactcgtgacttttatgtatgcgtactctaaatataaccaaatacccatgaatgtggcggaccaagattacacgagcttcactactgacatgtgactctattgttacaacgtgatgccctttgggttgaagaatactagtgctacatactggcgaatggtaaataaactatttgtggatcagattgggatcaacatggaagtgtatgtagataatatgctcgttcattctaaactttccaagagccacgttgacgacttggaggagtgtttttatatgctgaaaagatacaacatgaagttgaatctgcttaagtgctcgtttggagtatcatcaggtaagttcattggctttattgtcaactaacaggatatcgaagcacacttgaagaagacattgattgacatgccttcttcaaaaagaaagaaagatgtccaaagcctgacgaggacgcataactgcactcagccagtttgtgtgtaagtccaccgacatatgtttaccattctttaacttattgcgaggaagcaataagattgaattgacaaaagagtttgaacaagtgttttataggcgttgaagaaacacctaggtgaacccctaatattatcaaaaccaatcatggggaggtgttatacctatacttactgtaactgaacatgcactaagtgtcatattagtgtgtgaggagaaaaagatccaaaagccggtatattacatcaacaagcagttttgtgggagcagagttgcgctatcccactatggagaaacttgcctttttcctagtccattcgttaaggaagctatgaccttacttccaagcacatcccatcca

SEQ ID NO: 320580 - DNA, 634 bp, Cannabis indica
cctagggccggccctgactatgaagctccacaaacctccagctggtattggaggaaaattgtgatgaccaagaatttgattagaagcaaaatagctttgagggagttcactagcttacgttttagcatcacaaatatttgatccaagctttggccaagggacaacacgaggaaatagtttttcttcatttgggataggctaagtgatccaatataaaaattgattacttagttggcttgttggaacagaatccatatcatggatcgtttgttcaagtttggcttaatcactaatgctaattgtttattttgtgatgaggagttggagacacactaccatctcttctttgagtgtaagtacagtacacaaattcttgtgaagggtttgtgattgagctagtttaaatacccatcaaaatgatttagatggttgcttgattttgggtgaaaaattgtagaagatcaaagttttgaatgctatggtctataatatttctgtgacagtcactagtcccgtgatccgtaaggggaaatatcgggtaagctgtgcaatcccacactgcctggggaaggtcaagtgggatgattttgagactgtgtaggtatgggactacacagttgaagatggcttaaat

SEQ ID NO: 320581 - DNA, 1127 bp, Cannabis indica
aatacttagtttttcttttcctttttcgtttttttgtcaggatcctacccaatacagttgtaataatgaaagaaataaaatactacgattacaatctaaaatatcaaacttataacaaaaaaaaaaaaacaatactaaatatcaaatcactgtcttagacctataaattggaaagttatggatagtgtcgtatttttgtactcgatcacgaaaaacattgaaaatgtgtaattattctttttacacattacccaaaatttatatatacttctttttttgagataaaatattcactattattataaaacaattgtcattgacaacaaacaatgaagaaaataaaatgaagaatttcaccaatccaacatacatcttcatctaatattagagcatattttactaactcatgtgcagcttgattaacatgcctccgaacatgagaaacaataattctaaagagaaaataaaagataacaaacatcagctattaaatcagaaaaggaagacaaatctaaagatattgcaaataatgcaatagagactcgtaaagcatcagtttcaatgatcgtgatagaaatttgtagttgacttgcccaattgatactatgaaaaagagtttttgcttccatcttgtcttatcgaaaacaaccttggactaatttagataaggcagcaataacaaacccattgtgatctcgaataacaattccaatactcaaggttttggtgttcataatgaccgtagcatcaacattcagttttaagccatttagatcaggtggcttccatgggactccctttatctgcttgggaagctaagttgattgaaccaccatggagaacgcggttcctttccgtccaaataacccacataatacaagtatagcgatgacagatgaatccataatctccatattgcatatagtgagcttttgaaaatcaatcatgaatgatgaagccaaaaacgctatgctcagcaatactaagcaaactgattaaatgattatataatgaatcataaacagaacatactaagcaaactgattaagtgaatatataatgatctcaactcataagtcaaaacgctatgctcagcaattacaatccaacaagaaagaaaataaaaa

SEQ ID NO: 320582 - DNA, 1261 bp, Cannabis indica
ttttttttttttttggttgattatgacatataagtattcaagatagttattaatataggaagtcaacaagccaatcgtcaaattcaagaaaaaagttataccatctcttcaacatgtttatggagatcagatatgattaaattgggaattcagcaaaccattatcaataaaagaagaacttttgtgcaaccaatggtctattctaaattaaagttaaaaagaaaatctaataagactttatattgtggaatcaaatgattttaaaacataatatcaatatagatggaaatgaagaatattcataattggtaaacccgtttattaaaccatctaaacaaaaaaagatctcaactaaccatcagtaagtacaatgttgaaagtattataagaactaaccaaatcaaaggacctgttaagtatcagataatgacaaaatcgagccaaaaaaaaaaaaagaagaatgtttgatatttatcttatttctattggtttatacttcttcaacctacaatgaaatatgatatcctaacaattcaggtagaattcaaaaaaaaaaaaagatagacaaaataaacaaaattaaagtgtatatcaccaaaggggttgaagaattcaaaaacagattttttggtatcaattcattatcaataattcaaaatataatgtgaattcacattatatttttgggctagtgaaaccacagctccagttgccagctactcattatgaatcatttaagttaaaatttacaatttttatcatactttttaactcactatatcatccagtctctctccagattcaagacgaactcctacaattatgtgtctacaaagattcacaaagtaagtaagcatgatgtctcctgttcctgatagaccagttatcgtaattggctttgcacccatcttcaagaattagttacagaaaaagttgtgagaattgagaaagtaaaaggctaaagcagagcaataataatggtacactacagagagagtatgttctttcttctaatgaaactttaattagaaagaagaaatttttaaaccatgcattagggaattgggatacctttgttgccagcagttgtaagagaaaccccctcatgatgcccaacaatgaacatgagactcctatgttcaataggaccaatcgatattggatctagtcagggccggccctgggtataggcggactaggcctgtgcctagggcccacctagtccaagggcccaaaaaaaaaattttgcccttttaaaatt

SEQ ID NO: 320583 - DNA, 1395 bp, Cannabis indica
ccccaaaaatttgatatcgcagatggaattttaattttatgaaaaactgtatttttctgatacgaaaaagagatgttttcttcccatcagttcaatcgcattatataggcgaatggattgaataaacataacgggaagaataacgttttctgaagtggggtgagttggtcttttgaacgtgtcccgttaactgatacgactaagtaatcagtttaattaaacacgtttcttaattaaattaataaataaaaaataattattttattaaataatttttctgtaaaaaataatattgtgtcacaccacaccaaccaacccaacccggctcggatcggacggacggcgcgcgcgcgcgtgtgtggtgggtcaagtgtgtgtgtcctcacccattcgcacaaaactgggtaccccttggggcccaaacccaaatgccaaagttgcactctttatacccttgtcaatgagggttcatatcccatgtgggactctttccaactcacacacactaagacacttatatattttgttaaaatattcacaatatttccaacagataagtaataaagtaaaaagaaaaatcttactggggcataattggtaatactttttacacctccagctccaccaggagaggctcgatcatactcttcttcaacatacaagttcaaagctgcaattccctccttttaaatcacaatataatgatgtatattaatatatatatattttaagaaaaaaaaaagacttaattcacattctgaaaaatgtaatagtaaccttgaaatagttgcgaacaggggaagcataaatgaggaaagtgtattctggtgatggagccaagcccaatataggaccacttccaattagcataggcctaatatataaggacccttttccaggaggaggaatctatacattttgatgatgagaattaattaataataataatatattttaacaacatatataattatgtgtaataattaattaagtagtcgtacgtacccaacgtttgttggcaagaacagtttgtttgagtgcatggagaaattgattggtggaaggtgcgggcatacagagtctgtgtgcaccttccctcatgcgaatggcattttggtctggacggaatagaaggactcttccatctgaccttctttgagcttttgttccttcatacactccctgtacgtgtataattaattctctcttcttttattaattatatattactttcaaaattcttaacatcatcattctttttaggaataattacatgaggtacaattttttgtaaaatatttatatttttacgttcaaagaatatttttttacatttttacggttttccaaaaaataacacgaaaacaacataaaataaacaagaaaacaacataa

SEQ ID NO: 320584 - DNA, 550 bp, Cannabis indica
tatctgtatgttattttttgttggttatttttcatgttacttttatgtagttttcttgttaattttatgttgttttcgtgttatttggaaaaccgtaaaaatgtaaaaaaatattttttgaacgtaaaaacgtaaatatttttacaaaaaaatggtgttttatgtaattattcctataatactatatatgagttgggtggtatagaaaaggggttgatttttgatgggaaggatgtggactcttgtatgacaatcaaatttctgagatatttgtttttggctttaaccatatatgccacaactttttctcttttcaatattttgtataaatatatttgcatcaattctgattttttttttaatttttgaaagaagaatataatgtggaatatattgccaggaccctaaattttaatgggttataacaaaaaaaaaagggattgtttcacaaatatacaaaaataataaaaaaatttcaaaaatacggttttacaaaattttaaacatttttacgatttttttattttatttacaaaacatacgatctttt

SEQ ID NO: 320585 - DNA, 1258 bp, Cannabis indica
aaaaaaaaaagtatttcttaaagcttacaaaaatcaaggaagtaaaagagtttctagccagattataaagagagatgctcacagtatttttaaactcaacaactttgcatgaggaatacatttttttttatgaaatgtcgacttcattaaattaactttctgagtacaaataatccagcatagcaactggaacacatttaaatacactctattacaataattctttaataataaagaataggcttcatatagaattatcaaagggtatgtgacattgaaaaaaactaacaaacactagagagtggtgatgtttgctagctctctagaaattgagctagctaatcgattacccataagggtactgcaagaaaaacctccgctatcaatctcaataaataaataaataaataagataagataagatactaatcttctaaagagaaattaagaaagaaaattacatgttgactaatttcatggagccccatttcaaagagatcgtaccgttaaaatagttgcgcgagagaacactgaagatgataaaaaaaattgatatgattatatacaaatttagtagagaatgacatgcaatggtatattatattatttgtgttaatgataaagggaaacagaatttatcaacaaaaagaataattaaataaataaacagaaacaaacacaattgttgagtcttagtactttaatatacatttaatttagtgaacacatacttataatgttaatggtaataattaatttaaaaaatacttaatatttatgcacacttataattattacatctcttggaggtaaggaagttccaccaattccttaaataggttttcggacagactttgagccatcagaattatgcaagcgtttgttaatttgattaaattaagaagattccaaatataaaaatataattttatgatatttcttttagaaatttttacattaaaaatacaaaatggtttttttattacatatatactcctacacggcagctgttacttttgtacactttaagtttttttatttacaattttactacttacacacactatacacataatgcgactcttgaaagcaggtgaggtgactacacacgtcagctgattgatgcctataaatccatgctttccctatcttgttttccttcttttttttttcataatcttttcagtttttttttttaaaaaaaaaaaacttaatccataactgatatactttcttaaccacaatcaaaacccatttt

SEQ ID NO: 320586 - DNA, 958 bp, Cannabis indica
tacccctgagaagtgggttgtggcatccagcaatgatctcatccttttggcacacactgccaatcaacaggctaccagagtaggattttctttacactcttgataaatatcctttctttgtaaccttattttcttctaacacttccttctttttttactatgttaaatgactatgattattgagaggacatttgaaacagctaatgtcgcgaaagtggaactgactcaactcaaggcggagaacatgaattggtttctaagatggaggagatggcagtcaatctggaaacatcaaagagataagctaccaaagaagccgagaggaaggctaatcaaaagcttgaatcttatgttaactaggccaccgcttcctatagggatgaaacctttaacttgaagctgaagttatttccactattgggaagcacaaggaggctcaagagcgagctgacattttggatgcccaaatgccggcataggccgaaaagcttacgaagaaacaaattgaggttaatgccgcagagctcaaggaagaatatgagagcttgctgccgatgctgaggccaggagaaaaagggtaatttctccggagattgactggaagcggagaggatttggaggaggcattttcaatggagaagaactggactggtgaaaggtccaaggcttttgtagttgtcgatactttaagtaggtttgcggcttcatacccttaatttgtcagggaatcctagaaagccaccatcaaaactaagaatgaaatggagaaaaccatggaggctgctcttagggaagtcattgacgttgcaaaagtgtgtcacatgtagagcgtagagatgaccctcatgaccacacaccattatctatggaaaaaaggatcccaaagtcttgaaggttcttggtagggttgagcatcggtcggtttggtcagtttttttctatataaaaatctaaaatt

SEQ ID NO: 320587 - DNA, 2074 bp, Cannabis indica
ttttcatcataaaatttaagtaaaaaaaacaattatcacaaaaatgacatgcccaatcaaattaacaaataatgtatgtttatccattaattcaaaaggaatgtatatatgtataaacacatacttttttttttgggaagggaaaaatcatgtaggctcttgtccaattttttttatttattttttaaaatagatgaaaaacacaaataaaaataagtattagaaggtgtatgaacttttcatcattaattttaaataaaaataataataataaaaaaaaagtcacaaaagtgacatgcccaatcaaataaacactttttacaaatttaaaatataataaaattgattaaaataaatattgaattgccacgtttcaacaaaatagaatcattttttttttttataaaaaatgcagtgtacaatatattaatgagattaaaaaaatgtaaatttatacttataacagtaaaattgtaaaaaaaaattgggaaacacaataccaagtgtaaattttcctattttattttataggaatagagatataaaaaagataatattaatatgagagttttttaactatttatatgggaattttttttaatatgtattttaaactaaatatttccttattttgattgtttctacttataaacttctcatttatgtttgcaaatagagtaattcaaattcataacaaattatttttactatgtactttaaatagaataattcaaacttcttattattataactttatagattgcaatacataattatttttatatcttttaagtatatgtttttagattttttatttatttaatatttttttttattaggggggtgctttcaaagattaaggtgtttggttggaggtaatgaaatggaaagaaaacaatttttgttccattcttttgtttggttacattttgaaatattgaatatcattctaattggatgccctttttggtgaaagcctattctaatgtaaaattaagaaaaaattaataaatttttatgcattttaaattttattccattctatttctattttaatatctctactcattcttattcttatgttttcattcatcctaactaaatatcattttatcttcatttctataaaaataaacaaataagatatctttattagtcttcacataaaaataaaataaaaaataatatatctttaattatttatttttttaagttaatatattattcttaatattcatagttttaataaaataattatagaaaaacatttacatttttctcatattaatattattagttttctttaataatattaattaattagaaaaataaatttattttcttttaattagattatttttttttttgattaataatggtaaaactgtaatagtaacaaaatatcatggtcaataatttgttaaaagtaacattacttaaaagaaacacctgtcattattcagctaagagtaaagtgcaaaatagagagtgccctctatgtacataagtggcataatttattgttgtggcatattgggttgaggtaataatttcatgagaagagaaagttaaacttaaattggcacatgtctcaaagttcattcaactctctctgtgttgtatttaggtccagcaataacttcattaaaattctacttcaataaaaagtgtacacatactttgcatttgcatgcatgcactcattcatgctataaataaataaagaatatgagaattttaattcaccaattactatatattattaccattaatatgtacttgaatgtaatgtattgatacgttttttttgggtgttcttattgaaaccagttagtcattgaaaatgaattttcgaacaataacgagttcgtataaagtgaaacatatatgactatgtataaagtgcgtaattaataaaacatatatgcactataactaaggatcgaaatgcctccagttcaaacccaacaagctttggtctgcaaaagaaattgactaccatgggtaatcgagctttctcgctctctcaactctctttagatggaattttgctgttatgaacagaatgagtgag

SEQ ID NO: 320588 - DNA, 1751 bp, Cannabis indica
atattggtgggtgtagtaagtaaagtagtacattgttaataagaatttgaattttacaatatatatttgtttttcatatgaattattatttcacactattatgtgtggctgtgcctacttaaaaatgcatagtgtatttttttatataaaaaaagaataattataatttataaatacctaaaatttataaaataaaattactaaaatatagacgtgattctaaaatttatttctaaatttttggaaaaagttttcaaaaaaaaaaaaaaactatgggaaccaaattgaagttcaatacaatactttctatactcaatcggatggcagagatacgacttgtcttattatgcaagtacttaagtattactgtataatcatgttattaccctgatttagatatctgattgttatacactttcattatttacttttcttattgagttcttgtgactcacgtgtgctttgtggagcaggtaaggacaaaaaaaaattaggacaaccatgagatgacagtccttttcggaaaatgtacatatcgacttatccaacttgtatggtcgagttctcaggggttgttttgggttgtacctaatgtgtattggaattaaattttatataaattttttttttttataaaacgtttataacaagaaatccccgaaatagattcttagcgatgacatcatgttcattactatagatttattttagtgaaattatattattatcacatattgtattaaataattaatttactattattaaactttattcgaaaattacacacgttgcgtccctagagattaaggcgttacagcaccagtgtgtattacaccacctagagccaatgccttatggtaatattctataaaagttattatattaaattatatatgacctgatacttaattgtaccaataatgatataatatattggagggtgttaagcaccactaatatcttttagcatttctctaaaataaattatcaaaagaatttgatttgttttctaataaataagggaagtgaaaatcctcaataataacacttactctattaaaggggactgaacccttcattggaaatcaaaagttatcaaaacatataatattttgtcatttaaaattttaattattcattaatataaaaattttctgtttctttttgttcttggatgattattttgactcatcctttctttttgtatttgatccgccagaattgtctacttttgttgtgaccgtgcgcgctgttgctgtacttgtgctggatttacctctagatccagtctttaacaacttcatctcagtccttgcttcttctttacacacaaagacttgtgctctttcatgaaactcgttaatattcctcacagggaaactttggagatcatcctataacttaccccctgctgtagataaatcagttgtgattcctgcctataatgttgttagttgaatattattatttaggtttctgacttttgtagcagtcgtactgaagccactcaagtacgctttaagagattccccaggttgttgttttatgttggtcaaagatgacgcttcaggttgacggtctcttgcagcctgaaatttctttttaaagtccctcgacaactgttcccatgatgttatggaatgattggtgaatttatcaaaccaactgctcgcagctcctgttaaggaagttgggattaaaatgcaacgcaagttatttgaaacattacttgctcgcataatagtattaaa

SEQ ID NO: 320589 - DNA, 872 bp, Cannabis indica
tctctctctctctctctctctctctctctctctctctctctctctctctctctctctctaatttccctctctctcaccgaattctcactctctctcttgctaaatctcacagacgacccacgaccatcgactccactacccccaccccaaatgtcgttaacccagttgaaacctaccccacaccgacgagacccatgacgtctgacgagacccacgaccagagatcaccacgtcgcagaactaaatcacaaaacccaacaaaatcgagaaacaacaaaacgattaagaagaaggtatatttcgaaacttctaattgattttaaatgggttttggatcttaaatgattgattgttaggattagattcttttttttgtttcggtttgagtttcatgtttacgaacaaatttctacgatttcacctattattgacatctcgcgactatgttcgcgatattttgtcgatttctttgtcaggcacaccaaaattttgacagtttttttttttttgcaatgtttcacgacatcttgcgatgtcatggtgcgacatgtttgtgttgtgtttgtcgacatcgtgaaaattgtcgtgagatatcgtgaaatattttgtgttgtgtgtggtattttttgttaggtattttgattggatgtttggcatagttcacggcatgtgacgatatatttgtcgacattttgcgataacatggggaatgttgttgtagattgtatgattatttttttcgatgactgtcgatatatgtcgactcattttgcgatttgttgcaatttattttacgacatttgtcgacatttttatcatgtgttataatagttggtttttttttgtcataaattttgcagatggctcctgaa

SEQ ID NO: 320590 - DNA, 608 bp, Cannabis indica
aaaaaaaaaataaaaaaaagtcccgcacataaagtcatttatatatacgtataaaaatggaacttttggaaaatattgttgtgtttaattttattcttaattgaattaattagccgccccacaatataatattttgaagatagtaactaatgatcatttgacttcttcgaactagactaatttgtggcatagaaattatcacgaaattagtgcgattatctttattagaaaaatccttccggtgtttacttcatagatttatagtcaacaatatttgcttcatttcttctacattatatttctcctttcaaagccatttgatcccactgtgaatataaaatacacaaaatgttcaaatcagaatttatcacccctttatactaattcattcgttatttaaccacatttcatcgaattattttgactatatctaactcaagaagaaataaatgtgccacaatgcatagaacttgaggaagtgtatgtaatatttaacataagttagaatcatatctctttcaatcagttgaaacatacatatatactaggtgattgttacgtgccaagccacgtagtgttagttttatttaatattttagttttttatt

SEQ ID NO: 320591 - DNA, 885 bp, Cannabis indica
atttaaatataaatagaaaaaattatttataaatattaattgctaaaagaggtcttgttaaatatttaattaattattttaagaaaatagttaattataattaattaattctaaaaaaggaatgtttacctattagtaacctgctattacaggtcaaagaaaaatgtaaccatatggttacaataaaaatgtaaccattgaatagtcacctttatataaattactattttaaaactataatatagcttcctatccgaatgatagaaagtggttgttttgaaatagttttccaaactcaaagagtgctattaggatgtaaatacaagttgagacaatataatttttcttgattcataaataaaaaatataacttcctaaaaaattggactcaagaaaaaagaaatcaaacttaataaaaaagataaaaacaaatcacaaaaagataaaattattcatatttagattacccaacaaaaatatgtatacatcatacatttatagggatatgattttgtcccgtgatgtactttctcagaatatattccgtgggatattagatgaatctcaaggtacattaaataagtgtcaggatatttttaaccctaactaaccctaaattaatttcagccgtcagatcaaataactcccccatctaatacgactgccgtacgtcacagattacaatccgtgaaagtacaataaccggacaaaatcatatcatttatatgtatagaaaagatttctgattttttaaaaatatcatgtttatatatgtggttgttttaaaacaaaacagtaaacagaaattaattaatatcatctttacatatatgtaacttaattatatctttatatattaaaagtgcctatctaacggcatttctt

SEQ ID NO: 320592 - DNA, 782 bp, Cannabis indica
aaatattttatatatttttaacttaaaataaatgaaaaaataaaaaacaaatgacaaatttgagaaaattaaaaataggtgataaaactcatatagggtgccacctaaacttgttgatgctttcctttatattatatatagattttgttattttcaaaagaagagagaaaaccaaaggtctctcattctcaaaatcttaaccatagttttgcgtcatcatcatcatcacataccctcttcctctctcaaactcgaagctctctcaacctatctctcttccatgtttgtttcatgtttactccattggagctcacaacaagctcatgtcgtaactagctcatctcttgaagaaaacaagcaagaaaataagttatagagttcctcttcaaagtaagtatgctcttgactatttttttattcaaagaaacctcatgttcatcttctaattgtttattttatttttggccattggcatttgggggtgtagtttaattcactataaaaaactgctacttttagtgacagttttttagtcacaacataattttttttgtaattaaatgtgacttttagtcacaataaaaagttacttgtgactaaaacatagtaattagttacaagttgtcattaatttagttttagtcacaacaaatattgtgactaaaaatacatttagtcacaacaaattgtaatttttgtgactaatacttttagccacagacctttcagtcacaatacaataatgataatttataattagccacaacttttttatttttagt

SEQ ID NO: 320593 - DNA, 1510 bp, Cannabis indica
aaaacagaaaacaaaagtgtgttttgtaaagttcatttttcatttttcattttttgattttatttacgtcgggtctatgtacgggattggattttggttcaagtcagaggccgagttcagtgccaagggccgtggggggatttgggtccgaatcatgatcgaagtacaagatattgaattaagaaaaaaataactgtttaaaaaatattgaaagtaattttttttttatttttaaaattttgattctacaattaaaaaattgaaaagtaaaaacagttttatagaacatgtttttgaaaaatattttcactttttcaattttaaaaacagaaaactgattaaaaaagtgttaccaaacaacaccttagctaatgtcccttctgtaaaaaaattatattgaaataaattgtttactttatttttttgaaaaaaattaaaaataaaaatatgtttagtaaatattttacttttttttatcaatatatttcaatttctatgtttaaatattttttttggtaagtctatagtacattttctaaaaaggtgtttgtttactaaaattttttagaaactcaatatttaagagctaaagaaataataacttacagaagtaaagagatgaagattttcttacgtggttcgggtgtttataaaccttagtccacgagtcattctattagcctctgaggacagtattgatgtgtttacaatatttttgcaggaaaatctaagtttctcttgaagaagaagacgtagagtaatattggcaaagtcttagttatgcaagttgtaatctaccccttcatatgagaattgggaggtatttgtaggctaagtggcgggtatggacaggcccatgatctgcctaaggtatctgctcaagttctactattggggtacattacatgcaatgttagagctgagtgaataatcctgtggaaacattatgcccgtgcgtgcagcaactagataatggagactattttgtaccactcgagcacatatcacgcaaaggttcaacctttaaaagtaggagccacattgtaacgtcctatcctatgggaacgtcacgtgtgtagttttataaattagtttagtactaattaaataaataattattaaaatatgtgataatgttaaaaacttcactaaaataaaacactaaaaatggacatcataacgacactaaaattgtgttctaggaattcctgttgtaaaagttttacaaaaaaactaaatacaatgacaagtcaaaatgcaaaatcaaaatacacagcagatacagctcaaaacaactcctgacaactcggcacacaggccgatttagtcaatatgttgctgaagaagactgtcacatcatggttgaactagctttcctttgtctttacctgtaccacatagcatctgtgggtcactatgactcagcaagaaaagtaataactgttgggttttatgccataaataaaactcatttcaatataatcagatttgcttattaatatagatcaga

SEQ ID NO: 320594 - DNA, 579 bp, Cannabis indica
ttaattaatttaattgtaaaaataaaggaaaaagaatcccttgggaccgaaatacactttggagtgtattcttggtcttttcaaattttaagtgcaattgtgcaaatgacttaagttgcatccttttatttttggcatatttttttaactaaaataactataccatatttatattgattggaaaaataaaatagtaaaatagaatgccataactgaaatcaccactagtgaataggtttattttatttttacgtacatatattttaattaaatcgtacagttgccttttaattaaaataattgcatttttggacaactaattacatattatcatatatatataattaaataaaatttgtaggaaaatactaatacgaccaagaactcatgtgagtttggtctagatgaattttttaatttaatctaagtacaatttactttaattaaattatctttcttacttttcatagttaattaacttatttgtattgattaaattcctattttaaattaaaagttatttaaaatataattataaattaatttgatcacataatcaaagttaatttattctctcta

SEQ ID NO: 320595 - DNA, 708 bp, Cannabis indica
ttttttacatcaatcaaatataacatcaaatgaatgggactcatggcaaaagtgattctaatctcctacaatacaatatattttagtggctataaacctccatttatatccacaaaatgcaatgaaactcattttattttaaatccctacatatagggtattttttaaattctcagagtagaagagtcatatatatatataaaaagatgataaaaaaagtattttaatataggaatcatgtgcaatggcctaagctgccatatgctttggctgaccttgacaccaggacactgcgactgtaccatttgttgttgtggcaatgtggaacctaagttggctaaaagtaatgggtattcaggaggctctaaattggataaaggacaaacaatagtcggcgatggtgacagattgtatggtggcggttgaggccattcacaatcaattaatgatgaattctccttttgatttagttgttaatgattgtaaacatttgattaagggcgtgtttggaagtaactgtgtaattactaggtagggtaattactagggtggtaattacacagtttagtaattacactatattttaaaatgcaatgtgtgtttggatatgagatggtaattacatatgaattcctaatatcttgtttggcaaaatagttagtaattacatgggaaaataatatttttagtagctaatatttaatatgg

SEQ ID NO: 320596 - DNA, 922 bp, Cannabis indica
agtgtaatagttatgcaagattgcatttataatagatgttaagagtttagattcccaacacattttttttcctttttaagtttacttcttcttttaaattatttttgttctccatgtggttatgtggtcgtgaagttcaaaactctcatcggatccatatatcttttaaattttatttttaacttttcaattttagcatgttgtttttttaacaaagaacagtgtggaagaatgttgttaaatcaatagatttaattaagaatggtcggcctgagggttggaataaagtggcagatttacttacggatgatagaaattgaaatgtttccaaactcaattccctgtttgacaaagctaccaccaataatatctttaaaggaggtaggccggggggcaaggtagtgacaaatggatttggtctatagattcaactgatcggttttctacgaaatctacctgccttgctcaggcattatctcgtgcccctcctattacggtggcgccctccatttagaacaaactttagaattcgaagattttggagcgccataagattttgtggtggtgtatcctatcaagtgccttaccgatcaggtcggctttggctagaagaatgcacattgaggaggtttcttgcctcctttgtggggaggaggagaaaactatggaacatcttttcctctattgtaactttgcctcacccctttggaggtcatccccttggggcgtgatgccggtacccgagtcgggaggtaggatgtggaactgggtaaaattcctttggggccttaaggacaaaggagtagatgtcaatgagtcttcctgtatgcatcgattattgtggatatgatatggcgtacacgaaatgacaagattcataccactacttgttaaataaattaacaattaacccaagatctat

SEQ ID NO: 320597 - DNA, 1149 bp, Cannabis indica
gagaatagatgaaggtatttaaaataattttagagcgttattatataatttaaaaaatatacaattcgaactatcattttacaaaataaaaaattaaatcaataattttataaaatacaattcaaaaataatatttactcttaatttttcgggagttatatatgtaattggattgtgcaactcaagtataataatgaatttgttacatttttaatttattcaaacattatatcatatattgttcaaaaaaaaaaaaacaattgtatcatataaaataatataacattcttgactaaatattctaccaaacatttcaagaagaaaaatctgacgaataatgtaatatctattaaatcaaacaaaacatacattatattgtaaaaaaaacatagattataatgatagtataatattctcacttattaaataattcatgtctatatgcatgtttcgtactgccattatctaattattaaatttaattaataataaaaactaaatctaattcaattgtattatttttttttaaatatgtaaaatttaactcaaaacttttataaaatatatatatacccaattttacgaaattttttaaatagttaaataatttatatttgataaacaataaaaaaaatattaatcacaataattaataaaaaaattgttttaataaataattaatgaattgattaatggtgttaattttaccattagctttaatagagaaataacaaaacctcattaatacaatactttctgttatagttagagttgttcataaagtataaagtatctgatccaattcaatctgcaaaatgcaaatatctatatctgtacagattgaattggattgtttgacctcaaaaaataatcgatataatttaatccgcacctaattatatatatttaaaatatactagaagagagttacgtggaatattagttttattttaagttctaggggtttttgtttaagaatttagtgactaattgtaaattatgttataaacgatatgttttataaaactaattgttaagaatgtcataattgtgtatataaacctataatatacacattgttatttaaatgttttatgttataaacgatttttttttatatagagtttaaattttatattgatgattcta

SEQ ID NO: 320598 - DNA, 846 bp, Cannabis indica
cccaaactctcttttctgcacaattaagctattgcttaatgaaaattcataaataagacagtctaattttagaattatattaaatatctaataaaataaaatgataaataaatattatttttctaattttataatttaatttaaaaaaaattacaaacttttgatagttgataaaatatttggttagtttataaaaaaattatctagattattttattaaaatatattatattttagaattttaaataaggtcattttaaaaaaaattatttaaataatcaaaatgtaaaaaatctgactttagatttaaaaatgagataaaataattaaattttaaaatataacaaccaattaagaaaaaaatgtagaaattattctttttgaagtttaaaatctactaatatctaaaattaattaataaaataataattaatttttgaatgataattaaatttgagattcaaaaaataaaaatttacataaaattttacccaaaatatcaaaattaaattccaagaaaaagtatgaaaatttgaaaaaaaaaatggtaaaaaaatatatttggctcggatagtatgtattgcataccatccgcacacatagatggggatgcctgaccaagaaaccttgatggaggaggctgcgtgcatgatttctgcgcgcggatagggccttcagacaaaatcttgaccgagcatcctcgaacaggtcctgtctgaatgtgcatcaagaccgagtgatcctcgggtgtgcacgcgctttcataggagtgcatccaccccaattctttcaaaatttcaaaaatcataactaattcaatttaaatcgaaatttagttttgtaaaa

SEQ ID NO: 320599 - DNA, 1575 bp, Cannabis indica
aatagatttttttgacatgcctaataataattgctccctaaaaagtgctttttaattaaaaaggactttttaaatgtctttaagggtatgatggtatttttcccatttaaaatttgcatgcttagaatttggcggtttaaaacttcgaggtacatcatttcttatttaatgctcagattgttcttttcttgtatagttcccatctgtttgatcagatttcatttaatcaaacagttaccaccttttatgtataaatttaaagttgtgcatcattttgccattttcagcccacgaaccttcaagcttcaaaaaaatctcaaccaccctctcttttaaatttgcatgccctctctgtctctcacatttttcctacagattacatctgattgtactcattttctttaaaatcatcaaaacccaattcttcgatcttcgaaatttcaatcgcgaagtttttctctgcccagaatttctcatcaaaatagtaagtgacactctttattgttgatttttcatctgtgctttcaattttaatttctcggtatgtatttttcttgtctgcattgttttgctgcttgggtaatttaattttgagtgtttggataattctacggctaggaaatttaaggtctaagattcacagagtttttgggttttatttgtgctctgtttttccaggaattggggcattattttttatttagcatgtaccagtttatccctgaatttacaatcccagaatctttagaatttatttgtgctcaatttcatgccatagaatataagcacaaacctcgaagaccctagaccatacttgaaataaatgatgagaaaattaggaatcccctcgttaaatctagtcaagaagaaatctctagccattataagcaatttttgtaagaggttattgagggtaggcgtaagtatttacgagaagtagcttggcctgaacattccaatttagttgttatacccttagtgaggcccatatttttacctctagttgctgttgctttttcaccaagtgacttaaattttgagataatggctcctaaagctcgtaaatccaagaccccttaagatcctatagtcacttttgaagctgagttaatagaatccaaagtctggtccattagaccttatgttggggacgttttaaggtcaagcggcatcagaaatgagtagggatgtcgcattaggtctattgctaagggggaattcagctgttatccccctaaacatctagttcgagatgaaggttgtagcaccaacgagccatccagaataggcgcttagagcctcaaacatataagagctagggcaattctccctctcgaagactattttaaaaacttctgcaactaccttggtgttgccccattctaattggcaccaaactcatacaggatatttgtaatatcctgataagcctaatggtaaatagttagggtttatatttatattatgggttagtaaggtaataagtgggattatgatcctactaatctatttcagcataaaatttaaatttactataagtgagtaaataagcgtaatttataaattacggagatt

SEQ ID NO: 320600 - DNA, 653 bp, Cannabis indica
ccttattacccagaatagcaaaagcaggcgtgcttttgacagcaaaccgtttgggaacccaagccgcttgattagccagcttacccctttcagacttccgatcagtcaccgtcccaggacgcttcgaatctcgcaccaccatgttcagtcaagccgagtttctcccataatcattcattgctggcatagaagtcatcgttcatttttcagcgcgtccaggccgaggagatacagtcaatgatggagaggagttcgcaccagagaaaacatctagatatgaagatgcagtggagagccatggcccaaacatagggaaaggaacaccattgtcattgaccacagtgacaggagatgagagggaacaaccccttctttggtgacccaatcttccacagttataacagaaaataccaatcctctcatatttgaactgtagccaacgatggccacccgattccaactcgaaatagcaaccagagaacagaggttgatttgttggaaattattttagatctctttctctaaatctttgatgctgaaactcctttgctgatgatctttcttcacgatcttcctcactgtgattgaggtattgcttgctgtgtaagggcactactctaatcactaaggtgtttcgaaattatcaaggaaga

SEQ ID NO: 320601 - DNA, 661 bp, Cannabis indica
atatataaaagtgatgaaaagaagatatgctgataaattgttgttgctgttgctattacctgttaaaattaattattaacaacaattaattgatcattcattaattggaagacttcggttcctcaaagtatatatgtatttatataaattcatcaacttatctttgtcttaagagtaaataatctaactaaaccatgtttctaatatatactataatattaaaaatttacaatgaattaaagctccagataaattaataataataaactatataatgcatatacaataatagtagacttttctatcaaagtcaagacaatataatattcaattgttagacaatatatttatgacactcaaaatttgagattttgactagtatctgctgtaatagaaacttgacacagttgttttaaggtattattattattattattatttgttgttgattcataatatcaatttacgggactaattttcatgcttgttattgttatggtcaacaagttcaagaaagaaaaaaccaatactttttttttttttcaatggccggggattttttttattatcacattcaattcacatatacacaaaaaagtgtctacatactctaactaatgttgtatatactaaatatatatatatatgtgtgtgtgtgatt

SEQ ID NO: 320602 - DNA, 2049 bp, Cannabis indica
ataatataattcctcaattattcataattatctaattaggattttgctaattcattcaaaattccagggtgttacaggttttgagccagttttttgttgtgtagtattctgaatagtatttgtgtggatcaggatacatctctttcatctactaaagcatgtgcacataaaatttcattgatttgaaacctattgcatgtgcctattttttcttgtaaattcacaacccatgatcattatacattgtacactttgaatatgtgttcatttgatgctctaacgtgagaacaaatatttatagtatatatattgtcattgtaacatagaaaaaatattaaaacaacatgatataattatgattccttaaaaaccttgtacatttaatttcaaagcagctttgtagttgcccttcatgtttatctttgcagatgaagtcaattttgtgaatgtttcttgtgtcattttcctgtttttgcatgtccactcttggagtaaattcctcaaagcctccattagtgttgttattggtagttctctagctgacaggtttgctgcatttaacgcttcagcaatattcgatgtcattgtaatgtatcttttatttttagaataataccttaaccatttctcataaccaatattttgtagatatggtcgaaaccgtttgtctaaggcgtcgacctctttcatgcgatattcgaatttttgagctgtgtatgtctttgctgcacaagaaaagaacttttcaaagaaccttgcctttttttaatgttgttttcaggttgttaagtaggtgaaatacacaatatccatgttctacttcagggaagatttgttgagttactttgatttacttttatatctatcagatataacatactatttttgtctaacaccaaatgttgctcttaatttttcaaagaaccattctcatgagatgttattttcttaataagccacacaaaaagctagtgggaatattttactggcagcatcttgtgcactagctgttagtatgttctcccatatgtagcttttagaaaagttccatccactataattataggtctgcatttattccatgctttcaatgaagtgtttagtgccatgaaacacaataagaagttgttattctcttcggtttcaatgtgcactacagatcttgagtttatttttttggagcacatggaaataactaggcggcaactaataagactcctttactatttctctaacaatgtttagagcgtgctccctactccttcatgccatcatgtaaatcatttgtaatccaaatttatcattcatctcaaatctaatatttgctggtgttgttgttgtttttatgtttaaaaatttgtatttaatacaatcccctattatctttgcagatggttggctttgattctagaatttgatgcttagtgggcaagtgtgtttgtcattgtattttcttacaatgaaattctttgttgcaccattccttgacgctcttagtaaccgcttacaatctttatctaaacactcaatttaaaattcctttgtgcaagattttttttgaccttgtattgaaattgttgttttattgcaaaatagctgaggacactcttcaatatttctttatctttgtaaatctacccttttttaatttattgatgttgtttatctgtgatgtctaatgcttcttcattgttgatttcttgttgatcagttgtctgtcttgttagtttattcatcatttctgtaacaactatttgtgcatagtcaacaaagttgaatgcttcattatcttcatttgtgttttttatttgttgatgtgttggtgttcccgtgactgagtttcatattcaagcatgtggacttcttgccctgtatcaacctcattaaaaattggtaattttattattgtatttgtgttggggaccatatatatgcacaaacaatgattttgtcatgttattttctattgattttaactacaattaaaaatctaaactttcatcattcgtgatctttaatgtttgttaattccatttttggcatatttaa

SEQ ID NO: 320603 - DNA, 1219 bp, Cannabis indica
cagaccaagcgggttaagggtctactagtgttgcacttttgaattctattttgccgcttaggttggctagaaagaaaagagttgtaataaagtttgtaaatgtttttgagatcccagctgtttaaaagtttaaatttattacaagttttattttcattccgtttagtataaaagtttaaattaaatgctattttgcttagtaatcctgattaggggattagggtttcataattgattttgggtagcgtgcctaattatttagggcgttacaaccaagcactacaacaaggattctagaaaccattaggacatccagatcattgtttcccaaaaacagtcgctgaaagaatatagtcatctctaattaacataacttggtgtttagagatggtgctgaagacaagaggtcccaatttaaatgatcggtctctcagatcatcactctcaatgaaagacttaaaaagctcagtttccatcacttttctaccaggcaatttgtctagattcttatatttaggcacattgagcttagccctaatgtattgggccacgtgtaagcatactcatcaggcatccttcgacttctcttcatacgaggcctgacggcttcaaaagataagttgtttcaactcaaaaaaagtgaatatcaattcaagagaactctcttcaaccatctcaaggaaagatcaagttgactccaccaaacaggaaagggagttttagctcaaaaaaattgatttctacctaaaaaattaagaaacactcgaagaaccgatgaagatgaaatcactcagactcacaaataaaccataggtatggcgcagtgacgaaacgcattggagagaaattaaataagagctctgttttttagggatccaagtatttaaatcttaaaacaattaggagtcttttaaatttaatatttaaaaggaaaaggtagatgataagcaaaatataatcatattttctcttctccttttttaaacttgaattttaaattccataatgagaaagaaataggaattcaaaatttaaaagatgcaacaactcctaatgcaatgaagatttaaacaaatttaaagtttaaaagaaaaagaaaataaatgacaagtagaagataattatcttttctcttctcctttttccccttaaattttgaatggaatatatcaaatggagtaggatttaaactcaattaatcctaatgccatgagaaata

SEQ ID NO: 320604 - DNA, 1443 bp, Cannabis indica
tgagttactactagtcaatagaattaataggcgggcatataaggaccacgatgtctctatgagttgaagtactaatggatattatcaagtcgatatggtagtgtgtctagaaaggctgccaaaagttcactggtacgtttttattagttttttcaatatgctacttgcatggaacatgacctaaatcttcatgagacgttgcggtgtcttgaccttacgagtcttaaacgagatgccacatgtcgtcattcgtggggctagttaatttgcatatgtgcatgagacagatgcaccatgttaggtctaatgtattctactagtctggttggttcacttgagggcctgcccacatgcatagaaacatggtgccttaagaattagaccatgaatgtatggaagtccttgggccataagggagatttttcaaagtatcgaacggggcatgactatgcattggcaatttggcacgtcaactaattaatgttggcatttgaccacacatgctaccttggtcacaagtgactaagtgggcgatggtgtttggattttctctaccatagtgggaacctacagacaatgtgagtatcttggctagagagcttatacatggatacactcatggatgcttgcgagcatgacatggtggagttgttcaagggacgaaagtgtgtacgaaacacactgtcgtgcaaaaaaatgaacaccattgttattcaaatggttagaatactggccttatcttagaaaaatcaaaatatcacgcaagtattttactgtttaaaaaggtgagcccataacacttcatcattgttattattattatcatatagaaattatatctttatttttaataatgatgggtgacatctttattttaagttttagtgatgtgtatgtactaccaaaaataaaaataaaaatgtgcacaagtagttgaaattttaaaaggaagaaaacagaagttaattatatatttaaaaaaccgacctcgtttctatttaaaatcaatattatgtcgggataaagtacaatgaattagcttaccaagtcttaactttatgatatgattttaataattgagtaaatattgtgttttgatgtgatttaatctattttttaaaacaaaaactttccacgaaaatgattttagaaattctaggatgcaccattaaaatatgtatcaatagactcatttttttttacatccaaatagttatattttaatttttttatagagtagtttgcatcataacttctttagtttattacaactaacctctaattctaaaatttaagtagtaaaactccttaaacttatgttttgttagcacttagccatttctatttattttggctctatttttggcaattaacttccatgtgggcatgtctgtgtacatgacattatattattagcccacctaaaaatattttaaataaaaa

SEQ ID NO: 320605 - DNA, 1861 bp, Cannabis indica
gggcacaaaacccaacaagagatacatttcattactagattaacccacaactcagggaaacccaactgtttcatcattcattcaatgaaaccccactcaactctgtcataagcattagccataccagctctaagagccaggaatcctttttaccccgtttatgttttttggtgagattaaaagtatttaaaaccaatcatggcattatcagtgataagcttacttggaataaaagtactctgctcctcataaatcatatctaccaaaacaatacgaagtcgattagtcatcatcttcgtaattaatttgtaaatcacatcacaaaggtttatcgggcaaaaatcaatagtttagcacggctcctttaattttggaatcaaacaaatagaagtatcattgatacaagccactgaaccactaccattaaggaactcaaaagccattttataaagggatattggcggctaaaccacctgaactttacggtttgtagcacttaaccacaaaaatcgaatttttggtggctaaactacctaaaccttagtttcgttttgctctgcacaattccgtctgaaaatcactgttaagtgtcacggtggactgtccacgtgtacacacttgtacacgtggtaaatttttagtggtccacgtaatattaattaaaccaatgtaatcaagcaaaagtaaacttaaaaataaaaatatatatatttagtgagatttgaaccctaacttctatcctatatgtaatcaagcttaaccattaaaccaatgttattattatgcctataaataatatcttttattaaaaataaatatatgtcatatttaattaaattatattttttttttccaatttttcgtagaaggcgcttgctctcacctcacttttatgtgggtctgtcgctaaaaatattgcataatattattagatatttgaggtttaacctcttcatcaataaaattattctcattttcaaaaatatatatatttaattattcaaataaaatttaaaatattcacttataaaaaaaaaatagatttattaataaaaaagggttatacttatgatgattgttattagtatattttgtggagctccctttcgaaacaagacttatatataacataactaactaactatggttaaagactttattgatgatgggctcttttaattgtagacagatatgactcagaagtatctcagggcattggtctccctagtgggcatcttggctctacagctgcatgtgagtattacagactactctgcataagtaaagataatagagttttgatatgggggggttacaaagttttcttttaatttttggattttcctgaaattaaaatattatatttgcaatcaaaaactttaacttgtcttctattttacagaccagatataaaactaatggagcaatttaattagtggggtggagttgtcattgggtcatttaggtccaatgaccctcaatccgaccatattagaagaagtttctttctgtctttctttttcacttttcgggacacagcataaattctgaaacagaagcactacttaacctaaaatatttcaatttttcctcaattattaaaacaattttttttaacttattaatatatgtaaagaatgttattttgttatggttataatatttagagtaatttgcggcataaatacctaagtttatcattcggttgcaatttaatacctaagttaaaattttggcggcataaatactttctgttacacttttagacattctgtaggtaccttgttgttatcttgcacactagacaacaagtggcatgccacatcatttaaaataatgccacatcatattataaaattgc

SEQ ID NO: 320606 - DNA, 1500 bp, Cannabis indica
ccaaacccgaaggagagaaagagatctaggttcagatcttgatgatgctctgctacagaaaggaatcaagggctagagatcttgaactgaaggagtcattataattctgctgcaatcaatgtaaggttttcttaaaccttatgtgtttaatttcattcttttagagaattcatatttaggatgttaattcaacatacttgttagtaaatctagatcctggtgaaatattcccaacctgaacttctagagaagatcatatccatatgataaaagcttcatctaggataaaaaccaccactcatggggtgaatcaggccaaattcaacaccttagctgctttaatgaaggggatcacgacacctaagtggttcgaatttgagctcaaaagagaacgacgctcaccactctctaaaagaatcaaagctcttcccattccttcaaagttcaagaaaccttcctggcatcaatacacggggaaggaagatccactatctcacatgcactatttgaagtgcagaccaatctgcacggagtgagagatgacgtcaggtgcaaaatctttcttgccatgctgataggcttagctcaacgattgtaccttatgcttccccaaatcaatcgactcatggaaagatctagtggatgcttttggcaaccaattttctcctcccgacacccaatgatttggtaggtgttaagcaattggaagatgagcccctaaaagactacatctagcggttctttgaggcagccgctaagaccaaaagtcttagtgtggatgcaagggttatggcacttgtacccaggcttaaggagatgattcttctatggtctgacttttttctcaaggcagtatacactaatgacttcttagataaagtagatggctttatcaaacttgaacaagacatcacccgagcaaagggctcaaagggtggcaagaataatttgccagacactgaagcccctgctattgacacgtaggacaatgggaagaagggaggtttgaacagaggaaagagagccaacaatgatgtcaagcaaggtaatgttaggaatattttaccaagatctagatttactaacaagtatgttgaattaacatcctaaatatgaattctttaaaacaatgaaataaacacatgagggtttaagaaaaccttacattgattgcagtagaataatatgactccttctgttcaagatctctagcccttgattcctttctgtagcagagcataatcaagatctgaacctggatctctttctctcattcgggttggttaccaccatcttactcactatgattgagtacttgacttgctatgtgtgggaatggcactcatcactaagggtttgaaaaaatgaagaacaatgaaggaggtttgaaaccactaacgaatgaactctctcatgtaggtttggttgaatagtcaagttgacaaaagtgtcaagtggatgagatgagagcatcatgttccttttatagtgtttcaacta

SEQ ID NO: 320607 - DNA, 1284 bp, Cannabis indica
ggtaaggaaattttgataaaaacgatttctcaagcgctcccaagctatgccatgagtgtttttgattccacaagaggttataagagatatagaaggtttaatgtcaaagttttggtggcaatcttcgaatagctcatctaaaggtatccattggatggcttggaaaaacctttgtaaacataaatcgaagggaggtatgggctttcgtaatttaagagattttaacttggctattttgggtaaacaacgatggaggcttctctccaaatctgattcccttgtgtctcgtatttttaaggcaaggtactatccgcgaggctcttttatcactgctgatattggtaacaatcccaactatgtttggcatagtgtccttgaagctcgccatttggtgtttaaaggagtcgttggtctgttagggatgacacttgtatctcggttttgggggacccttggctacccgatactaaaaatcccttgattatctcttcgcaccttgctcttgttggtgccaaggtttgtaatttgttctctatagatggtacagttgggatgaggagctgttagcagatttgtttaagtagcgagaccaaactttgttcctcataacccttctacaacatgatcatggacaagattacctcacttggacaagtgaaatttctgttctatatactgtaaggagtgcttataaattggcacaagatatccatggtgagaatacacaagacgcgacagcaactgacagctgttggaagaaattttgggggttgaaactccctccaaaaatgaaaaatctggtttggagagctggacaaggttgtcttccaaccatggttcaacttcgtactaaatgcgtgaggtggctgctcattgtccagtatgcaacgttgaagatgaatcgataatccatgctcttgttgcttgccctgctgctaaactctgctgggacatagttggaattggcacttcagtgcagccaaactcatcttttttggactggtgcgtggccaagtttctggtgcttgattcagacatggaaaagctattggtagctctttgttaggctatttggaatgcaaggaatgatatggtttggcaaaacaaattgacaagtgtggatagtatagtgttctcggctaaaaactaccataatcagtggctcattgctcatagtttagatgttgtgttctcgggtcctagttttttactaggagactgtgctgagcattggcagccaccacatggagataggggtgttcatccgatccaatccgcactttt

SEQ ID NO: 320608 - DNA, 1646 bp, Cannabis indica
aaaagtattaccaaacaacaccattgtttatagctagatagatttaaaaaagggtgcaacaaataaaattttgaattgagtacatagaataaaaaaaaattaattttgagtagactataagcattgcgaaactgcataaactaatattattgttgtaatttcaatgatgaagtaatttgtatactaaaaaatacatattgtacatgattatagttcaatggcatgaatatcatatataattcaatttttactttcaaaggattgcaagcaaaagtccattagcatctataaaacattgtagaattgcatcaataaaaatgaaagaggagtacttgcggtgagaaaacaattgtgatagaatataaggtaaatattattttgtatcttgtgttttacaaaaattattaattagattatctgttttattaaataacgaaatagaccctgtattttctaaaattgtataaaatataggaccctgaattgattttttttgttaaaataaaacttaataataattcgatctagagatgttatgacaaatctagttacattttctatatctgttcgtgttagaaattttcataaggttggttatattaaaaaataaaattgttgaacattgagttcagggtcttatttttaccattttagaaaatatagggtctattttatcatttaacaaaacaaatgatccaattaataacttttacaaaacacaagatcaaaatagtatttaccttagaataaataagtgatagtaagagtgagttggagagccgagcatgtaggccaaagggaagttatttataaaagcgatcaaatataatgaagaagttttgttgtgtgaaggaggagacaataaataatttgttagaattttgatctctctctttttctttaacaatctccaacaatctcaatatcacccacaatgcataaacatcccataatatctaaatataacaatattaattataatataaagataaataatttaattaaaaactttaaatatatataaaaaataattgaataaatacttaagattattgtattattattaacaaataaatcaatcgaatttagagttacgaattgaaatctattaattgaaaagtttactatttttttattcttgtttcttcactgaagttgtagtcaaaaataaaattttatggtcaattaagaatgctgtatactcacttgtagttgcaacaatctttaagttttgtacacaaaattctcaatcaatagattcttaaacatataaatcatttgatagtataacatgattgacaaataaaaaaacagagaaaataataataaaaaaaattatatgacaaagaatatcatgcttatctatgattggaatatgagttgaagggggatgttagttggtattagaggaaaatccgtcatctgagaaaccatttcagcaagactatggcggctgcagcagttaggaaaggtaaatttattgcagctcgtttgtatatggggaatttaaagctgaatatagacagtttttataaatctgtctggtgtaatctttcgctgcccaaacacaggttcatattatggcaggtggttcatggacacttgctcactagagataactgttggaatttattttaccaggatct

SEQ ID NO: 320609 - DNA, 873 bp, Cannabis indica
gtataactttcaaataacatagaaaaaaattagcataaaatttagtatacgtgcctcgcacgtaattttttgctagtatgtaaatatacacatacatttaaatatattagtagtgaaatctcaatccgtctccttcaaaagatgaactactcttatccatatatatacatgaagttaaaactaatgaaacgataatcccaacttattgttaattaattactatattaattgcttggtcatatatactgtcgcattgctctacctattttgttggaacttacctcctttaagagtcatattattatgagttttaaatatatattatatgtatacatataaatacaatatcgggtacatcatcaacattttgatatttaatataaactacataacaaaaacagtaactgtcccaaagtttgtttcttgatcaagtattttttttttaatggaaattcattatatcatttcctctaaataacatctagaggtaattactagggtttcatacatataattccatgcaaacaacataaatagcaccaggtattggatacccaaaaatattcgaaattattcataatagaacaaagaaattaaaggttcgtaaggttttttgaaaaacacaaatatttcagatcgattaattcagcttcttcaactattagcactcctgacataatagctatacgtactattattatttttaacttttagttattgttggtttcttctcaataatgtacatatatctaaactaaattatttgatatattttgattgattaaataaatgttacaagtgtgttacaagtgtgttacacattttaatctagtgggggattgttatattattttataatataataagtgtaga

SEQ ID NO: 320610 - DNA, 1431 bp, Cannabis indica
acctgatgtcgatcgcatacttgcgattcctttatctttcaatgctgctaatgacagatggatttggcatcatgatgtttcgggtgactacttagtaagtacagggtgtcattttgcaaactcattggaagaaggtgacctttcttcttgctctaattcacaggacacttggtggaagactttttgggttttaaatttgcctgctaaggttaaaatatttggctggaaagttattcaatcttccattccagttgctaaatcactgtttcataaaaaaattctcacttctgcaacctgctctttgtgtcaatcagcatgggaaaccataggacatgctatgttctcctgctatcatgccaaggaggtctggaaactctctggtttttcattcaattttccaagtgcacatcgaatgcaggatggtgattacttgatgtacttatctactatgtacactaaatctgagatggaaagaattatgtgtgttatgtggtttatatggtctgatcgaaataactacatccatgaaaaaaaagactaaagcacctgtaattttgctgtcataagctgatgcttatttgtagcaataccaaaaaataaacattcctgcattatcgaatactggttctcataccagttcagcagcaggtgtaacaaagtggcatgctcccccagagaacaaaattaaaatgaatgtggatgtggcaattgattcttcgaggagcaaaattggtattggtgttattttaagaaattcttgtggacaggtgcttgctgcaatgtctaaaccagcagtagggaatttcaaatcacaagaaatggaagcaaaagctttgtattttggtctttcctgggcaaaacaaattaatctccctattgattatgtggaaacggattgtttaatgcttgtgaatgcattgaataagtatacatctccaaactcgagttttcatgatctagtttctgatatttcttctcatttatcctatttctctaatgtttgcatatctcacattaaaagggatgttaactaagctgcacatggtttagctaagcaagcattacagctggataatgattgtatatggttagaagagattccttctaccattttctctgttgttgtaaatgacactatttgatttataataacagacttttctcaaaaaaaaatatatatttatatatatgtttcattgtgtaatgtatatattttacagtataatttggtaaatatatattttggtgtaaataatttaattcaaattttggtgttggtttatgtttaatattttgagaaaattaattgaaacaatatgtcgccaaagtgacctcttttgtgtagattaatttatttaaatattaagatggttgtgtgtttgtaattgatgcatatattgactaacccaaaggtaagtgaatattttgcta

SEQ ID NO: 320611 - DNA, 877 bp, Cannabis indica
ttcctgtttttttccctttttttaatatccatcaatgagtaatgaatattacccattaaaaagtgttctatttaatatatggtgcctgtgcgtgccactggtttgaattataaaagatgaaatgaacacattgatttggagataattaagagataaagcatgtttattatccttgtcggtgtaatagtaatcttacgtcaataggccatcataaccaaaatcttgactattgtggttagtacaagatcttcaattatagctcatacatttttcaaatgccacaatatgcaaaacccttttaatttgcctttccgacacttgaatttggtctttaaaaaattatcaattttcatttaaaagcaagtttgcgcattactttttttattgaaaagctttccacctgatctccacattcatttttaatagactattttggttgacaatagggtactctcattactttgctactttgaattggcaaaaaggcatagtctttcctgtctcaaattctaaacttctaattaacctattgtagttttagattagccatttaagctatgtcttgctaatgtgtacttgttttcttttaaatcagctttttagtaatgttggttaaaatcttcaatatcatctcatattaatgtattgttatttaatgtttgatccaaataaattgataatttaagtaattgtgaattattaggtgttaaatgttaaaattctttcactcataaaatatgcaataacaaaattcaattctataaataaacatattacacattagggtgcactcttaacgggtattatccatgaatgggtagtattagaaaattttgagtttttatgattaatttttctatttaattagaaaaatttc

SEQ ID NO: 320612 - DNA, 1437 bp, Cannabis indica
cttgagattgagcctaatcataacaggattaagatcatttgatctaggatcaactaggcgatattgacttgaatagatattacggtaagtttaataaatctaagtcaaagttcaatatcggtcccttccgatgcatactccatgcacccaacctgagctttactttaaccaatgctctggaaagaacatagcatttctccaaatgcaagtaaactctgttgtagattatcatatcagtaaaaccctatgtctgataaatctaggaatctttattcacatagtcatgtttactttccaaagtgttgacaacacaataaacaggatcaagtatgtgaaaagggtttcagatgaatttataaatcaagatgaaccaaaacatacacaaatgaatgaaaaatacttctgtttctttattgatgttgaataaactggattacattgaaatggagttttatttagggcataaaccccaacagcttaatccttagagagaacattcccctgcttaataatactttttcatctacagattttctgttatgcatcttactaccccagcagtttaatgtaatactctaaaagtaaggaagatatttgttgaggattatcggttcttaccccattagtgtccatgatagataaaatttgattctgacttcttctagcacgaatactattgtggtaaaaagctaaataagaatccccatccttagaccaaagtagcttagctttctgctgtagtaatgataggtatgctgcctatacagttgcaaatttctctctagctgttgcttcttgcatctgcaaatcaacattcaaaggatcctgatgtagcaatgtttgacaggcatccaatttctccttagccatatcatttacaataggaaaatcagtaaaatgttgcttatttaggcttcaaatttttcaatttagtgaccacctgatacattttagagccaacatccttttccagcacctatttgcaaccagacttcgatattcaggatgagaggacaacaccttgaaataacaaaatggcttctttccacctagaggggttgtgaaaatggttaacacagctgaggagtggtcaaagagaccctcattttgaaaaataacctcagttgcagggtgcgagttcaaccaagccggattagcaaggaccctgtctatgggagagtaaatcctctcttctctacttattacaccatgtttaaaaattcccagtatacttcacatcttcaatatgacagtcattcacacagtccctaaacttaatagagtttttatttctaactctacttccacttctttcctctttgcaaggaatatcattaaaatccccgaggacaatccaagcttcattactttcaatatctctcaaatctccccaaaggtctcttctcccaacctcatcattaaaaccatagacaaaag

SEQ ID NO: 320613 - DNA, 1434 bp, Cannabis indica
tctctctaaacttgactctaaattttgaggcacttttatttataaatgttggtgggtatttctttaaattactatcaaagcatattaacttgacacaggttaagtgagtttaatcccaacaaagttaattatataatgaaatttaaataaaattgatatgttgaatgtatctttagttagcatatgaagttttagacttacattactatgcaattttgttaatgacttgactggaaagcattattttttttaattattaatgaagaattataaggcaaacatcttaacaataacaccttgtcgttacattattatatatatatctaacaaactaaactcgtctcatttatattctctttagtgagctctaaacattttgttttctttatttcactgaggtgagctaacttgttaatctccaatgtttttaattggatgaccttttattttccattataaaatttaaagagttggatatagatagataaattaaataagttactaacttgaatgaaatataaaatatatgcacttcaatttattgatatatatttttattattaattctgaagtcggtgtttggcatcactgcttaaaaattgagctgttaaaaaattaaagtttgatccaaatttattattttgcaaacaataagtgccaatcaagaacataataacaaaaacaaagaataaatttagaacagaatttgaaacaaacattattacaaaaatgtcatttatgacacgttcttttcatgttggacataaagaaccattaaagggtagtgcaaaaacaacattgttggacgtaataatgggacatactcgaatgcttgtattacgtccaactttgctcgacatgaaagttgataatcttatgttattatatttcatgtcctgaatttttattttttattttaaattaaataataaataatttaaaaatattaatttgataaatacatataaaaatatttatttgaaattcaagattgtaaattaatcaaaattataggagaactcatagattggtttggtctgatttttttttttttaaccaaaccagaaaaattaaatgcttaaaccacatcaaaccaatctacttaagaactgatttagttcaaaaccactgtttatactttgtaaatgttttactacttttttactaacttttttactttaaaatttataatatgtaaataacaatgaaaattgatattcttaaaacaatattaaccttaagattgttcctaaatatcaatattcaataaaaaaaattgtattaagtatatataaataattaagtggtttagtttggtttgaaccacatgcaaaaattttaaaaccatgacgagagagagagagagagagagagagagagagagagagagagagagagagagagagagagagagagagagagagagagagagag

SEQ ID NO: 320614 - DNA, 727 bp, Cannabis indica
agagttattttttaggctatacaggtcacccgaactcgatgctggcattcatctatctcaaaccaagtaccttcaagactacttactaaagctgggatgcagaatgttaatcctcaatctactcctatgaacagtggcctaaagttatcaaactatggtagtgaaccaatttctgacactactctctacaggtcgattgttggtgcacttcaatatgcaacaataactagacctgaaatctcatattgtgtcaataaagtgtgccagtacatgcaatctccattgcaatctcactggactgctgtcaaacgtattttgagatacattgctggtacacttgatcatggtttgttcctcaaaccagcaccagattttgcattggatgtcttttgtgatgcggattgggcatcagatttggatgatcgaaaatcaactacaggctattgtgtttactttggtggcaatttaattgcttggaaatctcaaaaacaggtgactatttctcgatcgtccactgaggcagaatttcgaagtcttgctagtgctgtcactgaagttgtgtggattcagtccttattgcaagaactccaagttcgaattcctgcctctccctccatctggtgtgtgacagtcagtagtcccgtgatctgtaaggggaaataccgggtaagctgcgcaatccaacatcgcctgggaggtcaagtgggatgattgtgagactgtgtag

SEQ ID NO: 320615 - DNA, 940 bp, Cannabis indica
ttaaaaagactgatagagaatagagattttatttctcattaactcatttttttaaaataaaaaccactcattattagtgctataaatacgggtgagattttttaacattattgcattttggtattgaagctgtgcagaatatttttagtttttttaattatttttttatttgtttgtttgatttgttttagtgtagttttacagttgttttgtcatgattatttatttgacgtcgatttcactgtttttttctcaatctcaccagaattgatggttgttttccaattgttctggtgtttcgatggtggttctgtctgtgagtgtggaagatgaaggtctaatttttttttttttgtgtttacagtatataagaaaaaaaaatttaacaaagactgtataaaaattatttctgctgtgtgacagtatttttactaaaaataagtcaaaaattaatatttttgtaaattttcctaaaagaaatgaatactctaaaagaaaaaaaaaaaaaaaaagtcaacaagaaagtacaagtgtgtaaagtagtttaataatcaaattcaaatgaaaagttttattttgttggaaaagaagagccaaactaaaaaattgataatatatatttcaaaaagtttaggttgggactaggtacacacagggccggccctgaaaatatatgggcccaagacgaaataaattttggggccctcaaaaatacattaaaaaaaatatcaaaaaaagagtgttatgggatttgaacccatgaccttgaatattatggcttccacctcaaccaactaagctatgaatatttgttgtttataatacacttaattttacttaaataaaagcctaataattttttttaattttttattttgggcccccgaaaagtgtgggccctaggcacgggcctagcccgcctatgcctagggccggccct

SEQ ID NO: 320616 - DNA, 1225 bp, Cannabis indica
aaccatgcaacattaaatgttatttctgatcaatattaataagtaaatctgattatattgaagtaaattttatttagggcataaattttatctcgcaggtgggcctttaggtgagcgcactggacgagtgagagccaaggttcctaggacctctcatggtgcaaatgctagtggaccatcactggctccccctccatcagggcttgcactagccgggcagcctatggttcagcctactgggaaggtacaaggaggcccaacagatgagtagggtcaattgctggcaagaaggctattaaatcaaccacttgacatatagagagggctatccctttcttggatgagggtttccaacagctgggtgacagtgtgcttgacagactatactcttctggacttcaggacctttctcttgtgagttatgctttcagctttgttcatattcactgtataggctggttggccatggtgctacttgcatgttgctggccgaccttgggcattcttataggggtctagccagccatagcagtccaaggaggggactggccggccagagtggactgtttaacactaatgttgttttgctttgttttcaggggctgatgaagctaagctcagctcatgacgactctggggttttcatatgctttttaggagtgtgtgaaggtcttggaagtatcctttacttcaaaagacaaagctaatttcgagctagaggtccttcttgtagagaagtagaggatggtctttggaatggagatcatgctgaaagtcgggatcaccgagaacactaactaagctaccctcatctctgggttggagattgatcttgaggatcacaagaagaagttgcaggaggctcttaatggccaacatgccattaaggaagattacatcgacctatcctctaaacttatttacgagttttgcatgaaccctcgagtcgatttgtcgtacatgggtagtctggcctttgtggagagaacactggcttgtgggaaggcactgtttgaaagccagatggagatggaccaaactgccacttatcaagaggggtaatcattgggtacctatggtgaggagttggccaactcacctatgtaggaggtggccggccaggatactgaccagcaggccaaccagcatggtgataatggggccggcctatactcagtggatcgcaatctgcccatgcacacatgtagatggaatttttattagt

SEQ ID NO: 320617 - DNA, 771 bp, Cannabis indica
tagagttaattaataataataataataataataataataataataataataataataataataataataataataataataattgtttggtaaaatattagttggatggaaataaataaatcatttatattttaagagtttatttatagtatcttcgactttgtgttctctttaatatcattttgaattcttataattttataaaattaattttgtcacagtgttttgtaaaaaaaattataattaggaacttaagatcataatatatttttatatgactattgtaccttgtatttattattattaagtaattaatttaaaataaaaaaaaaaataatcaaaataaaaataaatatatccaagttatttaaaaaataataaaaatatacatttaaattaatataaaattataaaatatttaaaataaagatgaattttttttaattaaatattaactttattaaatttttaacaaaataggtaaataaaattaaaaatgtaattaagtaaatattataatcttaatggcaaataaaacaaaactaaaatcattaaaaatcctaaaatttgttttttttttttttattctcttagtttgaagattctaagtcaaaattcaaaataatctaaaaatattggatccaaatgggtagtggatcacaaaacaagatccaaatggtgggttggattgatgattattaatgggaaatttacaccacatactgttttttcttattttatttcaattttactgttataagaaaaatatta

SEQ ID NO: 320618 - DNA, 898 bp, Cannabis indica
aaaaaaaaaaaaaaaaaccctcctcccgtctctctagctccactgcctatagccgctaaggacgtctgcccagcaatccaaccaccgttaaagacgtccgcctaacaatccaaccgccacccttcctctagctctctcacattgtggattaatggataagtctttttttttaaaaacattttgttaaataattgtaaaagtatagtatatttccggtagatctatgtggttgttgtttgtggcattttgttttcaatataattttcgctaaaatcacgagatctcattttttggagtattcagtgtgttcgtatttttcttggtagtttctcgatacgttctcgatgggttctcgacgcgaatgtctcaaggtcagggaagacctttctcgacggattgtcgataagttcttgaaaggttctcgagtcgaatgtcccaaggtcagggaagacctttctcgaagactttttgataggttatcgaaaggttctccactcgactgtctcaaggttagggaagacctttcttgaaggcttttcgatagattctcgatagtttgtcgaaatgtcgaatgatattgtatttccaatcataattgagatatgttttagcaaaaaaagaaaaaaaaactattcttggcatgttatcttgcattctcgattgtttgtcgatagttttttgatggtgtgtatagttaagttttcaagctttcctgtcacatgttattgataatttctcgacatgttatcgactgtttcttgatgattgactgattattactttttacgattattgatttcttttctgcaagttctcaattggttattttgatttagctgtttgtggtttgtattgaattgcaagatcgcttgtaattctggttgtattttatgatggt

SEQ ID NO: 320619 - DNA, 2136 bp, Cannabis indica
gatttaattttctgggtaattttctaaggttttatttagagaaaacacttaggtttatcacattcgtaagctcctggtttagatagatttcttccaagaattggggttgtcctttttatagaaatatcccaatctagttttgaaattccaactccaaaattcttagaaatagaatgcccaaaggaattagccgttccattcaaacccagaattcttaaaccttaatccaaacttgagataaatgatgcaaaaattagggaccatttaataaaaaccaatcaggacgaagttacaagtcgctataggcgttttctacaagagataaccgagggtaaacgtcattatttgcaagatgcagcttggcctgaaccttggtctttatcttctattccattggctaaacccctatttttacccagagtcactattgctttttcattaggtaaccttgattttgaaatcgtgtctaccaagcctcgtaaatcaaagaccccacaggaccctaatgtcacctttgaggctgaactcatcgaatccaaggtcaaaaccattggagaatatgtgggtggtgttttaaaatcctgtggcatcaatcaaaggcgaggatgacgcatttaggtgtttcccctagaaagagttattcgcgaggagtgtggtggtacaagtactagtggcttgtttggaataggcgcttggagcctcgagcacatcaaggctggagcagttctccccttaagagattacttcaaagagtttattaactatcttggagtttccccatttcagttggttccaatttcctacagaatccttgcaagtctaaaggttctgtatcacattttaggatgggagtgccccactcctctagaaatagtctacttttactcccttaaagcaatccccatgaggaagcgatgtgcagggggtttctattatcttggcacccacacaaatgacaataggattgtcgtgaggttgccaaataaaactgagtttaaggagaatttttttttggacaactagtctttctcctatcaacacaactgcattccacataatacgtaagtaaattttgtctcaagaacttgattttgagttattttcatatttatggctttgagcttgctgacttatttcatttattgtgttgacagcagtttctaagagaccaattcccactcctgagatggccgagtgccgtaaaatccagctaagtcttctcttcggattacgatcggcagacttgctcttgaatgaagccaatctaaagactattggccttcttgccttaaatgagtacacttgtgattacaagtttccaaagtactcttcgtaggagaattgtcccagttccagccgacgaagagagccaggattatgtggctcgcgtacattatctcgagagaatagcccctcgagaagctaaagtcacctactgtgcttagggcagaacgtacttcgttagtaacattccaagatagtcgatataacttttatacttggaaccctttcctcatagattgtataacccataggtttgatagttggtacctaaggttttttgtccaacttagttgcactagctctaactatgggattgccgagcagtatgggaccaacttggatagggcgagccatccagatttagattggaatttagatccaattaacccttacaacatattcttaatcacaagatctagggaatttagtaattactatagtcctccttctccatcatttgatgattatggtaaccttctttaagtgggaatttgttccctattttctttttatttatttttgattaagtgttgatgcatttcctttgtctcgtagatatgaatctagacttggagaatatgttcagtagccctccactcgttgacaaaagggccgaaaaacaagctgaccaagcaagtgatgcctcgggttctatcaaagaacccaaaagaactaaaacaactgccaacaagaagaagtcatcaggccaactcaccattgagccagccaaatctcataaggaggatgcgcctactgtggtgtgcgccagtgaacaacctactgggtcagtactgttggaaattattttaccaggatcttagatctactcaaaagtatgttgattaacatcct

SEQ ID NO: 320620 - DNA, 1098 bp, Cannabis indica
acccagaaaataagcaaatcaggtaaatcaagaaagaagaaaagctaaaacgtgaagcaaacccgaatcttacctgaaattcgctcagtgggttgagttcgtcctcgcctgacagcaccaatctccaagacaaatgaagtacaaagaatcccaacgaaaacccactttaaaaaatccattttcttgaactctaaattcaccaataaggagataaacgcaaatgggtacttgaagatttgagttgtgaatccgaatacccagaaatgaaaaagctcaaaaaactcaaaaggggcaaaatgggttgtgaaggattctagtggttgggcattgtgaagatgaagtaaagggtttgttttgaaggagtttgttatattgttttaaggatgggaagatggaagtttggaagcataataaggtaaagcttcgttttcgctattaggttttgagacttccaggcaagcaaggcaactcaggtcccaagtcccaacccaacagagggtggtggttgtgttgtgttgtgttgagtttgagctgagctgagagagacttggggaaagaaaataaaaacaagtctattgcaaaactggtcaaacttattggtggacctactcacctgctcaacaattctatatttatatatcttcccatttattattattattattatatgtcatactaccaattttacaactcttcaaatgatgttcttaacttctttcaaaaaaagaaatcatctccaatctaagagatgtaaaatttgtgttaagtaataagtatattataattagctcactctttatattaaattataataattattggtactataataaataaaaagaagtaaaatttattgtatgtcaaattcataataatattatatattatgataaatttagtataatttttaacatctgtcaaaattaatacaatttttagaatactactgaaatagtattcttttgaatgtgttaaaatataacaatatactactttttggagtattttattagagatgttgttataaaaataaaaataaaactattattataaaaaataaaaataaaaagccatggcttttcactttttttttttttt

SEQ ID NO: 320621 - DNA, 2472 bp, Cannabis indica
gtgagtgatagtgttatcttctttgatttttaattttttatttattctcaaatagtaaataatgacatcatatgtatttatacagattaaattggatgtggataatcattttccattcagcaaagaatgttatttctacgatccggccggtagcgatccaagagaggatgctttgattatggctagaacgtaagttttacattaactttacctaagatgcaaatcttacaatgttaataaattattatattatctaatcgaaaatttattttattgttaagggcatttggcataaatgatgctttcaatccaaaaggaaagagtagaaaataatttggttcccagtgaaggtatgatactaaaattgaaaagtattttatttgatcatttattttatgtataaatcaaatattgatacatattatattatatgtagggccctaggtaacttaatgacactgtgtgcgatttttacgtcatgcggctaatgagagatttaactatggaaaaaaatccaaaagaatatctttcgaaacacataagtaattaatatattcttttaaatttgatcaattttatttatcaagaaactaacatattgatttactcttatattgcagtgtgatggtaagaccaagtatacaatagatgatattaacactgtgcgtgaagaatagatcgactactatacagaatattttcaagcataattttccttttgttttattactcgcaagtatatacaatcttagctagatttataaatttagaacatgtagttgtcatacatataaccattaacaaaaaatttatatgtaaaattgatatcttatgaatttgattagatacaggggaaaatttaattagaacatattgtatatattttcactactaatgcaggggaaaatgttaaaaaaatatatatattttttcgtcctaaaatcaattacggaggttcttaacaaaccgtcatcattaacttatctcatgggttcttaactggtgatatagaataacaatctcggcggttcagaagaaactgccgagattgttatcctatctttgcggttctagcgtctacattacagaaatatgaaagcatgtggcacacctatctcggcagttatattttgaaccgccgagatagggtaccttatctcggcggttctctaactctaagataggtcaacatctcgatgtcgatggtcagatcctcgacgatcgataaccgcctagataggtctatctcccgggttcttaaccgtcgagataaggtaattttcttgtattgattatcattaatatatatacaaccaaaaggggagtagatcactacccactaactaagggggctgaacctctataaaaatattgtgtcccttttatttacttgttcttattgtgtacacatattgatatcagtcataaatacgactccactatcggttggccaaatttgaggtcaagaactgacacgtaacactgtcacaaccctattgagaagttctacttctaactcattcttagctcacgattctcggtcatcattgttgaagtcagaatcatcacctctttgtctccagaacacttttaataaatccttcttaacgaaggccagttcagctaatataaccttgtttaggacgtcctgctagggcgtttattcgcttctttggatgtttatttgatttttgagatctccctgattggaattaattctttcccttaaataaatcagaggggctcatcttccttaccttttagcattatgtcgttcattacttctttggagcaaaaatacactttggcattccctacaatcctggggtctaagcttcctttgggagagcctatttccttgccaacttttcccttgcgggaggaaaaaacgcacctttaaatggtcacaatttatttggtccccctaggtactatagtaggattgacctttgagaggggaggttcttcagaaggatactatattggatttggtatccgctctttttgtttcaggttttcttgtgattgagaacgacattctccctcattgtcaagtggcgtggtatggcagcagagtcaacattgaggcctgctctagccattgctttcttcatagcaaccatgacttcttacattcttttattggcctccctctattcagccaactgtatgtcgtgttccgcggcttgtagtcgtaaagagatgagtttagtgtattcatcctcctcatagtcttctacattgctctctctcctataatccaggtcgttggtgttatcttctttcctttcgaccaaggatgctacatcttccttagagcgtgcttgaagatcgggtgatgaaggaggtctttggttatttctggtcaataccattgtggaaaagaaatcaacggatgaaagcctcctgcagctctcaatgaaaacaccaaaatatttattgagttttttgacaactacataaatttcacta

SEQ ID NO: 320622 - DNA, 1591 bp, Cannabis indica
aaaacattgaatgtgatccaatgaacacctctagacatggacacccgagttcaatggattaaatcaattttggggcaggacatcaagatagtgattattgtaatattttgaaaatggtcaattcgaaatattactgttagtcaacactatatgagagatcagtgagagcaatgctatatttataatgatatagtacattgatcattatgattctaatctattttggtgacaaattaagtcgttatttgataatacatgtcagatgaagaattattgataaagcttaaatggtctaaatatttagattctttgtgatgagatcaatggtagactaaattatctcataatttacattaactaattatcattgtgattaatgttttgatttaattaagaacctttaaatagtttaaaagtgtgataaagtccatatacattagtaatgacgaagatcaagtttgagattatctcacatataagcttattgaaggcaacctagaacttactcaagtatacgcattcttatcgtgatatctgttacaagcatgtcgagtacttaatgagtgtcatctttatggtaccaaggttgtgttagcaatcgacaaaccaacatcgtgacatatagtagttgattttagtgatatcgattggaaagatatatggatgataaaatccatttataagtattcatgattctaggaggagctattttgtaattaagtgtcaaattaaaatgaacacctacaactttctctgtcacacatgtggtataatggtaagaggagttattttgtgattaggtgttgtgtggacacttagagcttcctcgtttgtaaaggtagagtgtgtggcgtgttacgaggacattgactatatattaaactgcaatattttatttcaatgttaagagtagttgactctcttgtgaatttactaaacttatgtaacaaatatcacggtcatatctttctcttagaacttgaagagtattattgctccattaatggtgataacgttctatatatagtgagaaaattgtgtgatcctctattagtatcataacacgcacttacagacaacatgtaaatgactacaatgacacggcttacctgaacgtatgtactaagaagtcatttcttgtttggattgttagaagccaaaaatgtatttaatgagtggaattcattattttcatgtatgatatacatgtaaaagattgccattagttgttgaatacatgtatattctcacggacgaatctatatacaaggcccctcaattttttttttcttacttttttttagttatacttttgtattttttttattgatttttcattaaaaatttatttattgccccccccccccaactttttacacatttccccctcactaatactttctgactccgtctctattatgggtaactctttaatattgtgtgtgcacacttgttgatgcgagccagtggcttagtttcggtgctatgatcgagtggatctagatcagtagttatcattgtgttatatgaatgtatcataatgtattatatttgtatcttatcgatacaatatgatgcataattagtttta

SEQ ID NO: 320623 - DNA, 765 bp, Cannabis indica
gtctgtgcacgagtgactcttttattttatttgaaggggtgtattgtaaaaataccttttaaattattgtgtgtaaatttaaatgtgaatactataattatttttactttattacaaaattaatataataataagtaatattttttagtgtaatttttggtgttgtggttggagtagaaataatttttaacaccaaatttaatgatagtgcaacaccaaatttgatgagctccttggagatgctctaagactgataattaccaaggtttaatgactgacttcacacagtattggaaaacacactatgtcagtagtcataataaacatggacatttctatgccctcttcttataatttttttttattaaaaaaaaaaaaagtctcctctcaagtctatagttttttttgttcaccattaacaaagcacttcactaattattgcgaacccaaatcccaatgcctatctttccccgccaacaagctcaaacctgcttcctcgcgattttgactgctcttttcatatcaccatactaggcgctcctccgtagtctcgcttttcaaattaccaaattaaccctcctttttctactactatattttaattttttatttaagtaatttataatataaatatttaaatttaattgcaataattcttaaattatattttttaaactcttctataattacatgaccatcaaatattaagttatttttttattagtatatttaaataaatttttttaaaaatttaatgacttggac

SEQ ID NO: 320624 - DNA, 741 bp, Cannabis indica
aaaataatttccaacagtgatccttgcctgttgtttccagtaaatcgctttcctggccaaagtttcatttagggagcggtgaatttcacattccatattctaatcacgagctccagcaggtaacttctgtatattgtaagctccatatccttaatgacccggtctatcttaccaaattgagttctattccaataaagaagagccacccgagttgctccaagtttcttgaagactcgagcaggggcccaagaatgatcaaccgaaccctaagcgttggcaaccaccaaattgcttctttcatccctcgtccagctctcttcaaacttgaaacatcttttaaatttgacctcctgctctccagagactaggcataaaggtctatgatccgaggtacttgtctgagaggagcaaagaatagctctaggaaatagctggagccaagctccattcactaggcctttatcaagggttggtttcacatggcttttgctagaccggtgatcatcccaagtcatcttataaccttgaatatgcatattaacaagaccccaagagtcaacaagattagatatgaaagggataaaagggtcccttcccgacgccccatcgcgctcagagtcactaaggacaaaattggtatcgcctaatatcaaccagggacccccaaacctatccccaaggttcatgagttcaacctaaaactttttcttagcatgaaggtaaggagggccatacacacac

SEQ ID NO: 320625 - DNA, 1155 bp, Cannabis indica
aacaaaagccatttagttctacccaagcttcgaaagaaaacctgcataccccttcgaagaggtttggtaacatcaagaagaacacgaatacggaggaaaggacctgagatttcaagcagagtttgtttgtggatttcgatcaaatcaccaacatcatcagcaaccattttagcaagagcaggggtacgaaatccaaaagggatgtaatggatttgcatccaaaagggaacataacgaagctgctctgattgcagaagatcaaggccctcagggttggcaaagaccataagacaatgatcaaagtgccaaggttggccttcaacaaccctgcgcctatcaccctcgcaaccaaagtgagccatgaaaagtccagagtggtattcagaaaagctaacaggaaaacgtaatgtccaagcctccttcatagctttgtccagccagtccactttgatacttttttgagtaagaaccttaacaactaagcagaaagactctgatgaaggattgcaaccgagggaaactccatcaaagtcatgaatgagggcttcctcatcattaatagcaagatggggaggggaagaacgactagaactcgccataacactcagagaaggattttgagaaggaagaaagaaaaacacaaagagaataatgcccagagaaagagtgatagcgatagttaaaggaggataacatataaatagagaaaaaatatacctgcaacagagatacgcctgatagaagataggaagtacccaatccatctctccattaaatggagcctggcaaaatccctcgatgatagagataatcatcgcccaaatcccctcagttcccccactgacggcgcactgggaaagcttgtggttaaggaacaaataaggatcaaatttggactgatggtgtattaaatgcaaatagatatggttagatttactggggtgcaataaatgtctttgatttattaaccagaaaagacaaaaaattaaaagaaagaggaagtgtaatcgacggttacacttaatcatcacaaggaagagcaagctggagaaaccagaagaagaagggagaaccctaatagagcattccagagcttttctattaatctacaatgtacattcttaaaataaatatattgatgcactcttatctgtt

SEQ ID NO: 320626 - DNA, 1023 bp, Cannabis indica
agtaatattgtctgtagaagtaaatattacgacctacaaacgtgaattctacaatcaagaacaaaattaagaacttttgagtatgtcattagatctgcttgaagaaaatcgcaccaagtcacaagtaactaatgttgcttatcaatattgtatcactagatactttaataaaagagtttgaaagaaactcttcaatgtagaagatttggtgttaagatgtctatttacaaagacgcgagatctagcagctagagtgtttaacttaaactgggaaggtccgtacatcattaaagttgtagttggaatcaaaatttacaaattagcttggctcaatagctcgctaataaaaaattaccggaacaacgagcatctatgaccttattactactaatttatcttgtaatgctatactaatctttgtaatagtagttccttgtcttgaataaaaaatctgaatatttcaagtaattataaaaagtttaatttttttaaaattatttgggggcatatatgtgtataataactagactccaccaagaaatatatgcaaaaatactaaaacctagaaattaaatttttttcaccaaggaaaggatgccattttgacaaaagtcaagaattgaaaaaccttcccttaagtgaaaattgaaatatcattgagatttttctcttaaaacaacaaagagttaagtgtgatttgaataaataatagatcgcataatatagcatgtattatgaataagataccaacgtgtcttgaaaagataatacacaagcttaagtatgaatagaggtactactcgtatgaacaatcaaaaagtattcaaaaatggtttttaaaagaattgttcaaaatatttaaagtttgcagtaaacatagcaaattattaactgcttgtagaaagcatagctgaatattaactacttgcatatgaaataataggataagaacatattggtgcgcgtgcaaccctaaaattaggggtgttcatccaatcctatccgcacttttttggtcaaaca

SEQ ID NO: 320627 - DNA, 882 bp, Cannabis indica
cttaacaaataagtaaaattttaaacttaaacaaaatttgatgtatcaataacgtgataggttattaaaaagttttttttttattattttatctgttacaagattaaattataaataaatatattttataaaattattttgataaatgtatacaataacttataaataaaccaaataatattttaaacatcatatataagttacattaaaaaaagagtcaaacattaaatttagaaaaaattaaataatctaaccaatttcataagttactaaaaagattatttttatttaataattaaaagtaactaaattatatttttcatatacttatttttatagaacaattttgataaattttggcttcagtacacaattatttatgaatcaaggtgattatacctaaaaaattatcacaaattattttatatttagcataaaaaaacaactatatgatatattttatgcaatttttagcattgtattccatcatataaatgcaaacttgccgtaatatttattatatatatttaattaatatttctattaaaaattataaaaaaattattaatttttaaaagtaaaagttcttataaatctccggttgacgctgaggaggttcggaaagtactctttcaaatgcatcttgataaatctttttgttttgatggctttaatactggattttatcagaagttctaggatatcgttaataaggatatcattcggttagttcaacacttctttacttttggtgaatttcttgatcatttaaaagaaacgaatattgtgcttattccgaaaaagtataaacccgaaagcatgagtgatctaagaccaattgctttgtgtaaatgtggcttataaaattatttctaaggtgct

SEQ ID NO: 320628 - DNA, 866 bp, Cannabis indica
tttcttgatgttgtttatgatgaccttatttgatgactcaacttgtccattgctctgtgggtaacatggtgttgagaatacaagattgattttacattgctcgcagaagtttatgaacttgtggctaatgaattgggacccatcagctccgatttcttgagacaacccaaatttgcacattatgtttctccaaacaaatctctccacgtatctatccttgacttgggcaaaggagtcaacctcaatccattttgaaaaataatccgtgagagctaacatgaatttcttcagagcttgcgccgttggcagggggcctactatatccatcccctatttcatgaacgaccacgaacttcacactgtcatcaactctgatggggggccaatatggatggggcatgtttctgacatttctcacatttcctagagtaatttgctgagtcttcctggatcgtcggccaatagtagcactgtctttagattcgttgcgctgttactcgtcctccaaaatgactgttgcactcaccttcatgtactttcgtcagaattagttctccctccatatttcctacgcatttcaagtaaggcccatggtaagatcttctgtacaattggtcttgcagtagtgtgtaccttgaggcccttaacacaatttttctagcctcttttaagtctagtggtaatttatcgtctcttaagtattccaagatcggattcctcaagtccctcaatggctccgtcggtgttgctacacattaaacttcctcttccaacatgatgctaggttttggaataaagtcaaacaaaattgtttttgtaatctggagaggagaggaagatcctagacttgccaaagcgtcagcatg

SEQ ID NO: 320629 - DNA, 1709 bp, Cannabis indica
ctatttttaaaacaaaaaacagttttttagttatgatgtcaaacatgcactaaaactcttcaaatacaatatatagtaactaattagagggaaatatacaagtaatatttgtcctaaaattatctcatgtgtttgtttcgtctaggatttgtgtatcttttatatgagcatgcagttgacaagtaaaactgacttcctcacgcgttcaacaaatgaaagtggtcaataaagaaacaaagcagggctattgacccacaaaactcctataaaaagaaagaaagagctcgtaattatgtaatcaagaaacgtttattttgtactattattatacatattcaaaacaaaagaagaagttttattattaattaataagatggctccccaagaaaattgctgtggccataataataataatggcatgatgattcccagcttcatctactcttcttcttctatgaaaagtggaatgagtattccaattaggaataaggagagaatagtgattccgacaccgaaagaggagaagaagaagttggaaatgtatacgccggcgttttacgccgcatgcacgttgggagggattttaagcacaggccctactcacatggctgtcactcctcttgatcttgtcaagtgtaacatgcaagtaagtatatatactttcttcctttttagttattaattaatgatttaattccaatataattttgtccatttttttcccatatgtactacaagtgagtatttatataaatcataaacataccttaatattgagtattgattcttcaaatcactatatcaaaccttgcaagcatccaaaactaagtaatatggagaagagagattatggagagcaattctctcatgccaagccttaccacttatcataacaaccacataatcccaatttcccattatgtgcctaatactagcaattgttgactatagtttcatgagtcaataattcataatcattatggtgctattatatgcctcaaataatatatagttattcttatatgttaataatgatactacatgtttaataatgtgagtccatataaaatattatgcatttagatttaagttggtttgatttgatctactttgccttccaatagttagatcaaggttatcatgatccaatgattatagagattcacaacacaaaatccatattaatcttattcttatcttcaaaggttttagtttcgaaattgctaacataattaggttgcattttggttgggagagagagagagtaaagaaaatagagaatgagcaaatgaataaaacagaggcggctctcagaagaatcaaaaacagaactaacaaattacaactatatatgtaacccctcaaacttagtatggctaaagagaacatgaattagtgttatacaaagctttggtcaaaattaatgtctctactattgattcaaggctcataaagaaaattatggttcgaattcaatttttgatagagacaaggtaactctcccactcctcaagtagttttatgaagaaaatttcatttttttttcttttgaattttcaaaaggcggctttggaagtaataataataataatagtaataaagggtcaagtcaaatgtttgaaaggttaggttagtaatttaaatttatgcttaattaattttgatttatgggtaattaatgggttaatttcacaaatgcaaaaacacaa

SEQ ID NO: 320630 - DNA, 680 bp, Cannabis indica
taaaataatttccaacatacacctcataatcaatgatgtccatacagagtcaaagcccatcttaagcatgatagcctcaagatattgccattcaaccctatcaaacgccttactcatgtctaacttgagtgctaaaaatccaattcttccttgtgtcttatgacgaagatgatgaatgagttcaaaggcaattaagatgttctccgtgattaatctattggagagaaaagttgattgtgtttcagagataacaaagggcaataccttcttgaaccggatgacgattgtcttggagataagtttgtataacattacataaacttatagggcgataatccgtcatggaactcgggttagacactttaggaatcaaagtgatgatagacttatttagttccgtcatatctagaccttcattaagaacaccaagtaccagattagatactgaagtgcctacaatattccaataatgttgaaagaacattgcagacattccatcacaacctggactcttgtcaggactcatagactttagagcatcatacacttcttgacttgtgaaaggttgaattaatgattgattcatgtcttgtgtaatggtagttggaacagcattaagagtggttatgttagttaataataggattgttgattaatgactttgcatataattgtttctt

SEQ ID NO: 320631 - DNA, 611 bp, Cannabis indica
ttgggccctccacgtgtctatatatatgagttaataacggaattggtagtaacggtataagagaattgtaacattaggtatttttgccaccaaaaataaacattaggtatttaagtgtataaaatcgaaaacattaggtatttatatcgcaatttaccctttttctaaattatatgggatccaatacttaattttactcaggatcaggtttaggctaagacgggctaagaccgcgcgcttaaggaccaaattaaaaaaatatctaagttttagaaatatcatttgaattataataagagcccaaaaaattgtttttctaaagcccattttaacttaaaatccgttctaattatactaatagcgatattgacaagtaagaaagtattaaacaccattagtacttttagcatttttccaattagctactaaatctagaacaataattccattaagaaatatatttggaacaatgagaaaaagacaaattattgtaattccgtattttaatattccaagtttaattattaaattaagtgattaattaaatgcggaataatgaaattggtactgaaaacagtttttccgtagttacagaatacaactctgtaact

SEQ ID NO: 320632 - DNA, 1401 bp, Cannabis indica
caaatgtttctatgttaagtaccaataaactcaactttagctagcttaagttagttaaataaattcttgtacttcatctatatgtgtggcccataaccacataaaggggcaataattctggagaccatattttaaaatagtcataattcagagtaaaaaattccgtaatacaccatcccccaatggaactcatcagcaaatctgatcatggaactttcctgcatatgtatatgaatgacccacttttctttgtttatttaaactctgcgactagttaaccaagtttgctgggaatgggctatgaggatgatgatttaaaaattcccagtgattcttgaggtttatgtgtgtgtgtttgttttttttttttaatcatgtaccttatttcttatgtcataattgcgtcggaaaatgggaagattgcagtgccttgttggatatctttgaagtgataaagatagaactgagcttttctaaaatatgtttttgcaatgcacaatgtaacttattgccttcaatttttaggttgtgagtgttcctgataaaggatctctaaagcatcttcgtggtgatactattcaggtaaactgaacttgacagttttttcgttcatctatgaatcatttccccctattctctcaatagttttagtagaatgctatgctaaaagtcctatgaagaatttgtctgatgcactgggcctcatgccaagtgctttgctcggtgcagttaaaaccatatagatgaccatctgaattctgaactgtctggcttgctgtttgtttctttaagtatatttattaactaaatgcaaatgacattatgtgactaagttgcattttaactaaagtcgatttcatgcttgcagacttagggaattatgtgttccattgtcttgattccccttatttatgttttaaaccaatgatgttcttccctagtttatttgtttacctcattccaattctacctagattgataccaagaatatccttttcatatgtggtggagcatttgtcaatttggagaagactatttcagaaaggtaattgtttttttttcctttgttgtttcggatgatgggtgcttcttgtatatatttttcattttattcctccactgctactagaatttggaacctaggtagtgatcagtaactggattgaactttcagaaggcaagattcttccattggctttggagctcctgtccggacaaacatgcagaatagtacagtgactgattcttttgtgacatcatcattgctggaatctgtgagaatcaaatcctaacatggttattgagtttgcatctttatttttttcaaaatgtttgctttctgtagttttttttttttgaaaaaagaaagaggccattgtctaagacttgagtttgcatctt

SEQ ID NO: 320633 - DNA, 1973 bp, Cannabis indica
aaaggagaagaccctatcgagcagctaaggcttctgtcgcatgaggttgaggtgtcaaattaaaggggaccactaaaaaggccaacactatgctcgaagtgtctcaaatgactaccccaacacacttcttaaaataggttaaattaatgcatggatcaacattaacgttaagcacaccaatcggaggtggctactatttcgaagagataagtggagaaataagattcatgcattgcacttataagagtcaagatatcccaaagtactactaaccacataaattatctaaaaaaaaataaaccataaaaaacaatattatttcttctattccaaatttaccaaccgagagtaacaaacttttccatttcttattttgacgaaacatcaacaatgtcaataagaaactcataaaaggacattgatggatggtacttcataccattaagttttgggcaaccctataagtcataaattgtcgtcttttcattggactcacacgtcgaacaagtcttgtcaagtttcaaactatgatcagcaaggttataaatcgttggaatctagatcaaagaaaccttccacaaaaaagggcttgatttttgggggtaagctgcaagaccataaaaatttacaccattcaaaaggacctggagaggaagaggcttgtcgaagacctttgttgcgcaccacaacccaataatcatttctaactaaatacctcccggtcttatccaaacaccaaatcaattgatcataaattctgtacaagccactcaagatagagtggatagatattacctcatctggactgaaacattacatccctcatcaaaagttctaaggcatattatgtaataccctactagttcaggcgtgttgacgtgatttttaacttaattgtgcagctcgttgcttatcaacgagtttattaaaaatcgtgagtaattaaaactttaataaactaattacaaataccaaaataacatacttagattaaactgggatcccgtttacaaaaatatttacaaaagttttattatgcatattacaaaagtttgtcgcccagtgactatacaaaatgagcccagctgccccaaagactatacgctccaggcctaatcgctccgacatgcacaatctccatctgctcgctctcacagctgctcaaccttagccttgcccttacctacacatgcaaacaatatctgtgagtcgacagactcggtaagaaaagcataaacaataacatagcaataactacaattataattaggtgcccatgcacccaaccataaccctatctccgtgtccaatacagtactgagtctagaacgttcgtacgacattacaattgaccataatgtcagcctatactcaatatgttggtcatactccagccatactaatgtgacagcatcaatcagtatctgagccaaacatacatctatcggtattcaatatatctctacgtatactgatatattgtatttattcaaaagagatcttgtggcttgtttaaatcaaagatgatcaatctcgttcctgacaatcaccttagaatattaagttactcttatctagtcatattataatatttgtgtgtctatagttgattgtactcattgtctcgatctatgtgtgccaatttttgcacctatttacaccattgattatataattaactaaaaggaatactatgttatgaatatgtgttttgagaagtagattaatacaacctcatggactaaaaaataaataaatgttaagttactattacctagtaatattactatatatgttagtttatacttgttgccctcatttatttgtgcaaattcttgcattgctttacaacatggttcattgtagcacaaaagatgagtgatcaagatcaggagattttaattcaaagtaagatatctgttgaaaatattttaccaggatctagatttactaccaagtatgtttcattaaca

SEQ ID NO: 320634 - DNA, 943 bp, Cannabis indica
tactctgcaatagaaaggatcaaggattagagatctgaacggaatgagttattttatttagctgccatcaatgtaagttttctatacctttacgtgtttaattcattatttttagaaaattcatatttaggatgttagattatagaattataatccaacatacatgttagtaaatctaaatcctgataaaatattttcaacatacacactgtaatacctaaatttgttcatccaaataagatctaataattcactctattcctgagtgttgagattggcttggaagatcaaggtgtggattcttcaacaaagttcttggattggatgttcgataattatacgaaaagaaacaaagatatcatgataggcttcaagaggtataatctttctttcaataatttagatttaatatatatattatgttgagatcctttagatttaataagtatgaggtgcaacatgaggatcatgttgtcttaacctctgaatctccttatcttgactttgaatcctggcttgcaactttgcaaacctctgctcccaatcttgcagagcctgtggtgaatttgcataaccaccaccatgagcctttctacagcctatgtctcttctacgaggatgagggggattccgattcatcgaaggccaccaacctcaactatattatcccaacccctcatattttgctaggtgtccatatctataggacaagcttgcgaacccataaatcaggtcggtcagataacaatgaaaacttttaatctaactaccgcatacatggaaacttaatcatggtcatattttgatataaaactgctaacatgctttctatcattttttcaaatcatgcttgactaactaaagtgctaaaacacataaagatttactgaaccgtgagtcgagcttatctctgataatgattgtacatatcttgacgattttc

SEQ ID NO: 320635 - DNA, 1209 bp, Cannabis indica
attatattttgaaatgatgtggagatacatagcacatttaaagaatgttaccattaaagatgctctaatgggttgcccataaaattatttttgccacatatataatatggtgatcatttttaatgtaatttgattaatattattgtttatatttaacagcaatgtgccattactttataaaatttaataatttaaatggtaatatgtgagatcatggtggacaacttttagagttatcagccattgcagtaatttttgtatgaaaatttgtcaaatcttatgtggatgagagagaaaataaaaaaataatattttaggatgatgtgtgcacttttgacaattataagagcatctccaactataaaattcgggaacctgtatctacattttttaactgtacataatcaaaatatgttgcacagtgactacaaaattgtgagccctaactgtcccgaagatctaatactacaggtcaaactgtctcgatatgtacaatcttcatccagctccaaactcactgtcactcaacaacacctttgtctttacctgcacaacatagcatctgtgagtcaagtaaaaaagacataaaacataaacatacagctgacctggggctaagcatccatacacctttcaacaagtcataaaccatgtcaaacatgtataattgagtctcaaacattcttgaccatagtacaattgactataataccacatgcattcagtactctagtcgtactaatattggtagcatcaatccatactataagtacaaccagtcataataccacatgcacttagtactctggcgtactagtgttggtagcactagtttatagaagtataaccaaccatagtaccacaagcactcagtactctggcatactagtgttgatagcattggttcatactttctaaattccaaacacatatattcacgatatcaagatgcaatcatatatacaccaactgtcgtgctgactgatatgtcatacatttgacaaacataaacatgtacatatatatgtttgtgttatactagtcttacctcaatacttgtacaccaactatctagagttcaaatacttgtataaattataaggcttttacagtcttatcgtaataatattcactggtggacagggctcaccttgagtaaaattgggccctagaaaaaataattttttggacctttttttttttaaaaaa

SEQ ID NO: 320636 - DNA, 746 bp, Cannabis indica
aaaaagaaaaaaagtactcttggctctggtgaatgggacagacatccaccgacctattttctacgcacacaagtcatattatactatactataataggcctcatggtcttggtgggtggtagtattgttgatatgatcatcactattccttaaattaacatattgaattaatacacccactcaccttgtttttatttatttaagaaaatagaatatggaaatcatgtccagtttcatttaatccaagttccacgaaacgtttgtccttatatgtaaaatatatgtatatagttcatttaatttcatatgtattatgtaaatttgtctttttgttgataataattattaattaagtcaagacccttacaagaatctttccaaattaagtttttgttaagtagagatttaaaaaaaatccagaagaaagccattgttcatagtagacgattgaaagaaagattaatatataaattgatagatagataagtagtagtagtagtggtggtatagtagggtagggaaagaggagagtgtggggctgagggggcagaggaggcatgtgcacgcgtgaggatgaggatgacgacaaggatcacatggcatttgacggccgataactattaacacaagaccagaccagaccagaccagaccatgccttgtcttggttatcttatttatctcctttttgatttagaagagcctggccaatggccatcctttactgttatttttgcttaatgctgc

SEQ ID NO: 320637 - DNA, 570 bp, Cannabis indica
aacacaatagtacaattgagtgagagcgttaatcatagaaatataatctataaattctataactatttaaaagtaaaattattgtttcattagagcttggctaatagacataaatagaagagctcttatatattacaagaattatattagtttactatatcatttataagaagctaagtgttttattaaggatgttatccaattttttgcaccttgacgtggcaataggatcagatgacacgtgttccatatttcatttacctaggcgaaataaaatatcactagcagtctacacatgatcaatcaacatctgtactagtcggctatccgagctgtgttgtggagaagatatctgaccaggtacgagcatgttagcacgcacaatgctttagagatttatctcgattgtccagacgtgaagacaatccctataatcgtgagattgagtcagagagaaatggcaacctgtcctatttctgacttcgtatattgtaattatagaatcattgtaatttcctattttgtgcattgtatgtaaaaggaaaaccatccctcatgcattaagtccct

SEQ ID NO: 320638 - DNA, 760 bp, Cannabis indica
aaaaaaataaaataaaaaccaatcaaacaaatactaagaccaattcgagacttacgcgaatatctctagagagaggatgagagcagaggacaccagtgcaagtccgatcggatatttcaagcgccccaaccccattcgccaacttatcagctccattctgtgacacagccgccttcgatgaagcagatgacgccgcggctttgcctccccgcttggccgccgccgcggccttcttctgtgcggccttcttcttgctggcgtccgaaaccatccttataacctaatccaccaatcgaaacaaataaaccataaaaaaaactaaataaacgaatcaagaataccaaaacagaaaaattgagaatattatatcagaaatcgaaccttcgtagattgcagggatgggatctgggaggggcgatgaaggagaacgaaagagtacgatcagatctagggttttcaggcgttggtatagatgaacggtgatgaaaagagtaaagaatacccaaagagatgagaaaaaaagggttagaggatttcggaacaaggaccagagttaagaatttatttataagggagagtgggttccacgtgttccttgtatatactgttctattttaatactagtagtactagtccaacacattagggcatacttttttctgttgtgtgagttgcgtatgcaatcacaatttttaaggtcctccctttgaaaaaaaaaaaaagataaaaaagccaactagttaggtcggtctgatatttt

SEQ ID NO: 320639 - DNA, 1205 bp, Cannabis indica
ggggtatttataggccaactccattgcataggctgtctttgatggatcactgcagggatgaaatcctatcattatattggtaggtggggaagtttttcatgtggcttttatgggtgttagaatgtaccgactgtacaggctgggcttcagacgcgtgctacctcagggtcattcttatttgaattctccttgctcctagtcgttggatcattcttcccagtacaaaaagacacacatgctctgcaggatagcgcgtcatacgagacagcctctgacatcgtacatgaaaaagcctggtcattgggtccatagcctgacacgcgtgggcttaacctccatggaccaaatgcgtacccccgactggtgcctcctcaaggtgctttaacttggcttgagaagatcgatattcctcgcgggagcaaacggtcttagatttttggattgaatgagactctagctcacagataccctttgtatggccaattggccgtggagacttcttttacggagacctttctcgcgaggttaaatgtctttgtccctcccggtgtgctaagttaatcatttgggtagcttaatgactccttggccttcattgattaatatccacgtatcgtgcttacaaaaatatggataacatctaccattaccatctgagctacgagccttatgcttgtgatacatattttatcatgtcgataatttcttgtcaagatagctctatgatctctttgattggtattgctcataagtaatattcaatttataatccatccatgggataggttcccttttatttttcttttgtgaggagaaaaaacctacttaatttagtggttagagtattgttttcatacggtaggagtcattgttcaaatctaacagtaggtagaacttagtagataccaacgtcagtagtatataatgagtttttatagtcatttatttttattgattctttatatttttcatcctactctattgaattttataatttcaaattagttcattgcattagaattggattctactttgatttgatttgattctcattcaattttaatttgaatcctcataagtaaaataaggtgtataaacaaaaattctagatgtagatgctacatagatggttctcattctttagagactacgattgtaataagagcatccgtcgacaaaggatcaccctaagatgatcatctcat

SEQ ID NO: 320640 - DNA, 672 bp, Cannabis indica
tattgaaaatatttttatatgattaattctttcgtacttttatttaatttttttttacataaatatcatcataataccgttaaattgtacgacagtaaatcataaaggtttcttaaaaaaagagaaagaaaagaaaatcaagagaaattgaaagtgactcaattaaaaacgtataacattaattcaaatgaatacgtcgaagttgatgaaacattatatgaatatatttccatctcaatttgtttagttattactagctaggactcttcaagtaattaattaaataactaacaaccattgacgtttactggtcccctccattaattgattggatccagttgtattgcgatgtacgtacaaatgtgtctgtaaattaaatcaaataatttgattgtatgattgagatgtgtagatatgcggtacataggaccacatatatattatctattatgtcttcatcaaatcacaaagacatatgtattaaacaattccattttcctttgaggctatgttttaaaaagagtaatttgtgtcataatttctttaagtggccaagtttgtgcaactaacttctaattttaaaattttggtggtaaaacctcttaaacttaagttctgatagtacttagccctttccatccatttttgggtgttaagtgtcagattggaatg

SEQ ID NO: 320641 - DNA, 1160 bp, Cannabis indica
aaaaatataaaaataaagataaaagttaaaacaagtgggcatacaaagtatagataatttttgaagcaacgaacaaaacattggtgtttcaaaaagagttgaactaaaatatattattttaaaatttaagtttttgttaaaactcttttaggacttattatatcatttagagtgagaatttatgtgtgtgtgtgtttttatatagggcccttgttaaagacaaattatggtatttttataaataactagaaaatatacatattattttttttaataaataattggacacaagcctatcccgcctttgtctagagtcgtttaaagcacggcatggatgtttacatgagcttaccttataaaaaattaatacgacacaataagtttatattttttttttccaaatttatacgatacgatacgacacgacgatatttttacaaacttctgaaaatatgttccaacattttttttcaaagagtaaaaataccattgaaatatgtcttaatctttatacttatttctatttgtttcttttttattctcaagataccataagctaatatttataaataaattttagtcaactttaattaaaagcaagaagaagatgaacataagtagtttagtagttaattatgcctaatccatgagtaagatcaattaacttctctatatactcatacagaggttattttggcatactttctttacaatgaattttgcatgaaaactcattttctattaagtcttttacaaataaggtattttaaaaattgcaattagataaataccacatttagaaactttgtaaagagcaattttggactaggcccatccaaaaactattgagattcggcctaatactgttaccttactggattgggctcataattgggctaactagtgaataaatgacagtttaaattggtatttttcgttaatacaaatctaacttggcagattttgacctaaaaaaaaagataaataaaaaaacatgagaggaacataatcatattgaaacatatatgcttaaattgtaaatatttgtttcgttgccaaaaaagaggattaatcaaaatgtagatcaaaacaatgaatatttccctctaaaaaaaaaccaaggaaatatacatagtgttttaataaaaatgaaatgttgg

SEQ ID NO: 320642 - DNA, 594 bp, Cannabis indica
ttattgtgggtaaattttttttaaaaatactgtattgtgttaagtttttacggttgttccacgattattttttcagttgtttcacggttatttattattatattttactatattctattccatctaattattatacatgttataatgtcaaaactttaataagatttttttattttgtattggtcaagttttattaatttgatttgtaaatttttattataatttttaataatgatcatatgtaaactgttcaaatcatattacactatatttcatttttgccgtgtggttttttgcgattttaagatctcgcggtgcggttgctgtttgagaaattataaaaaaatgcatatgtagtttggtttgaaaaaattattacaacactacccgtatcgcaaataccctaacaaatatacactttgctcaacaaaaaataagaaaacaactaaaaataatgagaaatcaatctcgtgacaactataaataactagaaaaacagtttcatgacaactataatacaactataaaacacgatttattatgtttattggagatatatttttgtaaataaaaagtttaaagagtaaaaataaa

SEQ ID NO: 320643 - DNA, 673 bp, Cannabis indica
ttctgggtccgccactatatatatatatatatatacaataatttgctcatcatactaactcatgcaatactacagcaaaaagagtacttagtcattttcttaagttagaaaggatatcaatatatatatattgcaattgttcgcaatcaatgtctatgaaaagaaaagtaaattaacactctttaaaaacaaaactattatataattaggagtgctaacaaagatttagagcctagcctttgggtgtgtttttagaatagaataaaaatttttttgtcattttaaaaattgaatagtgtttggctcatatttcttaaaactatttttagattttttttattgaaaaaaatatcaatatctataccataccacgatataaacctaatccactttaaaccagactttaaattcagactcggacctcgtacctgaaccccgaccctggacagaacctgtgtctgaggtttgggatcggggattcggagtccagatcagggtatatgagcaaaatttaaaaaagaatatgttcaaaaataaaataaaaaaataacattttgatgttatttgttttcacttaattcagtttatagaaatctctgtttttaaaaaatttagctaaacacatcgtctagtttttaaaagtttttttatttttttattttctgttttaaaa

SEQ ID NO: 320644 - DNA, 824 bp, Cannabis indica
taaaaaatctgaacaatctatttaaaaaaaatgtatatttggaatataattttttttagtgtaataaagtcaataagaaaaaaaaatcaaacaatctaaacaggagtccaaaatctaaactgaatgaataaaatttttagaatataaatatttcttgttgcgactgacatgggccattacacaatagtcaagtaaacatgaacaaattttttaagtacatgatatatgactccacaataaatatctttattactttgctagaaaaagtagtaaaataattaaaagaaaaagaaaaactaacatttcattgagcaaaatagtacaaaactaacattcagagtagcagatagaaaccaaggaccaacccttaatgcagaatagtaaagctaaaaacaagacacaaatggactaaataataacagaaaaataaattagaacagaggaagcaaaatcactccctaaacagaacatataaaaacaagtaaataactcagatagaacatgaattacatccaaaaccagcaaccagtcatctagtaccttaattaggagccactctgtgacagtcagcagtcccgtgatccgtaaggggaaataccgggtaagctgtgcaatctcacatcgctgggaaatgtcaagtgggatgattctgagactgtgtaggtatgggactacacagttgaagagggcttaaatggattggttggtactacctatatcaacaagctgcatcttgtttttcggtagtccatcatgaaagaactccacagttaagcgtgcttgacttggggcaattcaagatgggtgacctcttggaaagtttt

SEQ ID NO: 320645 - DNA, 1957 bp, Cannabis indica
gtctctttaagggtaaaaaaaaagtaagaggaaacaacattctgagaagcctggtccaaatccagaggcggtggatgagtccacgagtgacggttatcactcggatcatttttctaatgatcctatttacaatgtagcaatacatgaagaaaatgattatcataattttgattttactcctaaggaattttcattcccagttgttcatctagacaaccaagatggtgatctagataaccaagatcgaagaaaataattttgctattgaacgtgtaattaaaattttgttataatataaagtatttttcagctgttcttttaaattttcttaatagtcttggtttttttttttatgtaattttgttcaaattagtaattgattgataatttagttggttaatttatttttttagttctatacattgtaatacataagaggagcagggtcggccctgaaaatttatgggccaaaggcaaatttgattttggggcccttcaaaatatatacaattttttttttgaaaaagaatgttatgggattcgaacccatgacattgtataatatgcgatacaccttaaccaactaagctatgaatatttgttgtatacaatacactaaccaacttcatatggtgtggccagtaataccacaatgagtgcacaccaaattcgatcgatgtggctatacaactctagaaaattgaccatggttggatccagatccagatccaactttatcactttcagtggaagcattcgacagacatctttgactctcttcttgtatgacatcaacataggatttgttgatattagggatgtgatcttgcatcaagatctgagatctagctccattatacgattcattaagaccaactaaaaattcaagaactcgatcttcattttggtaatcttgaatttatcttgatagcaccataagtacaaataggttgtgttctatattcttgaatcaaatcccacagggatttgagttgagtgaaatttgaaccttgaacaagagattatttggttcaaatggcttcaaaaacacgaggagcatttttctggttaaatctttcttcaagattagaccagatcgtagtagcattatccatatacatgatgctttcagctatttcatttgacacaacatgaagaatctaggaaatgacagtgttgttgcatcaattctatagttcaaattcatcatcgtctttttcaggtgtagggagcttgccattgacaaatttgaacttattcctcgcgattaaagccacttgcatagctcgacgccatgagctaaatttttcataaccaattaagatctttagaaccaagctggctccaggataatcactgctagaaaggaaataaggatttcgagcatcatcagagaataatcgagtgtttgattctagagagagaaaagattggacatgttcgagttacgagtctgaattcctccacctcgagccatggaggaaagaaacaagaagaatagctacaggtgaacctgttccgataccatattagattgagagagaagagagaaataacagaataaacaatactctatttttattatagtatactgtaaagaccacttagtttttaatgagaattagtagataattagggcttaattatgaagctagattattatttatgatttatgattatatggagatttatttgaattcaaggtgtattatttatgccatatatgaaattttacatttttcatgttttgtgcccagcaatatcggaacacatcgtttagccaatagaatcacatttaagtattataagttttaaaggaaccatggccgtcttaaacattttagaggccctgttctaattttaaaaatttggcccttaataaaaataataagtataattaaattctaagttcaatttttttatttatttttttaggtagatcaagtttaaaaattta

SEQ ID NO: 320646 - DNA, 996 bp, Cannabis indica
tgttgttttgggtgtttccacctattcacagtcctagttggttgaagattggcctttgggtggctcgctcccctcaaggagggaatgcagtcccctggctagcctgaggtgcaccaataggtggctggccaaccaaaggttggtcgatggggctgttattgagcctgagatccctggtcggccccctagattgctagttgctgagatatggctattcttgccattagaccttcgtggcaagacctgttctcctttgggtaggggaaggtgtgtcctggttcctgaagaaccttgtaggtcagcatgctgataaaccctccccgatctgttaactagtcttccttggagtggatctttgatgagattctagtctcttctagtggttctttaattgaactgccttatcatatcattttcttctccattgcgatgatccagctccgccaggtgagatcagaggatgtcctcttggtcatccatctatcttaggaattcacgtctctattgagagaatacatcataatcagcaacacatggttcttcagttaggctggcttggcaggcaacctctctaagtttggctaactcaagatcttctcctaagtccacatggggcttgctaatagcaagctcaccaattcttggtcctgtctctctagcatagtaccaggacgaggtcaggttgttattcctaggggttgttccccaagggtccttccttcagtgggaggcaccagtggagggtcctccctcagaggcaagggccgattattcagatccaccgagatgtttgtgtcactctggccagctgtagtgactagatttaaagtgcctgctaaaatggcaggattgaccacatttgcaatcactactacaaaatagacttttggtgtcagttcgagtgatgttttcttttaaaaaactgacactaaagactaccccaactctttggtctcgatttataactgacacttataatgacttttagtgtcagtt

SEQ ID NO: 320647 - DNA, 970 bp, Cannabis indica
tatgaaacttataaaaaaaaaattaaaaaagtaaaaaatatcgcctggcagtatttttgtaaaaaattagcaaaagttagtataccatgtaaattttcttattttttttcatggagttgggaccagcagggattctccttaaatggaatggggacgaaaattatttttgtctctgaatattaaacgaggcgggaacggagatgacactctccaccctgacagacctgtttaatttattaattatatttttattagtattttataatttataatatgtgtttgtaattcttttagtatattagtgttatttttataacttttaaagttgtgttttttttttctataataattagtatatttaacaataaataatgtgtaatattttaatttttatataatttaataattttatacatttaaatttttaaaattttttttttacacttaagggatttttcgccctattcttgtcccattagggaatttcgcgccgtccctaatacggaataaccggaatgagatgagaatagagattaaaatccttaatagggatgggggcgggggaacactccctgtaaattctcggacccggccccatatctcaacttatataaaattaacaaataaaaataaaaatgaaatttacagaacacatttttattctttgtttttaaaattgaaaaacaaaaatggtcatagaatacatttttgttttttcaaaaataaaattttattaaaaacaaaaattttacttttatttttgtgattaaaaaatttaaaaacaaaagtattatcgaacgccacattagttaaacaaacacattaaatttaaggggtttttacattacatactgaaatttttaatctttttatttttttactgtggagtaaatttgttttcaaaaatattgtgcaagttttatgctgtgtactatgttaagtttttacggttgtttcacggttatgtttt

SEQ ID NO: 320648 - DNA, 1192 bp, Cannabis indica
ttttaattattaaaattattaatcttatttctatgtattatttattattaactttaaatcttatttatgattaaaattaatttattaatcatatatataaaatttatttttatggaacaattactaattattttaaataaatttaaaaagttaatttttaataaatgtagtaacaatattaataaattaaaatattttttatttatttaatcgtggtaccaattttttttttaatttttttattaatttataaagtaaaaataatttatttaaaataaataaaaacattactagaattattaagtaaacaaataatgaaatattttgaataatttatttacattatgacataatatttagttttatatttttaaaattttcaattaataattttcttatttattaaaaattttaatttaaatatcttttttcataagatgtaaattattaattttaaatttatttaaaaaaataaaatttactattattattttaaataaaaaaataattttattaataagaaatttatttttttaataaaaaataataaatttatattatacaacttatctttataaactattatttttttttatttattttttcattattaccaacttttttttttcattagaaatttgataaaaaaaacataaattttcacaaatataaatatgtgatatactttagaccaaaaattatggaagttatagcttggagtggcttaaagaccttcaattaccagtttactatatagagaccaattctctattagtggttaaaggagtgcaagctcctcttaaataatatttcttttagttttcaattttcttggggctcaaatttctcatatttatagatctgctaataatgtggttcacttgttagccaaatttactatctcggtggattctaattttgcatggtgagaggaattacctcttccaattatgcctattgtattctaactttgttatcaatatattggcatttttttctaaaaaaaaaaaaattgtgatatactttctccaactcaaagttccaaatccccaaaatttgagtggcaaaataagaatttggagtattaaaacaacaaatcaatctcagcaaaaaaatagttaaaatattaaaaataatcacaatacagattgttatatatatacacaatatatactattccttaatatatata

SEQ ID NO: 320649 - DNA, 821 bp, Cannabis indica
ggatgcgtgtgagtgaggacaaagcacgctgaaaatactcgtgttggtctgtagggtcagtcatcaatccatgaagcagccagagtgacgtactcgtgtataaaatttattcattccgtgggtgtaaggacccaatggaggcttgaagcggggacgttacaactatactgtgaaatcaagtaattttctaggatgctctctagcagaagagaatcattcatccagttctgttactcaagaggcatggtggatatccttctagaacctaaattagcttctttccaaagtcaaaatttttggttagagggctatgcataatattcttccttgtgcgacttctttgtttcagaagaagactctaacttcagcagcttgtagtctttgtgctaatgcttagaaatcggtgggatatgccatgtttagttgtaaacatgctaagaaggtttggagtcactcaaatttaacatttgatttcaaagttgatagtgtcatgaaacttagagatttttttgttccatctttcgaaaactcacaccaaatctgagttggaattttttttttttgcactacgtggtatatttggtttgataggaacaatattattcatgaaaagaaatcttaaattttagatgaaatttatgctaaagttgattcctatcttcttaattactaaaaccttaatgtgatttttgtaaagcccgcttagttaatttggaaattatcagttggttatgattaattaagaaattatttatagctatttaaataatttattactgttatttatggaattcagtagttgcatattttgcatttccggt

SEQ ID NO: 320650 - DNA, 1411 bp, Cannabis indica
tttattttgttttgatactaaaaagtaaaataaaagtccaattaaaatttattgttagtttagtaaattgtacccaaaaaaaatcaaaaagattatagtttatatttttccaagcttatctattcaattcagattggtaaaattaaataaaattattaagtgtaagtgaatataaaataattcacaaagtaatacatgaccaaaatgtacaaatatttttttttagatctatatcaatataaaataatttacaataattacataactaaaatgtacaaacatttttccaaattgtaaggttataatttgtgaggatttagatgattactgaattgataatctcttgaaggtccaaaacaacccgagcttcaatatgccaatagagtgccctttgttgaaagagggtttgaaacgacaccgtatagagagctaatgttcaaggaatcaaccattgtttcatcttgatttctaataacattgttgttgcttatggggctggagaagcagggcacgttcatcgagtggaaaacaggttttgacttgttgcaataaggtgatgaagaattatttaatggtggtagaccaaatcggcccattttatttccaaaagggcttaatctactcaacccatttatgggaattttcttaccacttgaactcttttgaaaaaccctgcaaattacccattcattctgtccaaacaaaaagaaaaaactgaattaagttatgttcattaaaagaaaaacagaggcaaaagtcaagggaaaagaggcttataccttttcggttctggggagattatggactgaaaactttcattctaatctgtattcatgcatgacccagttggatttttctcctttcagaactctgcctttgtagaaaaccagcgttttcttcatcctaacaagagagttttcctttgtaaatctctttatatttctctgttgccttccagtacccagctctgttgctctgtttgttctcagcccagttgggtattttctgtgtcttacatagaaaaaatatcgttctttttctcctatttttggctccggtggtagacgggggaggagtggtgtgcgcgcgatggatcgacgatgacaggcgacgttgaaatggatgacgataggtggttgaatcagggtttcaaggactaaggagggagagagagaagaaatgcaaatagagagaggtagaagagaggggggcggctgagagaggttgaagagagaggggcggctgagagagttagacaaattgttagggtttatgtttcttatatccttatatattcttttattaaatgatttttatttttgagcttttaaaaaaaatacatttttttttgttgaaaagtttctcaaatgttaatattgttatatttttttattaaaataaaagggtatat

SEQ ID NO: 320651 - DNA, 723 bp, Cannabis indica
aggctttataaagatctaattattttccttgtaactttatttatgggacaatagtatgggaatttatccaacatatatgaatttataataaacaatattaatttagattgatattagtagaaaaggaagtgtttacttatgagatatgagaatgagtagaataaagattgtaatttattatcttgtttactttattaattttcttaagggatgagaataaaatatgtgagtctcccattaatttgagactaaagaatcagattagcaatcttataagggtagtgtgattgtcactcatttttttgaaaattatgaaatatcatttttactctcttttaattatttttattaaaagaaaattaaaataaaaatctaaataaatttttggtaattgtaattttgtaacttaaaataatttattataattccaaaaaaatgtaaacatatcaatgagaatattgtttattttgattttgaatcccacaagtcaagtaaacaacttattttaattttgattcatcaatcggattaagggtaaatttgatttcaaattaatttaattcttagtcattttaatgatgtgaaagtaaatggaccaaaataataatttgagaaaaaaaatataattctctgtatatataattatatttagattcaactgcaacattgtaattgtagcaatatcaaccatttataatcagggccggccctaggcataggcgg

SEQ ID NO: 320652 - DNA, 1963 bp, Cannabis indica
aaactcgaaagcaaataaaattagtacagtaagaaaatagagaggccttcttcgtgttcttctctagttatagtcccaaaagagaagagtatagatagcctggaattaccaaagttgcctggatctcttggtggaaccgccattattgttgctataggaaagattgatttgggggactgtaaaagcatcgtcggcccaccttttagtggcagcgttggttttgatatttgtagcctcctttatctctgaaaggcggtggttgttgttgttgttgtagttgtacatggaagaggaagaaggagctggtgcttgagggacccaaagcccagtattctgcgaacccagctggttgttttccatatcacaatcccaaaactgtgatactaatccagcatcaccctacaaattaattaaagcaaaaattaaaaagattaaatctttattgaagattgcatgaaaaagagagaacccaccttagagaaaccgaaagcggctgaggaagaatcgagaaaatcttcgacgtgccagcctggcagggtctctatcaagtactctgatatgctgcttgttaaagccgtaccagtgcccacatcaccgtttgtggaagttgttgagctagtctttggtaatgaattataattattattattattatttgttgggtttggaattggaggcgaaacggaagtgaaggattttttgacggaggagcactgagtggtggtgtttgggcaagaaagagaatcggaaacggcgtttgtgggagaagattcgtagagcttagaagtaatagagagcttaaccccagttagaagatacctattatgcttctgggtgtgctcgttcgctgcgtgaatcggatagtcacactctctgcatagaatcgccctgtcttgttgacagaacaagaaagctcttttctcctatgtacataaacaatttcatattagattcaattatatatgtttatacataaattatatgatcaaaaaagagagagcgagagatagagtaacaaaagtacctgacaaatatcacagagggggatttgtttggaacaagggtggagaagagagaaacgttggtgtttagacgcaagcttattggcatggtggacgtggtggtcgcaagtatcgcatagagcagcctcatcggcggtgcagtaaactgaggcatcatttttggtacatacatcgcactggatcttcattctttttttcttttcttgggtgggttcagtcagagcgagagagagagaaaggaagatggggtcagagagtgagagagagagagaacgagcgtgagtaaagagaataaatacaaatattacaaatttactctgttcacttcggttaaactaaataagcgctggtccaatttcacggctttctaaatatagttttaaactattttagaaagaacaatatctttatttatttatttatttttttgaaagaacaatatctttatttttattacacaactactatttctatttcgtatctatatctaacaataaaatattgtcacatcttactttaaatattattgttcatcaattcctactatttcactcataaactaaatgtcatattttagatacaatcaaagacatctctagtagatagggtaactgttggaaaattctcattacaagagataatagaaggattacaatcaaaatactcaaaatacaaataaaaatattttatcaagattacaagaaagctagagaagaagaagaaggataacacacaaaaagcttgaccaaggctcaaggacctttgtcctaaaagtcatttcctccctcatatggacacttagggaaactctagaaatgcttttaaggatttatcaagcctcatatgctcagcctagtgtctaaggatgagcatatcctcacaaggttctaaccacaacaaatggtttcaaccacttcttatacaagtgaacaatatggcct

SEQ ID NO: 320653 - DNA, 1542 bp, Cannabis indica
gaatctgttagcgacttctgaagttgaaatccatcttttctgatatgcaactatattccttagctggtcaattttttatgagagtttgaactaaaaaataattaccgttttggagccacgggctctaattgcacttctttgctaaaatctgtattcatgggagaaaattgtcttgaaatgttaattgtgcgcatttagtagtataacatttaagaaattacatgcttttcataatacatatattagcaaaaagtttcatgatcaattcctattgacagtagttcatatgccttgttaaacaaattcttaaaaaagcagtattgctacttataggactcatgactcctcttttcagggctgctacaagagcttgtcttgaagacagacatggctgggcttcgtctgtattcccgacaaatgacattagatctcgttcggcagcaaaattaccgtccttgggaaagcacaagctccctttccctgatttgaacaaaccttcgaagtcaaaattcaagaaatcagttgagaatggtgagctacgccaccttcccagtgagcagaacattctccaaccgttgctaaccatggcagcaccaattgatctcaaccttttcagcccgagctcacccctcagtacagatattcagattgatggtctggaaagtaatttgtcaactgatttggataagctagctcccttagaagaggatggttttgaaacagttgaacacagttatgttcctgacttaatcaccggtcttgatgactgtaccttatctccggaattcacagacattggttagggcgaatctcaagctaggccaaaaccaaaagttctgtgctaaagctgtcataaatttggaacagaaggactctctcatctgatctggatcggaaataatgaacatgaactttaaagcattgtttttctcatcacacatcagatgaggaagttcaaaacatttgccaatttttaccagctggatgaagaagaacaagagctggtcctgctgaggagggagccatggttggggttgggggcatttgaaatgtaacataaaaaaaattttgcaagttcatttctcacttgggaaatctgtgattatttatcggggctttattagagatgttttgtgaatgagtagattttccccaatagcaagtagtaaaaggaaattcaaagtctattgattaatcaaagaaatggaaagaaaatcttaattaagcttcctttctctcacacttaagtttacaattggacaagacttgcattttccttcattatgttattgattttatatatgtggctataaactgaaaaacttgttattttttcttttttatattaaaacattacaatttaaatttaaactcaatacatatatctcttttttcttttatcttttaaatattacaattcaaatttaaaactatacatatctcttttattttatattaaatgtgcttatattaggaatacttctcaatgggtattacccattaatttttttttttaataaaacttaacaactttattaacta

SEQ ID NO: 320654 - DNA, 697 bp, Cannabis indica
tataaaaagcaagtgtccttttaattttacataactggtctgttttagaaccgttttccaataaatgacaatattaaatcagaacaaatgttaaagaataaatgaagaacaatttaattcattcttatattaagtgtgacaatgtatacgacttgatgagcacgagttgcatgctcatattctcgcacaaggtcgcaggctcttagtgcattttgtattcacttaatggctcatgggcatatcattcggatgtctgcattcaccttagattacataaacatacatcttacagattgacgagtgggacatgcgagtccttaacgagtcgttgaacatgatcagtcattcagatcaacttttatgtaaagaagcaatcttcactagtcgcgagaaaggtctacctagtcatcgcacatatttcaatatatacgcgactagtattaaacccttttggtcccgcttgtctttgactatgcagtgttggattaaaatcctcaatatgggctcatatgtatattagtgtattgctatttgaagtttggcccaaaataaagtgatcattttagtaattgtgggtcattgggtattaaagtgtcatgggctaaatgtgtagacctaagcgatatttctaatttattgaggggctaaattagaaatacttaaaattaataacctagctatgaggttataaattggt

SEQ ID NO: 320655 - DNA, 885 bp, Cannabis indica
ccatgtgagatgatctatcttaggcaatgtaactaccaccacttgattaaaaatgaagggcttaaaaaatgctctcacatgtgagaacaaaagtagtaccttcacttaaggagtaccctatccttatatatatttttccttcagagaagttacttgtctaaatctaaaatctctttctatataaaaaggtaacttccccatttaatttcttttttttaaaggttgcccattttagatttagatgagttcaattttttttaggaaacaaaatcataattatagatttttttataagataattgtagaatctttcaattttttaaaccgttaaattttttttcaattattaaaattgttagatttaaaaacttttatttaattttactaatgaaaatcttatctgaatgaaaattgaggggcatatatatgttaaagttcagtggtataattttatagatatcaaaattcgaatcggtacattaataaaattgaatgaaattaaacaaaaatccttaaattcaatactctcaataatttttttttttagccacttatagtcttataccgttgaaagacataatttagtacattttaaaattcagacaaaaaatcttaattagtctaaaaacattgatttaatgctaaattaaatataaaacaaattactgatttcctttattttttttttaaaaaaaacttaaaccttaaatttaatcaaaattggaaagataatagtaagaaacatgtattaaatttaattcgtttcatacctttggaaattgtaacgggtatggtcttaaaaaatctagtaaaatctttttgtaaaattagttttttctttttttttttttaaaaaaaaaaaatctcttttgtaaaaaaaaaaaa

SEQ ID NO: 320656 - DNA, 1180 bp, Cannabis indica
gctgaattttcatgctttctttttttattcaggggaaaaacttctacaattagagcacaaaaagggtattgttattcgcttcacaattggccacaggtaaaccagttctctggttattctcttacaagtttactagattgatgaataaaccacttgtttgtataaatcagactctagacactggattcttataaatagtttttttgccatgtccattggtaatgagtttatgatggattacttttatgtaccttttcttgggataaacttttttcattcattccactatccatgggatcataccaatattgtaccgttttccatctgtaatctattgtgttgccattctttttcactacatcttctcttataactcaatttccatactagaatgtaaaataaatttgcttttacactcctctactgcttgctcttttgatgtgtaccaatagttcgctatctagaaaatcaattagcttataaatcatctgtattacttctgtacacaacatggagtaattaggacagacattcttttttttttttccatgtagagactaactatatgttcgttaactatataccttcaactctctacttatgcaaaggtaaattctatttttacttatataactaaggattatgtggctaagaaatagtttgataaatcttttggttttccattatgtgttttcttatcggatgtttatgttgcaccaaaataaatttttgtcattgcaactttagaaatatcaatcctagaatttaaatgatgttgggatactaacacaacttaaaatgacatgcgtataaaagatgtactataaattctatgatttgatgtgttataatgtattttatacatttatgaatgttgatgaaaaccaattattatagtgctattgtccttccttttgaaactgacctgagatcctatttgcttattcactcagtgcaacatccaatagcattttagacagagccattgattcagaagatgctcaacataaagattttcttagactggtaagaaatagagctctttatgtgtgaaagtcaaaatggataggaaatgaatgtggtattgatattgcattattttaaaggaacatgttgaaggatatcatgaattatctgccaagacaaaaatttacttctctactgcagttgcaaaatggga

SEQ ID NO: 320657 - DNA, 1417 bp, Cannabis indica
ttcctcttgaaagctcttacaactaatcactgcgtaactttctcagatcactattttctctctagagtatatttttgcagtaattctcttgatcattttcatagtgaggctaagtcactatttatagggacttaatgcattagggatagtttccttttgcttacaatgcctaaaataggaaattacaatgattctataattacaatatatgaaataagaaactaggataggttgtcattttcctctgactcaatcccacgattatagggattgtcttcatgtttggacataacgagattattctaaagttgttatctcttgtaagtcgctcgacacaacagacttctacctagtcaggtatcttctccacaactctgctcgagtaatcaacaattatagatgctgactagtcaggtgcaggtggctagggacatttccctttgtccattgtatcagaaatataggacatgtgtcgcttgatcctatcaccacgtcaatgtacaaaaaattagataacatttacccttcaagtctacgcgtgaccttcctggtcgcacgtcgacttcactcaacctggagtcttgtttggatgggtgacatgtgtcttaggcgtcgaatgacaaactgatgtgtccctgactaaaggtcttttcaattttggatcattaatgctgattgacagttctgcctcgaatcacaacttgatgtccgcgcgtgatgacagttactctgcctgatgagtacataacatataatttttgggggaattcgaggagtttatatttttgaaataattattttcctttttcaaactgtttataaataggattgaaaacatctagtgaaccttttagccatttttattcttgaaaaatcagagcgaaaaaatcttaggcgaattttctctcaaattcttcgaaggattctcaagaattgtcgtttacttatattgttgtcgtttttcttaggcttttctagttggtgtctccttcccgttgggactttgaatataaattagttttgttagttttcatttcatcaaagaaaatgtagtatgtacaaagtaaatttaccattttgaataccctacattttgacttaataccagttttaactcaaactcttggtaaaaacactcgtcgactcaaatttgctcaaatataagtccgttaaaagttcaataaatggcatgaaatttgaaaaccaaacttcccgttctaatcttcaccaaataaattgatttcataattctgattctgctttgacaaaatccaatcacatttttctacaaaataatcaaacaggacacacattgaataaaataatccaatcacattgaataaaagtaagtactatatatatgcaagtaagtaaaaaaatgcctaaaaaatgtccttttattttaatttattgtttt

SEQ ID NO: 320658 - DNA, 1702 bp, Cannabis indica
agatcctggtaaaataaattccaacagtgattgtgtgggaaattgacttgagcagcatcttcttttgtgaaagaggtagtggtttctccgagcttcggttgcttggagccccttttttatggaaggatatcgcttttaggctcatgaaacagtgtccaagcatagcaatctctagtcttgctggtctctcctgcaatgtggggttcgccaataatgacccctaagtgatccgccactgaaggtggcatagggtctccattttgtgcaccttgtgcatgagattggtcaatccacacataacaaagaaagtggggattttttttccttatgaggaattcaatctccttctttaaattctaacacttgttggtgtcgtggctgaagtcattgtgaaactggcagaactttgacatgtcccacttgctcatatcctttttgataggagggggcttcatgtatgggatagttcccttagtggtcatgtagatggtctcaggtttctccattatgagggtgaagtaggtgaaccttttctccttatcttcctagtttcgtgttgaagttgtacttcccctttttgccactgtttcttccagagctgttattgttccgcttacccctagtgttcttgccactagaggtctgcacagaagtgttagttcctacatgcgcatttggaaagttgtggggctatggggcaccctaagactgcctattgccaacttgccatgtctaggcttgttagatagcttcgtctaacttcataaagtcgtcagctctgtcaagaaaatccttcatgttgttggttgagatcctctagatatctttccagaagccactcaatggaaggatgccccctagtatggccatatatcggcctttgaccttggtggcctcgaccatgacccttttggaggtaatcctttaaaggttctccttgtcattgtttgacctcgacaaggtctttcaactgcgatggtatcaatgtgaaggattagaactctctgtagatgttatccaaacaattttccttctgatgtggcatatccacgtaagccaaagatagggtacaagtggagtacatccatgctagtagcagaacagggcatctaggaaagttattgcaaaaccatcaagcaacaaccgaatggagtgaagtgagccctaaaggagctgttccaacatccttggccagccaccagaagcctatagtcccgccagggtgagcctacaggctggccaggatctgtgcacaagctggtcggccaggaagtgacttccggacaaaggaagctttcgttcaaccaagggaacgtggtctctacaaggaaatggtgtacaaagctgtcctcaacttgaaagagattggcctctacactcaaaggctggctccctattggtggagctatagtgacttgcaaagtcctgccagatcctgtaggccttgtcctgccaaatcttataggccttgtcctgctaggtcctggtaggaccatggccgaccaggattgacttggcaagaccatggccaaccagacatccttgtaggtctataggcaaccaagattgacctagcaagactctatgtacaatccaaaatgtggacacaaggcatgggctgcaaattgggccttaaaagcccaatagaatggctgaacaatatctagattcaagggcactttaatcttttgtaattatctaa

SEQ ID NO: 320659 - DNA, 1020 bp, Cannabis indica
taagaaaaaatataaggttttttaagtatagaaaattaaatttccctttaaaaattaatttatacatgagttcactttaaattgaggattgtaattgcgtagtatcagcgatgttcagtactttttatagttaacattttacgattagttagcgatattctttaaaagtattttcttaatttatatgggacccgacccaatacttaattatataaatagtggtatgacaccgagaaggactcactaaaaaaaatatttcagtgacaactttttaattataatataattttttagtgactaaatatgatttttagtctcaacaaattgtattttttatgactgctaatacttttaatcacgaacattttaatcgcaacataagaatatatgtaattagtcataattttttaacttttaaatacaagttttattataattaaaagtaaaattttttatagtgactaataatatcttttagtaattctctattaaattattgactaaattttttaaacataggtgaattgtagtaacaaaaaattgattgggcaccagtggtgcctagtacccttcaaacgtatcgccttatgattggttagcgatactctttaaaaactattatattaaactatatgaaacccgatactaaattaaattaatagcaatattgatacgtagaagggtgattgacactactaccggtaacttttagcatttcaaccaaataatagcacttgaatcgaaattcaaagtgatataaagatacatattttgtctatctttgactttttcaaacctacttagtgacatgtcagcatgtattaatttaatttaataattaagagtcatctttaaattcgatttctcattcctatataatttcttggtcattcttgattcatttcatatagggttaattacataaggtatcattttatttaagaaaaaattatatttttacagtttaaagattttttttttatatttttactagtactttttcataaaaacaacacaaaa

SEQ ID NO: 320660 - DNA, 1178 bp, Cannabis indica
cagactcctactgttgagtgggagcgatcaaatatgtaatcaaataggacacattgggagacaatcataaaaaaaatctctaaaagtgacctgtatgttagatgataagggtgtatttagaatccttaaatctacatcaactcaaaactttatctgagatggtggttaatctgggatggaagaattactctggaagattgtaaaaacccatctataataatttagttccaccagtgatgctaaataacttagttgcttttaaaagacactagaaagttattcaaattgaagaaagttcttaactatttttttttatctctattctattttggatagaatcagagttgtgtcttctgtacattcagatgtacttgttaagcagtttgtatccctagaggagtgatacatatagaaaaataatattacataatgttttatgaacacaaaaggaaataataatggagaaagctattgcttactataaccttacaattcctgttattcgggtagtcaaacacactacacttgatatggatatcaagataatggattgattgaaatttacttctagttttatgtttgtacaagtgggagtttgttgggattttataccctaaaaaaactcatttcaatataatattatttgcaattaatagaagattagaagtcatttaagtttacatattattttcattttataaatttttgataaatccagaacatgtattcattcacaattaccatgatgtcatcacagtagaaagtaattgtgattatatgttaagtttaagtcccatgatttatcagtgcactgaatttatattgacgtgataagacaaagtttacttacacttggataagtgatatgcccttttcagggcattgataaagtatgtgttgggttttatgccctaaataaaactctatttcaatgtgatctttatcatttaaatatcaataaagaaacagaagtattttcatcacttattgtgtcatttggttcatgttatcatttatttgtttatttgatttataaattcatccaaatctttatacatttatattcttgtatattgtatcgtcagcacagtggaaagtaatcaagattgtgtgattaaatatatattcctagatttatcaatacactgggtttaactgatatgataatctacaccata

SEQ ID NO: 320661 - DNA, 758 bp, Cannabis indica
attctgttcagctcatttgatgaaaagacctttttcaagttccaaaaatgcaatgaataatattctagttctaagaaatttatgataatccttattacaccattaacctcatcaaatggtcgattttgagttataaccccatcaaataatatataagtttcatccaattaccaaattgtactgtaagccctttcataacgaaggatagatatgtattaacagaaaacatgaatatatatttgttagaaaacttcacatggccaaatttttttaaaaaaataaaaaattattatgggattatattttagcttggaaaatttattgacgtatacacgtcattagaaaaaaaaaatgtgatacattaaatacaacaagattcaaaataaataatatgatatgatatataattaggaaaataaataattgtcattactactcttatttttatctatacacggttatgctgattgcgcttctacacttcattgtataaatgttcatcttctgatgtttatcttgaaggtaatttggaaagtcttttttttggcaagttagtttacaaaatatattttcttttatggtaagattgttttgcattcatacccgatttcttcccttgtaaattcggtttttagttgctcttttctatgttaggaaagatacacttttcagttggactttcctttgtttggaaacttcttgtaagagacgcaattctcttatggaaagttagttttttaaggaaactttgattattg

SEQ ID NO: 320662 - DNA, 1476 bp, Cannabis indica
aatttgaataatgcttaatttgagatattttgacatataattaggaaaattattatttatttattattttattcttaaaataataattatctaaccacatctattttaaaattggtttattttattattttaattttattaaattataagattagaagatgataaaagtttcgttctctctgctttctccctccagggcaaggaagaaaaaagttggaaggaaaccagtcattcgattaccagacgaagagattgatgcagaaagagaaggtacggaagaaagtcgaagaggtcattgctgatgaaactcactcaaccgaggggctgagcttaattgcagagatggctcaatatcaggagattcttgagacacagttcatcaggtctggtagtaatcgatctcagagctgcgcggaggaggttgaagatgaattgaagttaggctcgaacaaccagcaaattccaagatctgcaaaacaaatatgggagacgttcacgaaggagaaaacagtgaatcgagatcaacgtctcttattcacagaaccattaattagggatggcatcaaaatcgctcaagtcgatatggaagaagtgtaagaagaggaaaaatactggaattcaacagtcatttgcaaagtcctgggagctaacccacctgtgactatttttgaaaggttcgtgaaaaggatctggggccatttgggtgtaactcaggtaagcaaactatccatgggactaataatggtgagattcaatgatgaagcaactcgtgatcaggttgtggaggcaggagttgtgcaattcgatcgaaaacctatgattgttcgaccctggtctgcgaacttaaatgctatgaacctggtgcgcactgttccattgtggatcaggcttcatgatttagggcttcaatactggggtaccaaaagcttaaatgcgcttgttagcacaatcgggaagccaatcatggtggatcaacatacaaaagacagaacacgactgcaatatgctagagtgttagttgagatggagatcacggatgctccaccccgattcattccttactttaatgaatttgggcagctccaagacaagaatgtggaaaatgaatggctaccagtaaagtgtgcccaatgttctaagtttggtcacactaaagctaactgtagacatgatgagatagctaacagaaggaagaaaaacagcaacaccagcaaaagacaaacaaacagccacagaagaaggaatcaaaggcaaaggtagcaaacaaggatcaccaggaatgggtgattccgaagaaaaaaatactagtatcaacagctagtcaacctttaagtccaaagaagaaggtagagagcagcagtaactcgtttaatcttttacaagatcagaatgaagacagggtagagatgcaggtatctactgaacacattgattctgttattactactgttgtctatggataataataacataggg

SEQ ID NO: 320663 - DNA, 1587 bp, Cannabis indica
gctatttgaagtctaaaaaaaactatattttttgatgtcattttcttatcttttacagcagcattagagtaattgttggagatgcaattgtttccatttcgctcccataaactataaatcatggctgcgaggatcgagacatggactcgatgcttcttatcttctttgttcaaacagagccattgctgccatctgaaaaaagaagtcggccaacagctggtgttcaaccagttgcaaatttgagacatcacctgttgagataaaatgcattcaaagaaacaatgtgcattgctctccactactacatcagaaaccgggcagtaagttgtgtctagagtaatctgaaattgagcaaacttatctctcattaggagttgagagttgattgcttgccaaaagatgaatctatgcttcggcatattaagagagctccaaatacacttgctgaactcgaactgatcttgggcgatactgctgttatacatcagctttgtcttcaaatgtttcgcaccagcccctgctttcatgatgtccgcctttgtgaacttgttacaaagatgacaaagtttcctccaataccaactagtatcattctttaggtcataggtccaaaatgaattgttcttgagataaatattattgacccatttcacccaaagaatgtctcttttggttgaaatagcccaaatatatttaccgagtatggcttgattccattttaccccatctttgaaacctaatccaccataagcctttggaaggcaaactatctcccaagatgccacatgaagcttgcttctattcccatgccatccccaaaagaatcctctacataatttttcaatctccttggtgatactatgaagaagaataaagatactcatccaatagttttgaaggccaagaagcactaaatgaatgagttgagcccttcctacaaaggacagatgtcttgttgcccaagtttagagcctttgtttgatcttcttgaggatcactccacagtcttcagcttttcattttgtaggtcttagaggaactcctagatatttgagaggaaactctccttcaagaagagccatttctgaaagcatagcctgttttccttcttttttcactcctccaaagtagagctgagacttacctatcttaatagtaagccctgaagttgcactgaactcatctagaacctctttagcccggatagaacaaatgtctcctttacagaataacatcaaatcatccgcaaaacaaagactcattggcctgagactcttgcataagggatggtaccagatttttgactgacttgctgctaagtgaaacctcctggtcagatactccattatcattacaaataggagaggggatagcgggtcaccttgtctcaatcccttcttgcctttaaagcttccttgagctcttccattcaataaaaccgagtaagaggtggctctcaaacaagtcatgatccaagagatgaacctggttggcagtttgaaagcattcagaagatcttcgaagaaatcccaattgactgtatcatacaccttgcttatatctatttgaattattttaccaggatct

SEQ ID NO: 320664 - DNA, 1437 bp, Cannabis indica
gagagagagagagagagcaaggagctcccttgagcacttgcgacgtgtgatggggagcggggagctcctttgggcacatggtgatctgtagtggggaagttgggcagtggggagcatgggtgcgaggagctcgacccatgcctttgctcctcctcgtgccagcacatccccttatgtgtattggcctcatcgtgccaacacatctccttaagcgtattttagaaattatacttggtgaattttcgggtatgacaccaatgattcaaaaaattacacttagcaatttttgggggttaacactacttgtcccctagtctataagaattctttcaagtgttcttgtaaattaattttggtgagctttgtctccatctcttagtccctaggctagtgttgtgggcatttacgacttattttttttgggttaccctttataggggagtgtaggctttattagcaattcgacctcccttttttgagggtacttatcataatgaaggattgtcagcttgttaagatttctcaacctcttctatgagttgtcattattttttagaggtagaattttgccacttaggactcctcaaactttttacttatgttacttgtccattgaaagagtatagactttttagagaagtctcgacctcttctcagttattctttttatttgagggagattttcaccacttgggctttctcaacctcttttatggtgtagccttattatggaaagagtatagactcttcgagcagtctcgacatcttattggctacttatcggatataagggagcttgtggtcccttaggcagcactcaatcttttttaagattttacaattttattgggggagcttctagcctcttaggcaacactcaaccccttacattgcatccatggcacttagagcatgttttgaaggctagaaaattggaactccttttagagaggcatccctctcagagtcgtattcagttcctcttttcttttaatattttaagggagatgataattttgtgaatcgatttgacctttttcttttgatatgttaaggaagatgatggttctgtgaactgactcgaccttttgcttattttattttaagggagatgatggttctctaaaccaactggaccttttgcacttaacttttatttgttttcctacgcgcacttcaagacttatttgattttgaggagcttctccctcatttattgtgagtgctctttcttgtggagatatcgttaggctttaactcttttcttggaccgttaggggtagccaatccttgtagttctaagagttcttttttttacttcgttcactttgatattttcaattgacaagtatagcgagcaagtcacacagtcgtatggagagtgatgtgttaggttttatgccctaaataaaactctttacaatctgattagttatc

SEQ ID NO: 320665 - DNA, 1840 bp, Cannabis indica
taagacaaactgttcttgatgcctcataaagcatccttaccactcatcatccacgagctacatatgtcactatcgatgcccgatacaacaatcgataagtaagaaacctatctgtggtttcaagcaagtgattactcattcacaataaatggtaatgaccgtatctttacccattttcaataacggtaatgaccgtatttttatctcgatcattatcgagccacacacgatagtaatcgttaccttgatcataatcgagtcgcaaacgatgataattgttcctcacttaacatgcttagtagtgtaattagctttcttacctcagtctagtaatcaggtgtgcacaccgacctaagtggaataaagcttgacgatcccgggtcctatgtcacgacaataaaattcgataaacaacttattcaaattctgaaacaaaccctaattccataactggacaactctaaattcccactggtttcaaaaaagcttaaacatcactaaaacaccctaatctatgatctgaaaaacaccccgaacaaaactggtttcaaaccaaaaactagggttttccctactggcaaaccggttgaccagttttacagcacctgtaaaatcagttaatcggtttctctcctagcagaatgggaaccctagtttttcgaaaccaaaacccaaccaaaactccatcttttcaaactctctagaacagttttataccataaaaataatgtctacaatcaaacaatactaaaaaattcatcaaaatactcaaatcaccatatttgagtaagaattgagctcattaaaccttatttcctccaattcatgcctaacaggcataatatccaatcaaagtaagcttaaaccatcatcaattcaaacctaaaaacatgtttaaactccaataatcacacagacccaaaattaatataagtcataaccaaaactcaacctaaaactgaaaatttaaagtgacatggaaagaaccttacctcaaagcttgtacaactcctaatccttcttaattcagctaggaaaagatgaaattgaggaaaaaatgctcttagttgctgctggtttgtagggctcgaagtagatgaaggaaaagagagatagataatgttttcttagttttaggatgtatctttgaattttctaaaaaaataaatacttaaattaaaacataatataaacttactcaaattccaattcagcctagaagacactaaaagaacaaagaatctaatctcataaaatgactattttacccatccttttaaaatttaagctataatataacctaggggaattttgatcatttcttactttcctcgaataaactaacaatctcgacttttcaaactagtccagtatatttccaatatatcccaacttttatcaccgtgacatttctgacactttcgttgagtttccacggccgccgaacccgaaaatattttatttcgaaaatggtatctacaatacccccataatccaataaaatctctgtaattaataaataacgcttaattattcatttactagatttatactatttaacccacaattagcttaagtaagattataatcttactctaataatcgtatactcacatatttaataaaatatgcccaatttaaatattattatattttttggtcgggcaggttgatttggcggagcgtttgtctagcctacaaaaccatatcttagttttattattccgcattggctgtgacttaacgagtaaaatataaaacacatctcgggctcagaacttctagcttctggagcttacataggatgtaccatctgttcgaaattattttactaggatct

SEQ ID NO: 320666 - DNA, 827 bp, Cannabis indica
ttgttgtcttgtgaggatacgcttgctactaaagtgtttaaagcaagatattttgcattcgggaattttctcaatgccactctcggaagtaatccgagttacatttggcggagcatcctggaatctcaagatttggttcggactggtgcaagacgccttgtgggagatggctccagaatttctattctgcatgaaccgtggctgctagatgaggttaatccatacattgagacttcaagccaaagtcttaaagggcaaatggttcaatctctgatgcaagttgacaaacttgagtgggataatgaggttatttctgatgtgctgaatgacagagatagagatttagtttggcgcattcctctctcggatgcaaggaggaatgatcactggttttggttgcaagaaagctcgggtgttttctcagtgcgaagtgcttatagactacaacatgaggctcataacaatgttactcttgctgtccctactgatgtgtggcgcaagctttggtctattaaagtgcctccgaaggtactcaactttttatggcgagcgtgtgctaattgtctccctacaaagttcttattgacaactaagcatgtgcaagtcgaagatgggtgtccattgtgtgctgcagtccctgaaacagcgctgcacttgctggttcgttgcagcttcgctcgttcgtgttggcgacagatcaaagtgccgagtgtggcacctggtgcaatgatctttcagcaatggtttgaggcgggtcttgctcagtggagtgaggttgagtgcatcgaagcggctatgactctttgggccgtgtggaagatgcggaa

SEQ ID NO: 320667 - DNA, 1137 bp, Cannabis indica
aacggagcaacctcattacaaaatccttaagacatgtgaaagaaccctctccaaatggcaagtcttatgcaggtcgtgttcagcttattcattcggtgttgcttggtcttcgcaactattggatgaacatttttattcttcctcaaattgtcattaaagagattgagaagctttgtagaggtttcttgtggggagttaagggagagaaaagcaaaatccatttggcttcttgggataaggtttgtttaccttaaaccttttggaggtcttggtttcaaaaattgtcctacttggaatcggtctatccttggtaagttcatttgggctatcatggataagcatgatattctttgagtcaaatgggttaacaatatttatatgaaaggtgctgatttttgagagtacgaattgacaggggatgttagttggtattggagaaaaatctgtcatttgagggagaaatttagcaagcttaatgtggctgctacagtaaaaaaatggaagttcattgcaattcgtctgtatagtctcttcagttgaacacggatagcttttataaatctgtctggtgaaatataactctgccaagcatcggtttattgtatggcagctggttcatggtcattttctcactagagataacttctctaagtttcatattgttcttgagtcaagctattgttcggtgtgtagccttgaagaagagagccaccaccatctgttcttcaattgcatcgtctcaaaggttgtactgcagcaaatttttaactggtgtggggttgttgcttggcctttggactacaacagttggagatgctagtttgtaagcaaaaatcctggtgtgataatctctttgtttgctgtaactgtgcatatgctgtggaaaaacaggaattcttgtgtgcataataattgttgttatactattttgaaaattgtaaatgatattaaagaaataataaaatataggttgtatagtttaaggaataggaggtttattcaagctgaaaaaggcatgtatttgcgcctaattgagtagttgttgctggtggttttgggagccggttggttgtggccgtggtgtgtaattggttcgttttttgattaatgaatttttttctttagtcaaaaaaaaaa

SEQ ID NO: 320668 - DNA, 732 bp, Cannabis indica
tgaagaaaatgaataaggaaatgaggaatgcaaatgaagttgcggcagttatgacaatattcatgttcatgatatatttatatagctctattacgatatcttttgacatgttgtatttaattataagaatcaatttaaaaactccacttcaataacagtatgtgcttctctttccttctttccttttttttttaaatctggtgtaaaattattattacttaattaattttaatttcttaatattaagtattattctagttaattgggaaattttatagtagagtgtcacttatctctatactagtaaaagtgttcatgttttcggataccttatggttatagaaaccaaacctaatttttaaaattttttgaataatttacgatggttcaacttcaaacaattatttgtacccatgcttattattttcttttttatatgtatatcatttactgttttgagcttgattttcttttcagcagggtaattaattgaatttatatgcaatattagttagggataattgggacaatactacttgaactatacgggaaatttgaaattccatgctttaaataccctataatttttcccctaaatgtataatcattaaaatttgtcatatatgaccactttaatgattttcctaaactacccctcacatttcaaaccatctctctctcttcctctctctcagccaaactaagaacccatcccaaacccactctcagccg

SEQ ID NO: 320669 - DNA, 1790 bp, Cannabis indica
tttggattttggcgggtgggcttttatgttatttgagaaatgttttggtttaggcgggtgtttaaattacattagttttattttgataaattaatttttgggcattatatatattttagagtaatttagtgtataaatatttaaattgaacttttaattacaaataaataatttaatttaatttttaaagataatcatacttaaattatatttttaaaatttctataagtacttaatcgtttagtgtcaagtcaatggcaggtcattaacggtagagtacctgtataagttccagaaatataactgacgtatttatctgcaattaagaattaaacttgtatatttacgtcacaaattattctatattttataaaatatttacatgcactcttaatttaattataagagcatggttgattgtatatattttggtttaaattgggttcaaaatatattataaaactatttttggctcagattttatatttgtgttataatgcacagtgtacaaatttgttataaaaatcaatactacaatcaatgttcattgaaatatacaaaacaattaattttattaattttatatttttttttgaagaaaagtaatcaaaaactttattaaccttcaaactctattaccaaacaagatagtaaatcagttgggacatctcccataatgaaaacacgaccagaataaaaattagaagcttttgcgaaagcgtgagctactgagtttgctgaacgttttacaaaatagatcaaaacattattcaagtccataaataaatccttacaatcttgaataatagagccaaagctagagatcatggtgaaaggacttaagatagcttgaatggccaccaaacaatcggcttcaagaatcatttgttgccaacctctgattttaatccaacttaaagcctctgtaattccaatcgccttcgctaactcgggccgaaccactcccggataagaagtgtgactccctcaataaggtaactgaattcattcctagcaacaacaccataaccatagccttgagagtcttcaaaaactgaagcatcgacattaaccttgataccatttgatacggggggctccactgctcggccccatcactagcagccagctgagatgactccacaggagtttgagcgatcttccattgacccaggtaagtaacggcagaggcaacagtagcagaagcattaggcatctaattcttattcactttatcattttgagctttccaaatggcctagtagagaatagcaaccatgcattgggtttcgtttgaggatgaatcgaacatagtagagcaccattccaagaaatccatagcaattgtgattgtcgtattctcaccaacttttgtccaacaagccaatgccataggacacgtgacaagcacatggaggatggtttcatcatggtagttgcaaatcggacagaagctactaacaacaaccttataaatatgaagaaaaaaatcattaatgaatattattaatgaatgtcaaataagtaattaaaaaatgtggtaattattgacggctaaaagttagcccatgctatcttttgggtcaaatgtagtatacattttatatcacgatagaagttaagttttaaagaaatattctaaaatatagaaatacgttatatttatagctctccattggagatgctctaatgtgtttacaacaaatggacaattgatggtttttagggttaactccctatagaaatgcgaaagaggattcgtttaaaaaaatatttgttgaatctgatat

SEQ ID NO: 320670 - DNA, 1275 bp, Cannabis indica
tttagtacatgtcaaaattttgggggcgaattactaattagccaatactaaataagaagaaaatataacaacatttatttggtgtagtgttaaagggtcttactttaagctaagagatcaaggttcgattctcaatctctatatttactattttttaaaaaatatttaatgtgtagttatgaaaccttggagctttaagagtttttaaaaagtttacctatacaccaaagcactaaaattattatttgattttaccttaggccccatatattttaggaccatctctggattatactgccagtttcgagcttttttgaggttaattctgtctaccagtagcttggaatcagtgaccagaacaacctctaaccacgcaccaagcaagcaaagagactctttgtggtggagagcgtttatgcttttaagggactgtccgccccatacatgacagtgagagcctcaatgagggttccctcaccatcttgcacgataacagccgcaacagcatataacccctctaaccgctgcattaacaaagagtaatagaacttttaggcaaagacatcttattatcatcagtagacatagtaaaaggggcatgtaaagaggtaacaattctaaacagctccattaatcgaagtttaagtttggaaacccttccaacgaaaggtagtattttcatgataagcttgatttctcgcactccaaagttcataacaatgacaacaagcataaagcaagatggccagcgatcatcctcgtgagcattttacatattacttgggaataagaagtgttagaattttgatgaatattttaacaaaatatagaagtgtttgtgtgtgtagtggaaagagaattattaagagtcccacatggatatgaactcttgtttataagagtatatagagtgcaattttgacatttgaattttggtcgtggtgtatccagttttgtacgaataggtgaggacttacacacttgacccaccacacgtgtcacgggctcacctttttaggcagcggaatacccgtgcggcaccttaacttttctaagccaaggtcagccttccaaccatccgagtaacaatgggctcattttttgcgcgaccgtgtgcctcgggcacactcccgtctctcgaacaactcccgccgagtcatgctcgcaagcatccatgagtgcattcatgtaccgagactctctagccaagatactcgcactgtccataggttcccaccatggtcagacaaatcccaacaccgacgctcaccttgt

SEQ ID NO: 320671 - DNA, 2193 bp, Cannabis indica
ctctctctctctctctcaatgtcattgttaacccctaattatgtccccagatttttcatgtgtcatgtttgttattcttccagtttttagtctctctctttgtcactattaaccccctattcatacatgtaatttttttatatttagaatataactttaaattcttcattgtagtaaaattagttaaattaaagaatgtttcaaaatatgaaaatgaaattactaaattactagttagtaactaattattgtatactaaacataatttgtaactaactagtaaaaggacttactctaaattactaactatataataaccggcgctcctcacgcatccatgatttaaccatcaaaaattaacaaaaaaaaaataccaaacaaacaagtttaagaaaaacttaaatcatataatttttatcctaatcctacaaaagttttagtaacataacgactataattgaacattctcaaaaaaaattaaagctattaataacaacaacaaataatccaaaaataagataaaacaagtgatgatgagttagatgatttttaatgatcattccattttcgattaatgttttaatttgagttttgtgagtcaagtgtgttcttggataatagaattgagggctctaagtctaaaaacataattatctttacattagtttaagttttatgattctttggtatgtttgaattttatgtgatattttattcatccttaggtgttctaaaatattatttcaatttgtgagggttacacctcaaaggtctcgaggcttccgaaattaataactagtaactaattatagtatactaaattactaactatagtaactagtcataattctacacaaagtttggcagcataacgaatataattaaacatttttaaaaatttaaagctattaataatagtaaaacacaactgaaaggtgtaacgtcaatttacaacctatgcctaaagttaccagcaaggcatggggtcgggtgcctaaggggagatcaacaatctgcctgacactgttataacttttgctttgtctaaaaccatgaatgaaaaaatgcctaccaagagctctagaaaagagtatagccaagggtaatgaagtccagcccaaagtgtggaggcagatttagatccttactttggggatcctgtagaaagcttaggactgatagaggagttagaagaagtagaggtccatcctaccctttcgactaggaaattaaagatctggaaaggtttaggacctggaaaaaaatatgcattgataaaacttctaaggggaaatatcgatatcttttcctagtcacatgaagacattgcggggatcgatccatcagtaatttctcatgccctaaacatagatctaaacttctgacctggacaatagaaaaggaggttgatggataaagagtgagcacaagctctgaaagatgaagtcaaaaggttcctcgccaatgaatttattattgaagctttctacccgccctaggtatcctattctatcttggtgtccaaaccaaaatccaagtgtcaagtgttcatagatttcactgacctaaataagacttgtccaaaggactctttccgacttcaaaggatcgaccagctagtcgacgctatagcaggtcatgagatcctaagcttcatggacacttattcaggatacaatcaaatcaaaatatatccaccaaactaagaacatacgagcttcttgaatggtgtaggcatgtacaactataaaatcatacccttttgactaaaaaatgcaggggctacttatcaaagacttgtaatattaaatgacctaatcgatcgaaacatcgaagtctatatggattacatgcttgtgaagtccaaaaaggttgggggcacatagaggatataagtgaatgctttcagatcctctgagggtacaactcaaatctcaatcccctcaagtgtccttttggagtatgctcaggcaagttccttggcttcatagtgaatccttgggaataaaagcaaacccagagaagatcaaagaccatttggacagaagtcgcccagagtgataaaagaattgtaaagctttcttggtcgcatagcagcactaagtagattcatgtcaaagtctatagacaagtgtgtccctttcttcaacatacatagaggaataaaaaatttgaatggatagaggagtgtga

SEQ ID NO: 320672 - DNA, 1232 bp, Cannabis indica
cacaaagaggagatctcaagtttgattctccctccccaaaatcaaaaaaaaaaagttggtataaatttggcaaattttatattaaatttaacacaatatttgttatgatataaaatttacattataaaaatgtattatttttttgtttatatttatgttatttatattattttattaatatatttaattataacattaaattttaaagtatttatatttttttttactatcttacatattaaaataataataaaattaacaataaaattattaattttaatttttattattttttgtaataaaagaatttatagattaaaatcaaaaggtgttagacctcacggtcattacatatgatgtcgtttggtatagaagaaagtttcaccataccagtaatattgatggcaaaagctcacttagccacattttgagttacaaaattacaatatcttgaaataaacaaaaaattataacttaacaaatgattagagagatttttacattgaattgcatagttaccaataccccaactagaacagattcctttcagcatcctgataactgtcttagagtcactctcaatcatcacaaaagggtgattcaatgaaactgctgtctccatagctgacagacatgctgtaacttctccaataagcgaatcggagaaattcagcttattggtagccacccacaaaacaaactctatatggtctaaccaaagctaccacgcatatagaaccgcaaccaactttcacatcatagttgattttgacccaatctacagggggagggaccaaacagaagacacaacaaccttcgaccaatcaaactgacaagaaccataatctgcgtaacaaatagagataaagtcaatacaatgtttaaggttactcagagaattattgtgtaccttgtcgttgcaggctttctagattgtatcaattacaatcgaagcataaaggaacaattcctgaacgtccacccctttagactttagactccaaagaaactgcacccaatcccaaacacgagctccagaatccaaaaccggtattactccccattaggatgacctccacaagtgaaaggcaaaattacaataaaagaacaggtgctccgttgtttcctccccctccccacaaataggataggaaacatcctcaatatgtaatcttctagcgaggagagagcgtgtaataccctggaattaagaaaaggattagcaaaaccct

SEQ ID NO: 320673 - DNA, 907 bp, Cannabis indica
ttacgttcccatctcgagtactcaccatttttaggttgaatactcgcattttgttactttcatacaattttcctctttattattagttattattattatatatttttggtgttgcgaatttttgcttcgaaaacactgtcaattagcgttcatgggaaaatacaatgtcagaaaaagtatgggctaaatcccaaagacatcttgttttgaggacatgttcacttttccgtctatactgaatcagtcatctacaatgcttcgccttgggagatgtgtcaaaaacattggtagctctcggatgctatatgatctgagataactctcttggaggacaaagctccgactcaatttcaacaacccttttagaatcattgttcactcttggacgcccacgcatctctgggtgttaatattgatttgttatgtcttctacctgggccccatagacatgtggtccactctctacttgccacgtattttggtataagaaatatggacaatatttacccccaagttctagcttgcaatttggtaagttgggacttgctattatatactcttttcagtttccttctggaaggtttgcaatatgacgctacatttgcgcagagcacgcctattcgtacgaacgtgccaagtggtcttttagtggatggatataactccaaacatcccttcataaatgtgtttctttacacccttccccagtcgtcagatcgttgtgtgttaattggaatttgaagggaaccgtaggatcaccaagggaccaggatcgagggttgaaggttataagtatcatttgccttctcctttctcacattttactctcttgttattttcttcagagctccaaactggaaaatccttcaagcaaacctgtaatacccggaattaagaaatggattag

SEQ ID NO: 320674 - DNA, 1255 bp, Cannabis indica
gagcaatattaatggtggcatctctatatatatttatatggttgtgtgggggtggttgagatttgggaatcccatgaaccttggtccatataaaatggagtgatcaaaatacagttctcaacatataaaaaaaaaccaaaaccaaaaaataaaaacaaaataaaaattatattattattcatgtgatatattgaaattaatagtatggacttgacacatgtacttgtattaattgtttttccccatttgagtcaaatgtagtttttgtattttttcatgctcacgtaataagacaatagagtatatttgaaacgtgaaaactatgacatgaaatcaattattcagtcatataatgcgaaaaaaatatttattttatttacgaaaaaattaatatttatttactttcatagaaaaaaaagacaatacatattaaaagtgaaatagttgaaaagagtaatgttgtaataagcgaaatatggtagttgtttccgcccatgcatgttggagataagtaggtcaaaagtcaaatagttaaaattttgtctcggccatcttttcttgctacttgcctaaaaaagcttttttttttttttttttttcataattaatactattatattgtttttattatgttaaaaaatataaacatttaatattattttctaggaaataaagatatggaaccatcgagttggtgatgagtggtcagaattctagaacatttggttaggtgatgaaattctacttctcgtctcggcgccgaacatattgaaatttataaacgctttgctaataatgcaattaaaggaatattattacattatatttgtggttaattaagagggaactaataattatgacatatatatacccttttatcaattcttagtatttgaattaatagaaagtaacatgaattaatgcaaaagggatgcatatggtttcaactcaaaaacatgactctaaaattaatttgctatttattaatagatatatatatatttaaaaatgatttagttttattattttaaattattcctatataaaagtacaaattatctatcattattttaacaataataaagatggtcctattttttgtttgagaaatactaaaggccatttatagtatcttgtgaggtgaaatattgttagggaaaatatcatttattatacttaataaaaattcttatttcaaaatataatccattaattattttatacaatactattctaataatttctcattttaccc

SEQ ID NO: 320675 - DNA, 1479 bp, Cannabis indica
aaataaatcaaaaaagaaattaacgatgattaaagttaggttttcgacttcagctgtattgattatggccgaatatgtagggttgttcacaaagtatccaatcaaatccaatccgcacgatccaatccaatccaatccgcaaaatgcggatatccgcacttgcgcggattggattggattgaaaaatctgaaatcagcggattggatgttgtttgaccgcaaaaataaccgatccaatctaatccgcactcaattatatagatttctaaaaattatattatatataatttatattaattttcgtataatattaaaaaaaataaagaaaatttctaaacctaaacacttataatcgtttctcctcctagttaaaatttcctaccagctgtcaagacacctaaacctaaacctaaaaaaatatcacttcttctcagtcgacggtcgactcccacccatgctcttccgaccagtcatcttctcagtcgacgattgtctccctcccatgcccttccgatcgaccagtccgtcttctcagtcgacgatcgactcccacccacgcccttgctgccttcactaaccagtccatctcctcagccaacaacaatccttttaaactcgtcttcagtcgatggccatctcttcagtcgacggtcgtcttttcagtcaaaggtaagatgtgaaatatttgttgtaaattaaataaatattctttgctttgaatcaacaccattaaagttatggttttcttttttccttgtgataactatctgcagttttaaaaatctcaatagaagttcctttgaaatttgtttacttcttatctttttgctactttttacaatttattgtaggcagaaatccttaatatattgcaagtacccatcaaaaattaaagtcagattttagatctaattttaggactttgattaatagtcttctttcatgttaatagctaactgaaaaatatcagtgatatatatttttatatatcagtattctcgtggatttaaacattaactggttttttttcaggatttggaagatggaacatatgattttttttttccatattgttgctggttgttggatttggagatggaacatggttatttttttttttatttcataatgttgcactgttgctgctggttgttggatttagaagatgaaatatagttgttttttttactattatcagttatggaagtctaatgtgttgttggagattgagaaacagtagtttgtttgctaaaattttagttgtgttattgttggttttctttttctttattttaaatttttaatgaaatattaaaatacaatccgcactaaaacaaccgatccaatccgcattatggcggattggattggattggatttaaactgttatgcggattggattggatccaaaatatgaaatccgtacttagtgcggattggatgttgtttgactaaaaaagtgcggattggatcggatga

SEQ ID NO: 320676 - DNA, 1571 bp, Cannabis indica
cctcactaatctgcttataaatatggctaaaaaccttaatcaaccacttttagccattttcacttttaaagaattagagcaagaaattctttgtctttcaaatcctttgaatattttttaggaaacacaggccagcatcatctgagcaaccttttacagctttgaatgtttaattttcaaggattctattacaaaacttgatagttcttgaacttgttctaggagaaccatagaaaatttaggtttaggactttaaaatcttgactattcttaatcacattgcttgatcataactacattttaatttcgattccatgatattcaatttcacttacccattcggggcttagtgaaaatcaacccttaattagaaattttgaaattctggattgcaaacctcattatcatgcaaaatttctatttttgatcccttaatcggacttggtctgtataacaaacctattttcgttcgttatcccagccaaatgctcatcttgggtcctaccttttgtagatgaacctaggtgagttttggggaagcgaacatcatatcgaccaagatctacttcaacttctatacgaggatcatcctcgcctccgtgttagtctgtcttcatctactgacagcctctccaattcaagcttcgaagattgggagataagtagtgaacatacaccttccccagaacctgaagtacaacaccatttttaccccgaccagatcaaaggtgaaggctacggacgcttcatctgagagcttaggaaggggtggaggcgctatctaccgtccaactggacatatattgtttgaccagatacaattgacaccttacttgtaggctgtccaaatcctaccgctgcaggtaaacttactgctacattcgccgtaaccatcgtcagacataccaaccaggctccgtctaggactaggatgatgcacgaaccaaacaaaccgtgcagaagtcttctctatttgaaccacgcgtagcacggctcgccacaatgtcgagtgcggacaaggcccagcctgctgctgaaaaaaagacattgagggggacgttgaagtccaaaagatggaggatgagggcgaggtccatctcgatactccttctaaatctgaggaggaaggtgcagcttggaggttgccctttggtggctttgatgaagagggccaacctgtgtttgaggctggggagatcctggaggccagtgaagactatgtcactaaagaatacactgaggctgttcctctgagaaggaaaggcgtactaggagcttggtgggtttctcctccatccgtggtaaccaaggcaaagatgaagaatctgcttaagcatggttacttaggggatgtcgaatgcttccttccctcccctaacccgttggcgaccagtccaagggagggttactgcgcttggtcgggtgctcacactaaacagagggctatgttacgcttgcttccgtactttaggagagttgcggattactatcacctttgcccgacccagttcattcctaagggcatcaagtacttgtccgtcctgttcatcctctatgcctcacaaggatgg

SEQ ID NO: 320677 - DNA, 723 bp, Cannabis indica
attaacataaataactgctaatttccaaattaactaagcgggctttacaccaaccttcaccactgattctttccatatacgcctcacaaatccatcaagtatattgacaggagggtttgcaccaattatataacagacaatagaaggctgccaataattgacttcgtcctcaatatcagtaaaatcaatcttcaccttgctcttcgatccctgcaattccacctcactcttcggtttggaaccttcaaacgcactatccagattccgaacaatattagatctgagtattgggggagaaggattctttccaatacttacctcctgagtaactttgtttgcaacatcaagccaagctgaaaactcctgttgaaattcacttcgaattgtatcagtcgcaccaggtgaagagtagtgctcatggcactgttccattgaatctgctatctctggtatttctaattcctgaactccaagaattgtattcatagatctggtcttgatgaccctatccgaggatgaaggccctgttttcttccccttagctttaactttcccatccagtttcgcccttttcgccatggctccggtgattcaccgaaagagagagagcagcgggaaaagtctttaaaattttaccattacactaagcactagaactaaattttgttgtatgtgctacatttttttacacatatgtaatctattcgcaacatcaaaaagtaa

SEQ ID NO: 320678 - DNA, 1579 bp, Cannabis indica
caacactcggagtcacacggggctcctaaagaaacttaatcgcaccctctgctcgtagagccttttcatccatctccgcatatgatgttgcctcatttgtcgtaatcaccaagtaatgtctaatttttacattgagacctgccaaatatttctctttcttgttgaagtttgtaagcataatactcgaggcgagcttggctagacaatcgaatttcgttgtgtattcagttaccgacataccctcagtctgcaccaattctgtgaattcttttcgcttagcactgcggactgcctcattgtaatacttggcattgaataaatcttggaactcctcccaagtcataacagtgacatctcaggtgagggacaccaattcccaccacacgagagcgtcacctgatcatttccaacgacccccatcaaattcagaattctttctatcattgtgagccaccgttcagccttcatcacatctggacctcccaagaactaggggtgttcattggatcacatctaatggatttggacccaacagatccaatccaatcaaattaagtcatctgatccgatccgatccaatggatgtataggattggatcggttccaactattggatgcattgactggttttttattggattggattggatcaatccaatccattttaactaccattcaaattaatttcattcgaaagaaaaatatatataaaaaaatatagtttaaaacttaataatccaacatatataatgaacattagtttagtccaacctaatgctcatcatctcataataaaactattagaaaataaaatttattcaactcgtatttacaatttaatagcgtttaagaagatggaaaataatattttaaatctaagatttttttttctttaatctcatgtgttaaatgtatagtaaatcaattaatatatatttttaaataaaatatactaaatatataaaattataaatgtattttaaaaatatataaatataattggatgaccattggatgataattggatcgatttggtcagttatccattggatcagatgtcccatccaacaactaattcgatccgattggatttttaaaatttatatccgatccgatccaattatgattggatatctgattctattggatcggttggttgtaattggattggatgactttctgcacaccccaaccaagaacactggaggtgcttgcttgcagaacctctcatatagtggctccatacagttgccagcaacaggttgttctgctggcactgtaggaactataacagcctaagcttgcgggcgaggcactgcaggaggaccctgatgccttagcctcaaaatttcttcatcttgctggcagatacgatcttgcatttttgcaaatctctgctcccaatccggaggagcttttggtgaattcacatgatgaccaccctaaactctgccacggcctcagccgcgaccacggggattctgggaaatttgatttccctgtccgcctccagtctcgaccctattaccctgactccttatatttcgctggacgtccatttaataggacttagcctgcg

SEQ ID NO: 320679 - DNA, 1537 bp, Cannabis indica
tttttttaattttgaaaacaaaaaattaattaaaaaaacattactaaatacgtcctttggatttttttaaatatacctctttattaatttaaataagttgaaaaaaattataaagtatttgaagatggagaatgattcatgtgttgaataatatctttttttatacaaaagttacatgtctgccaatataaacttgtcctgtgatgattaaatgggtgaaacctaaaacgggtatgttgtgtaagataataatactttttcatcttttctctttttttatctaatttaaaatgttaaagtaaaatatctaaacaatataaagaagaaaaagaattatagtgtaaatgtagtattttggaagatatatagaaagatatgaaactaaataggagtgctattagacttgagatataaaggcaaaactaactttaataattttaatatattttcaatgcatttggaatagtttcacgaattttaaacattttaagatatgaaaaatttatataatagactaaatttgaagaaaaaaaatacaaaaacatggcaatacgattttcttttatttttattctttaaagttttttatttataaaaatgtattcttagtaaaacaataaactgttttttttttaataatttatttatagttgttttgtaattaatttacagtggtgaagttaattttttgttgttttcttactttttgctagacaaagtgtatttttgtaatttttaaagtatttttataaataaaattttagtgtaaaattgtaaataaaacataagaaaaaatatttttaaaaatctccgaatttgacaattttactctcagggtctaatctaaaacctgataattatactttctcttccaatgttctgccgtaactgtaattaaattaacaaatataattcaaatgttaagtagtatttagtagtatgaaatttacaactcatatatgaacgtatagtttcccttcgaatctcatgcaattgcataattaagatgtaattgagaatcaaataatcaaatcagccttgattgagctagatcttctaagttctaaccattaatgtagtgttttaggtttttaccttactctcttttgctggggattatttaataactacttctttgggaacattcattagtgtcaaaacaaaaccatgattcccatcaaccattattatatcacactacaataaaagtggtatttttgaaaactctttcataaaaactgagtagataatatcaattgggtttggaccttcttaattaagaaatagcccatgtgagaaatcctaattttgagtccatatttcatgttgataatacatgaccttctacaatatgatgatgatgataattttttttttcaagaaattactctatactctttttatattattctcttttatttttacattcctcttttttaaagtctatcatttttatctctttttttaaacattgtaccaattttgcccctgtcactttaagatactctccatatgactctcttatgtcagggtattt

SEQ ID NO: 320680 - DNA, 569 bp, Cannabis indica
aatacacataaaagttgtaacatgaaaggaattataaatttaaaaatagattgtaacctaagtgttgacctcaaatttggtcaaccgacaatggaatcgtatttaatactgatgatttgccacatgttacacattaagaataataaaaaaaataagacacgagattttatagagcttcgactcccttagttagcgggtaatgacctattccccttttggttatattgatactagaaataataccactcagatcacaatagtagggggatctgaggtggttctcttaagattacaatgtgagaaccaaagttggaaaatctccagtgagtgatgcttgggagtgtgagagagaggagacttagagtttgtgagttagaactcatagcttaagacttaaggttttagggtttaactaatgctctttatatagtagtgttatctgtattctcggattaagtgtatgtggcaatcacgaaaggatgccacgtcagattatctatggtcaatgtgttagagattttattacaatggaagataaatcaagatatatacaacttaattgtaaaaat

SEQ ID NO: 320681 - DNA, 1167 bp, Cannabis indica
gggcataaaacccaacagtaagggcttggtgaaggcatcggccaattgtaatgtgcttgaaactggaatgaggcgaactgtggagctgttgattttgtctcgaatgaaatggcaatcaagttcgatgtgctttgtgcgttcatgaaatgtagggttgttggcgatgtggatagccgattggttgtcacaatatatgaatgccggacctgtttgttgtatttggaagtctgaaagtaagtattggagccaagaaatttcactcgttgttgtagcaagtggcctatattctgcttctgctgggctttttgagatggtgggttgtttctttgttttccaagatatgagacaatcgccaagaaaaatgcaaaatcccgttgttgatcgtcttgtaattggacaggaagcccaatcagaatcagagaaaccacggaggttgagagaggaagtatttgaatatagaatgccttgaccaaggcttcctttaagatagaaaatgaggtggttgactgcctgcatatgttgtgttcgaggggctgacatgaattgactaagattattcactgcataagtgatatctggtcttgataaagtgaggtataggagcttcccaattagttgtctgtaggccgagggattagtgagaggttctccttgctgatcgtccaacttagtccttggattcatgggggttttagccggtttacatccagaaaaaccagtgtcatcaaggagttgaagtgtgtattttcttttagaaagaaagagaccttctttagattttgcaatttcgaatccaagaaagtatcttagctcacctagagctttgagtttgaattgttgatgtagagactgctgaacttgctgcaaagtgtggatgttgggacccgtgagcactatgtcattgacatagacaagcaaggcaacaaaattatcatttgttcctctagtgaataaggtgtaatcggcctatgattgtttgaatccgtcttggagcagagcattagtgagcttcttgtaccattgtctcgaggactgtttaaggccgtaaatggatttctgaagtttgcaaacgagaggagcacctgtattcacagattgagaagtagttagtgctggaaatattttaccaggatctagatttactaccatgtatgtttcattaacatc

SEQ ID NO: 320682 - DNA, 654 bp, Cannabis indica
aaaatctccggaattgagaaattataactctaatatttatttctaaatattggggtcgacaattaaattaattcacaaataataataaaataataaaaattagtgctaattgcctttactaatccacataactagagcggtcattacagagacccaatcattcggagctctcgaccacactaatctccatatgggaacatgccaaatattcaaccaagacgaagacaactcaacgacacaagtaatcaagccaagaatttgataaaattacatgtgcccgagcaccccaaagtgacaaaaaacacatgtttttctcacttgggaatttcatcaaacaagtggtgggacctaatttccacaacccaaacttaagccaaaagtttgtaatctttgcccaaaattgtcaatcctacttccaaattgtcaatttccatcaccaaaaccacaaccaattcaagacaaagtcagaacctatccaaacgctactcccacaacatatatccaaatgaattcaagaaaaaaaaatcctaatttccataaccaccatcatctcatccagggacggagggactttagcccatgtgtaggctaaagccctcactcaaatatatacattaaacttttcacatattgatatatacatatattaattca

SEQ ID NO: 320683 - DNA, 675 bp, Cannabis indica
gcctgctgtagcattttttcagcaaaattttagcaaaagtggtacatgttaaaagagcactcagcaagatttttgctaaacttttgtggaaaatttgctgcagcaggcgtcacttgggttatgtacgagctgaaggttaaataaatcattcattcaaacaatcccaaatccctaaatttctcacacctttcttcctcctctgtatcaaacgccagacccccatcatgcctttctcaattttctccagaacccgacctcctaccaccatccctcaactcgcttgaaacccatcttctccatttccaacccagtagcccgaaaccccatagccgcttaacacctgagccaccatcggaggagcttctccatttggaacccagccgcactcgtacgccactcaccgtctccatcatccttcttcttccttctcaaaccaagccatcatgatagccactagagcccagctttgactgaagctccgccctctttccctccatactcacgaaaacctcgaccgtatgagaccccactactcataaacccctctccattcgacccaagccaaaaaccccaccattaccctccagtatcacctgaacctcaacccgcttgtgaaatgaaacctagcctttacgacccagctccgccatgttggatattattttaccaggatct

SEQ ID NO: 320684 - DNA, 673 bp, Cannabis indica
aaaactgctttgaattgtgtggggaagcactcaatttactaatggaataaatttaggaggagaaaaaaactatagaatatcgaaattgaaagagaagaagctagagagcttttctttctagggtcgtatcacttagaatcatcttatgacaaagctctcatctatttttatatatttagccttcacactagggataggttagatgagacggacttaaaatcaaaagccaattgggcttaaatcactctcatggctgaaatccactaatgggtcatatagttagatttttgccacttaatttcaactgaatgaaacaacaagtcttttttaaattttactactaatctcatctaattatttaaaaatcattttaatctaattatcaaataaaatataattcaaatatatttattaattagataattaataaataaaccttttcttctttttttttttacaaatatgctcaaactaagtaaaaattctcaaataagacatattctattttcgaattcagttgattgattaaaccaattaattgagtctgcaaagcagtattatcccaaataatgtgggaaccatgtgtctatgtaactaaactcccaataaatagaatgcactcttaattacatagaatgcactatataccaaatatagatatgctatgaattat

SEQ ID NO: 320685 - DNA, 1613 bp, Cannabis indica
acagggagaattctaactctagacctaattttcctaaaaataaccaagccaattatggtgatggttatgaaagtgctgatagtggtgaagtatatgttactgtatcatcttttaaaaatggttggattttagattcagattgtacttttcatatgactaatgacaaaagttacatgtttggttccaggaaatctaaaggagaaaaagtgatcatacggaacaataaaacctgtgagattaaagggttgagatcaattactcaacaaaagattttttactcttcttgcttggaggctgtttctagaaagaaaaaataaaatgcaattagcaattactcaatataattttattttattttagcccttaggggatatttgagctactattaccttaatatttactcgagaagctgaacttgttcgaacatgtccaagtccaacacatttgagcacatccaagctatataggtccgaacatgctcgaacatatctgaaaagatcccaacaaaattattgtatctgagtcttttgcaccttcattcctatgctttgggaatctcctctaagtaacccttctttatcttagtgcaaaacaaaataaagggataaaggtttcaaagacgatcataacaaacaatagtcttattgagattttttctgaggtaagatttcagacattttcaaaggcggacaaattccattttgtttcggatgaagtagatattaaagtgatagaatttagatgtctttaaaaaaatttatatgataaaaaaaatatttttgtaaaaatccatattttagaactatttctgtcccataaaacatttaatacaactaaatatattttaaactgaaatttataaacttgtgataaaattttgctaatataaatgttatatttggtgttattgtataaaaatatttttatatattttaaattgaaaattttcatgtcggtacttggtctacttatttcaaaaaagtgaaaaaaataattgcatcaatagagttggattaggtacactatcttgttaattaaagaaaaaattaagagacactttaaggtgtcaaatattataagacgtgacatattggtacattttaaaagcgtgttctacatattttaatttaataaataatataagaaattactaatcaattataaaatactgcatcgttatagtgttaggcgtcttaagttgcgaaatatcaatgttcataataaaatagtcacctctatctgtaatcacaacacactcttgttaatgatccaaagtagcaacaagaatagcccagctctgtgtccgggtactaattacaatatcaattcgttctttgacaaaatactcatatactgcatttattaacctcgatgtgtgggttttcagatctcttttaaggcgtaagaaaattttaataaaggaattgactatataggcaggcagacaagaagatggtggcttcactttcttaagattaaaaacataaacaaatatgataacactcatgcagattacaaggaaaatgcacatggccactgcaggtaacaatgtttgactttttgttaattaaaaaaggaaaaacacaattgccaaaacaaaccacacaaaaaaa

SEQ ID NO: 320686 - DNA, 1156 bp, Cannabis indica
atctttttccttcagagaaaacatgagcctttcactctaacctagccgccaccttcctctccttcttcttcattgaaaatttcgaacctcttagtgaaagagtagtgcccacacacatcaagtagtacatcaatcatagtgcacccaatgtaaggttgctcatactttatatgtgtttatttgtaatcgttttagatgttcatatttagggtgttaatcaacatacttgtgagtagatctaagatcctggtaaaataatttccaacagttaccacggatggaggagaaacccaaagagctcctagaatgccttgtcttttctggggaacgacctcaatgtattcttcggtgacgtagtcttcaccagcctctaggatttcaccggcctcaaacagaggttggccatgttcattaaagccaccaaagggcaacctctaagctgcaccttccttctcagcttcagaagaagtatcaagactaacctcgccctaatcctccaactcttggacttcaacgtccccctcaatgtcttcctcttcagtagcaggctgagcttgttctgtactcagcattgtagcgagccaagctacatgtgggttagaaagagaagacttccgcatagtctatttggttcatgccatcattttattcctagacagagtctggtgggtatgtttgacaataaatatggcaaaagtagtaatgggtgtaccggtagcagtaggatttggacggcctactggcaaagtatcaactgtattttggttggacaatatatgtccaattggacgatagatatagtctctatcttttattactcttctaggaagaatgaagatttgactccaatatgcatggatagtcaacaatactgaatcgattaggacaattcttccagcaaaggataaattccttgagctccacactctgaatctagctgtcatcttctcaactaggatattgcactcagtagcttatattctcttggcacagatagggatgccaagatacttaaaaggtatatcattcctttgaaaaccagaaacatcaacaacccttctgatctcatcctccttcatgcaactgtaatagattgtagttttactgctgtttggatgttggaaattattttaccaggatcttagatctactcaca

SEQ ID NO: 320687 - DNA, 1218 bp, Cannabis indica
aaaattaaaatatgaattgcttcaaaacaaaactactcatataagactaagttactctaaaaatttaacaactggatatcaccccaaaaaaagcaaacagactaaatgaataaattaagcaagcctacaaaataacaaataaattagaaggtgcacattatttatcgagattttcggaatctaatttaataagtgcttaagagatagtaaatgcagtaataaagaagacaagaatttttacgtggtccagacgttaatgagccttagtccacgagtcagtttattgaccttaagaagcttgtataatacttttacaatagtatttgcaagaaaccctaactctaccctcttggtttctctagaagaagaagaaaacttagagaaaatttagcagaggttcgactatcttgtttttcgacccccattttttatgaaaatcaaggggtatttatagactaaagtgcgagtatggacacacctaagactcgcctagggttttcgcaataagcccactattggagtaaaaatacatgtaataatctcactattggccgccttcactaaactgtttttgaatacctgtgggactagttttgatgtttacttgttgaatttgagtaagaagccgagttttgaactttttaaagcttaagtctgaatattaatggtgtatactgtttaaggactcaattttaattgttacgtaaggattgttatgtttatgatatatatgtgccctataaagtttagaatgatttagataggttttggtggtgtttagaagagtgcaaaatttgggattttttacccctgctacgaaacggtccgcggtttggtgcaaacggttaaccatttcgtgttaggaaacggttaactgttttacaaaacagtttgagtttctggaaattataggaaaatcggaaatcgtatttttgtcataacttttcacctgggtgtccattttagatgttctatataccatttcaaagattgagacaagctttagaatatggtgtatattttagagccaaaatataagttttacttgacagtaattttaccgcagggtttggtagaaaatcctagattatcttatgcaaaattaaccattattttgggatagacactgattggtttactgttgttacaacatagggcacgggatcgtcgatcgtactccaagcaagtcgaccagcatactgttggattttgtgccct

SEQ ID NO: 320688 - DNA, 1843 bp, Cannabis indica
caagtgcggattttgaattttccaattcaagtgcgaatatccgcacaagtgcgaatatccgcactttgcgaattggattggattggatcgtgcggattggattggatcaggtattttatgaacacccctgttctcaatggccttcacccgagttctcgccttactcttcctcctccttgctctctactgtgccactgacccacagccccatctccgatttcccggactttcaagttcacaacataaatatatcctcttggttcgaaattccagcccacaaagactagcagaatttgctccgagattaagtttttgaacctggttcagggccctaagagtgtcaccttttattctcttggccattgaccttacactggtgtcaccgatggtagaattcttttctggaatggccactcttgaactgatttcgcctatacatcgcccaataggttagattttatgtataaatgtatatatgtggggtttcattcttttttgttccaaggatatcgatggtgagggatttgtttggagtctgcttctttttaacttgggaagaagtcttcttagttcatttgtggtgctagagttcttactttggatgagattgaagggctgaaaaatttggatgtacaatgttggggtactgaagaaggtgatgagggtgaccccccgagattgtggataccaaatgggatgtatcttggtactgcttttaggagaagtataggtgatttcatagctgagtcaattggagttgttgccacacctgaaattgtggttttggagctcacacaagacaaccctttctttgtgcttgcaagtgatggcgtatttgattttctttctagccaagctgtagttgacatggtaaggtaccttgttcccacaatcttgcaattcagatctagaatctatgaagtttgtatagtttgcttgatcgaatgttttgaagcttgttttatttatcgtagttgcatgatactcttttaattggttttttaaatgcttgtattgtacataagtttaaacaaattttgattttgatattgtagttttgttttaactatttaatcatttttagatccaagacaggacattgccttgtcaaatttttcaaaaatcatggagctttgcttactacatttgtgtacatatgctaaaaacttcaaatacttagttgtcatttatgattgtgcttgtctttccaggttgctaagtataaagaccctcgtgatgcgtgtgctgcaattgtagttgaatcttatcggctttggctacagtatgaaactcgtacagataatatcacaatcattgttgtgcatattgatggactagctgaagtaagataaattaattttttcagtgtgttttttcttatagttttaaatttatttgcctcaccaataacatgttttcaccacttttctctgtcagactggtggtggtcagacttaagttctgctgctgtcctacggccgcctgttcctcaagttgtggaggttacaggatcataatctccttcaacctttagctagaattcaaagaaccaacgtgttagacatgatttatcacaggctcgtctacgtgcaatcaaaagtcctctagagaatgtgcaagatttggttcctccatccatatcccatagaaaagcttacagattctcagtgtcatgttttggtggattgcatgcaaagagttgaactccagcctggggatgttgtagttaaacaagttactccttttgcattttgaatttacgtttttttcatttaatggaggtgaggttgttatgggttgacggtaaagtggtacattgttgggaattattttaccaggatct

SEQ ID NO: 320689 - DNA, 943 bp, Cannabis indica
cacataacggagaggtacctacagaagttccaagagtgtgacggaaggtatttttaccgccaaaaataggacttaagtatttatctgctacttggcataaaacttaggtatttataccgcaaattactctttaactttttttttttaaaaaaaaattaatattaaaaaacaaactgataaacaaataaaaaaaaaagaaaattttatttacaccccaaaattttttaaagacaccatattttaataatttttattttatataaaatttatatttttaattgtactaatttttttttaacttttttttctaatttatatatttttaaaaatatacctataaaataaaattaaattatattttaaatattatgacaaaaaattaaaaattaaaaattatataaaattttcttaaaaaaaatagaaaaatatagacataatttagaaaaaaatataaacataaaatcatataaatattaaaattataaaataatatgtgaagtatatttttttttttaaaatacaataagaataatttttaaaaattatttaagtttacttttttaataatagggtatacttatcattttatggtctagaaatagaactctcttaaaaataaaaggaaaattacataattaatctcctactttttgaaccaaaaaaaaaaatatggcttaaacataaatttgtacaaaaataagaagaaaacaaaactcataaatacaaaattttggaaaaaatataggtataaaataagaatttataataaatttcatatttttgtaaacatttttttttaaagaaaagctgtacaattatgtaatttctaccaaaataatatttggttgtaagaaatgatgtaagaaatactaatttatgaaattaaagcaaatttcaaattttatatttagctttcctaaacaatcactacaatttttattac

SEQ ID NO: 320690 - DNA, 811 bp, Cannabis indica
ttcagcccaaaatacccagttgtgactataccgcgccgacttgtcaaaagacacctgcagaaagatagaataaatatactatataataatattgtccataagcatgctataacattaaaattacgattttacccttctcgggtcaacatgtcatttattagtataattcataaatattaaattatataataatataattccacattaatacacatttagctagttaggatttgctaatcgtattccttaatcttagggtattacaccacgttgagagatatacaactggccagtgctactaaggcatttgtaccctttgtggctattactatagccaatgttaacacatttagtcgaataaaattagaacttgtgtgattgataaggatgaaggcatgctgaagcaaacacttttagaaacctataatcaggttgttttaagtaaacaagttcatatggtgacttgttcttaagaaatggggtaggtagtcgatttataagatgtacagatgtttagaaagtattatcctattttttgcactatgacgtgacattgaactgggtgacacatgtttaatatttttctacctgggcagaaggttatattcctaacagccccaaagattggtagaaaggtccactttgtccacacatagtaggatgtccgaacagagtcatcaagggacatccgaccaaagcacgatcacgtgatcaactcaaatgcaccaggcaggatatgtgaattaagaattttagagataggcatcgttacttccaagacacaaagataatccctatattcctgggatta

SEQ ID NO: 320691 - DNA, 689 bp, Cannabis indica
ttatttatcccaccctgctggatgggataaataatcccagacagatgaggttaactggattagttatccaagacttctaacatgcccaaacactggattggacaaattagcctgtctaatccaatccagtcctgcgtaccaaacgagctctaaggggattagtcgaggtttaagcctaatccagctagtcaaggccgaccttgagattggtaggctttatgaaaataaaaattattagaccctttagttaattcccaatgtatttttgaaaactactaaaataaatatatattttttaaaatatatatatatatatctgagctattggattgggtgagccttaagtgtgagcctaattcattctagctcaagtctgagccttctaatatggaaagagctttcttttagaaacttctaatatttagaaaacgagaagacaaaaatcgaaggcaagttcacattaatatttatttagtatatatccaaaagagtggagccatgcatgcatcttagaccaactcctcctccaacttggtccactcttcattggaacaaaatactatcaattaatattctctcttatccctacctaaaattagggaattccaccttcacttttccaaattgaatgattcttttttatatgtatatatatatcaaacctatctctaacaaacctatcttgagag

SEQ ID NO: 320692 - DNA, 625 bp, Cannabis indica
aaaagtgacttcaacaataagaagtttttgctcccaaaagactttatttctagcatgttaaatgaaataaattatggttattatgaataaatagcattataataaatatataattaaatatattacccgttgatggttacttaaaaaaaaaatcaatccatatactatttttttaacttttttatatttttacgatttgggttgctctggtggttgttatgtgaattttcgtaaaaatacaaaaaaaatgaaataaaaaaagaaccttaaaaaaataactactattcactacgtcaaaaaaaaaacaagaaatattgattttagaaatattaaacaattagattttgacccaatggtcaatataataaaagagaaatttaagtttctatgattaatttagttacttaattacaccaaaaaaaaaattattttttacactatatcaaaaatatgtttcaatcaaatgtatttaactttaactcaatttttttatctctttcaaccgatagaacaactccagtcatgtcatataatagttcatttaaggctaattagtaatttttctccctgaactttgacatgtagtaaatcgtgccccttgaatttttttgggcgttaaaaattc

SEQ ID NO: 320693 - DNA, 1337 bp, Cannabis indica
ataaggtgaaccaaaacatacacaaataaatgaaaaatacttctatttctttattgatattgaataatacggattacattgaaatggagttttatttagggcataaaacccaacatttaggtctaaccgtcctgatatatacaatttttattaactagagctcattactattcagcttttgccttgcctttacctacacatacaatcaatatctgtgagtcgacagactcaataagaaaagtataattgtaatataacataacatgaattataaataggtgcccatacatttaattatagccctatcccgcgtcccacgcgtattgagtctagaacgctcgtacaatagtactattgaccataatataagtctatactttgtattctaatcgtaccgacgtgatagcatcaatcagtactatgccaaacatatattcgtcagtattaagtgtaactctatatacactaataccgtcatttgtgacatgttatctaacatgaattcataaacatgcatgctaaacatgtaatcacatatgatattattatactaatcttacattgattccaaatttaggtgtatcgatcaacctgagtggaaactactgctcgacgatttacaggcccttaagtcacacaagctaaatcactttttgaggacttaaatttaaaactagaagctttcctattgacataaagcgtggcaataccctaaatattgataaaatatgaaaaactaggctcctaaaactgctaaaactgataaactggatttccaaaatagtaaaccagatcctagggtcctccctggagaaacaattaattggttctacagaaccggttaaccgtttctcaacaaaaactctaaaaacttcactacatgttcaaaattaccccaaactgcaccaaactctctaggccacctaattaatccacaacaaacataacacaactataaattgcaagaaaaactccgtggaatcaaatctgccatgaatgacctaagtttgagcttaaatgctcaagcttaggtctttctcaacaagaagcttcaaatccaacttagaatcactcaagcaacaataaagtaactttagaaaacaattctaaacacaaccaaaccaaacaacaacctaaactcaaaatcaagcaataaaaatcaaaattttcttcttgaaattcaaagagaaaaggggagagaagcttaccttgatctatccttctctttatctatagaaattctggctaaaatccttagttttctggtttgaaattgaaaggaaaaatctgttttttggtctttgatggtggccaaacaaggagagagagagagagag

SEQ ID NO: 320694 - DNA, 809 bp, Cannabis indica
atcaattagcattcttgaaaagaaaactatcaacatcaaaaaaataaggtccaagccttgcaatctgtaagacaatagatcgaagcagcataagaagccaagtttaaatcaaattcagtttctaaaaataataataataaaaaagaattgatatatacttacatatatgttaaatagaaaaagctcatgatttcattcaaatgccgaaatacttactgctgaaatctgtttgtttgtattgaaggattgcggaatgaatttgaaatcaaggacctctgataaagtacatgagggacctcaaaaatcatctgatgtggcctataaaataaatttacaatcataaattatacttgcttaaatgtatggattactgcttaaactctaaggtagtgcttggtttacatgaatgagtgtaagaatagaatagctattcttaaagaaaaatcattcaagtgtttggtttgtttattgtcattggaaaactcattccaataggaattgtaattcatgtaaactaggaaattatttttcctaaataaaatgacttgaaaagctattctatactaaccaaaaattatttttccttatctaccattttcataaataaatgattaaagttataattatatgggtaacattttttattttaaaacatatatctataatatttaatattataatagtatgtttactattttttttttgtacataattataggaaatcaatattaatattattattattatatgaatagaaggtgtgattattaaaattatatgaataacatttatgttgatacttaaatatt

SEQ ID NO: 320695 - DNA, 1323 bp, Cannabis indica
tcatctaaaggtgatggtcaaaacgttctttcatgatgtgattaggtctctgtagttcaaaggtttaaaaatgcctcctaaaagatcagtctgattacgttgtggtcgaggtcgaggtcgaggtggaggtcaaggcgaagtctaaggtagtggccggtgatggaggtgttgatgaaccatcgccagcactacaagaatggaaggagtgttttgctaaaatggaaaaaaccattcgtaagcagaatgaagaacttcattagctgagacgtcaacaggcaccgcaagttcaaataaggccaccagagccagaaaatagggacccaccaactgcatgtggtggtatatcctggtgcagatgctagacttaaggtattagcagagagatttcgaaaataacatccacctgagttcgagggaggcatagatccagttgtagctgaagagtggatgagtcgcatagaaagtattttgaaaatgctaagtgtcgatggaaatgatcgattgaagttcgcatcgtacattctaagaaaaggtacccattttggtggacggtggtgcatggaacagacaaaggatgtgaatactattaattgggatgagttcaaaaaagggagtggattcttgactccggatgcacttatcacatatggattcttgataagcttgtctttgctaattctttgattgtttaaagtttagttgatttaattctgcaccattaatcgtaattttcccacattaattattcaatatcaagtacttgctggtatgtacgtttaatattatattaatattctatttctattttttactttcattttagaatgaacttgtgagtttattaattaaattaatattatatagggaattatttatttatatcactttttgaaaaaatttacggtttgagttactctaatgatttctatgtgggttgttatgtgaattttatttacgatttaggttgctctgttggttgctatatatgtaggttactttctaattttcatgtggttttttgtaaaaatataataaaacagttttaaggtgtaaaattagtgagagggtttcaacaaaaccaactcgttagggcttggagggtgaaatcaatataatcgttgatgacagtattgatgacgatcaattaacctataacaggcaatgacacaagtcccaaacagaaacaaatggccgatgtggatttagaaatagatttcatgaaaaaaaaaataaagtctagaaatatgtaaacgcacctaatgattatcatctaattggatgttatatcaaagtttttttttttttctaatttgttaaatataa

SEQ ID NO: 320696 - DNA, 798 bp, Cannabis indica
agatttccttaacactttttttttcaatttcggtctcataatcgttctaaattgctggaatggtaaccacctgttccaaactatcaggaatacttcactatagccgacagttttgaataattagaaatttttattagcgattgtttaaaaaaaatactaatttggagaccaacgagaatggtatattttttttatggtaatgaaggttttaagttccaaatattattccaaagaagaagaagccattataatccatgggaggcctagagttaaaaaatttaaatagcacattaatttcaaatgtgttaagcctcttaatttttgattcctcaatcaaatttgattatctttaatatttatttttgtatgtttatgtttaatcttccattgtcaatagtttgagaactctcttgattatattatttattctcattttgtgaaattcattgttgaattttgtaaagtcctcctaattaccaacatataagacccattttctaaatcattgaatgcaaacagaaatatgtaatatcagttatttttaaatcttcttttaataaatttaaaatggggtctgtactaacaaaattgaataaaaattacagtttgttaaaaatttcattataatagataaaatcaagatgtattacaactctattgtaaaatgttaatataagagattgaataaatatatgttacaacacatatatacactatatatattatatatacatatatatataaaagaaaagtagattaagagaattataacacgtgtaatataacacaatgtatata

SEQ ID NO: 320697 - DNA, 3194 bp, Cannabis indica
ttatttagggcacaaaaccaaacaagttcatattaaaaatatattgcaagggcaagcactataacatgaagatctgaccgttggttggtaggaaacttcccatcgtgcggtgtacgactgtagtgaaggattccatgcgaataaggacacgcgtcactcaaaggtttcaccttgaaaggttattgccttcacaagccgttgaataaaaagagggttttagtggcatgtatgcaccctaccatgatgtgacgcatgggacaagatctgattcagtgtcagagagtggataactgtcacttcaggttccggataggatattgtcgaatgagcttagggatccatgagccaaagccttcttgaaccacactaatctactacctttctagaatacttgatgcaccagataattctaattctctccacttgcgtattgatagtatgagtcttggatccctatccttactcgctaatattggagacctttgattggcttctggaatataataatctccttatactgatcacggatcctccaaaatagcaccctttcgtgattgccatgcatcaggcatccatgaatatagataatatattgaattatgagattttataatctacaatttacaaaattatttcccgcaccttggtcaatcgtctcaaaccagttctttgctgatttatctctccggcccaaagcgccttcttgcccaattgcttgatctctgataacataattattggacaagaagtcactcactctctaaaccatcgcaagcattgaaaggttggttggatggccttaaaactcgacatggccaatccttttgatcgtgttgaatggaatttcctgaagagggtcatggaaaaatttcaattcacgcccaatttcaccaaccttattatgtcctttatctccactacctcattcaccttttcaattaaccagcagcttaatggttctgtaaccccatcccttggaatttgccaaggcgaccctctctccccctacctttttcttctatgcttcgagggcctctcttcgctcataacccaacatgtccatcaacgcattccccagaagcatgcccttggactcaagatctcctggaatgagcctatcatctccaatctttttttcgctgatgatagcatccttttcagtgctgtctcccctaatgcagccgcacaaatcaaggatatccttcacacttatagcttggcctcgggtcaacttgtcaattatgacaaatcatccctctatttctcacccaataccactgcctctgtgaaggatcagatcacaccttggctcaaagtgcctattcgtacttctatagaaaaatacctgggtttacctcaatcttttgggcgttcaaaaaaagaagcctttgtttacctccaagaccgtgtgtggacccacctaaacaggtggaactcaacttttttctcaaaaggaggcaaagaaattcttctcaaatcagtggttcaagcgattccgtcttatgcaatgacttgctttaagttaccccactacttccatcaaaaggtggaatccatgatggctcaattttggtggggaggtacaaatcaaagcaggaaaatccattggaagagtttgtcctccctgtgtaaatccaagtttcatggtggtcttggattccgttttatgaaagctttcaaccaagccttgttggcaaaacaagcttggcgtattcttcaggctctttcctctcttgttgcccaacttctcaaagcccgatactacccccactcatccttccttgactctagtagagggcatcgccctctcttgtctggaatagcatctcctggggcaaaacacttctctgatctaggttacgcggtcttgtgggtaatggtacctccatctctatttacaaggacgcctggattcctggatatgggaaacttgtctatcttcaaacgccaactacccttgataataaagtttccattctcataacccctaatggagattgggattcttagcaacttcaacacctcttcccgaccgatatctcccaagctatacaatccatcccactcctacagccccctggccaagaccgcttatactggtctcgtatcccccatggaacatacactgtcaattcgggataccaccttgcccatgacattatacactaacttgagccctctccctctatcacaactcaccaagaaaaatggtggaagatgacttggaacatgaagatacccctgaaaataaattacttcatctgacgagcttaccatgatgctcttcccactagtgtgaacctctaccaccgtcatgtagtgaggtccccaacttgctgccgctgcaataatcacgaggaaactttagcacatgctttgtttggttgtcactccgtccagaaggtttggaaattaactacattctatgataacattgttaaattaaaatctttaccttgtcatgattttttctatatatgtactgatattatgacacccaaagaatttcagttctttgtctgtcttctttggaaagtttggcattccaggaaacaagttttacaccatcaaccagaccaagatgcctcaactcttatccaatggacggaagattatctctactagtatcaccagcacagcgacgacacagctccactcaagtttcaagatggtagtcagcccccattttaatggcaaccaccgccaatcgttcacctaaaactcaatgttgatgcagcccaaaacacacactataacaaaatggggtttggaatgatagtttgcaaccataaggtagaggttgttgcggccttggctatcccttggagaggaatacaccaaccgcttataatggaagcacatgctcttcaactcgctcttgattggtgtcaaaagaacttaacttggagtaaactatattgaatctaattgttaaactctcattcataaaatccattcaggttgcacaattaagatccatctacaggagcttcgtgacaaaattattagcttactgtcttctcttcctcaagcttcgattggctacatccgacgtgaggccaactccgccgctcatcagctagcaaagcaagctttaggcctatatcagtaggctcttgattacaagatctattcattcagtcctttacttgagattgcttttggctacagatctctttctttttcaaaaaaaa

SEQ ID NO: 320698 - DNA, 1775 bp, Cannabis indica
caagggtatttttggcctaccataatcaaggattgaatggactatatgaagaaatgtgacaagtgccaaagattctcaaagatcctgagagctccaccaaacgagctcacactaatgcagtctccttgagcctttgttgtggggggaatagaccttatcaatcaactccctaggagataaggaggtgcacaatatgctttattcgtagtagactacttcactaagtggacagaagctgagctattggcaaccataacttccaagaaagccctcgactgtgtagtcaagaacatcatatgtcagtttggactaccttataagattatgtcagataatgggaaacaatttcatagtgacatgttcactgacttctgcaacatatacgacatcattaaaagcttctccgctgtttctcatcctcagatgaatgggcaggtggaagctgtaaataagaccctcaaggatacaatgaaaaagcatctagaagaggcaaaatgaaattggcttgaattactcctagatgttgaactcaaggcagagaaagattctcgcacaatggtgcaagctgacctagatgaagcatcaactagctttggtgaggtttagggccaatataatggcctaaaccaactgcttagcctccagaaccaaaaggtggtcaggttgattgctaagaccattggattgaaaaaggaccttaagaaggagcgcaaggagaaatatatggcccttgatgggtgataggccatcaaggatgaataacttagcttatcctcaaaggttctttacgaggtgtatctgcacaaccccagcgtcaacctgaagtacatagagtcgccattctgtgagagttaacttcgatgagggagagaactttataagggtagacttctgacagaggaagttggctttgatgttgagatgatggttgaccagacctaggaggcaccaaccaaccaacctaaggggactatggttggctagcctgttaatgtattagccagccaacctgtcgatgtagtggccagccagcccgttgatgtagtggccgaccagtctgttggagtttaggctataaagccttctttagaggctccacgcaccaaggttgatgttactgcctagggtccgaccagtgtagatccatctacattttccattatacctgatgatatttagaaacttttgttagttcttatgcttttattttgcacactatcattttgttcttgtatggcctataggccctatacattcaaacaatggttgtatatggtctttaggccttttactttggatagatgatcggcccgatgatctttaatcctgactttaccttttttattagacatataagtgtccggacttacttaatcatgtctaatttaaagtatgccagttgcagtatacttagctttcaattttttgcttgtcaaagctttaaattttgtctaagtttagctgtgcttgttcgatgcttgtatcgtgttggtgccctcatgtgatcaagcagacttatggtctcttggtaacttgaaactcaccaagtactatagatttttgcctgtgtattttcttaaagagacatgtttgtatgcatgtggaactaaaaataaagattaactttacgaatttatcttgttagcaagttgctggatacaatattgaactataatgccatttttatcattaattggtctaaaataagtgttatcgttgtgcggcgtatatttattgattctaaaagctttcaaaataaaaagtctacttctaga

SEQ ID NO: 320699 - DNA, 1565 bp, Cannabis indica
acttgaggggcaaatgttatcccattttttgcataatgacgtggcagaatacacaagtgacacgtgtcctgggcagagatgaatgtcccgagcagacatcatattatacatctgcatgtataacttctaattacctgagcagggtgaagggcagatcatctgagcaggcatagatctggttttctgaactacttatcaggacttagctacttcagagtgatctcgtaaagtccaggcacgaagacaatccctacgatcgtgggattgagtcagaggaatatggcaacttgttccaatttcctattttgtgtatcataattatgtaatgaatattctttcctattttatacattgtaagaaaaaggaaaatctttcctcatgcatttaggccctataaatagtgaattagcttcacaatgaatgggatcgaaagaattgcttcagagagagatctaagagaattactcagagatttcattgtaagagctttgagagagaaaaacactttgttctttgtctcaggttaatacaatctaatgggagtaggctattaccacacttacagggccgaacctctttaaaatctggtatttttattacttatttgtttttgtatattttaattattttcttaattgcttaataattgacttattgtcattgcctaaaagcgaggtcaacaatatctatttaatttaaatatgaatttgagaaaattaatatcccataaaactctcttactttggttcaattattcaaaataataaaactattttattatttattaattaataattgggattgttattatttaaatttagaattcaaatgatagccatgatatttatttgaaattcaaattcaaataaatcccaaaataaacttaattatttactttaaataatttatagataatatatagtgtatataataaatatacgctatatattatatagatacattatatacatatatacatatatataccgaatatatatacacatgtatagttggataacacaaacgataggaccagccatcaccatcagtctctgtggccagcggcttgacagtcacctgtccagcaatggccatggtggtcacgaggaggaggagcgtggggagatcgcatgatggtcggaccacccttgaacactatcaagttcatgccccattcgccgcccatgcacagtcgcatgagtccaatgggacttgactgtgcttgctccacattaaggcactcacgtccctattgcatgacatgcatgcatggttttcgcgtggccacggtacccaaaaccactcgggtggttgtgcatggcctgaataatattctcgagctcacttgcatgtgattttaacgtgcatggtcgagtttcaagattagaaactgagctcacatgttatgaacattacaatatgtaatttttacgtaaaatatgatttaaaaattacataaaaattttgaaatggcgggtttgcattatataatgtatttccagatgaattccggttagtcatacataaatgccccttaagtaatttaaagaatgaaactttgtaat

SEQ ID NO: 320700 - DNA, 757 bp, Cannabis indica
aaaaaaattattatttccgtctatgattataatgtcggttacaccgatcaaagcaaatactttatatgtcacttacaaaccgaagcaaaaagccctttttgtagtagtgtaagaaaataaaaactcaatctcaatctcttttttttcagcctgaagcacaattcttagagaagacactcataaaaattttataccctaaaagctattcatctcgctatctatcaaaaatttattgttttcttcttgtttcgttctcttcaacaaacatcactcatgtttctcatcaacataggattgagttcttcatcaccgttataagaattgagattcaagctctagcatcttattaataagagtcatcaagaggtaagatgagttcttccactttttggtgtcaaattttcggttaaattattgaaatctctttttttattttttctaaaaattattgtcgtagtataatagtcatatctttctcaatatttatccaatgcatgcgatcctggtgcctatagaaagcttattgaatccttcataatttttatgaagaactattttactgatgcagaatttttatttgtcaaaactagaatatctattctgttagtcatagatcattttcttatatctcctataaaagttttctccataaaattagaatatttctttgaatactgatccaattccagagatcttggtatctttagaaatcatattagatttttcataagttttatgaagaaaccttttgttaatt

SEQ ID NO: 320701 - DNA, 1692 bp, Cannabis indica
tatgttactatatacctattctagttatacgtttggaagtatttagtgactcctacgttactaaaattttagtaaataatccatcaattagctaattttaaagtatattgtaatttattgttataatttattggtataatttagtagtacaaccaaattactggtaactcataattacaaaaatattggttaccaatttgatagtgttgactagatttttagttaaccgacgcagcgtcgtaataaataagatttaaactaaaatcacagtaataaatgcagttaataacactaaaatttgcaataaatgtaaataaaagacaccggagtttaaagaggtttggccccgaatatcgataatagcctactccccttgagttttattgatctgagttgcaaaagtcaagaacagactcttgattgcaaacaatgataaagtgtttatttttctaagtgctcaaaattgcggatccctttctcaggtcatggatgaccctttatataggggagagagtcggtgcttctcgcttcaggagacgccaccaacacggagctacttcaaccgtctccttgatttttggagttgaagtctgatttttatgacaatatcccactattttcatggattgacaactgtctttgagcctttcatgggatttgaacatttgaaagaattactgacgacgagggtctcttatgggtgtgacatggttgtcgaccactttcagggatgaagcccatacttgggggcaacaccctcgagacccaacttgaggagggcgacaatcgtcatcgtggggtgacctctcgagatccaacttgaggagggcgaaaattgtcatcgtggggtgaccccctgagacccaacttgaggggggtgacaatcatcatctcggggtgaccccccgagactccttgtccgttgtcagtagtgatagtgtaatgtggatgtccccatatacctttgagaatgtcattgtgtctatggtaaaatgcatgacttgtaccatgaaggtgtaggggtataccataagtggtgtacccctagactaacccccttggggttaagaggggtgtacccctagactaaaccctatatagatcattgcagtttaggtaggggtagtaatatataccccctagactggtttgactcccataggtgtgtggtgattgttcattccgcttacgaaggcgttagtccatcgttttgccttcttaaagatgcccaccttactcaagctaggggtaagggcgaccgtctgacttctatcctaacggtcatgacacacttcatggttgacgaccatcccaacggttatgattttacatattcttcattaatttaatcccagtatttttgtgtcacgtgttgctactcttgatacgtcattgttgttaaaatttagataaatagatagctaaaccaaaccaaaccattagtaattaactcatagtcacaacattgttggtgactaatgaggtacgtaacttatagttacgcaaatttgttattctcattgctctaaaaaaatttatttaagctatttttgtgatcttgagtgtaaaactaagaataaatacaattaaaaggagaataaagtattaccgtaaaatgtgaagctaaacctctataaaatttagatcgtcaattgtaattttttgcttttgtgttatttatttttattttta

SEQ ID NO: 320702 - DNA, 2137 bp, Cannabis indica
ggttggcggccaggcaggggttgggggcacagttgtagatgtggagggatcaggtgcagttttgggtgaggatggtggaataatatttacactttgaacataatctgccacccgtcttgcttgggtctcgaatgcagtcgaatcttgctgcccaacttatgtttcttcgacctcatccaagcctatttccactgtggggacctcaccctcacaattggtcttccaataatcaacctctcaattccgaggatacaaaatttgaagaacaaccatctgcaaaaagtgaatatcacattaatcgcaatcatgtcgcacaaacatcgcaggaacttgcaaaatttcacgcataataatcgcacatatatcgcacataaatcacactacatcgccaaaaatctaataaactttataagctactgtcattaaaaatcgcacaaagatcgcatagtaatcgcactatatcgccaaaaatctattatgcatcagcaaaaaaagtttataagctactgtcattaagaatcgcacaaagattgcatagtaatcgcataatatcgccaaaaatatacaacaatacaagtgaagatttataagagaccgccaagcaaatcgcacaaaaatcgcacaacaatcgcataaagtcaccagaaaaatacactaaacaactgaacatttataatgtactattaagtaaatcacacaaatatcgcacaatgtcgcatcaatatcgcacataaacacagattacacttatagcaaagataaacagcaaaaatagagaaagattcacatacccttttctcaaacagtgcagccacatcaggttgcttcacatcgtgtttcgtgactgagtcgggggtgctccagttcaacattcgagggaatcgagtccctttgcactggccatacttcttccccaaaacttgcatggcctcaaatgcccaatattacagggcaggtgcatatccgtacacattgtacttcgcttctggttgagtaacctttttctccttcttgtgtttcttcttggtcttatcgttcttactcgacaccttatccatgtagttttgcctgagttgttgcatattcttagttgtggaagacaacaacttctgataagaaagaagaccccaaggatactcgaagaagttgtcttcattttctaccaactttagcatatctgtccagatatacacaccctcggcccgtgacagcagaacaccttcgacaaatgcacacaactccagcttgtatacatcgtctgcaacatcgcatgcctcaaaggctagccaaagggtattaaaggtcaccctttttgaattgttgagatagtctcacaaaatcaattcttctgacgaaggaccaccactcatctttaggcctgtgatcaaaccaaattcagaccgcccaaatctagcttcagttttacccacgtaaaaccacacttcattatttttggcctcactcattttcttcttccttagtaacagttgatgcacaataaccccactgaatttcaattcactggcattccaaaaaactccaaagggtgtctccttcatcttccgaatcaagtcaaaagcttcaaatttagcctttattgatgtaaagtacccgttccctctgtaagttatacgccctcgaaagtgctcgacaatgggagaataaattctggagccatctgcatcaaaaaagattaattagcaaatatcacataaagtcgcacaaacatcgcataaaatcgcataagacatcaacaaaaattataagctactgccaacaaaaatcgcacaaatatcgcatagtaatcgcataataatcgctaaaaaatacagcgtaacagctgaaaatttataatgtcaggtaaattgcacaaaaatcgcatagaaaatctcataatatcgctaaaatcgcacaacctataccacatcccatatcgctcaaaatcccacaatatcaattaacatacccaacacataaagtataagtcttaatcgcacaatatcgcacacaaatcgcacaatttcgcacaatgtcgcaaaaataacaaaaccaggaacgaaaagaatcagcacgaaactcataattttcctacatttttcttgcacaatttatcacaaaaacacatactaaatcacaa

SEQ ID NO: 320703 - DNA, 668 bp, Cannabis indica
gtaaattttagaaaattttaaattgtttatattgttgaaaatattgctcaaacaattatctactacgtatatatgaaaaagttatcatgattacagtaaaatattccaacttcatcttcggcattataaattattcaaattttaaaaatttattggtaggtgtaaataattacaacatatattattattaaaaaaatagactaaaagacttttttaaatgttgaaagagttaagggccaatcaaaataaaggtgtccaatacatatcaaattattttttttattgtaaaaaaaactttatacttggccctccttaaagaggaggctggtttcgcactgtgtgtaagtaacactcttgtaaccaatccaagatcattcactaaaagaatcattttctcctactttggctttcactacaacagatttgtatattaccagcggaagcatctgccggtattaaatgccaagcccgccggtaataattaataccggcggaatggtttccctgcatcaagttttagtggtaatggtttccctgtatcacgccttctttgctcaacatccaagttggtagcaaggccacgccctttcttcttggcggtggagcagtctgacaagttggcggtaccctctagggtccggtggatcggtaccacccccgtctccacc

SEQ ID NO: 320704 - DNA, 2172 bp, Cannabis indica
ttggtccttaaagtccctcagctccttcacatccacggtcaggttggccgtcgacagcaagtcggtgtagtgcagctcctccaaggattttaacttagcggccatctcaaccatagcgtccttggtttcccgcaactcgcgcttggccttggaagcagcctcaccctcacccttcagctcctcctggtgccttgcctccgcctgagcctccctctgctggtcctcctcctggaatgccctcctctcagctgacaagtcccacagacacctcacggccttgtccatgcccccaaattcagacatgacgtacccgtggtaaattagggtcttggagaggcggccggtctctgcagtaatctaaaaaaaagcaacaaagaatgagatcagatgccttaagacaaaatataagcggaaagagaggaatgaatcaagaactcaccgcagccagggcagcgctgatgtcctgaacctggtaaacagagttcactgaggcacaggctgcgtatcttttgggcgagaattgagtcagatgggagacaaactagctagtcatctcagaggcgaagggggcaagagtaggcccgacgaaacggttgaaccaatctgtcggggatccatgttcaggtcccagggatttctgatggcgtcctcacgtaaggggtgctgttgctcctcccgtaagattttcttcagggcttccccctcagcatgtccttggctgaactcgtccagggcgtagttgtctttggaaattcgcaatagtttcctctcttcgtccgcggggaccgaggtgagaacaatgccatgcggcacggtgtactcctctacttccaaaggaatccctgagttgtgctaacagccggagtgtccctcttccggggccacttagaagactcggtctcgaccatcttcccttccgcttacggtcaagggaagctgcaatctcgccctcctcctctcgacttcctcgaaagacaattgtgcctaagggggcactagaagacgacctcccgggagtcaccagtcggggtggagccggaggcagagaagggttagggctgtaggcttcggcaagagtcgccagaagatcgtctattggcttggctgctgcaacaaagaaataaatgaagtgttagaataactataagaaggtgtgcgcccaacagcaaaatgataaagctagtcctaccctgactctctaactcagccctatcaaagtcttgaactacagtgctggcttcgtcatccccaagaaagctgtctgaggagagaaaccaactggaggacaagtaggctgaatgatccaatgtaattggtggaggaggtccagagcccatccgggatcggcctaagaaagggcccaagtgggaaaagtagaagtctttggcatgatccccccaccgagtgcaggacatcctaaacttaaaaaggcgctcatcaaatcctataggcctgcgtcgggtatactctcaaacagaggggacatgatgaattgttaaaggggacttgcccgaaccggacgtactggcgtcagggtctcttgtgttggggaccagggccagaggtttaggcctagaaggcacctgacctggacccacctccagacaaagagtcctttcggcggcagccagggctttaatgtatgccagctcctgttccctcttgaagaggtacttctgataccggtcctctgccgaagtgattatgtccactccgagcgccctttccgcagcaggagttctgacattcaggcagatgaccttggaaaggttaaagtcatccaccgactgattctcagagattagcttggccttccgacagttctccgtcgtgaccaagtccccaatgttgagggccttcttgtcgtaggtagagaaggtcttggcccgttggaggaacagctgggtaggcgcagtctgcgggtagggaggtatcctgacccactccgtaagaagctctgggcggtccatggcttggaagtcggagaaaaagagaagcggtggcggtattactttacatgcttctgaaaattgtaagggaccgggccctcatttaaagggtgggcccagagcccataaaaaccatccttgaatttgtcccactttttggggacggaaacgagttcataaaaatataaaatctcagccgaattgggcgaaccccagctccggg

SEQ ID NO: 320705 - DNA, 3015 bp, Cannabis indica
ttaactaatcttgattaacagtataactacttgacagctcagcaagattagtttcactaacaggccccctcaaacttagtgtggaggagcaaaccacaccaagtttgtccctaagaacagcaaactttgagttggagattggcttcgtgagagtgtctgggagttgatgttcagcagggacatggttggcagcaagcataatggtactagaattgtcacaccagacaagaggggagaagataaaggcagttgcagctcagtgagaagagattgaacccagctgatttctgatactacagctgctaaacttcgaaattctacctcagtagacgagcgtgagattgtgctttgtttcttggattgccatgcgattaaatttcctcctaaaaagacacaatagccagtagttgagcgcctatcatcaggatcagccgcccaatccgcatcacagtatgcttctaagttgaaatgaggtgatcgtttaaggtgcaatccatagtctaaagtcccagcaatatacctcagaatcctcttgacagcaacaagatgagattgaagaggtatgtgcatgaattgacataccttgttgacacaaaatgctatgtcgggcctggtaatagtagcatattgaagagcccccacaatggatcgataaaaggatgcatctgcaactggttcactgccatagttcgatagccgtaggccactgttcattggagtgttttgagttttaactccttccatttcagctttacataggagatcttggaggtacttttgttgagagagaagaaggccatcagatgttggaaggacttgaataccaaggaaatagttcacagtccctaaatctttgagagcaaaccgagaacttaaagttgaaataagtgctgagacttcacttaaacctgcctttatgtccacataaactaggacatagaggcaggtttgaggagatgttttcacaaagagtgagtgatcagttttggcaaaggaaaaaccaaagtgagtaagggctgaagacaacttttcaaaccaagctctgggagcttgtttaagaccataaatggccttattaagcttacagacgtggttgggaaagttgggatcaacaaaaccagggggttgggtcatatagatttcctcagtgagatctccattaagaaatgcattgtccacatcaagttgtcttatagaccagcccttggtgatggcaagagttaagataactctaatggtgaccggtttggcaacaggactaacggtctcattgaagtcaaagccagcttgttggtgaaagcctttagcaacaagacgagctttgaacttgctgatagagccatcaggattctcctttattcgatagacccatttgcaaccaatggggattcgattgggtggtaatttcacaagaatccaagtattattcctctttaaagttgtgaactccatgtccatggcattaagccatttgggatctttgagagcagatgaaatggttgctggtgtgagtgaagccataagaactttaggctttcggattccagatttggatctggtttttcatggcatgagaattgatacacgtgtggtcatttgatgtagatatagtgtgggtattgggagcaacaggagcagtagaggcattagtgtgttgctgtgatatatgtctctcattgccagcacttgctgaaggttctggaggagcaacaggagtgacatgagcacatggagttgtggtatgagacctgttacaatcagcaacaacaggaagaacattagtaataacaggaaaagtattggtaggaccattatcagagttggaagtgctgctaggagtggcagtggggacaggtatgaggtcaggagttgtgtttggaagcaagtgagtgggctggcctgtaggaattacgtagggtgggaaacagtagtagggacactgttattgagagagtagggaaatgtatcctcatcaaacaacacatctcgagagatgtaaagtcttccttcctttgataggcacttatagcctttatgagcaaggctataccctataaaagtacacggctgtgacctgtactgcattttgtttttgttgtagggcctaagattgggaaaacaaaggcagccaaagactttaagggaggcataatctggctttatatggaaaagcttttcaataggagagattagaccaagttgtggagtaggcattctatttattaagaaaacagcagacctataggcctcatcccaaaactttaagggtaaagaggcttgagctaacaaggttaagccactttcaacaatatgcctgtgcttatgttcagctacaccattttgttcatgtgtatggggacatgaaacacaatgtaatatgccatttttcagtaaggtaacttgtaaaggcttggtactcccctccccaatcagattgaatcatttttattttggtgtttagttgaagttcaacctgagttttgaagctaatgaatgtggacaaagcttcattttttgttctaagcaaataaagccaggtgtgcctagtgtaggcatcaatgaaactaatgtaatacctatatccatttgatgaagtaacaggggcaggaccccataagtcagaatgcaaagcttgtaagggggctgtgtaaacagtattagaaataggaaagtgaagcttatgatgctttcctagacaacaagtagtacacacatcagatgaaaaattggtatttttattagtatcaagtttgatattacaagaagctaaagtggcttggacaatccgagaggaaggatgtccaagtctcttatgccacaaagaaaaaagattgctttggttattaagaatatgactgttacagatgggagaaggagattgaacttgagtgttcctttgatgagatgacagaatatcaagttgagaaggatcaaatttgtagagtcccttgtcaagtttcccaagcattaaagtcctctgagtatcctggtccttgacaacacaataagagggat

SEQ ID NO: 320706 - DNA, 1418 bp, Cannabis indica
ttacttttatacaggtccaaaaccaccctctccaagcttatttgcctctgcaaaatttttagtggcaagactaattgtatgcaggtccaaaaatggaagctcaaaatcatcatattggctttcctttctctctgaaaaaaaaaaccattaatagtttttagtagttaatgtttaaaatgagaagtttttcttttgtaggatatgtaagtgagtttgtaaggtgcatgagattctatgtcaaaacttgacaataaaaaaagtagcgcatacatcttatatgtggtattatctttgtgggactatttataacaaatctaattacaagagcgcaatctaaagaataaagaaaaagacagaatgaagtaaaaggtagagaagaaagtatttactgaaaatgcgtctcctccttcgaatgtaaaaggcaatcaaaataaacacaccacctaatccgactactatagctattattatgactactctcttcactttcaccttcccacgactaccatcagctctggtttcattatgaatttttggagctgtgaaacaaaagaagcaaacattaatcaaatattgaacaacggaaaggagatccatataaaatgtactaagaacacacgatgtgaacctatttttgaatttgatattcgaatataagtatgtggttcgaaacgactagaagacagttgtctaatatcaaacagatctccaaaccagtggatacaatcttcatttgagtaaattgactctgagaatggatagctataagccatacaagagcaattgctcaagcatttactcctgcattcgctttcatccttagtcttagtcacccaactataattagtatccggtgctctaaagcctgaatattgatcaaattcaaatccttcctcctcttcaacttcatcatggcaacttggaggactgtatggctcacacccttctgaccaagaccttgagttccaattgtcttgattctttggcttgaagccttctaagcattggcatattggctcctctgttacacttacaacattacattgtgaattagctccgcagaagccataatagtcacatttgtctcttgggattgccccataaaaagtcccaaagtcccagctaggttcaatagttccgtcataattcaggacaatttgtggcatcatggacttattttggaggctgtaagtgtagtaaacttcatcatcgttgtacacagaattgaaaatagaatcatccacagcatcgctggaactcataccatcccacaacccttgacgatacaatattgcagatccattacggacagttagttgaggatatgtatggcgtttctcatcaagctcaatcccataagtgaaatctccatcacatggatcactataaaagctcttccatgatgataaacgcctatt

SEQ ID NO: 320707 - DNA, 618 bp, Cannabis indica
taatggatcgaattacccctcttggacctggagggccctaattgaggaagctagcctaggcacctcccgaacaagtattcaaagggtccaacacagatgttgacagcctcagggtgtcacgggtgtccaccctctgtacacgtcgaatctccaagtgatggtgacactttttctgacaagataagatcatgtctcctacatcccataatagtatggcatgcacctccaccacctttttaccagacaggtattacggactaccacttgtataggtgaaagctttaagcgacacgtggcctttaattttaaaggttaaacttttgaaggacacgtgtccattgcatacatattatcccaaatcacctagctgcaaggtgcacaagcatgattttcgacatggatttaacaatcagatcttattttacgtgtaatttaccctaacagtggaatttgaaaaaaaaaactgtagcgggtcatgcgcctgtccatactaggggtggcaattcgtgtttgcgggtcgtgttcgtgtcgtgtcgagacccatatataacaggtacatactcaacccgaacacgacccgtttaataatcgtgtcaaaaaatgaaacccgaacacgac

SEQ ID NO: 320708 - DNA, 1887 bp, Cannabis indica
aataataataataataatagagagagctgagcaaaagagagaaatgaaatgagatttaagaaattttgagggttttattaaaaatgggaattagtcatctatagtatagccgatgtttgaaaattttcggggattctattttaaaagtgtaaagtttcaattttgtaagtgttttaaacaatcgcctacacttaacgactattaaaaactgacaagaattctcaactataggtgtcgcttttagacactcatttatttttattagcgatggtccttgaaaaaagcaatttttttgacaaacgagaatagtgatttttgtagtagtgttggaagacttctctaaaaagatgtcctaggtgcattaggttgaaaatatgttaatttgggcccccaagatatcctgggggcttgcactgagcacccaggtgtggggaaacatctccaaaatttgtctctttgattctcaatcttcatttggtgaaaagtactccacatattttattttgtcaaatttgcacaggcatcaccaggtgatacgaaattggtgtctaggttgaaatgtcaacctgggtgcccataagttgagttgggctcctttgggatatcactgataaaatatcatggcatggcattgttcctcgatatatttaaggaactgaggtccaagaatgtccccaagaacctaaaccctagctattgtgcgcccatatcgagtagatgtcaacttgggagcccattagggcttcatggttcctgagtgttatttctcatagacttatctccaaagtctaaaacatggcttgagcatgtctctcatgtatctaaagataatggcttagcatatttcccataagaagtttataggaaccaaagttgatacgagacaagacacaagatgtcaacatgggcgctcaacactgatgttggacccagattgaaccttgtgatctacacgtgacatcctcagcttaatggttcttcattttagtgggtgtcctcagtgtgcaggtaacactgccctatcctacgatgcgatatcaccgtgttgtttccttcatgccatgcgtcaaaagtgcccacataatcaagcaaaatttttgggtaaacattttcccctaagttagtattttattttggtacaatgctgactttggccctggattgagaatttggccctgcccttagcttgggctcttctatatctcggctcaagtccatattctcaatccagggccaaattcttccccgtcttgggtgcatctcaaaatagttataagtgcagtctctattctttcctcagttgtagccttagaggtattcaacgtcccctcaactgtgttcacagcagaggagcccttcttcgtctcctaggttgttttcacagcggatgatgttttattcgtctccttggctcttatcagaacagatgaggtcttgttcctctcctcgattgttattatagcagaggaggtcttgctcatctctcagctattttcacagcagaggaggtcttcctggtgaatgccaacaaagtcttatagcatttacgagctggtctttggttgaccaaggatacgacgaatgcttgttgctatcggaacttgacaagcaggtcaaatgtggacaaagcggcttggaagtctcctttgtttgacaaggttttaataaattattaatgtatttatttaaattataaattattgtagtgtcctcatcaaccaagtaatataaggtgtggctataatgttatgagaatgataaaagatctagttcaatcacctaatcgacgtgactatattaagaaaaaggtacataaatatttgtaaaataattatcaaatataaatttaagttttatttatgtttattatataattaatttatttct

SEQ ID NO: 320709 - DNA, 1027 bp, Cannabis indica
tatatatatatatgagaatatacatgatcatgcctctatagaatatggtatgggaaggaataatttccttttaacacacatatatataaatacgtacacaatatttagcaagaaaaataattgtagatgttgatgttagtgtgattaaaaagtgcatgtactcacgctagctctatagttatatatatttaacctcgatcttttttattaaggtgaaaaaagaaaaagagaaaaggaactatagcatgatcttttagaacatatataatatatttttttaacaaaaaaaaaagttttctttttgtagtctctcttttttcttaggtctttatgcattaaaaattgtgtataagcaaaaaaaaaaaaaattagtagtattaacaaatgttatcgcttctatttttttttttttgggggttaaaggttaaagtaaaaggatggcttgaaagatcatacaaagtcaatattttttctcttaaactgtaggaaaaaaaaaaaagtcaaatttatttttaattactttattcatattcattcataatggagacaaagctagagggaagttgtgagtcttgagaatattattaattactgatattaataaatacattaataccgacattatgtatatgattgatgataagataatgatatttagtgtaaaaaataaaccattatggtggaggatccaatgtaattaattattaatatatataaacataagttaaaacaaaggagttaattaattattagatatatatttatatatatatatatataaaagtactacttttgaaaccatattgcatggtttatatatagatgatgaaaaagaagtaaactaactatatattggtttaatttgttgtttttcttcaagatactaatgacatatacagtagaaaagaggtgtaatttaaagactttctaaaagaaattaaaagaaagtggaaaagggaaaagaaggaatctcaaggcaacgtttcttgtagaagtaaaggaaaaaaagaaaaatatatataagaaa

SEQ ID NO: 320710 - DNA, 2381 bp, Cannabis indica
ctataatgccccgctatactaaaaatactaaaatgtgattctaatggccaaacgccgcgttccaatgttgtcgggcacaaaacatgcaaaaatataaattttcatatatggtatatataatgcattctgaattcaaataaatccccgtaaaataataattcataactaatatgcaagtttcataattaaaccctaattatctactaatttccaacttatagttaaacggtctttacagggacccataggtaattcctgcccctagtgacataagtcttccactatcatcaatgtctcttaccttggcggcatcgtagcttttaagctttcaccttgttgttacttcacattggcaagggaggaacattctaactatctagccttggcgacttagaattccttcttcaagtcatgtgagagtttgtcccatgaggtaatggagtgcctcttaaatttcttgaaccaagtcttggctgctctagtaagtgttacaggaaataacaaacattttaagtcaccaactacttggtgggcacacataagtgtgttgaagtcacttatgtgtactctgagatccgtactcccatcgttcttggttgtggtcgacatcttaaacccttaccgatatggtagggccaatatcctaggagagtaaggttttagctcctcattcgaatcatatgcagtgacattttggttatttgttaccattagttaatgtatcatttgttccaatacattgagcctagggtcattggctcgtccttcctaaccatggctagcttagggaatattgtttttatatccccaattgatattattgttgttatttgctactggtgaaattgggttctaccttctactcaaatgttcccttaaatcaattttctttgattgaggtgttgttgcaatgttcattattgtgaagtgaattattatgaacactaatggaacgactttcggagtcaggtcgaccactatcctcagcaaagctcactgttctttattgttgttgatgatgaagagagagtgggggatgctcaaagtatggcgtcaaaggagtgtctaatttacacacatagctattttcttcggtaggttggtgcctcaggggcatcctttatttttgccaacaatatgttggcttctgacaagcacgatcttcatgaggaatggtgccttgcttatgccccctaagtggttgagcatgtggcgcattaccatgggaggtggatcgccttggtttttctagactactacaaattgacagatttggtaccttatagtttatggtggtgcttgaatcggagaaggatgcactctcttttcttctccacccatgttattattctcatagttaggccttggaggaacagtttgggtcccatgagcatcatgaccactcccatgtaatggtaatcgactcaaacatttggtcaaagtttgtggtccccctccttgttggattattcatgggggcatgttctctccttaggcgccctcttcttctcctaggtggagaaggatttcttggtacaggaggttggtccccatttctttgggctagctattggagctctctattttggcgtaggctttctgccaacaagacacttagagtatcattttcttgaaacacttcatgcacatgtatggacctgactggtgggcactccctaaatggagatgaggaactctcacaatcttgtacatgtcccacatcttctggcataggtggcatgggatacttttctcggtacctacaggttccctctccatgttgttgtggagggactaaggttccttcacttcggggttagttaacttcccccgttgggacttcagcatcctcctcataatttttcctcctcgtactcaacaccattattgtaaaaaaaaggtaaattgatgagttttcaaaaggggaaaatagacaaattttcacctcaacactctcaatgaaagaaccaaactgtattaagagcactctctaatcctctcaatgaaagcaccaaactgttgttgcggttttttgttaacaaatctatgaagatcgtaaaaatatagaggattgcgatgaattaattttgactaataaaaccacaatcaatatatttgacatgagatatttatagtagttcgcccccatgtcacgatggtaatggggctacgtctacttttgtttttattaattagatctaaaacactagatttatgttctcaagagtgtgtggataaaaatacagtaaaggatttctaggtgaaatcttaaccgagacttatgaacattggactcatgggagactcaacattcataaatctgatcaaagttggtggttgtaaggttcttgggaacaataaaccaataaagtagaaaaaag

SEQ ID NO: 320711 - DNA, 693 bp, Cannabis indica
tgtttaaacaacatacttgtgagtagatctaagatcctggtaaaataaatattccaacagtacggtatacccagctgcatacccttctgatctgcccaagggaatactggatgcagtagcttgttgttgattggtaacttgttaggcccttcttattagtatgctggcctgcctaatacgatcattaatggctacctattgagccctcataatttccatctccaggtccctgcattctatgaactgacgtctttgctcgtcaaatgcaaggcttatggctgctcggacgtcctcctgatcatgatgcaaaatgtgattatgaccttgcatgagctcaagtgcgctcacagattcttgagtttagtgtcgtctccagcagtcctttgagtattagaagtggatgggaccaaagcgctgggagtggattgatcggctgctaaactaatgtttccagtttcttgtacgcctgatgtgatcccagccaaaggggaagtcactctgtggcctaaagtaggaggtttgtattaacctacttggagtttgtccctagtggtcctattgtgtttctaggagtatcaatcaatccatttaagctatcttcaactatacagtcccatacatacacaatctcagaatcatcccacttgaccgcggtgtgggattgcacattttacttggtatttcctcttacga

SEQ ID NO: 320712 - DNA, 1431 bp, Cannabis indica
ctaatccacgaagaccaaggtagacaacatccggtatactatgtgagtaagcatctcttagatgctgaaactcgttatctacgaatggaacgactggcatttgcattgctaatcacttcaagaaagttgcgaccttactttcacgcctttgcagattttaaactcgaatttccaaatgacggagtggcagtaatcacagaatagcgagttgatcccgacgtactaacgggcaaggggtggactttgtacgttgatggggcatccaacagtgaaggatcagggggtggaataatcctcataagtcccaacaatataaaggtacacactgcccttagatttgagttttctgcatctaacaacgaagtcgagtatgaggctctgatcgcaggattaaaactcgctcttgagatgaaagtcgagtatcttcaagcatttagtgactcacagatcatggtttttcaagtcaacggagagtacctagccagaggaggtcgtttggccaaatatctttcttatacttgtgagttatgacaaaagttcaaaaagatagttgtttgtagaatacctcgtgcttataattctcatgtagatgctctcgcccgattggccttgacaagagaagctgaattactctatgtaattcctgtagatgtattaacttacccaacaatcaatcgagaggagatgatggaaattgatacagtcaaaaaagtcatctggatgaccccgataattgactacttgaaaacatgaatgcttcctgaagataaaacttaagccaaaaaactgcgatatccagcggctcggtatgtcatttatgatgacaagctctatcacagatgctttagtcaatcgttacccaagtgtatcgatgggactgagtgcaattatatactccgagaagtgcacagtggaatcagcggtaaccatgctggtggcaattcccttgctttaaagatcattaggccaggatattactggccaacattgtgagcagatacagctagcttcgccaaaagattcgacaagtgtcagtgaacagctacttatgtacacaggccactgagccaattaaattttatcactagtcactatcccttcgcggactggggcatagatttaattagacaattatcaaaaggaaaaggaggggtaaaatacgccgtagtcgttgtttattacttcaaaaaaatgggttgaagccaagcctcttgcaactataacagccaccaaattgcgcgagtttgtctacagcgccatcatctgcaggtttggcatcccttgtaagttaatttctgcaatggtaaacaatttgactttaaggagaagacaaactatgcgatgaattggggattcaaaaactttttcggcagtcgcatatccacagggtaatgggcaaacagaggcagttaacaagatcattaagcatac

SEQ ID NO: 320713 - DNA, 1410 bp, Cannabis indica
aacaccccttatattttctgtttttggtaatttttgatattgatattggtttatgtgagatttattggttttgtaattctttagttggggataaaaaggaagatttttgatttgtattgagaaagattgaagcttgaattgagttttacaaagttgttgtataaagttttggaaatttatgtattaaacccttatacttaaagggttgttatgtagatttttctattcattttttagtcttaattattttttttttatctatcgcataacttcttgtagttatttaagattatttataaattttaaaaaaattttaaataatttataatgccgaaaaataattacgtttaatattataaattaatttattaaaatctatatgtaattaaataattatagcgtacataattattaaaataaatttaattaaaaaattcttttacatgccgaaataaataaaattgttaccgaaatttttttaagagtgcattgtaaactcacccgtaaatttttattaccttatctaaaaagacaaacacacattttaatgaatgaaataaaatttgacaaaacaagagaaagtaaacaacacccttttcttttgtttttgtaaatttgtaccctcatcattttgatattgatatttgtttaaatgaaatttttattggggaaaatgaagattttgtatgtcgatgctataaactattgagaaagaatgaagcttgaatgaaatgtttttaacaaaaaagttgtataaagtttacttctttatctcatttttggtaatttctaaaaagataaacacacattttaatgtaaatgaactaaaatttgacaaatcaagagaaagcagaaataatagacatagacacaaagaccggcaattaaggtgataaaagtgaggggctttgttattgaatttgccagctgggttttgcatgttgcttcgacagtgtcccatgttagtgggtcagacattatatatttatttatcaaaatgacagatcttccaagttgaaatgttttgtggctaactatgagctcaaagagaataaaagacaaaacaaggccatacttgagcatgtatgttttagtttctcaatgtacacacttgaaaagaaaacaaagaaaagtgaaggaaattataactttcccaatagcataataatatgagtatgagtgagtaaataccattggaaattaggcatgtcaaaaagatccatttatttagagcgggttggagctccgacccgacggatcatttctgatccgaaacattcggatacttactggatcttggatcagatccgctccgccccgccttattttttctgaatcggatctgatccgacccgatttcaattattttaaaaaaaaactatttaagactcacatcccttgggacctgga

SEQ ID NO: 320714 - DNA, 602 bp, Cannabis indica
gcatccatgaacgacataagctcgtgtctagcagctgcatccactaattggtcaatccttggcagtggacacgatgtgtggcttgaaggtggggcattcgaggacaagtaagaaattgactaaggtgattgaaaacataggagatgtgaggcttgtaatggtaaggtaaatgagtttacccatgaggcttctgtaggtagtaggatcgggtaaaggtttgcctttatccttgttgagtttcaggttagattccattggaatggatgctggtttggctccaaggtagcctgtgtcagttagtaattgcaaggtgaaaggcctttatgaaacaaagatgccttgtttggttctccttatttccatgccaaggaagaatcgtagtgagccaatgtccttgagtttgaatgttttatctaagaactgtttgaaatgggttatggctgattcattgttactagctacaatgatgtcatctacatagatcaacacagataggggaattgtaggtgttcttttgatgaagagtgaattgtctgacagggattgatgaaacccttcagttttgattgtggtatttgttggaatttattttaccaggatct

SEQ ID NO: 320715 - DNA, 1243 bp, Cannabis indica
ataactttttagtcgcaatataaattttttgtgactaaatgtgacttttagtcccaataaaaacttacttttgactaaaatatagtattcagataaaattatcactaatttagttttagtcacaacatgtattgtgactaaaaatacatgtagtcacaacaaattgtaatttttgtgatgtatacctatagccacagactttttagtcacaacataaaatgataatttataattagtcacaacttttttacttttagtcacaagttttattatgactaaaagtaagattttttgtagtgtttgtattgggcaggatgcaaagatatcactagttaaatggagtagtgagctcttctaaaatagatactattttagcaaccttttatttgagcaaaataagaatccaacgttgtctagtagtgagctctagcacttgccacattttttgacatagttcatcgaatcctcgatcattgttggtcaaaaatacccctgtcagagtatctttttggataagctttgcccctgagcatgattgtcgtagaagctttcatgcacttctatcattagacgctcgacttcattcttgctgacacaccttaagagcagcattgtgaagcttcgcctgtatattactccgtctaagattagatacttagcagcctttcttctcatgtttttttacctcattcttgttttcaggcaaggctccaattcgtaggtaaacaacaagagatgtcatccatgttggactgtcgtcgaacatgtcgagttcttcagggatggcaatgctatgttccttcaattactgtattggcaccatgtttgccttgtcgataatggttctacttgtcagacaggcaaatacatctactgtggcattcagttctctagggattcgccttattgtatagcctttgagctgacttatcaagtcttggatcttgctcaaataggcaatcattttttcacctcgagttgtgtattcacctaagacttgatttatgactagttgagagtcactatatatgtcctggttgttagcctgtaattcatgcatcagcttcaggcaaacaatcagggctccatattcagcatcactattagaggctttgaagctgaatttgattgctctgtacatctgttgctccccaagtgttatgagggtaatgcctgcaccggatgattggtcattgcagcttccatcaacatgtagtttccatgttgattcttcaggtttttg

SEQ ID NO: 320716 - DNA, 685 bp, Cannabis indica
actatcaaaatcactctctttacgaataacataaggacaaatattgcttgatccgattctcatatatatatattttattcgcttaatcttttcttctattataaccttaatgattagatttcacccttaccccaaaattcaacctagttatttctaaataaaaagtagagcttaaaattatctatccattaacactttaaaaaaatatcaaacttaagaacgtaccaatagctctatatgccaaatttattaaacttgaaacatacactctgttagaaatgctaatataaggactaaacttgtttttaccataacatactctatttcaatcacaatttttcttttgagaacactcctcttaaactcttgattatgaaaataagtaaaacctatcaaaattaaacttaatttacgtaatatacctacaccttgaaacatttctttaaattttcaaaaaaaatatcccattgatataatcctacccatgaaatactaagacatattcttctaaacacaaagaaaatttttaatcacactaaactcgtacacctaagatgtaacgtagcataaaacatgcaaaaccaacacgaacagattaactaaaacttacagtacagtgagtcgagctcgtctcgtggcaataaactttacatgttagggataaccacattctttaggaccgtat

SEQ ID NO: 320717 - DNA, 3957 bp, Cannabis indica
taagagataaaaaagttagtctatggatctaaaaagcatcggacatgatcgatctagcttttaggatagtatactccaaatcatataatattatatacatatatatcgccctaaccaaaagaagctatatatgtattattaaaaaaagaacatcgtgaggatcatgtatatatatgtttcaaaaagaaaaaatattgaatagtattaatccgatttatagtatgcaaatataattctttatcaacgtgatcacgatcaattatatcattaattacaaaatatttatatatatatatatatttatatatgtcgatggattgatacacttttctatatgactactaaaaatgatcatcattttaagaactttgctacaatcaataataatagaggccatgaattagtataataacttttacaaattcaaagaaacacggaactagctaactacaaaaacttcttaaaagctagctagctagtatacatactttctgtaaccttctcgtttcaaatttttattcgacatcttttcacgaatttatgactcttatacacacgtgcgtacttattttaaatcgaatcatttgaaaaatggcaggcttaattttaaaagtattagcatcaacaacaggtggtcctatactagattgagtccatgtcatagtggatagcacgctcaagcttctgactggtagattctggctgttagctaacttggtcttctactacacccccattattaccattatttgtcattgcttcttctacttcaacccctctttcactagcagcctctctttccaacctcttgttttttctattcaatctataagtcttctcaattttaggatcaacagacactctttcttgcagtaggtccttgatgtcgcatatactacctaaacgtgagatgagaaaaatttgatagaattagtaaaattgggaaaaaaaaaaaccaaattagaataaaattaaattattttaatattaactaaaatagttcccggcaacggcgccaaaaatttagtgtgataaatccaacagtacgcaaatgtatgtatcattttaacaagtaatacttaacaggtagctgagattgagattgttcccacgaggactgtagctaagtatcaataaattgaattcttgtctctacaatcaaataaatggattttaaaactaaataatctaagcaaaaattaaataacaaaacaataaacaagattttatcaagaatgaaatatagggaaattaacttcagttgcatccacttcctatttcaatagtgcaaatcaattttcttcttctatctaatatgatagcgaattattatttcacaaaaattctttttagacattaggggtactaaattgtaaggataattgcatctgagacaattacacgagcaatctgcattaagcaataacccaaaaactacaaagtcatactaatattgttttcattttgtttcgaaacctataatattctcaatactcattttttaaattttgtattgagatgcataaaatgttcagtcaaacacacgtaatatgcacaaatatgaataaatcatacataaatagaagaaataaataaaaatagcattccataaaaagtttcaaacaatctccattaaaatccctaaattgaagtttagctaaaaatcttacattaaaacattcataatcaaatctatagaaaacataataaaactaaaaaataataaaaagagaagagaagaagtagatttggggttgtcacaattactccaaagcttcatctcaaatcttcttttcatgtttttctaagttctaagaagtcttccctctctaaaattttttattttctctttccaaaaatgaagccctaagtctattttgttgaaattccaaaatgcccttaaaaagctaaaaaattatgcaattcactgtgcagacagcgccgctgcaccaatatcccatgccacagcacctggaaccaatgaaaaactcaatctcatctatattggggtaccgcggcgctaattccaatagtgtacaattattgttatcttaaaattttacttcaatgactgatagtattttagctataactctcttaatattgcccgcaattgaacgattcaagatgttttgaaaagctgaaagagaaatatagaattttcacaatattttcctgaaattaaatgcatcatagtcaaaaattagcttgatgttttagacttaatttttaatcacaaacgaagcctgttgagcatccaaaacttaaaacttttcacccattatatcttagaatgaaaattccatgataaattgatcatatttatttttttgatcatgtttttttttttttgattttaaattcatattatgaattttaccatttaaacttgaaacaagaaaaataagcataattatgttccaaaaatatgaattcacaaggaaaacaaaaattaaaacactaaaaaagtaggctaaaacttagtaaaccgtacttagtaattctatattaaagattatatacttttatacattactgacttattttatttatatagtatgaatcttaataattcttttgtacttccttacaagatcaacattctctatatgaatatggaaaattttagatatttattaattatatttctataatttacatgttcatttatcttctacttgtattatttcatatattcttcaatatattatcccttaatattttcttttaggacataaatcctaacaattacatagcatgaattaatgctaccaatattagtacgaatagagtacttgcattaggttggtattatggttaataggtacgaacttatatctcagtgaacacattaattggatgtggttaatagacttatagtaattgagtgaatgggcgctcagttacaagtcagttatgtatgttatattatgtatgtttttttttgctgagtgtgtcgactcacagttgctttgttatgtctaataaagaaagaattaacgttgaacatcaatgagttgggagctcagtaaagattgtacaaatctggccgcctagacctgaagggttgagatatgtgggagatcagctggcacagcttttgttgtgtcattagactcggcggggattattatattataaaagtattttgttattagataacaagatctcattttgtaaatgtttaaatgaagtttgtttagtaagtttttaattattataaattttatttaaaatttatacttttatttcaaaattctttgattagcaaatgttagtacagtaattagaaatcacataacgtgccttagatattaggacattgcacatcttcttttcgacaatccttcacttaagtgttagacttttatttgggcttacattaaattttattggttttattaaaacttgggttgattggatagttctttgctgtgttagcccatgttgttggtgatcaattgttaatgggcttagcatctgtgtgtaaagtctaggtgaagcagaagtgtgggcttttctagttgactgaagcctttgatgagcaggcccagcccaactagggttttgtagctaagtcccctccctaactctataaatacatattgtctcatcacaattgtataccttttgataatcagataaataaactgcttctgatttagagatctagggaggaagacttagttgatagtattgcactatcaaattggagtaactgctgtggatcaaacagagataattgctatggatcaatcaggtacacatacctaattattatatcttattattgtgttctatgttatatacaaatagatcttgggttaattattaatttatctaacatgtggtatcagattgcctattgtatatgatttagaacctataatttgtataacaattaatatgtatatgttaatttttttttcaattacatattaatttcgttattatttt

SEQ ID NO: 320718 - DNA, 1159 bp, Cannabis indica
gccacgtaggataattttttagtgacttgtcattgtcacgtgggcaaaattagaacttaatgaggctagacagacgacaccttaaaaatttgtatgtttttttgcaagtaaattgatagttgggggagttttgccgtcgaaattactcttaaagtttttatttttattttgtaaaatatggccacataggatagttttttaatgacctgttattgtcacgtgggcaaaattaggacttaacggggctggacagacgacaccttaaaaatgtaaacggaatagtactttagagggttttcccaccaaaatatgaggctggatgatttttttgtaagtaaattgattgttgaggggattttgcggtaaattactctatatatttagacgagtagtttttggagagaaattaggttatcattgacacgtattctaagttgcattcatcaaaagtcatccaccctttttattataatcattatttctactttcacgttattgcttatgaagctacgcaaattgagttgattcatataaatatcaatattataaatgaaaatttgtttttaattattatatatatatgcataatgaaaataacaaattattatctatattaaaatttgttcatcaaaaaattattattcacatctatatgttttttaaaaattattattcacatgcatttttggttaataaacgactaacgagtggttttatcttcttttttcttcttcaaaaaggaaatatacgataggttttctcattttgaaagagaaaactagtagaaacttagaaaggatagaatttggtttgaaaaattgagtataatcaactgatcatttgtacagatgtaaagtttatttttgagcaatacaactcattcatttactacaaaaaaatactgaaaaagtaaataacacaagagttttatagtcactagcggacccaatgaaggaccagtgtgggcttatgctgaaaaaattatttcttttatttcttaacaaaaaaaaatctcttaattattttaattacccacaaaaaatgcgcaacaaaatgggagatcaatagttgaatgatagtttgacaatatatctcaaaaaggatgtattcaatgctattgacaaagagcttattattcatcgttttcaaaacatgaaaa

SEQ ID NO: 320719 - DNA, 1354 bp, Cannabis indica
tgaatgtagtccttcaaaggttcattttatctttgctttattttgacatgatcatgcaatcgtgaagtgatttgtcttgaagcagagaactaaatatagaactcttgggagatttcttcccaaaaattaaatcgtccttgggccagcttgaaatattattgttgggctattttagctagattttctggaaagattccgcaacgcacatctcccaatacttgttgatgatctaattggatttcaaagtatttgaggtgtactaggggttcttctttccccgtgtaaatcttccacgccggcatattgaacttgggcaagggcaaggcatttatgtatgctgtgaatggtgatccccttgacctatctagctaaaggtatgaaggttttaaaatagctaggcctttaatcaggtcccttatttggtccaactattcttgcacagaaggatctgctactactggggcctggtagattggcccttcttgattgagttacagccatggattggacagagactagccgggcataccctaggcagggctatattaaaggactgctagccctaggttttgcaactgtccatggctagccagccttgtgctgggcagggcttggccgcccactccttcatcactagctggtggagcttgtacgttgacatgggctagacaacaccaattgctggagtttggtggatctaactgtctaaagtgattgtattcactcctcaagttgttgtcttgggtggttccacccgttctcgggcctagctagttaaagattgacctttaagtggctcgctcccctaggggaaggagtgtaccctggccagccagaagcagtcatgcaggtggatggtagaccaaaggttggtaaatgaagtatgtttttgagcctaagatccctggccaacaccctatgccgctggttgttgggatctggctgttctcacgattagatctttgtggcaaggcctgtccttcctggagttaggaaagatatgtcctggctcctgaaaaactgggttggccagctagttgatagaccctccctaatctatcaactagtcttccttggagtggatctctgcagagatcctagcctcttccactggttctctgattgagctgccttatcatgtcgttggcttctctgttgtcgcaatccaactcctcctattgagatcgaagatgtactcttggtcatccatccatctcataaattcatgtctctgctaagcgaatatatcatgataaacagcgcgtggttcttcaattatgccagcttcgtagatggcctctctaagtctggctaactcgagatcttctcccaagtctacatggggcttgccaat

SEQ ID NO: 320720 - DNA, 1458 bp, Cannabis indica
gatctgtagtgcatattatacccaccatgtgatccgttattataatttcgcattacatgttgaaggcatacatctagaaaaatagataatatcttaaaagatataaaaaaaaagtcccacttggagatactataagaaaaagaatggaaagaattcacgaaaacttcataatcactctctacaaaagaaacaagaaaacccagcaacaaacaactttgggcttgaggggaatatcttagcagcatgaaggtgagaagcttgtgcttgtgaagattgacatcccctccaagaaaaaaaatgttttaactactaataaacaaaatatacattagtaaggaaaaaaataataattataataataaataaacattatttttacaatatattttcactacaaattaataaatcatattgataaatagtaacaattgtagttctatatgaatcaagggctaactcaaccacttgagcataagatcgaacaacccttgattatttaacagctacaattacatcctgagcaatatgttctttcaagcctcaaataaacttggcctttctagcaatctcagtggccacttcgtaagaggcaaacttagccaatcagtcaaatttggtggcatactcagtcaccgtcataccaccatgaactagctctagctgtatgaattcttctgccttagtagcacggatagattccttataatacttctcatagaacaaaatctggaacgtaatccaagtcatgaccttgggacacaatctcccaccaaatgtgagcatcctcctacaacatgaatatagcacaaccaacacgatcattactctcgactcgcataaagtcgaagatagttatcatgctcatccacttctctatatttggatcagatccaccctcaaacattggtggattatgtttttttgaactgttcatataacgaatctaaacgatttcccacatcatgtggcacaaccagaggtgctgaaggaatagggacaaaagcaggccgaacttgctgctctctcaactctctgatctgatctccttgctatcatattgtctctcacattgtagcatatatttgctcttagttttgtggtggtagaggattcaaatcctcatcgccagccccaaacctagaaagctcacggttaagcctaccaggtcgcctcaggtgcataatctaatacacctgcgaccataaattttccaagtatttttggacaatcaccaatgctaataagaacttccaccctcacacagatattatattgctattcataattcctatcatgcttttctaacaacacgttttccacaaatcatataagcaggtaatcaaataacagataaacaagtagcacttactataacatgagtcaaactagtctttccagctaatgtatatacagggccggccctaggcataggcgggctaggcccgtgcctagggccca

SEQ ID NO: 320721 - DNA, 1060 bp, Cannabis indica
ttttaaaaaaaaaatttagtaaaacttaaaatttgaacaatctcgacgaactaatctcttttggtgctctcattgagagcaaaaatccaagtttgttcttcatcttaagtttcaacaggcacacagaatggtggtgcaaactcgcagaggcttggttgatcagagtgacccaatggtgacagatcctgctatgaaaacccctgggaatacaagggtcccacctggaaccaatcccgagcagcctaacacacgaccacctattgtgggccaaggtgtgacttcccctctggctggaatcacaccggtgtgcaagagactgggaatataagttctgcagccgatcaaagcaatcccagcactggaatcccatccacaaccaatgctcagaggacggtaagggatgacactgagattcaaaacctccgtgatgcctttggactcatgcaaggttatactaacatcgtgcaccatgatcaggaggatctccgtgctataataaaccttgctttcgctaagcagcggtgccagttcattaagtggaagcaaagggagatggaaacattaaagactcaacaagcagccatcaatgaatgaacaaggcagactaccgtactgatacgaaaaagttaaaataatgattctaattttataatattttatttatttttatttctcctattaattttttttctgataacgattacgctttaataaaagtgccattaatgttgaagtgaaaatgaattctcaagttatttctaagttgttgaatgtctttggcagtttatggtttaattttataagatatttatttaatttacaataattttaatgtttttaaatttttattttgtaatcgtttaacaaactctattactcgtaaatttactaaactgattctctctttgaatgatgggagaatttagtggccaaaattaccagtctatgtagggcccatttgtttggtcttaatagacctcttgatctgattcggtcagatctagtattattaagtgggtttgtttttttatttttttaatcactttttgccacttaatac

SEQ ID NO: 320722 - DNA, 1677 bp, Cannabis indica
agaggtgatgacatgcaattgatgtattttaagccgacaaataggacatgttttattgattcgagtccacttagtgatacaatgcaagtgaaacacatgcatgcatggtgtcgactcaacaatctttttgctcgttttcaattcattatccaataagttttctaaacaaattgcacactcttcttcctcaagtccatctcttattattattggattctcttcgtaattttcttcaccaatgaaacaatttttaaacatttgaataataccactttgtttggcaccaacatctactatgagaatttcttcatcttcatcccaatcgtacaatattttgtagcaacaccaccaaactaacaacattatggtcaatatgattatcaagtcttcaatgccgatcattttaagtaaaacacataataattttttgttgaactttgatatatataataacttaattaatcctaatcctaattgaatttgtaaaaaactatatacagatatattatattattaatggttcgaaaatttaaatttgaaagtggaaaaaagataataatatattatataaaaagataaatgagtgaataaataatattaaaaaaatctctattcatcatcatcgttttcgttctctccactcaaactccctccatcaaatttcaccatcattaacttattattactattaacaaagggagtgtcgaaaatttttcagataaagataggaagaagggatccaggatttttactttgtggggtttatttatcataaaaaaatatttatagctacattataatcactcttactaaatctaattttgtgggtttttttttactatgttggcctataattattaaattaaaaaatttacatttaattttttaaaagacaatatttttattcattccccacatcaatcttaatggctccatcccttgagacatgtgagaatgtttcagcagtacaagttaaatgtaagatcgagagttagtttttgtgatcatgatgtggagagttttttcaccatatcatctggttattccttgctgttatattccatcccattcctcccttgcttcaataatatgtttcaccatttgatgccatggctttcgacatctgagaatcttaatttcaccattattaattggtgctgttaactgtacgtttgtaccattttggtgaatttgattcttcgaaattaattaatgtgtatgtttgacatgtaatatctatatatatatttatatatgtttgtttaagtactgtttcgaatacagcttctgctcgatccatgttctttgtgaaaatttaaaacacacggagttcatttgtgaatctcactcctttcaaacattctcgtactcgtgctcttctatatatgtatcccaaaactcttcttctgatcacaaacattgtacttattgtggtgaaacattctcacatgtctctgtccaagggattatatatgatgatgatgatgatgatgatgatgatgatgatgatgatgatgttgttcattagttgaaaaagtttggtgaaaattcattatttcaattcacaacataagttttttcctatttatatatatttctttgacattttaacttttctcaacagtagtataagttattgattattagttcatttttcacaaaaaaaaaaaaaataca

SEQ ID NO: 320723 - DNA, 1282 bp, Cannabis indica
ttagatttttataaaaaaaatgataaattggcgctatagcacaggaatcgggcgctatagtgctcaacacaatttctgttctgaacctgattagtattttggccataacgtcttcaatacaactcagaattggacgattcaagatgtttcagaaagctaagaacgagatctaaaacttttatgttgagctccaagtccagttttgcttctaaggttgtcaaaatttacaataaagttctaccttataaaatcgagctcgccgacttctactatttttcaccaaaatatgctaacatccctccaaatgactccaaatgcatgattagtcttcaaaatagcctaataaattataattacactaatcaataatttaaagaatcaataagaatattaatacataaattagctatatttataaggcaaaatatcgacttatcagtacatcgtttccttgtggaagttaggttcccttggtcgaatgaaagcttccttggtctagaagtcaccttttggccagccaacttgtacgcagatcctggccgaccatacaagctcactctagccggcctataggtttctcttggccagctagacatcttggtagaacttcttaacggctcgcttcactccttccagttgctgcttaacggtttgtcatacttcgtatagagaccatgtcttactattggcatggctgtattccacatgtactctgtctttaacttacctggacatgccacgtcaggtggacaaaatttaagataacagacatgatacaaaatatctattattcttagtttctatgaaaaactacaactcatttaaaatatcaaagaaatttttataaaatatctaatggagaaaaatgagtatcgtgtatgatcaatagatattgatgtaagaaatatgaaattgatttattaagaaaaaaaaagtacttacaaaatgctaattattttttaacaaatgaaatcaaaaaaattaaagtaataacattgaagaaaaaaaaatattatatgtttaaaatgataaatgtaataaatgcaatataattagttatttttgtaaaaaagataccatacttagaaattaatcatttaaaaattaaaattaaataaaaaaataaaataaataatgaaagtttacaacacaacaataaaattaaaaaaaagtttaaatttgtatagtacattgatatataaatataaagtattaatgtaataatattaagggttgagatgcaaaatgatcctaaatttggtaactaagttagtaaatgtcc

SEQ ID NO: 320724 - DNA, 1034 bp, Cannabis indica
acccaaaatgaaatatcaaatgttaaattttttttttttattgtgtttcatttaaatttaaaattggtataaatttgaaaaaatatgcataaaataccctaatattttatgcctaaactaatacatattaaaatttaaaacatatgaccactttatcaaaaacccaaaaatacccctctcataactcaaccccaactctctctcttcctctatctctctcggttctctctcaatcgaaccactcatgaaatcaaaacccccctcaccaccgcctacaacgccggccccctctcaaatcaaaaccgagcacttcttaccgcctacggcttacatcgtcggtcccatcaaaactgagatgtccaaggtaagcttcggcccccttttttttgtcattgttttttttttggggtgatgtatgatttggggtattgataggtgttgattttagggttataatatatattgtatgtgtatatatgtgcaccgtgagttttgttagatttagggttcgatttaggttcagatcttcgaattggggaaatcacgatttggggaagacgatggcccgatggagaccctgattgggtccgatgcatgtgcgaaaaatcatttcttgttgggtccgactagtcccatgtgtaacccgatgggatccaatgcatgcttaaaaatcaattttttgtgtgtccgatgggtccgatatgcctgatttgctatgttaaaattcaattttttgtattgtgtcagatggttccgatttggaacccaatgggtccgatgggtatgttacatttcaatttttttgaaatatgtctgatgggtctgttgtgtaacccgatgggcccgattgctgtgtcaaatttcaaatttttttgcattgggtctgatgtgtccgatggtgattctgatagggtccgatgcctatgtgttttttattttttagtgtttgggtccgatggacccgatggcattgttaaaattttaatttttaaatttttctactttcattttgttgtttttttgcagagacctgc

SEQ ID NO: 320725 - DNA, 832 bp, Cannabis indica
aacagagtcatacatcttgttatcatctttattttttagcgtttcaatgagtagcttcatatcctcatgtgatttttccaccattttatccaaagattttgctagtttttctaacccaacacaaatatctgaacctggtctacctctattctttcttccagactgggattgattaccacatgattggttgacagacattggagaaaatggttgacagacattggagaaaatgatgattcttcttgcatttcattgtcatcataatcatctttaagattgtttgctttagccatatcagctggagtatcagcggcttttccagttgcacgattcgctccaaagatgttagccaatttgttatagatatgaaattatttacccctccatctatttttttgtggctctgaaataataagtgatgaattagaatgtagtttatgagtattcatcaatttgaaaccaactaaacaatttaatataagtacctgcacatatgcatttcatacttcatcactatcaacctgaatacactttaatattttgttccagccaaatccactcacatttagcatgtcaaatactatactatattgtttcttccatatgtttatctttgactcaatgtggggccttgctttcaatccagaattaggacacttaaaatgtaattctttttcaattaataggtatgttccagatttgaagccaccgtcacaacgatagccacgcaacacaaatgactctaacactattaataatgcttcctcctccaaaattgtccaagtacgacgacccctttcttcgagttagaagtatgttgcatgttgtctcc

SEQ ID NO: 320726 - DNA, 684 bp, Cannabis indica
gtttagcttgttagcttctacattttggagtggtaaatgtgacaagcatttggtcgaaaattgctgtcggcactcataggaagaaatagcagataagttaagaggtaaaatcgatcaaactaaagttgagaggtattggcctggtaaagctcttgagtgggcagatgaggccgaagaagagggagatattagaatgtccaaggcagctgccttggaaaaagctttccccacacgtgaatatatattttgaaactgtgaggaaagatgaagtgagagctaaccatatgcatcttcggcaagcagagaagaggatgctgtagatgctttagaggaaagaaggccgaggattaagaccatctctaaagacaagctaaatttggtgtcaaaagaattactactctaaccataacaccaaaaattgcaataaaaaaatatattttttattattatattcatttttatttaataaaattatcataattgttatactatatattattaactgtgctttgattttataatgttatattgtttagtttaaagtatgtgtagtactcttgattaataagaatatgatatttagtgtgttttatttaaattttatatgtgattaaatttgtattatttttattatgtgatttttttaaaaaaaataaaaataataataaatttactaaatcataa

SEQ ID NO: 320727 - DNA, 663 bp, Cannabis indica
ggcatcttcatgtagatggtttcttctaattttccgtggagaaaggcggtcttcacatccatttgctcgatttctagatcttcagatgctgctttggccattattgctctaattgaggtctgtttcacaacaggagagaaaatttcattgcagtctaccccttctctttgagtaaaaccctttgccacaagtctagccttatatctcttgcaatcagcagaccctcattttctctgaaaatccatttacaactaatcagtttacacccttctggttttctgacaacagtccatgttttattcttcaacagagactgtttctcttcatcaatagcctgcaaccacttatctttgttcttgtatttatggcctcatcataggttgtaggttctgcattctctatttcactggctatagttagagcatatgcagtgtagtctacaaatccaaacctagctggtgcccttgattcccttctcattctatctctggcaagttgataggtatcaagtgagctatcttggggctgatcagtctcttcttcatgttcctgatcagtattttcacttgtttttgcatcagttctgacttcaacatggacctatctagcctcaatgctagtctcagctttgtcttctagtttcatggccattaccttctcatt

SEQ ID NO: 320728 - DNA, 2204 bp, Cannabis indica
ttgttataatatgaagcatcattcagtttttaatttgctgtaatagttcactttgctctatttgtattttaattggtcatatatttatagttcacctctttactcttaacttctcagaaaagaaaatctctctcatctcaataacccataaaaactcatgaaaaagataacaataataaattagccaaaaatgggacttagtttagggaggatggacgagctaccaaagttagacattaagaaatctcatatagtcgccaaaattaaacatttaatacatcttccctaacttttttacattttgtttttcctaattttattaaaaaaatatattaattacttaattgttgccctagaacaaggccgactcaagcaatttgagaccttgagacgaaaaattaaaaaaaaaattataaattttaaaatagacaagaattttagaatatgtgtattgggatcaaaagattttattaattttttttgtaagggtatatttattcttatgaacatttattatgtatactaaaaaaacagtcttttcatataaggggtcttctgtaatggcccaaactgctatatgtttcggcctaacatttatgttgcatttgattgagagaaatgaaaacataagaatttaataggaatatgaatagaaatagaatagaataaagaatagaataaatttaaatacatacaaaaaattataaaattttttcaaaaaaatttctcatattgtattcgaatgacctctctttttatttcaaaatagaatagtctttttactatgggtgttcatataatttgcgatctgtacgttttaaaccccaaccaattcggaccaaaccatttgagactggaccaaatgaatctggtgtgaatgattcggtcattccaaactgtttacaattctcttgttcggtcacgattttaaaaatcttagtagcggttcaaaccaaattaatccgtataattattttatatatacttaatatatatttttttagacagaatattgatatttaagaacaactttaagtaaaatattgatattgatttaatattgttataaatatattttttttattgttatttatgtatcataaacgtattaaaagtaaaaaaattaccgaaaaaataaacaatcactctaaaaaatttagaacaacttcaaaatacaaaccataattttgaaccaaactaatctgttcttgagtggattggttttgtttggtttgatcacttaattagtctggtttagttttgaattttttaaaaaaggtaatacttagggttgttcattaaaccgctcaaatcgctcgtatcgcaaaaaaaaatgtggtttgaaattatttgcggtgcggtcgcggtttgaatttttcctaaactacgtgatgcggtttgcagttttgaattgataatatgcggttcaagccgtactgcaccacatattataaaaatatcaattttatgtttatttaggtccaatatgtgaagatccagtccatagccaactaattattgtatttgttgaaactttttttcatatttattttcaagccttatggtatttttgataagtgctgctcaagtttttttgtatttgtgatatttaattatttagtaatagtccaaactgcaaaaactgcactgcaccgcactattttttgcggtgcgatttctttggtttttttagtttcgcagtgagagtgcagtttgagaaattggaaaaactgcatgtgcggattagtttgaaaaaatggtcaaaaattacaccactagcaccgtgaacaactctagtaatactggtttggtttgaaaaacttaaaattcacaccaaaccaatccgtaaatacccctactcctaaattaaaacattaacatacatgcaattaactattttactatttgaacttttttgccatacttataatataaattgtaatataataaagtcgttcattttaaggaactcaacaccccgatttacgtggcagattcagattggtcggcaaatttgaatacaaatttattgaccaactcgcatccgcctcgtgaattgaagtggtcgggatcctcgggatgaatagtaggattcattgtaatataatagtcttataataataataataataataataataataagaaatttttacatgaaaaatccattttacacaatttattacaaaattactcatacacgc

SEQ ID NO: 320729 - DNA, 1378 bp, Cannabis indica
tataatttgtctgtctagtacttttgatgtaggtgacagtgagtacttggacaacgatcttctaaagttagagacgcaaccagtcaattcaagggaaacgttctacaaaaaaaaaatactaaattattgatgtaattttttgtacaacctataaccataggagatcgtaaaataaaattaaagaaattcaagtatgatagcggttgttagaaagtaaacgagtgatgcctagcaccacctaaaagtggtattttacgattgttaacgatattctataaaaattattacattaaattacatgagattcgatacttaattataccaacatagcgatatgccttttagtacttctcaataaaaaaacatataagaaaatgcttttattggcgatactctaagctacaaaatgcgagtaagcattgttattaggtatcagtattgtatattattcttatagagatgatactttatgattagttaacgatattttttaaaaattattatatataaaactcgatatttaattgtactaataacgatataatactgaaaaaatattctatttagacattaataataattttttagcatttctctataggagcactctttgttgatggccaaaaaggccgtcttgtctagttggcacagttggctagctcattgccctatttatgaatccagtagtagttggatatatatccattattcaagttgccatccctatatattaaccctcaaagtcaagatgtatatgctcatctctctactttgtttttaaaataataataataataataataataataataataataaagcatcagattgaggaagttaagttgtggtgtgggggaacactcaatatttttagtacatatataattttaaaaataattattatattttatatatatacatatgaatgatatagtcaacgaaactttaatcatcattgcctatatgttaaatgtaatttaccagttttaagggatgtatcatgtatgtatattcatgttatcatcacaaaaatatatatatttatttatatataatatatgagatatgtatacgaataatgttaaaagttactgatttttaggattctcttgtatattaatattgttattgatataattaagtatcaattgggtctcatgcatatagtacgtttaatgtaataattttttaaaaaatatcactagtcaacacgtcttaaaaatgtaaaacacttttagctagtgcccaacagtaatactctatatacgaatatatagagtattgttacaaagtattagcagcgtgcctacagtagtacctattcataattttacagttatttatgatattttaaaaaattaatatattaaattataca

SEQ ID NO: 320730 - DNA, 984 bp, Cannabis indica
ttattttgtcacctaacttgccaaaaaaaagactttacattttttgttaacattggtccaaatatatttgtctattgagccaagttccactcaatattttcctaacacctagccccctaaatttttctgtgaacatacttattgccaagccaccaaaccgggtccaaacaagttaactacttctttccaaagaaatgctctacaaacagccaccacatcctttagcaatttctttgaaataattatgattagtgcccaatatgagtgaatggtaattaatattgaattaaatagagtgattctccctatatatcacaaattcttcctactccaaactctaatgttaggttgtttttagtgttatttttaaattaattttagtgtgattttaatttagttttactcgtgtttggagcaattttacgcttgttatcttttatttttggacatttaaaatagaagaagatttgaaaaatatcaaagaaaaaagatgaaaaaagataaaaagatcacataaaagatcaccgtgcaaaattaggatcctgcctaggtaaaaaagattacaggccttgaaaacatgggaaaattacacacgggccgcgacccaggaaaggcatgccgcgacccgtaccttgaaattcttctatcctcgtgtgaagactgcacacaggtcgcggcccaaggagcacgctgcggcctgcccctattccgaagcagaatcagattttttctcaatgtgggcttattgtggttacctaattcaaagctgaataggatttttagcatgtgcgatttttctatctttttagtccctcaatggttatataaggagtgaacttcagttgatttcggtaagtaattcaggaggaaatcaaaggcaaaaaaaggagtacgaatttcagagaccaaatccaatactggaggcattcttcagaggattttcaatattctttcttctctattttcttctcttttcttaagtta

SEQ ID NO: 320731 - DNA, 1060 bp, Cannabis indica
caataactctctctctctctctcccaaaatatgaatgccttttgaaatttcactaccgacatccatgcctcaaggctttatctatggacttgtgaagaatcttttttcgaatttattttacagtgtatcctaatgcacagatttcatgtgtattgtaactgattcggttggaaattatatgatcacattcaaaaaaaacactaccttttgttaagtttttgtggttccattgatcaacttaaacatatcctaaattcccttaaacgcttctcatccgatttttcttctcttaaacaggtaagcctaggtggtccggaattggtagagggtcggttactggcagcattaagagtactactggcctcagacgtgacagaagttgagaaacatgatttgaagacgctgaaatccttatcagccgaagctcctctcggggttgcaaatgaagtagctgcttttcgcaccatgatcgccctttgtgtgattgcactcggacacttccctactaaaatcatggaagatgaatcactcttgaaaaagggtgtttcaagctctactgagttggctattcagtttagaattcagaagaaatctgtgataattgatgttatgaaaaatctcacaaggagagtgaaattactgtcacagaaagaaacagtcacttcccaagactgaagttttgtaaggattattttgttccaatcattttttatgttccttattgcaaaaatgaaatattgattttaagttttagactcgtattgagagttgtaaaatgactttgagagaaatattgatatttgatataataaaaatgaaaaattaacggataattttacagttcttcccgttatttgttttggtgccatagttttttattttatttatttatttttacggtaattatctagaattatttataactttgtaagaaatttaaaatattttatattattaaaaataatgtttgaaattttaaatattttgttacacttgtaattattatttttttttataaatacaatcgtaaaaaattatgaaaaattctacaatgcacccc

SEQ ID NO: 320732 - DNA, 1105 bp, Cannabis indica
aaataggtggtaacggagttagcaccttgcttgatgcgagtcaaagaagtcttgagattaaagatccgagggtcgttactttggttgaaccgatcatggaggttattccacatagcaagagctgaatctttaaacataatactcgctgcaatttcacgtgagacatactgcaatatccaagccataaccatactattgcattgatcccaagcagatcggtatggatgattaataggaggacgaggaagagtaccttcgataaatggagttttgttcttggcagccagattgatcgtggcagcgcgcttccatgactggaaattatcttggccagtcaattgaaagggaacaatgagaaaactcgggttgtctccagttccaaggtgatatggattgcattcatcaatggaaggtcgatcaagatttacccaaggagtgtcaaaggtagtaaaaccaggtggacaagatggggaagccgtcggagccataggaggcggtgctggaaaaccagagaggaccgagggaataggtgcgaacccctccaaaagagtcgtcgtagggatcggcgatgaaaaagatggtccagggggacgcgaagttggcagcggaatggtcggagtagcaccttcggtcaaggtctcaagtggcggagaagaaaactgtgaagacgaagcaccggcgaggtgaccttcgactggtgcgatcgtcaaaggagaaggatttgttgaaatcagatcttcaggatgcggcacgatcgtcggaggaggagttgcacgaggaacctgctgagaagcttcaatcagagaagggaggtcgacggcattggcgaccgtcggcgtggatgagcggcctcttgtctgaaccatggctagggttagggtttgatgaaggtgatgggtttagaatgagagagaatggaaagtttcatctgataccatattaggatattagaaattggtatttctcattacccaataaaatgggaaaaaaggtatttatacaaagtggcaaatatctaaaacaaagcccaaaataaaatcaacccaatataaaagcctaatcctaataagttgtaatatggatttcaatgtagaattccgtaaaa

SEQ ID NO: 320733 - DNA, 1672 bp, Cannabis indica
tttgttgttgaatttggcatatgtaatcttgcaaaaaaccaggtttcttgagtgttctaccagatttggtagttgttataggttggctgttggatgttgtagcagattcagaggtggttgcaatagattcatatgtagttgttacttcagtaatgtttggaacactaggaagctgttctttggcaattgactgaagtggagcagatgaagctgcagtatcatgaggagcatcggattggtgatgccgatttgaggttgagaaaaaagtgtcaatttgagttgtgtttttgttggatgtattgagtaatggataaattgactcataaaaaattacatccctggaatgaaagatgtaattagtttgaagatcaagaagggtataagccttcatgttgtcggggtatcctaaaaaaatacatgctcgagctcttggagagaatttggtggggtggttaacatgagaagcataagctagacaaccaaaatttcttaaatgagtataagtgggagccttgtggtggagaagctcgaatgatgttttgtcatttaagagaacagaaggtgttcgattgattatataagaagttgttttaatcatgtaactccagtagagaagaggtaagtgtgattgaaatgctaaggctcgagcaactgtcaaaattctttagtatttaatattttactttgatcaaggggccacttagtaacaactcataaaattagattatatataataaaaattaggaaaataatacatatatactctgggtgggggccaaggccatcattggctgcaatgtacttatgcccctgaataggagtgttagtcatagatattaatatctatagattgctattgggcaccagtagtgcctagcacccttaagacgtatcgccttgcgattagctagcgatactccctaaaagctattatattaaactacatgggactcgatacttaattagaccaatagcgatattgacacgtaggagggtgcttggccccactggtacattttagcatttctccttctattatgttagaagtgaaataataattttctttaagcttggttgaagccttaaatgatagatcactcatttatgtaattaaattagtttattgaaatatcatttataataagtaagtattttaaggataaaatacaattaaagagtaagacggtaattttaagctcctatgaattatagattgtctatagagtatcattgattgatatgataaaaataatcgattctatagtggagtcatgataaattaataagttaggaaatttatttgttaaattttggatgtacttattgtgagcttgattttataagcacatgctccccgcagtatcacgaataattttaatagtaggttataataattgattttttaatcaatttaaattcacattattgattttgtcaatttggagaatttttactaagttggtgaaatttagaagaaaaaaagaataaaggctgaaattattaattaaaatattttttgtaattaataataatatttaaatattacattttaatttaataattatttggatatgattatctgttggggattattgtaccaggacttagatttactaacatgtatgttgtttaataccctaaatatgaattctctaaaataatagaatttaaa

SEQ ID NO: 320734 - DNA, 813 bp, Cannabis indica
aagatgacaaatcttatatggattagagagaaaataaaaaatatattttagaatgatgtgtgtatttcgataattataggtgttatccctactggagatgctcaatagctagtggttgccaaaattgtttgatgaagtaatccatttttagtgaagaaaaaaaataaataatgtgaatgcattcacattatgtgctttgagcaatgacctatataagtgaccgaaaactaggagcttgtttggttctgttttcagatttcagtttttaaaattgtgtttttaaaagtgagaatagaaaacagttttttgtcattttaaaaatttaatggtgtttggcacaaatttttaaaaactgtttttagattttttcttacgaaaaaaatcaatattttagcaccataccatgacattaacctatccgggtctaggttcgggtatggtttcgggtataggattcgaatatgtgagcaaaatataaaatataatatgttagacaaaaaaaattgtttttgaaaattgaaaacagcattttgatgttttctgttttctagttttttaaaactcagtttttaaaaaacagtttttaaaaatttttgccaaacgactcctaatagtttttaaaaactgttttcagctttaaaaaacagaaaactgtttttaaactgtgaagccaaacatcctctacgagactcttaaaaaaagaaagcaacttctaaaaaattaatagtgggcatttggccaaaaattttaaaaataatattttgaaaattgaactttaaatgaaaaactagaaaacagaaaaacatcaaaatg

SEQ ID NO: 320735 - DNA, 1383 bp, Cannabis indica
gagtccctggactaggtgggcgctagacacaggcctagcctgcctatgcacagggcccaccctgagtgggtcccaataacgtaaattgggccaagtccaagatccattttgccttccaaaataacatcatgcaactcgctcgcaaggttccgtcaagcctaatcaatatttagaagagtcgtgactctgtgtatctcgaagaactttcagcatgtacccagaagccagttatagtttctcgttttctatttcgcgtagtacaagaaattacttcccttaaatctcgaacaaagaataaaatcatgttaagatagaaaactatacaattggagatcaagtaattaatgatacaatcatatgacatggtatggacagatacgatcgtgatcaattctccacattagcatgcgcgtattgtctcatgggtgggcttcaccagataagcccaaacttatgtattatatgtaaattccccattagagggaaatatagtaactaagtatgacctctattatactattgtttaacgtccagaaagtgacttccactagcagtggctgtagtataaattgggtggtcgattcaacaaagagatgattatggacaaaaatattagtggaaaaataaaaacaaaaagttaataataaatgacagaagtaaccaaatgagattgagatttttattttgagaataacatgtaacaagaaagtaatagaatgtgtaatcaatagtaaaagagagtaatgtttcaagaattatctttacgtttatttagctattttgtacctttgattcacaaagttgacacaagtggtgtaataatattaaagttcattatattttgagtatacaagttctttaaaataataataaaaaaaaatagtttaatcttatgtagaacctagaaataacattatacatcaagcaatagtataataaaagattaaatataaaactaaacaccaatattatttttactaaatagtaacacatagaaagagcatgactaatcctatatatttttactaaaaataatgataatgagatggagatagtggtgatagtgacagtgaaggaaatgaatattaatattacttttattaatttttagacacatagagaaagcatgactaaacttatatataccatttaactaaaagtaaataaaaatgagcctaaacaatataaatgagcaatactaccattactatataatcactaaataaaagtatgcagaaagagcttgaccaagtatatatatttagtatgtaatatcataaatagtagtatagatgggtgaagaacataaaaacaaaagtggaatcaaaatttgcattactcaaataaattttacaataactgaatcaaagatacaaaataact

SEQ ID NO: 320736 - DNA, 1953 bp, Cannabis indica
attgttgtaggagcatgcaagaattgacttaacttgttggtgatgaaagccacatcgggtcttgttaaggacaaatattgaagtgcacccaatgtgcttcggtataaggtggggtcatgaaatggttctccttcagttagagagagtttgatagtggaactcatcggattgggacttgccttggcaccctccatatgtagtttaactaacagatctgtgatgtatttggtttgagacaagtacataccagttttgtctcggtatatttcaacacctaaaaaataatgaacttgaccaagatcttttagagaaaaggattgattgagatcattaataagacccgaaatgatagtaggattgggacctgtgattaatatgtcatctacatatacaagtaggatgactaaatttgtacctttgccatagataaacaatgagttgtctgctttggaatcttgaaaaccccatgactttaaggtagttcttagcttatcattccatgctcttggggcctgtttgagtccatagagagccttttgtagtttgcacacatgagttggtttagaggtgtcttcaaaacctggtggttgacacatatagacagtctcatttaaaggtccattcaaaaaagcattgctcacatctaactgagatacattccagttgtgagttacagccaatgaaaggactgttcgaacagtggttggtttgacgactggactgaaagtctcatcaaaatctattccagcttcttgtaagtatcctttggctactaatctggacttgtatctgttgagagagccatctttgttgagttttactctatgtatccatttgcaccctatgacatgcattgaaggatcatatggaacaagaatccatgtgtttgctttcttaagagccaaaagttcactgtccatagctccatgccacttaggattagacaaggcatcctttaatgttctaggttcagtaggtagaagtgactccggcaaagggtgtttggtggctaggaatgatttgggtttgaatatgccactttgggatctggtacgcatagcatgggttcgggtaatgcatggtgcatttgtaggtggctcggtcaaaggaaggggtaccaattgttgaccagtaggtaatggtgagttggtagtgataggcgtgggggctattggggagttgttggtattttggacagtagtgttttgggaaatagatgtatggtctgttgtagtggggaccatgacagagggttgggcgggtataggtgtatgggaaatagtgatgggaccatgggtaggtgtactatgaatagtagatggcatagtaggtaatggatagaaatttgtagtaggaaaatgacaaggcaaggaggattgtaccttagtggcagaggcgtgattcaaggctggaaaaagttgttcattgaaaacaacatttttggctatgaatagtctaccctcaggactttcacataagtagcctttgtgtgatgatgagtatccaatgaaaatacattgttttgtcttgaattccattttgtgtagattatatggccgtaaatgtggatagcatgcacaaccaaatggctttaaaatattataatctggtatttgtccaaataatacttcagttggtgactgatttcccaatactggtgttggtagtctatttatgagaaatactgcagtgtgaaaggcatgccaccagtatgagaaaggaagacccgactgagcaagaattgtaagtcccatttcagtgatgtgtctgtgtttgcgttcggctcttccattttgctcactggttttgggacatggatgttggaaatggattccctgatcactaagaaaacgagaaaatggcctgtattccccaccccaatcagcttgcactttcttgatgggaaggttaaattgtttttcaaccatgactttgaattttaggaacatgtca

SEQ ID NO: 320737 - DNA, 962 bp, Cannabis indica
aactgacaaatcaggaaattaaacttttgaacatataatcatgattatattctactgtgttgacaacactataatcatgaataaatacatatgttctggacttaatagaatttatacattaaatataatcatgaactaaatcatgtgaatcatgcaacataaaatgatttctgatctttattaattagtaaatttaattatattgaaatgggttttaattagggcacaaaacccaacactaccatcttgattaatcgagtcgctagggtgattccttcgcgctttgtgtgtgagtaactttgcaccttgtcctcgtggcgcgtctttacctctagggtcagaagggcgtccaggctcaagagcaccggaaaccttctgcgcccttaagggctgaccagtcgcaattgtctccttttgaggaggcctaggtgcatgcttttgtgagggctcacccacattttccttgcccttatccttacgaggatttgagatctcatcctctacttgcttgcgggtacattcctcgcccatcacttccaccaacggttcaccataagattctgccatatctccgaacttacactgcagatgctccatcatttttttcatttttgtagtgagccttttatgtttggccaactctgcttgagttgcctttaagtctttaatcactcgcactaggtttgggtcatggtcatagtgatattcatccttgtaatgccaatctctgacgtagtcttcgtcttcaccttcttcatctcttcctttgaggttttggccatcatcaagtccgtgaaacacgttctcagtatcctccccttagtttttagtgtgggtcgtatcttcttctttgacgccatttgtctagaggttagaggtgtgggagtcagcctcctccatgacagtgtctaatggagttttcttgttggtattcttttgcgtattcaccatagttgaagtga

SEQ ID NO: 320738 - DNA, 1870 bp, Cannabis indica
gtatctaattttaacacaacatgaagtttttattcgaaaaacaaaagaaaactagtagccacaagagggggctacatcccttagaagacccgaagtcttcacccttgactctctagcccaacgagctaaagaatcagccaaaccattctccaactggggaatgaaagaaataacaacatccttaaaggatttacgcaaatctagacacaaagagaacaaaggataagtaccccaaccataaggaagagagccagactcaaaagccaaaactgcaaccttagaatctgattctatcttgatcttgcgcactcgacgttcggttgcctctttcaaagctacctgaattcccagcaattccccttccaacacacccgacaccatggagaagtcaacgacaatccaaggatttgaggaaagctcatcgtagcagcacactaccgccacccctgcatcaacaccaaacacagaggcattgactttgcagcaccagtaatcatcccacatggagttttttgtagaatccttcaaagtaacccgagtctcttgacagtcttcccagtaatggcaagaagaaaactcctaaaatctcgccatacaatcccgaaagacacgctccacatcacaaccatcattcttaaatatcatatcatttcgccatttccaaagagtgtcacacatgcaagctgtaaacaggataagtgcctcatccttaaggctcgtccaccacccaccaaaatctaatagactattccatccaagcctatcaattcaaatcccccaagaacttctgaaccatataccccgagtcaccgaacaatgacaaaacaaatggagggaagattctgcttccagattgcaaaaaacacagttcctatgttcaacctcccttagacccaatctggccgaagtggggagaatgtcagaaagaattttccaccccagaaactttaggcgaggatgcaggcgaagcttccaccacttttcccagagtttgttaggcgtattgaaacagtattgttgactagcccagtaagcacttttaacagaaaatttacccgactttgctgcattccagaacacaatgtccgtgcctcccgttaaaggcttgatgatgagaatatcattagaaattcctccattgaaacactcacggataagttgctcattccacattctagtaccctccacaaacagatccttgacctgcaaaaggggctgattcttcttgaacttaaaattcagcttgatctcctcctccttcctactggggatccaaggtctatcccaaatttcaaaattaccatccgcaatcataatgcccgcttcctccacacaaatattacgcgcctccaaaagacttttccagcatttcgaatcagtccctttttttttttccacagtccatatcgaacagatatgacaatatttatctttaaacattttgacctagtcctttccttcatcttttagcaacatccaacagagttttgcaataagagcccgattcatatctgcaaagcgtctgaaacccaggccgccgcacctcttaggctggcaaagatcaggccagcttttaaacgcacaatatcgcttcttttcaacattcccattccagcaaaatcttgcaattagcgatccaactcatcacaaagagtcttaaagattaaagcagtagacatgaaataatttggaatattttgaagaaccgaatgaaccaacaccgttctgcccgcttgtgataggtgccttgccttccaaccttcgagtctacttaatattttctccttgagaaagagataattgtctctcttttttgccgagaaaaagaaggggtttccaagatgtttctcccttcgatccaggcaattaa

SEQ ID NO: 320739 - DNA, 837 bp, Cannabis indica
tacagaaacccttattacaactaccgttgcaaccatattagaaactcaaactgtaaaatttaaaaagaaaaaaaaaattaaaaaaataatatataaagtattttctcaaaaatcattcctgcattatacacacataacattattttcaaactgtagtttacattgatctaaataatattttttcaaaaaaattaaaaatattatacaatacaggcggcggacaggacagccaatataaatgcatggttgagagttgagaaccaatatatggacagtacactacaaaatgctttatatatatataaatatttatagaaaaatgctaaagggcaccactgttgtctagcactcttctacgtgttaatatcgctattggtgtaattaagtatcgggtcccatatagtttaatataataatttttatggagtatcgctaaccaattgcaagttgacacatctagaaggtactaggcaccactggtgcccaatagcaatgctcatatttatatatgattaaacgtgtcattttcagatttaatgaatgccttaattaaacgtgttgccattgtttaattaagatatccactcacagcatgcgttggcatggaaaaggtaagtcatttttagttattagagtaaatagttggataagtatattttaaatttataagccgtataagtaattaatattagtaaaattgtaaattttatggagttttatatatcattatagattttgttaatgttttaaatttgtaattagacttagtttttagaaaaatttgatacaagtatgtttctgtctagagtcaataaatttgaatttaagccttatata

SEQ ID NO: 320740 - DNA, 612 bp, Cannabis indica
gcaatagaggtttctatacgtagtttttttgtggcaatttaggtgcaacgctagttgcaataagagtttctatgtagaaattccgtaaaaaatgactaaaaaaaaaactagtttgaaagtagtaaaaaataaaaaaaaacccaatttatataaaaatttactattataataatatgtatttattattatgatatttaagttactatttaatatttttataaataattttaaagatttattgaaattgttttagaattaggaagagtagaatataatttttaactattaattaaaaaaaatagtagcttatgaaattgattggtttattaagttttgtttagatttaaatttatttatttttttttgtcaattaaattgaaaagaaactaaaagatatttgctttcgattattttctctggtaatggtaaaaaattatgtgtgtcacacgttaaaataggggagttcatccgatccaattcgcacttttttggtcaaacaacatccaatccgcactaagtgcggatttcatattttggatccaatccgatccgcataaaagtttaaatccaatccaatccaatctgcaatagtgcggattggatcggttattt

SEQ ID NO: 320741 - DNA, 953 bp, Cannabis indica
aaataaaaagttatgcattttcaaagttcacacatgaatctgcccagtaactcaagagcgggccgcgacatttaaaagccatgtcgcgacacctgtgaccaactcccaggtccggaaaggaggcgcgctgcgttatgccaaataccatgtcgcggcacctgggttcaaaacccagaaaccaacagcaagaacacgaaaaattagcccccaaaactcaactaaaccatcgcaaatcacaaccaaactttcagatcacagagtaaggctactaacaaccattagggaattaaaataccaatttcatgcatcaaaacccactttttaccttgaaaattcagaagccaaaagagctcaaagcttgagcctaattcaccaaaaatccacaatcaaatccctaaattctcaagcatattcaaccacagattgcagcaatataataatcaagcacaactagatttcaagcataagaggcacccaagaattacttccttagctcaacaacaaaatcaccacaaaatcataggattaaacccaaacctaggatgatcaacactaacttcctcttacatgcaattaaaacatcacaaccaaaacatgctttcacaaccgttaaaatcagcaaggatttcaatcaaacatagtaaaagaaggttacctcacttcaaatcaaggctaagctcaaatcaatccccaaatactaagctctaagctaagcaatttcaccaatttaagcttgaaattcaaagagggtaaagagagagagggggtcaggtttgaagggaaacaaaccagaaaatagactcattttgttgatatttgttaggttatttttagtataaattttagattaagtttagtatatttttaattgagttttaatcgtgtttggagcatttttacgcttgttatcttttatttttgcagatttaaaatagaagaagattagaaaaata

SEQ ID NO: 320742 - DNA, 1776 bp, Cannabis indica
ttttaacaccaattctcaaagaataccaagtaaacccgaccaccatactcttgccatatccaaagacaatgtaagtttaaaaagattgttagctaagagttcgtagaacgattacaaaagagaaacttagaaacattaacacagttacaaataacatcaatatctttaaaaattaggccaaactcaaccaagaacaaatttctcttctgtgggatatggataacatgttgacaatcttattcgatctccacattgttgaagcccagatgcgaacatagaagtaaattatatgttaatttaattatatttagtatttgtgacaaataatatcactatctttctatatatttttaaaaaagaaaattacatttctaattttaatactattactttgtttataatacacatacatcaaataattatattttaaattatatagaactcaataagtacaaaaagaaaatataaggatattacaaaaattgagcaacaccgcgcgaagcgcggctttgttccctagttattatatattatagtgttctatattatgtacaaactttttatcttgggttttttattttttctaacacatacagctaaaactaaacacaattctcaatcattaatttgtgcagagtagcttcagccttcttgaaagactttagaatattttcttgtacactttcaatgtatgcaactcacttcattctaccaaaagaataaaaattaacaataagcttattctgatcaactttgaagtttattatcactagaaatgaagtttttgtattcaactacagtagcaaaataaaaacataaaaaatgaaagtatttactaaattaacatgtaaacaactaataaacaaagctatatcaacataatcattaaaaaattatagatcaattgactaattcataaaatcaaaataaacaaaaaataatactagaacaacaatacgaagctccatttaaagaagaagaaaaattacaattgaatatgtcttctttctttaggctagtgaaaactcaattcttttggacattgcatcaaatacatagcatgtgtgtctttatatatatgcacatatatatacacatacaaaaaagtatctactcccattataatatatttacaaaataaagtttgcaactaaagtcacatgcaaatcaataatctattttcgaaaaaaaaaaaagtgtaacttacaaatggaatagaaatggacaacaagcttagtgtgatcaactttgacattcaaaataattaaaaattaaactttttgcattcaacttcaatagcaaccacaaaataacttataaagaacaataaatctacatatttattttagatttgaagataaaataataattcataaaactcagaccaacaaaataaagacaataacaatatcttcaaatagcttaacttaaagataaaaaaaagtacaattaaagatgccacatttctttttgggcattatatcaaacacatggcatgtatttctttatatacatatacaagaaaattaacttaaataataagaaaaacgaacacaataattacaaaaaaaaatattcagatccaagcttatactaatgtattataaactaaagaagaacaaaaggagtagaatagtttagaatgttaactcatttaaacaaaaatgatagtaaaaaaaaacttaaaaagagaaaaagatggttaaacaagagggaaaataacttttagggacttagattggaagtgtgcaatggcaagggctagagtcgatcatc

SEQ ID NO: 320743 - DNA, 1036 bp, Cannabis indica
agtatatatgtaaattttccttatttaaaggaaaagagaggccattgtggccgtgcaccttaattggccaaggattttcaaaaaatacccttggcacaattaacacatgctcttcatcacttgaaataaaaatgacactcctctccttttgatacttgtcacttgtgtagttaaagatttgtgatatacacattaaattgtgtggaaaaataaaaatttgtcatccttagacaaattaaatttcttttcacatagttaaatttaaatttcacaaattttgagaaaagttactagaagacataattgactcaggtacgcagtttggtactccaagagacgacgaaataagcggaaggagacgtaattattattttcaagacaagagggtacaataacaaaagtctttctcgaaagtttttgacaaacacttttgggagcaaatgttatacctgattttcaaaaaatcaaaaaaagttaaccttgtgactttcaccaagacttataaatgtcaaatgagttaatacatccttcttgagggccccatgacacctctggggacttaaaaatgttaaaaaactatttggtgcaatgactcacacacccatgtgtgcccaaactagggttcatgggcccgcacgagcgttttcatcctagaaacctcaattcaccaagaaaaccaacaaggacttgactcatttaggcatgaaaatgcttagacttgtgcataaagtcaaaattacttaagactcccatgcaatagagcctatgcacccaatgccatatggagatggcaatgctctttaatttttggagagcactgccacaaggagatggcagtggttgcctcctacaaagaactaaggggaaattgtctaaatttgttccctaaacacccaagagtgcaatacaagtgaaagaaactatttctcaccaaggaacaagcctagccgaccactgccatctgtgtggcacaatgagtggcagtggtcggccataaggaaggaggataggattttttgccaaaagtacattttca

SEQ ID NO: 320744 - DNA, 448 bp, Cannabis indica
ttttcttttaaatcattcaatactaaacaattctaaatcaaactcttctttgtttacaaaacattacatcattgtgtcagcttcttcaacagtcaaaataaaatagacacaacaattcactttaggaatcattcgtcctccgtttttcatattgattgaaaacttcgaacttgttggaatattttatatttgtatcgaaactctataacttatcaaaaatgagaagatgaaaatgtaaacttattggttgaaagtagtttattattattattattattattattattattattattattattattattattgaagagctctagtccaccattcaacaatttaatatgaaactaaatggtctaaattaatggtgatttagatcttctcatcatagccaatttagatagcagcctcaactattatcttcattcatttctagactttgaat

SEQ ID NO: 320745 - DNA, 1822 bp, Cannabis indica
tcaggccaatttgctagaaattcacaagccatagtgacattggctcgggccctagcgtcaacaagctaccccatttcattctctcaatttgacctctaattgtttcaaactgaggttggtgtctcaatgtagagttgggaactcaatacctcggtcttcaatatagggcctactctttagccgcatgaagcgttgttgggccgcttcgctaacaaatcgggttctatcaaaagtcgaaggtggtgggttggatgatgaacccccctcttcattaccccttgttcttttaggacccataatcaacacaacaccaaattttttcaccaacataaatttctaaaaaaaattgggcagcacttccctttaaatttcttgatttcccaaaattcaaatatctccaaagtaacacaaacaataccaatagcaatccacaatccacaatattcaaacaatactccaatcaatcacacaaatttcccaaatacccaattaattccaagaaatccctaaatccttcaatcaaactcttaaataagaaaagggatgatacttactaattgaagaagccactaatccacctccattgttgaatatccttgaaaagcttgaggttgaagatgatgaatagtgtttttggatttgggtgagaattggtgaatttgggtgtgatttttgaagaaaaatgatgattgatgagaaaaattgaggtttgggatgatttggattgaagaatttgtaaatggatgaagaaaattgaagaatgggttgaggatttttattatttttcggctgggagaagggtttggacggaatgaagaattgtgtttagggttaggttgaatgaaatgaaaattggggatttataggcttttttgtaagctagttgtgactaccacatgggctggtcgcgattagcttacgaaaaaaaaatttggctgattctctgtaaagctcgtggtcgtgaccataaaaaagggtcgcgaccatgggtatggctggtcacgaccactgtagccaaaaattttcccaagtttctgtaaacccccaggtcgcgaccaaggtcgcgcccacaaaaaagggtcgcaatcgctgggttcagaggcccaaaaattaattttttctacttttcacgtttttcacgatccaaccaaaaaaatataacgtctaatactttacaaagaaaatttaaaatgagcttaaaaaaaacaaaacataaactaaaataaaaacaaaagtctcaaaaataaaggaaaaacacttgggttgcctcccaagagtgtcttcatatagccggacgctgagttgttctttaaagaggcgccaatataatggcagacttgggttggtcaaattgacctcacaagtagagcttctatcgttttccattaaccttaaatatttttggactttcacctttcaattctacagctccataaggaaacgccttgaccaccgtgaatgatccagaccatcttgacttcaacttaccaggaaacaatttcaaccttgaattaaaaagtaaaacttgctgcccgagttgaaactccttcctaactaagcttcggtcatgccacttctttgttctctccttgtagatcttcgcattctcataggcctcatttctaaattcttccagcacatttaattgcagcagccttttctctaccgcagccgctaagtccatgttgagggtcttcatagcccaataggccttatgctctaattacaccggcacgatgacaagcttttccgtacaccaacctatacggtgacatcccgatagatgttttaaacgtgttctataagcccacagtgcatcatc

SEQ ID NO: 320746 - DNA, 865 bp, Cannabis indica
catcagaaaactgtcatattaccaaaggctaagaatgattggttgcacttgaggttgcaagattttaaattagaaagtgattataactctgtaatgtttaatatcacttctaaacatatactacttttaatgcctctaatgtgctcttgcaccaacaatataaagaacaagattttaaaaaaatattcagaattaatttcatgtcttctggtagctaaatagaataatgaacttttgatgaaaaattatgaatctcacccaactgggtctgccccactccctgaagtgaattctataatttctgacaattataatcatagtcgtggtcgtgatcataatcaaagtgatagacatggtcgtgaccataatcaaagtcgcggtcgcggttctagtcgaaataatgtttgtcatcgtaatggccagaataaaaattcgtacactccaatgaaaagcacaactcctaagaacaatgaaaaaggtcctcaaaataataatcataaaaattctgaaaatttttgtttcagatgtggaatgaaaggacactaggcacgtacatatcatatggtaaaatacattgttgatctttattaggtatttgtaaaagggaaggagaaaatagaagaaaattttacctatcatgttgattgtcttttcaaagagcccttggatattacgcccttggatgttgcagatttttttaaggaagatcccattaatagcaatatgaatatcgataatggagatgggaatatccacagctgatcatttttctttgttatgtaattattaacttattatttatttactttaaggtatttattttatttgggatgtttatgtaataaacttttagggtgcgtttgga

SEQ ID NO: 320747 - DNA, 3064 bp, Cannabis indica
atcagccacttgatcaatggcaggcacatgcttgacttccaacacttttgctgaaccttttctcaaacaaaaataagagatccaactctatatattttagttctagcatgtaaattcgaattgagtgtaagcataatcgtgctgaagttgtcgcacaaaaccactagaagtttagaaagtttgatgtgcaactctgaaaatagggaatgtagccaagcaatctcagcaacagtgattgctaggcttctgtattctgcttcagtgctggacctggatacaatgtgttgtttcttgcattgctaagattgcctcctaggtaaagtacaaaaccaaaagttgatcttttgtcattagggttagatgcctaatcagcatcacagaacccagtgagctcaaacctggtaggtctggtgagatgcaatccatagttttaagtgcctccaatataccttaagatttatttggctacaatctaatgagcttgtaatggattctgcataaatttgcataccttgttgacattgtatgctatctctagtctagtgatagtgacgtactggagggcaccaaccacagacctgtaaagctgaggatattcaacagggtcactaccatatacagagagtttgaggccacttgtcgtagatgtagagaaggacttggcatcctgcattttggccttgcataacatatccttggcatacatagtctgacacagatgcatactcaattccaaagaagtagttgagtttgccaagatccttgagagagaattgctgattgagagcagtaattatgtgggaaatgtgctcttggttgctgcctgtaattatgatatcatttacatacactagaattagtgttgtggatgaactggtgtgctgaatgaataatgagtgatcaacttttgatgaagtgaaaccaagaggctggaggcattgttgcagtttcttaaaccaggctctaggagcctatttcaaccatataaagctttgtgaagctttcataccaaatgtggtgcaaatttgtcttcaaaaccaagaggttggatcatatagacttcctcttgtaaatctccatgaagaaatgtattatccacatctaattgtcttagtgtccaatcttgagcaagggccaatgtaaggacaactctaatggtaactggttacaggactgaaagtctctatgaagttaaaactaggttgtttgtggaattcttttgctaccaatcgagctttgaacttgttaactgagccatttgagttttctttgatcttgtacacccacttgcactctagtggtgtcctcctttcaggtaatggaaccaaggtataagtgtcattcctttttaaggcaactatttctatacctatagcattgttccagtgtttctattgtaaagcttctttcaatgtaagaggttccctactcaccatgtaagtttttagcttgaaaatactagatttggatctggttttcatgtgatgagtgttactagagctgggaataggtacaccaggtactctgttggttgtagctggctgagagtcaataatgacctctgatgagggagcatacataggaatctcatcttgaaccacattcttagtagggacactgagaataggtgtttgctgactagtgccaatgttttgctcagtgacaacattaggaggtaatgtgaagtgggaggtagggattcaggcttgagtggggatgtttaaggagtggcaatgggagacgcaggcctggttggaaggttgtttgtgaggtcagggggaggggtaggatagctaaaactaggttgggaggaagaagcataatctgtggtgactgtactagattgtagaaaattggttggacagtaagatttgttgtgagcaccagggatatgaccagatgtaaagcaagtatctggtgtggagatagggatggtagagacaatagattgagtatggggaaaggtatgttcatcatacacatatcccttgagatgtataatctgccagaggcatcaaggcatttataacctttgtggttaagactatagccaacaaatgtgcaagaagtagacctaacctcaagtttgtgcttattgtagggtctgatattggaaaaataggtgcaactaaagattttgagagtaaggtaatctggttttatgttgaacagatactctataggggattttttgtcaaggacaggggtaggtaacctgttgtgaaggtaaacaatagttctaaaggccttatcccaaaatttaagaggcatggatgcatgagcaagggcaccagtaattgatcgtgaacttcccaagtggagtatgcaggattgacattttgagcttcacaatcggcattagtcaagaattgaggtggagctgagttttcttggatgtaattagtcatctgtcgattcccttgtatggtagcaagaacttgctgtctccatagtaagtaattgtgatcattcaatttgataagcagagtatgattgaagaatacaggaccatgatcatcaccaccacgatttcttggattcagctagtttgcattccatggattcgaggctgagatgttatcgatttgagcttgagcattagatccattgccaggctgagcttggaagccattaccagagttggtgacgacattggccattaatggctgaaaggagctctgataccatattagatcttcttgacattgttgaatcagagaaaataaaccagaaacagtaaagagaaagaagaagaaagataaaaagaaagaagctgaaagagaatgaagtgattcattaactaacaaagtcacgaagcaagacttatatacaatcttaccctcaagcaagaactaactgaaaactgttacaagttaattaaaaactaacatctaaacaattaactaaccaactaactcataacaaatattaactaactcaagcaactaatttactctaataagtagtaacggaaataacaaaaatgtaatttaaagtatttaattcatcggaaaaaaaatataatatttaagtatataaaaaaaaatataaaatatttataccg

SEQ ID NO: 320748 - DNA, 690 bp, Cannabis indica
ccaatccgatcacaattaaatatacaatatttaatgatcgatcataattaaatcgatcgtcatcattaaattggatgatgtatggacatcccctacggtccaaatagcttaagattgactctaatctcaagtaaaatgatttcactaggttagcttcacccatgaacataagggaatcacgagtagcttgccatgttgcttgtgtcagaccaaataatagtgaagtagataggagaaagagtcaacattttgtgagataatcatagcattaaggcaacagtgctaaccctttgtagggtacctgttgccaccactaaagatagcctaatacattagaatctatttttttaggttttttttttcatttgcttaactattattttttaggtaagtaccataattttattaaaataagtatttacagtagaaatacttattattttttagatgtatttatttatatttttattatttttataatacaataatcaattttaatattgaaagttaaataatacattaattattaaacaacaaagaatttcttccaaccaataaacctcgtttttaatttgtagtgcatgctttattcaccatgtgttgtagtattatcatttcgcattacatgttgaagacaatttataagaaaccaatggctcttatacacgagtatgccactctggctgcttc

SEQ ID NO: 320749 - DNA, 2154 bp, Cannabis indica
taaattcattaatattccttacatgaagaccttgtaaatcatcccataattctccccctgcaatggataaatctgttgcaatttcaacctgtagggctgttaattgagtgctatcattcaaatttatgactttagctggagctgtactgaagtgactcaagtactctttaagggacttccctgactgttgcttgatgttactcgatgaaggcgcctctgaaccacggtctctcgcagcctgaaactgccttttgaaatctttcgacaattgttcctaggaagtaatggaattgttgatgaatttatcaaactaactacttacagctcttgtcaaggaagttggaaacaatatgcaacgtaagttgttcgatacattgctcgctaagatgatggtgttgaaattttttaaatgagagacttgatcagtggttctgacatattacgagacatgcatatttttaaatcaatgaggaaattgtgagtttaggatatcagggtggaaaggttcagtttcttcatctaaatcatatcctggtagtttgccatattctccatcttgatatttcctaaatttgtcctgtaattgtattacttgcaattgaatgggatctataggttgttgatttccattttgtttaagttggttacgcaaattaggtgcatttcgattcaagtgctcacgaaggtctggctgccttcgattgaatcgctcgtgaagatcaggttcacgatgcctttgctcataattactcacggatccagttcctgagtaactttcagactggtaactacgcgagttactaatactttcttgatcagtaaaataacattaacatctattcgcgtctcgcatttgcctgttagtttcagttaacctactacgcctgtaagatcgtgattctcctgtactcgaacttttttcacgtgtctcatctcgcattggtcttcttctccgaaagagattagacacacgtcccctactcaagtaaatgtgtgtattctctctgtccgcgcgagaaggcctatgtggatgccttggaggtcgtccggacctaggttggtctctaggatttcttccatcattacgagaagttttttggtttcttggtcgcagttgttttgcatctgcattcatgagagatgactcaagtacatcagtttgttcatttcttaggtttgtaaacccatgggaaggtcctagagcatctcgtcgatgctcctgatttcttatattatttgtgttgggtggatttttctctatccattgggacattcctcgcattcccatgttgttcttcctgagcatttgtggggtttccttggttattctcttacctcctggtcctagaacctcgagatcattctcgtggtctccttacagatggatcaggttgagtttgaggaatggttccctgtgcagtcctggtcgccgcgtcttctcgctccaactcagcatttcattagtttgattcagcaaggcgttgttgaagttgtttgttttctagttccaccagtgggacatatctggtaggatcataagcatcttcacttcttctctctgggatttgttcaccaccaggattgaattttccttcgttcctcccaaaacgtgatgtttcagtcgtgttggttctctgtgatccctaaggttcttttctagggcgatgggtagtctcctcttcatgggaaatgttatttgccataggtatatgtttgtaattgtgtttataaggagggattttttttgagtttttattactaaggctctcaatgaaagcacaaaactgttaacgcagatttttgttaactaaatatatattcttttacgtaataaaaatactacaaaatttaataataataataaatgaacacaagatattttacgtgttttgtagttaaaatttacatactccacgagtctatcttcttcgagatatttttctaggtacagagtacaattctcaataaatgtaaataatagttttttctctctctcttttgccgtccatttttccatgcattctgtccttatttataggtgtataggatggcggttatttttattaggatctattcatttacaactactcatgaaacgtggacattccccacgttttatttatatgcacacgggataaaatctaataactaccc

SEQ ID NO: 320750 - DNA, 695 bp, Cannabis indica
acaatcaattatctttaattttttattggcttaattttcttccctatagcatgagttaagaattgtattccctactgtagaaaattcctatatatatattttttgatttttttataagaataactatcttgcctcacttttatttggattaagtattaaattaagtattaaattctaatataatttaagataataatttttaaaaaatattattaaacaattataaagtatcacttcataatagtaggcaattatattttggttagaaggagaagggatggatgaaactgaataaacggttcaaataaggaagagtgaaactgacagtacttggtggggttctctatgtaatatatatatatatatatatatatatatttatataaaaagagtaaatgagttcacatgtatgagagagagcgtggagcatgtgctttggtgcagcagtcggccaccatctcctctattttcactctatcagataagaaattaaaggactcccaatagatatagatctatttttattgagaaatattaaaatatattattttattattacattagtgtaattaaatattaaattttcatctaatttaagaaaattttaaaaagtatagttaaccaatcataaagtactacataaaaaaatactaactactatttatatttatttttattattattgttctaattat

SEQ ID NO: 320751 - DNA, 605 bp, Cannabis indica
agtgccactcccgaacaaacaaaccagaaagcaaaagcttctgaatctaatgtgacctaccaaagaagtaagaggagttcaaaggggccaaatcgaagagtctgtgaagaaaagtaaaactcaagaatcaagatacatggaatacacaagtctcattgatactctgagagaatgtgtacaaggaaacctgtaacacagtgcattataggatgcctccaccaatgttcaaaggcagattacataggcgacacccaaacaaaaggtgtgaataccatggtcttattggtcacactaccaatgagtgcgactacttaaaagatcaaatagaaggttggtacagaatggacatttgaccaattgggtaagactccatgtcatttatctgggacaagcagtcacacatggactgatgcgtgtcgtaagccacaacaaatttactattttatttaatttcaatacttctaattattttagtataatcgtaagtaaggatcgatcccacgaggactatgtttatttaattattcacatattagtaacaaaaattagaaaaaagggagttttgattattagaataaaaattaaagaaaagaacaaatttaaag

SEQ ID NO: 320752 - DNA, 784 bp, Cannabis indica
tttaattagataaaaaaattaagtataaaaatttaaaattttataattttacacatttatgggtaaactcattaaaagcgcacccatatatatacacgaaaggtcaaaggaaattaaaagagaacattaattaagaaatctgagatgttcaagagtgatatatctcgatgttgatgcagcatttgggatcatgatgtgatcaaagatacactatttaatatttatcccctctactttatgtccttgcattaatgtatgtactaacaaaattttataaagaatcatatcttaataatttttctagaatttaaatattcaaatttttaaatcgcacgttacaataaattaatatataatttgttaattttaattttatatttttttttagtaattttaattatagaattataacattaaatcaatagtattgattagtgttataagtttgtgtgtgtcatgcttcataaatattttttcatgcatttcaaaatatgagcagtgttgtgctattaaaaaatatgaatcatgtcttgttgtacaaatatttttaaaaggaaggatgacatgacttaattttttcatattcaaattcgtatcatactttactcgtgtttacttatttgtcttaacatgccatccttttttatatttaagctcctattcatattttacttttctacaattattttattaatttatgagatcattactaaattatagggttgtacaaaataaaattgtaaactgcccaaactagataacccgcccaaaccgaaccgaaaaa

SEQ ID NO: 320753 - DNA, 3197 bp, Cannabis indica
acaaataaatatgttctggacctaatagaatttatacattaaatataatcataaaataaatcatgtgaaccatgcaacataaaatgttatttctgatctttattagttagtaaatctgattatattgaaatgagttttatttagggcacaaaacccaacaatataataatataattactaagagttctatatttatagtggagtattcatggaattgataaacaggattatttggttgatgagattcaataaataatctagattgttggagcttagaattataggtccaagttcccggattaccaccttgaaacactgtcaagggaagggatagaagttgtatattgatgtttgaaaaaatctattgtaatttgtcaaaaatagttattatttatttcgtaataaataatttatttacaaaatttattaattagataaattaaggaaaagaaaaaaatttagacccagacaaaagacactatcattgtcttgtcaagacaagggtaggcgttacctacactgtgataggcaccctctattgtaggatgtctccactacattttattttagtttaattaattaattcaaatatttatttgaatttaatttgaaaggtggttatagacatttaatttggttaagatattctctcaaagtagttgagagattctctctaagtagttgagatattatctcaagtggtcgagaaattccctttggttattagatatttaattcaaacctaaatatctataacagatttagttataaatatttattccaataattaaatatgatttaataattgatgtgaattaaaatatttattaaaataaaatatttattggttttaatttatacatatcgtattaacctaaaaatatatacgtttatttttaggaagccctaaaagattaatcagattattttttttatcatcactccaaaaaagagttcttgctcatgtcttgagaaaaaaataaaaacatcatatacaatttatatcttactaggccacactagtccttgtgtgtggtggaagatttggaagactgtggtgtgagttcttcatcatcatcggagaatacaacttacgaaaagaaacaaggataccctgatgggcttcaagaggtaaattttattttcgtctattttattttaaatttaatgtatatacatatgatgatcatgaggatgtggtacaatgataattatacattatcattccgttgcgtacctaatttagtaccacaaaactaacaaatatgtattattgtatatattaaatgttgtgtgagttttatgcatttatatatacgtgatatgtatgtgaatggatggttatgatattgtgaatgcatgtgagatatgaatccttaattatatggtaagaaataggtgtagattttgcctttattttttcctagaaaaaggtgtaagccgtcctcagaaaccccaacccagttcttcctccctctctcctcgaagaatctctcgtttctattgctccggtgccgatgctggttgttctatctctggattttgcgcctcgaaaaccctcccgcctctgcagatcggtgcttctctagtggcctttgctcctatcaaataataaccctctttctctcactctcagttgttctcatttcattaaagctaaaattaaaatctctgatgagtagttatgagaaaagaagaaaacagaggagaaaatagcagagcaaaaactctataaaaagaaaattgtattgattgaattgaagatttgatacaagagaaaccttatataggcagtacaagagataggacccagctcacaatatcaaccaacttaactaacctctaacggtattgtaactaacagaataacagaaataccaaactaataaatctaagccgaatagcccccctcaagatggagtgtaaatgttaagtacacccatcttggagactaagatagaaaactgatttggtagtaatggctaggggaatatatctgctaagttctattgggaaggtacatgtagaagtttgagagatccttgttgaactttttcccttatgaagtggcaatctatttccacatgtttcgtccattcatggtaaactgaattttcactaaagtggattgcagcagtgttatcgcaatacatgttggctggtgtgttgtgggagacgccaaagtcttttagtaaagcaaaaagccatgtgagttcagaggttgcattcgccatagcgcgatactcagcttcagtagaagagcgggaaactacctgttgtttttttttttgtttccatgaaataagagatttgccaaggaaaatgcaataccctgagattgaacgacaagtatcttggcagctgccccagtcagcatcagcaaagaaggaaacttgaacgtttgttggggatagactagtttctgcataagcagtaagcttgggggctgcatcagaggagaaaaaaacaatccctgacagggtgtctttttgagatattgcaaaattcaatttgtggcatgtaaatgaggaagccgaggacaagccaagaattggctaaggtggtttacggcataagaaatgtcgggtctagtaatggtaagatatataagcttgccaattagactacgatagacagtcgggtctggtaaaggagttcctttatctttgctgagttttaaattgatgtccgttggggtagaggcaggtttagtgcctatgacccggtgtcatttagcagctgtaaggtaaaatgtctttgggaaatgaaaattccctctttagttcacaacttcaagaccaaggaaaaacgaaggtgtccaagatcttttaatttgaactggatgtctaaattgttttggaagtttgatgtggcagtagcattgttgctagcaataatcatatcatcaacgtagacaagaacaaccaaaaatggaggaagtgtgtttgataaagagagaattatctgactgagattggtgaaaatccatccttgatgagagtagtactaagtttggcgtaccattgtcgggaggcttgtttaaggtcgtaaatgctcttatttaacttgctaacagtgttgggaggagcattgtatccaagaggttgttgggttttatgccctaaataaaactcatttaatataatcagatttacttattaatatagatcagatttaacatttaatgttgcatggtt

SEQ ID NO: 320754 - DNA, 950 bp, Cannabis indica
ggatctttttgccatgcctaatctcatgctctagatattacctatatataataataaatgaacccgttatttaatcctataaaataaaaaaaaattattgttatctgcctttttgcaggacatgacacgtgacatttaatgaagaagaccaaattaatccttccttaattaaagtcttttaatactattctatcacggaaaggcttcctcgaaccgagaatcatccagaatgaaaaggcacgcggcagcctactcacgcttgccttaacttcccagatgcgaaaggcgaggcatctcttccgaacctggaagggtctaacggggaagcttgcttgttttatacccggataggcagtagaaagaccaaaaacagatattgaccctcatgaagcgttgtggacgtcaacctttcacacacgcaaagtcaccaaagtgatggttatgctttctctaataaagaccagatcttgtctcttacatccgagcatggcagtgcacgtaccaccaccaccttattactagatggccattacgggttgttgtttataagggagcaagctttgagagacatgtggcccccacttttaaaggttaatcctttgcgtgacattattgaagttccttggtattggcctcagccccctcgagcttcacagtggctgcatcaagttcttcttgaagtttcaggcacatctcgggcttgtccttagcctcctgggctgtctcaagttcagccttgtgggccatcttcacctcctcgacctctttgtttaaatgggagatctccgactgagcctcattctactctttggcaatggcctcgcgttgcccaattattctctgaagctcgccctcaccctgtttcacctgtcgagaccccaacattgggcgacaaaggaaaggaaggtttgctgtgaaaaatgaaaatgcataagtatttctgagggttc

SEQ ID NO: 320755 - DNA, 834 bp, Cannabis indica
tttatttttatttaatatgtataattttcaaaaacataaggaggaagaacaaaattgaaaagagaaattagtataaattaaagatgtgttttttttatataaataaataaaattatcaaaatggaattcttttataagattttgaggggcaaataaatctcccaaatgaataattgactatgcttattacagaaaaaaaaaaaacactatttacacgttgataatagttatagtagtaagaagaacatttaaaatatttaatattattattcgtagattaatattttttataggcgagactattatccgtatttatagtgacataaataattccaaaatccaataacagtcaagacagacctaaacctatagccaatcaagataacaattaagcccacaaatagagttatgttacaattttgcatctagatctgagtctaactcatcaaaataacaaagtctaatcatttgatttgggaaatatttttcggccaagaaagtgaagagtgtaccaggaccaatccgaataccttcttggggtaagtcggacgccggcaatcgcagagtcactcggggagcttttgggtgataccttacgcggaatcctcaagacacaggaccccactgtgttcgagtttgtccctacactggacccgcagaatgcgcacaccaccaaaagaagagtgtctttttgttcaacgacatattctatgatattcttaatatgggcacggttgtagggctgcatatttggacccgcacacccgaaaaacccgagtacccgccccgacccgatgccaaaaaaactgatcctcggaaaacccgtatagtcgg

SEQ ID NO: 320756 - DNA, 618 bp, Cannabis indica
atctatttttaataattatgtttccttatacctcttcaatatatagttccccaaggatttaaggcagattagttttcaagaatcgacacccttctcgatcttacactactccgaaaatgaaacactagctataccaaatttgaagagctcagaacttgaaattccaatggagttggctacacaattccatttcaagaagttgaaacaagaacacattaatgtgacaagggtaaagggagagctccttgttagtaacggcaaacatcagttaatttctgagacgaaacaggcagaccaggagaaatgcaggcctgttctttgctggggttccccgagtacagatactctactagcagcattgtcggaaaggggtatcagcggaacagtggaaggcgatacggtagatttggaaggtgaaaatgtttctgtggtacacgtccatgaacctaacagagcttgtataaaaatcggtgttgcgattactgttgttacaactgctgacgaagatttagctggtcggatttcagatgctatatatagtgttcttgacaatgcttaagaggccaaattgaacaatatgtacatgttcctgtcagggccggccctaggcataggcgg

SEQ ID NO: 320757 - DNA, 1060 bp, Cannabis indica
cgagtttatgaggtgcgccgatagggaacttatgattgagatgtttcaagagttgcttactgtttggaagccgccttaataaccgaaacaaatgtatatttgttatggtgtatatttttactgtatatcttgtttgaaccatgaaaactttgttggaaccattactatgtaatatattggcagtattattcaaaagaaaagtcattgctattaggtacattcattattagctataaaaatcttatctttaagcgttggacctttgaatattacatcaactctaaaccaatactccttttgttctaacttctaagctctatccatacacttgttatatcttccaagatctgaaaccatggcggaattaatggtgggagcagatttcgggtttgatgaatgttctctttgataggcttgcttctaaagatgtccttgaattctttcgaggaaataaaaaagcgaatctcaaaaagttgaagagtatgttgcggtattttgatgttctactaaatgatgctgagcagaaacttggagatgacaatgtgaagaagtggcttgaagatcttaaagaagtagtttatgaagctcaattgcctgattcaattgacgtatctgtttgcgtgttggaagcactctcattgggaagttgccaaaaacttactcaattgtctactaacatatctgagctaatctttcttcgctatctttacatcttctatgacacacccttaaaagagatgccaccgatgatttgcaatatgatcaaagagttgggtaagttgacaaatcttcatggaagattgtttatttcaaggcttgagtatgttaaagaagtgaatgatgtcttaaaagacagcttgatgaagaaaaagttatctcacagagcttattgtgaaattcatggtatttctttaaatagttcttttcgagttttagaagagatacatctcagaaacataactacatcagattggtcgtttatcaatacaaatgatcatcacaatggtgaggttttcccttgtttgaagcgatttcatttgaatttacaaagactctcatc

SEQ ID NO: 320758 - DNA, 977 bp, Cannabis indica
atgtggacaagagtttttggtggctcatgtgaattggctgaatggtttggagtatgagtaataggcggatgatgagtttttgaagtaatggtgttgtcagaagaagaagaatgaggatcaatgagtgaaacaggaggatgagaattttttggagcaatggtgttgtcagaagaagaagaatgaggatcagtgagtgaaacaggaggatgagtagtttttggaacaatggtattgtcagaagaagaagggtgaggatcaatgagtgaaacaaactcccaattttcccaatttttttagttcttgattatgattctccactgaactgcaaatttgggatagtaagattattcctcaaagaaagtgatatcaggagttgaacactttttgtgaaacaggacagtagcatttgtatccttttttgtggctcgagcatcaagtttgctacgatgttaggagtgaacatggaaaaatgcaacacaactaaagatacataagggaatttgagacacaagatgtgagtggggatatgcttctaggaagatttgcggcggagttttgaattttaatacatgtgatggcattctatttatgagataagtagctgtgagaatttcttcaccccaaaatatttttggaacatgggatgaaaaagtaaagatcaggctacctctagtaaatgaacattttttgcgtttagccacaccattttgttgtggtgtgtctacacaataactttgatgaacaatcccattagattgtaaatatgatccaagtaaagaattgaagaagccatgagcattgtcgatttttaacacttggatgtttgtttggaattgagtttggattattttgtggaaattttggaaaatatgacttattttagatttttctttcatgaggaatgtccaacttaggcggctgtgattatcaacttgtaataaaaactaacgtgccccactgatattttgaattttgga

SEQ ID NO: 320759 - DNA, 1109 bp, Cannabis indica
tatatatatatataatttttctaaatttctttgtataataataataatatgtttttttgtgttattgtataataatttcctttttttagataaaatgcaattctttgtataataatttgaaaaggaagaaatttgtatagtttaaacttcaagataaaatctttaataatgataatgggatggccaataaccgcaaagaaaaattaattatgttgggccattctttttgaagggttttcgtgcaatttaatttatattattttacttgtaattcattcagttcgtactaagagggaattcaataaattattttgaatgagttactttttaatatttattaaaaatatttttttcacataattaatagtaaaaaaataaattattactattttatgtctttaataacaaaatcaaataaataaaataataaataacaaataatttcaaaaaaaaagaacaatatatatatatttaattttgttttaaattatattctccttatataacatgtacaattgatttattaagtttcatatatattagattactaattttttaaattaaaatattaattatatatataatttttaaaatatatatgtggattaaataggttacttttatatgtcaaccaacattcaatccacacaagtacaaattttttattttccaattggatcgtacgaattaaattaaattgggtattttatgaacacctctaattcttttcaacaaaaataaattaaaaaaggggtttggacatcatttgtaagggtaatttacagtaaaactctctcaactttgaagttttgcacgattaactccctagactgaaataattagggttgaactcccaatctacagaattgttttgctctgtactttttccgtccattttagtcaattaagtgccaaagtagactgttacagtgtactagaatgtagacgtggcaaaattccattaatccacctaatattaactatttacttattatgaaaaaaataattaacaaataaaaaaattattaaaatctaaaataataatttaaaaataattaacgtctttttttcctttttcctttttcctctttttctattttctttttctt

SEQ ID NO: 320760 - DNA, 986 bp, Cannabis indica
gaactttgataaccagatagaggggaacgggctggacctcattctcaggaacattggtgggggagggatcatggagcgtttggatagtacactcagtgtccgtgagattaagggcaatggaaagggaatttattaagtcatccattaagtgggtcggttgtttatactgataaggcagagataaaatgataactaaatgatgtggggaaagaaaaatagtataagccttaatgaaactacaccacagataaaacaaaaacaatatttttccaggttgcgattgaactttggcagtaggatgtgtatgatttttgtataaaagattctggtacaggacgtaggtaaagtgtgtttgattaagaaaactcacagatgaccaaaagatgctacaagtagtcggcaacaggtttaaagtgaaagatgtttgatttagtgaatgcaatagaatactaaggatgtaactaagacccaagagatgagaaatatggataaccgaaactgggaaataccataagagatgcaacagacaggaagaacaatatttactaaactgtaacttagagtggtgtgtgcacggggtgacaaaacagtgaggaccaacaatgtttttgtgacgttggggacttagatgctgtgtattgatgatgataaaagagaaatggtaaaataaagggtacctacggggagagttaggactgggtatgcatgagtaccatctcagtttgcctttaaatagaaagttcctcagagaactaaggcaaaccgatttggtaactgtcacttctaaagcatttatatcagaacagagatgctgcacaaaggatatacatatagtactaggcagattacacttgcagataaaaattaatgcaccatttaaccccaattcgacaaaaagaattaaacctcttctgaggatacatttgaattgataccctttacacaaaaaccctttcaaagcacaaaagtcatactgtaatttaatt

SEQ ID NO: 320761 - DNA, 3085 bp, Cannabis indica
ttttttttttttttttgtacgaaagacagggaaattacacaactggaacagatccattccagctcaattctttgtctagccccaatgccttctttgctaagagatgagcattattgttatttttcctgtttacatgatgaaggctagcattagggaataaagacaaagagcttctaatatcctccactacatccgatagtacagaaaggtctcgcttgcgcccataaatccgatcaactagaagctttgaatcagtctcaataaccgcaatcagaattctgatatgataacaccagttaagacttgctctaagtgctaaagcttcagccattagtgggaaaagatcaccagcagaaggaatagaaagaccagcaacaatcctgccatgccaatcattaataacggccccaaaaccaagtttgccttgagaggagcacaaagccgcatcagtattaagttgatagtaacccggattgacttgcttctgttgtccatgaacatgtaagatttgggatggactaagcttcctcatatttagttgtgctgcattgtaatctgaaagataagagttaatccaatcaataacatcagcagaagacatattaaatttgctaaacagttttttatttctaaggttccatatggcccaaacagtggtcaaacaacagtgttagatcctctttgttaagatgtgaataaccagaaattaaaaactctttaatgtcaacatgtctatgagtaacatagaagtgtttaagaggagaagctttccaaatcttagcggcgctggaacaatctagcaaggcatgagtcactgattcagtaggacaacgacaaagagaacaacaaggacttaggagagactttttaagaaagaggttaagagcagtaggtaggatgtggtgatacgctctccaggcttgatttaaccttaggaggaagattgagagtccaaagtgtagtccaccactttttaatgaaagaaaagttagaagaagaaggaggaagggacacagtgtgggcaagatgatagcccgacttaacagaaaagatgcctgtgctgtccttattccaaatgagatgatcttctttattaaggccgccaattgggactttaaggatagaggaaacaatgtgagggtcaaaatactgatcaagcttagcacgggtccaatgaccattctcatcaataaaaaaactgactttatccgaaggaggccggcggatcactggctatgagctgaagaaattgtgaatcaaggacccaataatcttccaaagttcggataaaacatccattcccaaccttccacatcaaaccttgactaaggagatccctaccccaaagaagactagaccaagtgaaagaaggggaatgcccaagcctagcctcatagaaaccagtatgtttaaaatacttggctttgagaatagcagcaagagtagaattaggattagacaaaacacgccacgcctgcttggcaatcatggcctgattatgatgaactaaagaccggaatccgagtccaccaaagaatttggaagtgcaaagattattccaagctttccaatgaattttagaacctttacccatcgaaccccaccaaaactaagccatcattttttcaatcttatgacaaattgaaacagggagttgaaagcaagacattgcataagagggaatagcctggataacaactttcaaaagcacctctttaccagctttggaaataatttttcattccatgctgagagttgagaacctatcctgtgaagtataaaatcaaaactggattttttagaccgaccaaaacattgcgggacccctaaatacttgctaatgaaaggtttcgcctcaagaccaagggtttcaaagaagtaagaagatacggcaaggggtattgagggaaaaaaggatagaagacttagtgtaattaaagttctgtccagaagtaaggttatagagagtaagagcctctttaagagaattacaagatgcaaaagaagcagtggtgaagataagggtgtcatcagcaaaaagcaagtgtgagacagcaggggcagttcgagcaatagaaatacctttgaacaatcccaagttttcctgaatacgtaaagctgcagttaaaccctcagaacaaagcaggaacagatagggtgataaaggatccccctgtctgatgcccctggatggaagaataggatcagtgatttgcccattaatactaaaccgtatagatgttgaggacacacactgataaataagattaataaaatgagaaggaaactggaagcgatggagaatagccatgagaaagctccactcaacacgatcaaaagctttctccatatcaagcttaagaccaacccagcctagcttaccatgcttacgatgattaatggcatgaacaatttcttgagcaatataaatattatcaaagataattcgctcagaaagaaaaacaccctgattagaggaaataagatctcctaagacaaatttgagcctattagcaatggctttagcgacaatcttatagacagttgagcgaaggctaataggcctgaagtctttaagggtagaggcattagtttttttggggatcaagacaatgagagtagcgttaatagaggaaaaatcagcattaccattaagaatatccagaatagcagtggtaagatcaggaccaatgatagaccaatttttctgatagaatgcggggttaaggccatctaacccaggagccttatctccagaaagctagaagagagcttgctggatttcagcatcatcaaaaggagtatccagaaaacttatttgttgcaaagtcaaagttttatcaagggcagcaagaatgaggttagtagtcgtagcatcgaaactttgagacttgaacaggttatcaaaataagttcaaacctcatgacaaatgtcagaaaaggaagtaacctgcctcccatcctcacatttaagtttttggatgtaattagtctttttcctagaagtggcctgttggaaatattttaccaggatctagatttactagcaagtatgtttcattaacatcctaatataaattctaaa

SEQ ID NO: 320762 - DNA, 1269 bp, Cannabis indica
tctctctctctctctctcgtgcgcaacctcctctctcatgtgttgactatcttgtttgaaagacgagcaacacccacaaccatcgccacctcctccactgagcctctgtctctcactcctcctcattgttctcattcttagtcccaatgcactaccaccgccacccaccttcgagccgacaatccaatcgtaccactaccgccacccaactccacctcgctctctctttctcctccttgtctcttctcgttcatggagaaccataggtaagagtttgatatatattttccttttgtattatgtttttgttgtggaaattctcctaatctcttgaaaatccatgacaaaggaacaatatggttgagtatttcagaaaacaattatcactgttaatggatgggtatacaattaatatatttgtaataaatatatatatttactatattgaatcgaaatgtggtgagatctgattttagtggtgtacgatttggttccgagggtgagatatggttctagatctataattttttaatggtataggtgatagttttaaatagtcatctatactgctcagtattggtgactattttgcatagtcgagaaaaagttttcctgatgtttttctatcttcgcctaatctgtctagtttttccaataatcgaataggtgtcagtcttagaaaccgaaaagaatattttacctgactctttaaaaatgttagaaaaattcaattttataatagtgattatgattaaaatatagtaaaacttttatcaagaacgtttagtcacatatgttattactaaattatccttaaatttaatacatttatagtcgcaaattaattatcataactaataatatagctagaagatcagatagatacattgacaaaactcacagaccgtttggctcggaagcaaagtggatccgtatctaattcaaaagatgaggatccacaatcatgtgtgaaaagagttattgagacccatttgcctaaaaaattttgaatcccacaaatggagttgtacggacacaatacgggtcccgtgacccacttctccaagtacaataggttgatgcaagtggcgtaagtcagtgaagatgggacatgtctatggactacaagaaataggtgttgggttttgtgccctaactaaactcattttaatataatcagatttactaattaataaagatcaaaaatcattttatgttgcatggttcacatgatttatttcatgattatatttaatatataaattctat

SEQ ID NO: 320763 - DNA, 1496 bp, Cannabis indica
gagtatgttgaactcgtgtcattgaggcaacaagccactaagcatgatacagagttggctgaacaaaaagaaatgaataggagaatgcaagaggccttggccaccatgaaataagatatggccttgacatgcctcgatgtagatcttgcagctactctaccaatattcaatgatgcaagtgaattcccctcacgaccccagtaaaactaaaaacaaaaaataaaagtacctagtccccatcaggtatccctccaaagatcctcctatcttgaaggataaccctacactagtacctagggggaacataacccatcgtgacccttgcaaggtctgggaaatgagtttccttgaaggaaagacataccctaggatagtaaggggcgtcatagcatgtccgtacatcagggacgggaggggcagtatggtcaaagtaggagggattccccaatggacttaagggaaaaaaattaatgcaaaacatggagatctcaaaatttgcatcaactctctaaagaacggtccaacaccatcaaaggacgttttgaacaaaggtatattggcagaacttgccattcttcaaaaagatattgcaaaagtatctcagaggcaaaaaggagatgactatgagtccgattatgaggaatgagagttgtgtgccaagaacgtcctagaagctaaactccccaggaattttaggatgccagaaatgatccaattgattggagatacagatctcagtgaccatttgtcacgatttaacaaagttatgacaattttaagagttagcaacgatgctaagtgcttgtacttccctgactttgagaggatccgtagaagattagtttaagaaattggaatcaggctctatatatatatatatatatatatataatacaagtatatatatgttatatttatatgatagatttgattttgatgcaactgaactagtactgcttaaacattgacttttaagctttcttaattctacacaaacataccttagaacaagttaagcagatgtacatataatagatcactcaaaacataatagattactcaaaacattactagtcactctaaagtacaagcacaagttctgaatttttactattttaatttcctcattaaaatttgtgactgagcaatttcacactcttcttcataaccattttccatgttcctaaagagtcatatagaaaatgcaacgatttacacaaaaaactttctaaaagtaaactatctccatactagatgaaacaatgtaaagtaaaaaaaatgatgtagtaaatatagattattgcaatgtagattttatagcagtataaacaaacattaatcatatctatgatatttcaataagacccaactttataacaagaatatatatttatatatatatatatatatatatatgcacaagagataatgtactactagtacttgtctttacaagaattttcattattagcagaacctcttggaggaacaagaat

SEQ ID NO: 320764 - DNA, 668 bp, Cannabis indica
gttaacgaaaggaatacctgaggagcagttatggcaagtatgggggcgacggggcagccgaacgctcaatgcggagaggaggaactacctcagatgaccattactttgactgagatgatgagacggctgcggggattaatagagacaaagtggccccctaagatggccactgaccccggcaagagggacaagggacggtattgcgcttttcacggagaacatggccatgcaacttatgaatgcaggaagttaaaaattgaggtcaaccggctggtgagggaaggtttcttccaggattgcctagcctcggattcaacgctccacatgcagcaaggaagtgacaaaggctgagatcaatcccttccaccatacattaagaagaccgtgaacgtaatctcaggagggtcagacctaagcgggaactcaatacgagcttcaatggcccacacccgtcagattcagttggtaagggcaatggcggtaattgacaatgatggcccggacgtactcctatcgttcaaccaatgggaagcctccgagctggagcacccccacgacgacgctcttgtcatcactttagatgtagcccacatacgaatgaaatgcatgctcgtcgataatgggagctcagccaacattttatttgctggagttctgaaagaaatgga

SEQ ID NO: 320765 - DNA, 1081 bp, Cannabis indica
aagagaaggagattcggactcaaatcttagtgataccctgctacagaaaggatacaagggttagagatctgagtggaaagagacattatattccgctacaaccactgtaaggttcctgaaactttatatgtgtttatttcatatcgttttagaagttcatgtttaggatgttaataacatacttgttagtaaatctagatcctggtaatatattccaacagataggattcatcaaaagtaagtatgatgcccgtgtccatttcaatgatcacatttacttattactatatgttgatgatatcctaataaatggaaaggagaaatcaaagttaaatgatctcaagataaaactaaacgaagagtttgaattgaaagaccttggaaaggccaaaagaattctgggaattaacatacacagacctactcaaacttgtatcactttatcacaaagcaactacctgcaaaagttcctagacaagtttggtatgaacaaatgcaagccagttgctactcacattgctcagcatttcaaactatcagcatctcagtctctaaacaatgaaactgagagaatcaagatgaccaaaatcccatatgccaactgtgttgggagcctcatgtactccatggtatgcaccagaccagatttggcacatgccatgaatgttcttagtagatacatctcaaatctaggtacagaatattgggaagcattaaaatggattatgaggtatgtgaaaggtacactaaacacaggcattgtgttcaaccgtgaataccaacacaaagaagaagtcactggctatattgactcagactttgctgcaaatatagacactacaagaagttgtacagcctatgtgttcactgtgctgggaggatgtgtaagttggaagtctaacctgtacaaagttgttgcattgtcatccacagaatttgaatatatggctgcaactcaagctattaagaaggctatctggttaaaaggaaatgaattgggattcaactcaaaggacattattgtccattgtgacaaccaaggtgctttatgttgggttttatgccctaaataaaactcttt

SEQ ID NO: 320766 - DNA, 523 bp, Cannabis indica
attatttttaaaattatataagattcaataattaatttgattataataataataatatgacacacaacaaaaatacagtaaatatatatattctatattaattttttttttagttttgcattatcttacaccaataacatgtgtaagtaagcataatgtgttgttttaatgatttagaatgttttaaaatataaaaattgaataaatgcatattgcatgcagtgatgaaagagaatataaaagaaagagtacaatattaatttggtatatatatttacaatttgagcattgttattatttactataatagtgctcaactctgctatattgtgatgagttagtaatattttataaaattttattacattaaattatatgagacttgatgcttaattatatcaataagaatatgacactttaaatgatactagataatattattaatatcttttatcatttctcttagactttaggtaagatgaagagatttgtcctaaaaaaaaaatgagaaatgctaaagggc

SEQ ID NO: 320767 - DNA, 1006 bp, Cannabis indica
gtgaatatgttgatgtgtatgaagactcactccatgaaggttggggctcctttcttagagttcgggttcgattggatattcaacaacctctaatgcgtggtaaaatggtgaaactcccgcatattcatgacgaacattggttggagtttcgttatgaaaatctcccaattttctgcttccattgcggttgtttgggccatccttttgagagatgtgttggcttccttgagatgtatgatgaaggtatagaacctgagttactttatggtcctgaattgttgggtgataaacttcccaaatctggttacgaaaggtatcggaatgacttttccaaggcaaatgcttacccgttcttaactcgcctaaccagaaaaactatcacctctgtctatcctcaacacttttcgcagaaacacttttcccttggctctgcccctcacccgaccctcctcaccaatgttgaatcttcacctcattccatacctgagaaatgcatagctactactgcccctgaacttccatctccatttccctcattctttcaaccttcattacctattaatgcaaatgggcctattgatgaacaaccagctattacttgctcacagatatcttctccaatctctgcaattatgacctctgcccaatctacaccagtagcaacatatccccctgcctcatcactcactaatctcaattccaaacactcacccatctttgccagtattcccactactgatgccatagccacctctacacttgctaaagggaaagctattttgataaatgaagatatatcggcccaggggtcttcccaacgtgtttataaacggcaagttgaacctgcaaatttgcgaaatgtcctcaaaagatgcagaaacaatgttccatctgatattcatgctgaaggctctccatcacagttagtttcttttccatcgcaagattcatctgagatgcagccttcttttccagcgggtgttgttgacaaacaaccccgcaagca

SEQ ID NO: 320768 - DNA, 1219 bp, Cannabis indica
catcacaaccatttaatagtaatccaatagcttaaaaaatataaccacgatagttacaataaaaatataactatttgaaacctcttccatatatatatatatttgagggaataattaagacttcattatattactcaatcaacaacaatgcttctgtgttatgtttacaatctttattcccctacgcccaatctcctttgattctatacattagctttgagaacatctacaaattttagtaaactaatccccctatttatatcttttgccttacttggcattacaacaaaattttaagttgaaaatctttttgaattgcctctacacattacaaaaaattttatgactaattataaattatcaattctatattttaattaaaatgtttatagctaaatgtattaattttaaaatcacaatttatgataactaaatatatgactaaaactaaactagtaacaaacaagcaaagaaaaatttggccgaaggttatgtgtaaagggaagttttctggcgtcaaagatcgaaacaattatggttacaaaaaggagacaataataacaaattttttcatgcttctgcaactacaagacgaagaaataattttgttgccaaacttaaataccgttctggtgcgtgggttgattgggatagtggtttggatcaatttatggtttcttatttcaacaaactttttttatcttctcaaaccgattggagagaagtcacaagctatgtgcaaacttgtgtatcatcacagcagaatgtcgagttgttgctaccagtttcagatgaggatgttcacaaagctttgttctaaatgcatctggataaattcccagggcccgtcggtatgacccctggctttttttttcagaagtattggccgattgttaaaggtgatatcatcaatatggtcaatcaatttttttataatgggtttcttcctatagatcttaacaaaactattttagtcttaattcccaagaagaagcagcctatggatatggggaatttaagaccaattgctttatgcaatgtgttgtacaagattgtgtccaaagtggttgctaatagactcaagagtgttatgccgtccatcatatccgatactcaaagtgcatttttacaaggccgcttaatctcagataatatcatgattgcctatgagattatgcatcatttaaagagaaaacgaagagggagggatggttatatg

SEQ ID NO: 320769 - DNA, 856 bp, Cannabis indica
tgtcactccccaattcattgggatgacaggagaaaggaaatatttaggccctgagttggtccaaaagacaaatgaggcaatagataagattaaagtgtgaatgcttgcttcgcggagctggcagaagagttacgcagatcccaagcgccgagatattacatttcagtcgggagaccatatcttcctgcgtgtatcaccactaaaaggaatcggccgcttcagaaagaaaggcaagttgagtcctagattcataggaacttttgaaatacttgagaagatttgacaagttgcttatatactagccttgcctccatcattgttagcggtacataatgtatttcatgtttcgatgttaaggaagtatgtgtttaaacctatacatatcttgagctttgaagcattggaattacaaccagacctgtcttatgatgaacaacaagtgcaaattctggatagaaaagagaaagtccttcgaagcaaaatcatagcattggttgaagtgctctggagaaatagtaaagtggaagaagccacttgggaattggtgtcagacatgaggactcaacatccaggattgttcaagttatatttcaaggacgaaatccttttaatggggagataattgtagcgaccgaaatattaaaatatagattagtgagattataagtgttaattttattattattatcattaatattgaaatttttatgtcaatgattatgttaaatgtaaaatatgatatctctgtaattttagctcactgacgatggaaaatgcaatggcagatattttagtcacttgaggaaatatagaatttggtaatgttagaaaatatgtcatgtaagctaatggttgg

SEQ ID NO: 320770 - DNA, 1660 bp, Cannabis indica
cccaagttttaataaaaccaataaaacttaatgtaagcccaaataaaaagtctaacagttcaaagatcatttaactgaacttggaattgaatcccacacaccacacaaatatatctaaaacatcaatttatcatccaaaagagcacagaacccacacaaattcaactaatcttaagaatatacaaaaattagcatctaaatctatgaaaaatataatttttattttaaaaaacttaccttttgtttgaccttggtggtggtggcaacagttatttgaatcgtggtggtttcgtggtggtggaggataaaactgggtctctacgcctgaggtggtctctgcgctggaggaggtcaaatttgggttaggtgcgcctgaggtggtctttgcgctgaaggaggtcaaatttgagttcggtttgatttgggtcaaatttgggttggctttgggttgaatttgagagcaagagagagatagatagagatagagatagagataaagagaggatctggcagagtctttgggattggggaggttatcggtcctgcgtgagaaatttttgggcatgcgaggaagagggagagacagagagaggaaaaattaaatgtcaggggtattttgggtataatttgagaatattagtattgttttgtataaattaacaaagggtctaaaatttgatatgggggtattttttatgtattcaaaatgaaattttccttgtacattaatagtaatatatggagaaacaactcttagacatttgtaaacaaacttaaatattaaccaattgaatatattcatataactaactatgttataaaagtttttttaaagagatttgtcttgcactgacaatattaaatacctgcaaatttgataaacactatcattatgttatcagtttgtaatcattgatatgttaagtttcagagtgctagtaaaactttaatgcaactataatgcaacataaaaaactagaaccatatttcgatgtacatggctctagattcatacgaatttaccatacttttttcatgatttgatattaacaaattcactattgaaatttgcaaaacaaaatccatgcaacgggataaacattagctataatattgttgtattttttttcctttttttggattatacttgattttgattgattagaagctctagatctatttgttagagatctgcattttatgaatatgaaaattgatgttaagaggattagttctttgcaaattaaattgaaaatcaaggttgaattttagttttgagctagtttttctgctctttctttcatcaatacaaaacaatatttgtttggattgatttcggtcttcttcttaggtgaagttgccagaattaatggtggttttacatctggttggattttatttcggctgtcttgctgggttgatcaatcgaaacttgcattagtgaggtttttgcttatgttatattattttatataatataatatttagattaaataattaagtgtgataaagtattaattttgtcgaattgtaacatacattatggagttacaaaatgtgtgtagaatgatctcaaaataggagttgcaaataatttaaattgattatcacttgaatatgtaactctcatctctttttcactcttaaattagtaaaagat

SEQ ID NO: 320771 - DNA, 781 bp, Cannabis indica
aaaactattaaaaaaatgttaccaaacgtcaccttaaaaagtgaaaaataataattgtttctattttatttcttacattttcattttatttaatgtttcatttcattgaaaaaaaagccaatgtgaaaagaaagtaagaaattgaactcttaaataggccatgtgaaataggcgaggttgcaaaagtacatttaaaaagtcattttttattaaaaagtactttttagtagagaattattataccttaatttcgactaataaccaaaagttgacacgtgtaccaaagaaaaaatatgaatcagtttaagaattacattattaaatacatattaaataattcacctcggaattacgattgatagaaatattcaaacttgctaccacataggtagaagcgagataagaataataactagggttgttcattcgatccaatttgtattgttttggtcaaataacatccaatttgcactaagtgcgaattttatattttggatccaatccaattcgcatagcagtttaaattcaatccaatccaatccaattcaatccgcaatagtgcaaattgtagggctagcaaaacgggtcagcacgaacacgactcgaaacccgcacgagagttagcgggtttgggtttgccttaaatggattcgggtcgtgttcgggttgactcgtctaactcgtttaataaacgggtcatgttcaggttgacacgactatctcgatattgacccattaatgatctatttaaagttattttagtactttaacatgtcataaa

SEQ ID NO: 320772 - DNA, 1334 bp, Cannabis indica
ttttttaaacattacaattcaaatttaaattaactcactactacatatctctcttatctttattttatattaaatgtaatctgtataacataaataatagatatattattcagtacagttttagtaataaaatataaatcctcctagaatttatatttttaagtaaaaaaaagtaatgattaacaattatagtatgttattatgaattatattttttaaaaaataaaaactttacttttatacaataacaaggtaataagttatattttatgaaaggtaaaagtaacttctaacctcccactgaacagtgaaaactctagggataaaagaaagaaaataatatatatttaagttaattataacaaaattcctaatagttttaccttgctagcaattaactctcaaaatctaaattttgacagtaaaattcctaaaattacaatactattgataaagtctcacttccattcatctaatcctattatttgcttacgtgctcgatatacaagtgtcaggtcaactccatattaccatgtcatttaaaatataattatgtggcatttctaaaactaagatatgagttaaaaaattgttattttaaaatttttaggacaaattgaaattacacaaaacaaaaattaaaataaatgaaaaattaaattaaaaggctaattaaatgttatttcttcttctctctacctaactttctctctctcctaggagcgattttagctccaatggaacccaaagctctatgtgtaacgccctaaataaataggcacgctacccaatatacttatgaagccctattcccctaaatgggattgttaataaaattagcgcgaaaattaaactttaattacaaacagaatgcaaataaacttgtaatactttttttttacaaaataaaagatacatgtgtcgcgattccgaaagtattttacaaaatgttattacaagtttactttctctagccgacctaagcgacaaaacagagaacaaaatacatcaatggtagaccccaacccgcttggtctagtgtggctcgaacatgtacattcttcatccagctcctacactcatggctgatcagcaatagccttaccctttcctgcacaatagagcacccgtgagccaagcccagaaagatagaataaaatatcaataacatgtttatcatactatataaactagggatgtacatcggtcagtttgggcggtttattctatatattttcaaatacaatctaaagttcgggttgctaaaatttaagtgcaacccgcccaaatttaaaaaaaaaaaaaaaattctaaaccgaccaacggtttgggcg

SEQ ID NO: 320773 - DNA, 1535 bp, Cannabis indica
gggactactgactgtcacagaactcaagtgagttggccgacctgaacagaaaacttcgtgctgaatggatgccctagtcacattacacaaacgggtaaataacacgccaaaaccctaatctggaaaacttaaacccccctcccaactaagggttctactattgacaactaatagaacaatacccttaatttcaagggattaactaaccaaggctccaaaaataacacgaattgatgtattgaacgatacgagaaacctgccctcaatccggctaaccagttttacacgacactagtttgcaccaggtttccccacatagttcaaatcttgctcaaaacgtatccaaaccaagccaaactttcaagaacacgtataacaatatccaacaacatattccaagcaataaaacccaaaaatacacatagaatccaaacatgccattaatgactcaagtttgagttttcaaactcaaacttgttcattcaccacaaaactcatcaaaaccagcatcaagaactcaatctcatctcaaattgaacttagaaactgaaccacaaactaacctaaccctaacagccacaaactcataaaactacacattaagatcaaacttacaacacaagaaatcttagagttagagtgtttagggttacctcaagctaatacaaactatttcacttaaaaaaaggcccttgaatcctactaaaatgaagaactcagcagcaaaccccttggtcgaagcttggttcgaagagagagaaattttgtatttctttgaatatttgatttttcttcaaattgattaactctacatcaatatctaactgaaaaaataaatatggctagtttccacccttagaaaaagccacataatccccttaagaaaattaccataatacccttctacttacaacttaagtaatactaagcctacgggtaaaatggtcaaaagccataacccagctcaaactcggtattaaaaatattccttatgtttgtcccgctaagaatgaggttccagacttatccatttgactctaacgaccatccatcgcattgtttgccgtcgccgagcaaaaattataaaaatttacataattcatatatagcataaataatacttctagagtttaataaaatcttcagatcgaaaaattataatgcccatttctaataatgggatccacaatataataaaatcatgcataattataaaaaagtcaataattaatgctaattacctttactaatccatattctaacatgcggtcattacaactattcccccgttaaaaggattttgtccccgaaatttaacctaaatagctctggatattgagttctcatgctagactctaactcccaggtggcttcctctaccttgctgttcttctagagcactttgaccaaagctatggtcttgtttcgaagaacttcttctttcctatcgagggtctgaactggttgttcctcataggataagtctgattgtagttcaagggctttgtaactcaagacatgagtcaggtttgaaa

SEQ ID NO: 320774 - DNA, 1021 bp, Cannabis indica
aataacccctaatacgtcatggtacctaaaacaaggtttttatcttttacacttacaatgtgcatggtttctacgacgatacttatgccactattttgaatctctcgagcatcatctcttgactttgtataaaaatgtttactccttacaatgtaagcttcatgctttgctaccgcaaaattttttccaagagcaatacgactcaactatcacatactccatgattcgattcgttcaattttgctagaatggtattctttaaccactgaatgaaatttttacaatgctcgttggcaatccatttttaattaattatttttatatgtcttggaaccattgattgtaataactccatatggtcactacaaatcataaatgtgaaattagaataaaaatgtaatgttgatcaagttattattcatcatgattaattaaggttaatcaaaggaacaactacctataacttacgttatatatggctgaacctctatattattgttcatcacgaccaattaagaattatctagttcaaacttggcacagttaccattgttcctttctcccttaatcctttatcaacctcatctaggtcaaaccttggtttgttaattctaattgcctcaactccggccatgtactctaaacaaaattcaacaacctcttcagatatgtagcactcaaccatagatacttctgggtgatagtggttacgtacataacttttaagtaccttcatatttctttcaaatagatacatccatcttgcccatactggccgacacaaccttgcttctctcactaaatgaaccattaaatctatcatgatgtcgaaaaaagatggcagaaaaaaaatttcaaagttgcaaaatgttttgactacatgttcatgtaaatgtaatgcatctaatttatcaatttctaattccttctcgtataacttattaaagaaaatgcaaacatatgtcaaacactctcgaacctttttttggcaagactggtctaatggaaattggaagcagat

SEQ ID NO: 320775 - DNA, 1072 bp, Cannabis indica
  modified_base (49)..(49): a, c, t, g, unknown or other
gtcctaaaaaaaatttctccaaaggattgctcaatccagtggaaaaaancatggccaagattagaacttggagctctagaaatctatcatttttagataaagcggatcttataaattcaattttgatggtcattcacacctattggagtcaattaatggttctgcctaaaagtattgttagagacatagaggctatttttgcatgggttttttatggagtaccagccaacatctgactggggctgctgctgtggcatggagcaaagtttgtcaacccaaatcagcagggggtctaggactcaaacaggattctgattggaatacagttgctatgtttaaatatatgtggactgttgctaagaaagagaataatttatgggttaaatgggtgcattgtgtgtatattaaagaagataattggtggaattacagtgttaaagcaagtgatagttggtattggagaaaattagttactttaaaggagagaatgaatgagctgtttgatagtgatgatatacggaaaatacaaggagcaagcatcagattgcagaagggtataaaaaacttatccctgcagaaactaaagagcattggcttgtcattgtgtggagtcgacttaactctcccaagcatagcttcattttgtggctggctatgcttaagagactcaagactaataagataggctataaagttcaatacttaattagatacatgtttgttctgcagcaatgaagagcaatcggtggatcatctattttttgcttgctccttttcacaggattgcttaaaccagacgaaattggtttcattggaacatgaactctacctccttggtaagtgctgtcaagtggctaggcaaagcaaaaatgagcaaatttaagaagtccactttggttgctgcactagcagccctagtgtacactatctggtgtactcgaaacaccaagttttggaaaaacaaagttgaaaatagcaacgcagtaattactcaagttaagaatgtaaccaaaggacgaatttcatgtatatggccaaaaaaaagtttctaacagtagataaagtataggtt

SEQ ID NO: 320776 - DNA, 830 bp, Cannabis indica
tttttgtataaacatatttttgatatagtgtaaaaagagatattttttgatatttttttttaattaagtagttaaattaagcgtagaaattcaaatttgtgatttcattattcgttattagatcaaaattcgataatttaatatttttaaaattaatattttatagttaaatttgtttagtaaccatttatgggtaatacccattaagaagtatctagatactaaagaaatataagagaataagaactataatcagaatttaggtgacgtttggttaaaacgaatgaaaatatagaaatatgaatgagaatggtaataggaatgagaatggaattgaataaaatataaattacataaaaaattgataaaaaatcgtaagatttttttttcttcatattacattggaattatttttccttccatttcaaaatagaatattcattccactaaaatagtagaaagaacaatccattagaataacattccaatacttttaaacgcaaccaaataaatgaaatgaaaagtgtttcttttgtatttcattatctctaaccaaacaccacttttaatcaaactaaaaacatgaaaactctttaaacacttttttcttgatcgtaaaattactacttatggcaatctaatttattaaagttttgcaacttattaatctttggagatggaacagaatgaaatatatggtatatattagtaatattactatttaatatctcttgtaaaatattataatgattgtgtcaattaatctaaattataatgggctattttcaaaaatatgggaaaaattattaaggttatgataaatatggcat

SEQ ID NO: 320777 - DNA, 1062 bp, Cannabis indica
taccttggattggatcactagaaacttgttagaaacctcagaattaagcaacaaaaacataaaatctacctggattcttttgggttcaaaagagagagtgttttatgtgattttcttctaattaataaaaatgaaagaaactaaacttctttttatctatttaattaaatgagaagctcaacatataatctccaataaatatacattaaaagacaaaaatacaattgggcaaaattatcattttgccctccaattaaccaaaaagtcattaaatcacctagggataatttggtcacttctcaaatctcgacgcttcctgacattctctatgtctaactatattgccccactatactaaaaatagtaagatgtgattctaatagccaaatgtcgcgttccaatgttgtctggcacaaaacatgcaaaaatatgaaattctatatatgacatataaaatgcattgtgaattcaaataaatctccgtaaaataataaaaaataactaatatgcaagtttcataattaaatcctaattatctgttaatttccaaattaaagttaagcggtcattataggtgaactgttttctaggatggactcccagattatggtaagcagtttgggaaaacagttaaccgtttggtgttccagcacctaaaattttgtgttttattgatatttagagaattgccacgctttttattaatgtcaaaacttctggttttgagtttaagccctagatccggctcaattgaattatttatctaacattgtcgtgacataggacccgagattgttgaggtaagaaaattcaattgtaccacattgcatgaaaaattatgatacggtaattacttctaatacgaaaaagttattacactactcttaaattattgttaggtttcttagttattagttgtcttattagacaatgatatattgtggcactagttctcccatttgaaaatgagagttagcagatactttttaaagtatcgggaatagttttccttattatagttctgcgtctgaaaaatctggataagattgactcgtggactat

SEQ ID NO: 320778 - DNA, 733 bp, Cannabis indica
aggtttttttttttggatatatttttttggtaaggagaactctcaaatcaaattgtttcctgccaatgttctattctgccgagagctggattttgaaatttgaattttatagaaggtgcaatatttatgcttagcgaaaattcgtggcataaataataaaataaaagattgatttatgattcttactcaaatatcatccttttcacttggttaagtaagaaaatttttctcacgtatttgataacttcaaatttcacatagtttctttgtaaaaagaaaagtagagctatccacgataacagcacaattaagatttgaaatagaaaaaaaaaatgatagttgtgaaggctatttacacataaaatgatagttggctgactcagagctcatttattggagttggacctaacctagtcttttatatcattcattcaacgttattttctgtttacacttaccaattgtgtttcatatagcatgactaatttctttcaaaaatatatatatatatagggaccggattttgtcccgttactgtacggacacggattgcaatccgtgatgtactgtaaccgtcggatgggcagttattttgatccaaaggttggggttcatgtagaggttgatgtaggggtatgtagggttaaataaatggataccggctacttttttgaaatttaaatttattaaaaatggaaaagtgaacagttacatccatcaatcaagtcctatc

SEQ ID NO: 320779 - DNA, 2346 bp, Cannabis indica
atcaaatccccaataattgatagttgtactcttatggacattcccctaacttatgacagtaacttggaagctttgataaagatggaagggcctgccaagagaaggaaagtgatcccaaaaagaaccaagaacaatgggtataatggctcaaagatgataacttcaaaggagatacaacagacacgaaacaggaaagatccaaaggaaatttcgacagcccccgatttgacctttgatgaaactttgaaagcggcgaactcagtagaactgggtcgtcgagagccatgttagccttattttggaatgtccaaggacttgggaatccttggactttaaattccctaaaatcccatgttaaagattatcatcccgggatgatattcttgtttgaaactcatcttaacagtgctcgaatggagtttattcgcattcaattaggttttgtggggtgtttcacggtggatgctaaaggtaaaagtggtggtttagcgcttctttggtcagatgattattcggttcagattaagtctttcacagcttctcatatcgacgctcttgtggaaaacgatttggggttcacttggcgttttacgggtttctatggtagtccagatccgggaggaagaatggaatgttagaagctcttgaaaagaattaaaccaatgtttcatggtccttgggtttgtgggggagacttcaatgatatcgtaaataataaagaaaaaaaaaaaggaggagggccgaaacctgaatatctaatgagaaattttcttattgccatttcggattgtcatctaagagaactacatgccgaaggaggaggatttacttggtgcaatggtagaacggctaatcttgtttatgaaaaacttgataggatcctatgcaactcggattggaaggaaaaattcaagaagaataaatctcccttctaaattggtggaattcggatcatcggccactcttgcttcaagctcatcaagttggaaatgggcagtccttcaacaagagatggggatcgcgttttcactttgaacaagcttgggcggaaaatgaagattgtaaaagaatcataactgaaacttgggagaataaacagcaaggggattcgattcacatcctctctcggctgttacattcctgtggatcaaaactaaatgcatggaatgctaaacaaaaaaaaggagatgcttgctagaacaaaagaccccaaaggaaaaatagagagccttgcaaactcaacaaagaaagaagattggattactactcaaaagttggagcatgatcttaattgcgtcgaggagaaaaaagagatttattggaagcaacggagccgagctctttggctgaagcatggggataaaaatacaaagtattttcattttaaagcttcccaaagacgcaagaaaaacactgtaatggggctgtttgacgattcactaaactggaaaacaaaggagacagagatagagaatatagccatcgttcacaaagcttttcaccaaagccaaccgaggcatggatctacatgaaactctccataagtgtgtccctcatcgcctcagtcttgctgaaaaccaacacctactggagccgtttaccactgaagatataaagacagctttattccaaattcacccacttaaagcccccggcaaagacggacttccaggcctattttttcaaaaaaaaactgggatgttgtaggagaagaagtcactaaagcgtgcctagatgttttaaccaacaacgccgactgtcgaagcctcaatgatactttaatttgcttaataccgaaggtaaaacaaccccaacgtatgactgaattcaggcccattagcttatgtttagtggtctataaagtgatttccaaatgtttagcgaatcgaatgaaacaaagtatgaattccgtgatctcatcaaatcaaagtgcgtttataggagggagaattatctaagataatgctattctcgggtttaaaagtctccattgtatgaggaaagaccgatttggtaatgggaaaaaatggcggtaaaactagatatgtctaaggcttacgatagggtgaaatgggactttttggaggcttatgatggattgtttgggttatgatcaaagatggacaatgaagattatgaattgcatccaatcggtttccttttctatcctcattaatggttctatcaaaggaaaattcttccccgaaagaggccttcgccaaggtgatcccttatctcctttcctttttctattatgctctgaaggtctttcttgtttaatctttgagttgaacggccggtagacttcatggtcttagattcgggtctatggagtcaaaaattatc

SEQ ID NO: 320780 - DNA, 1489 bp, Cannabis indica
aataatctaatgtctaaaaaaaaatgtaaccatagttacatatttaatgtaattattgaaatctcctccaatatataatacatataataaatatttataagagtaaatatacacttagcatttatataaaaagttaataaagtcttcaaattccaatatacataattctaaaaattttacttattttaaaatttattcttttttttttttttaaaaaaaattattttataaagtattgattgattaatttttttttaataaaggttcaatttcaactttttactaccggcctcgtacggccagccgtgatcataatagggtatacatcctttgcaatttgattttttttatattccacgatgatgagggacaacatcaagaaaagtatggctcaaatctcatattcacatctaagtagtatcaataattactatttaaaaaaagaaaacgatgtaaaggcattacgatctacttttcttatcttaggttagaaagtcagggacttaaatttttcagtagcatttttccaaataaaaggagaaaatattaacatttttcaaaatgtgcttttatttgtttaattaaaaagcaaaagtttatcatgtatttatatttgcttcttaattcatctttattatgaataattgtggatgggaatggaaactggaacaaggatgggatgggcgaccagtcagccaagccgaaagctatggctttatataaaaatatatttaaataataatgactatttaaaaaaaattttagagtgttgtaaagtatatctttcatcaaatatgtattattaccacatcagtaacacagtgcacaaaagagatacattaatgaagtaaaaattgaacaatcagcattcgctccagaaccttcgaggaaagcgaagtcaaatgaaccacctatcatcttctctgaagaagattcaaaacatgtgcggtatccacatggtgatcctcttgtgataaaaattcaagtcgccaataaaagggtgaagagagtactagtggataatggaagctctgtcaacattctttacaaggatacattgaagaagaagggattggaagaggcaaaactaagaccttgcatggtaaatttgtgcagctttacaggtacagtgtcgctatcttaggcgcataatcgagcttcccttaactatgggggaaccaccattgtctgggacacaaatgcaagaatttttggttgtcggtatcgcctatgtatataatgtgttgatgggtcgcccagccttaatcggactgggggcaatgagctcgataaagcatttgtccttaaaatttcccatgcactttggagtgggaacagttagaggcgaccaattattggctcgagaatgttatcgagtggaacttcaaaataaaagagccaatcatcaactgatggtaattctgactgaagaaatcgaggggaaaaaagaagatttggatcctaggatccaagatgataacaaccaact

SEQ ID NO: 320781 - DNA, 1012 bp, Cannabis indica
gaatgttgtaatctttttattaattatttaaccagttgattatttaacttattttttttttaattttaattatgattaaatcttgaatgaaaaaaatatttatcgattagattgtaaattattattttttttgaatgaaaaattcagattttattaaatcttagtatccgccaccaaacaagatagcaagttagttgaaatatcatttaaattaaaatgataattaagataaaatataaaggttgtagcaataatacgatttactatattagctgatcgtttaacaaaaataacaagaatattactaatcaaaagattacaattattaatcacttaatcaaagatggagatcttccaaatagaatttcgtaaagtttgtattaccttcaagcaaatctgatttgagagtgacacgttgctatttatgttctttatcctgttaagaacttcacgaactttcattatttctgctaattcaagtgtgatccattcatgattgtagattattagtttaagtagtgattgttataataaaaaggaaggggatattttttattttctatttctttttttgaatttttctaaaaataattatgaaagtaataaaacttgttaatttcgataataataataataacaatagtaattaattgaattgataagaagaggaggagatgccgtgtaactacaaaaaccaaaacgcaaggaagttatggcggtggtctgtcgttttggtgggccaaccacccaccactcaaaacttaaaagcaacaaaacaaaacgcctatttattattattattattgagagagagtgagatacacaccctcctctcttcacttcatcttttaaccaaattttatttgaatccataaatttacaaaaacagttcaattgtaattttttgtctgagaatttattaattttttttttgaaggtaaaattatttatattgttttattagttgttatgtgggttgtaggtaaatttttgtaaaaatataaatttttgt

SEQ ID NO: 320782 - DNA, 518 bp, Cannabis indica
gatgctaagagtaagtagtaggtcaatttttttatgagggggtatctacactctgcccaatcaatgttttgcttacatagtagactgggtgttgtactctattttcctcccttactaagactgaactaaccgcatgttatgttactgctaggtataagctaaacccttcaccatctaagggttttgaaaggaccgaaggctgggataattgttgctttaaagcttggaaggcatttttgcattcttcagtccatttgaatcttttgttaccacttaggatgttgaagaaagggacacacttttcggtttactttgaaacgaatctacttaaggcagcgattcaaccagttaagctttgaacgtctttaactttagttggggatttcatgtcgatcaaggcctttatcttttctggcttagcctcgatgcctctagagttcactatgaatccaaggaactttcctgagcttactccgaaagaacactttagaggattgagctgttgggttttatgccct

SEQ ID NO: 320783 - DNA, 1702 bp, Cannabis indica
tggtgtaggcccagtggaggcttgaagcaggggcgttacaaacttgatggtgaaataagaaggtgagtggattatggagcagatgtaactagagagcctttgttaaggagaagccatgatgtaatgaatatgttgaatgacatgacaaattttgattacgactggcactgggatccatcactataggattggagtcaccaataccctccttattgcccaaattcaattcaccccaaccatttcaagaagaggagaatacactatcacttgcagaagaaattaatcacttagcagacatggtaagatctctgtgtgataatttaagggtgttgaatttgaaatattttaaggaaaataactcaaataatgaaagttatgagagttgtttgaatgatgtagaagcaccattagttgaatacgcagaagacattgagcctataactaaagagcaaaacccctttgaaatggttttaattgaaaatttgagtacattggatgcttactcgacaagtgatcattttgatttggtgattgaagcaacacccatccttagtgaaaaagttattgaagatcaaatcataatcaacgttgtggatagtcatgagaaaagtaagaaaatgtgtaattggaggttgaatcacttgttgttgttaatttgagttggtcaatgctattatattatgcaccaccaatggatccttattttccattaatgccacctgcaccatattacatcgtctatgagctgccaaatgtttctctccaagcatatcatccaaagtctagtgttgttggtaatgcttttggttcaaactcatcgcatgccaagcttgagggtattttcaaaaataactttcaagttttcctgcatgacacttattatgggtgtgaaccgcttgttgatgcggcatggtctaaggtaagttctcttctccttgggttatttgtcacattgggacaatttaaattttagtttggggagagtggcttattttattttattttacttgctggttttctttgttttgttttgtgtcttttttctttgtttagtgtgttattaattaattcgatgatatagttgttcgattatgttgttgttgctatttgtgggatggattgaaaatgtgaactgtgtgcttgattctttgactctttagtttaatttagatgcttgttgaaaattttgtattgatgtaaatttttaatagttggatgtatcataattattctacgtttgttggcgaaataattacttgaatgggatagaatttgcatgatttattctcttgaggtaaaattctttgcaatgtttgattggaatatgattcaggaaattttttttggatcatgttaggctaaaattagtctaagtttcgggtcatattttcggttagttttcactctttgtttctagttttagggctatattacgcttgattcttttgtttcaggtcctcgggcatttaaagaaagtatgtacaagaattgaggaaaaatggtgaaagaatcgagaagaaaaaccaagattggtgtcgctgcctgttcccgtcgcgacggggaatttgccagtcgcgacgggaactggcagaaagttttcaagaattcgaagttgaactcccgtcgcgacgggggctttgccagtcgcgacggggacccttatgacgggatttttgggcagtttcgtaatttcacgaatttt

SEQ ID NO: 320784 - DNA, 936 bp, Cannabis indica
gcaattggaatacgataaattattagttagtataaatttttccatattttattagttgttagaattttttttaaaatattatttatgctgctaaaatatgattaaataattagttagtatgcatagttattagagcaagagcaactcacattcagaatttcttaattcaaaaaaaaaaaaaaacaaaaaaaaattaaaaaccaatttggaatttctccttattcattaccgtgctgtggagcagggtattaacgtatactgatgagagagccattcattcattcaatacttctactaaatgatccttttaattattttgtattaagtaaataccaaatagattgattgttaattaccacatgagagagtatgaagcaatattgtttttgtgtcaaaaagttgcatttatagaagaatattgttaatgaagcctgaccaaattaaactaattattatagctataatttgctccaataccagctacccactttccacttagtctataaatcaataaaggagacgctattatataaattttaattacttctttgagttttgatatatatttcctacattgcatggacctttggtgcaatcaattgtgtatttgttttctattaaatgtaaaaaattattatatggattattattggggtcgtgtctatgtctagggctgtacatttctccaacggggataggccccgacgggactcgcctctaatggagctgggttcctcacctaaatgaggaacgggacggggacggaaattattttttgtccccgaatgttaaacggggcaggtttagggatcacacttctcacaccgatggagacccgttcagtattttattttatatttatagtaatattttataatttataatttatgtttgtcatttttttagtatattagtatctttttttatgaattttaa

SEQ ID NO: 320785 - DNA, 945 bp, Cannabis indica
aaacaaatcgcgcttcgcgtgcggttatatttttatttagtgataattaaattataaaactatatctattatcaaattttgatattctttatatatatatttttaataatatgaataattgttttttttcttatttttgctcttaataacacaataaaataaattaatattgcatatactcgtaattttcttaatttttttgaacttttttaattaatttatttattataaatatacattattatattgttagtttttaaaatgtttatcattaaattagaatttttcatgaaaaaaaataatgttaataaaaataatatataaatttatagaaaactaattatatgatttaaaaaccgttatttttactatgtctcacttgtgatcaccactatattaaagcttcaatttgaaagaatctataaaaaactcgtcatataattttaaaattgttgtcattattatattccatttataatcatcactacatttaaagtcactatttgatatagtttataagaaacttataattttaaactgttgttatcatataaatatataaagaaattttattaagaaaacaaataccattcattattaagatctttctttgaaattaatagttatactttttttttttttgaaataaagcgtatatatattagaaggaaacaaatagtcagacctcacggtcattacaaaaaatattactcggaatagtagagacttctaccataccagaaacattgttggcaaacgcccacttggccacattatgggccgcaaaattacagtttctagaaatatacgaaagattacaacaagtaaaagaagtggagagatgtttgcattgtcttgcgaagttctcaagctgccaaaaggattcgacaccctttaggttcttgatcaccatctgagaatcactctccaccataacaaatgggt

SEQ ID NO: 320786 - DNA, 1411 bp, Cannabis indica
tatatttagatgtctataaaaataataccagatataattttacataattgtataaaatataatttaatataatactacacaatactacggtgtaataagacataccaaatcaaccctgaaaaaaaaaggtacaagaaaaaaagaatagttaacaattaattatattgaaggaacaatcatcattcatcataagtaactatatttcaaaactaaattttgtcagcacaaattagtagttcccataaaaaaaaaagaacataaaactaaaacaaaacctaaaatttatgctggtatacttaatttttttcttcttttttcaaatccaatctttctcaaatcaaaaaactcaaattacttgtactcgaagctaggcactgggggcgcatcaaagctctccaatatcttcgtttcgcttccactactactcgctccttgctgctccttcttgtctccaccaccgagccaccctccaaaccaagaacccgaacccgaatccgaagcagacccggttgcggcagctacctccggagcctgtaaccgacccggtaactggcctgaaggaggaaacccaggcattcctgccatattaggagctggttcgtcaatcataataggcatcggttgttgttgactaaggactttattgagcatgatcccagctccttcgatcagagccaataaaacgccaccaaacgcagccgatcgagaagccgcgcggaaaccctgacgcatctggagaaatccacctgtggcggcgccggctatgatcgagttccaaggatcctccttttggcgaacgtagaccatggtacagtcgaaggcggagaataaaccaccccatacggcgaagcttccgccgactcgaggagcgttcatcctcacggcttgagagccgccgacgagtcgtgctccctggggagagttgtagacgcctttgaggaagtggaaagcggagccgccaacggcacccatgccgaaggcgccgccgatgtcgtcgagaatacgatctggacaaggctccctagaagtctctggagttcccatggagaaagtttgtggagagagctccgaaaactgttttagggtttgagacgcgttttgaggggtttttgaggtttttggtagaagaggatggaagaaagaatagtatctaaagattattctactaaatagtgtaattataaaattttattttatcttttcttcggggaaaataatcggttggtaaatttgtttagattaaattaattatatatatatttatatggttaattggtaatttttttcccgaattttgacatgtactaaatggtgcctctgaatttttttggccgttaaaaattcttcccgaactaatttaaggacttttgtctaattttagtaaaaaaattctaacatagatgaaagttca

SEQ ID NO: 320787 - DNA, 558 bp, Cannabis indica
atctccatggctaagacaaagaatttagggcaccaaaaaaggtggtggaacccgaacttgccccctcaaatgctcttcctgtggctccaattttgctccctgctcctgcaaatgctcctctccaaggagattcatcgcttcctcagcgtgaatctcagaatgtgaagatcaagcctaaacggattcccaaacaagtggctaggaaaaccatgagacccatgaaattctgcacttcatcatcttcatcgtcgaagggttctcctcctcgtgctactgcatcacctcctgctgtcactggtaagggttttgctgcataaactccaacaggtccatcctctcgaactcgtgcccaataagcttcactcgagaaggaactttgcaccaaataaagccatgacagaccgaatcctactgccaagaagctgaagttgaatcccccctcggcttcttcaagttctgaagaagaagaacatatggaagtctcctctgatgacttcgagaccaaattcgtgtcttttccttctgaaaaagagcttccaaaagattttggtgtctcct

SEQ ID NO: 320788 - DNA, 1184 bp, Cannabis indica
gtatccatgtatggttcagatggtcaactttggaaattcttgtgaaatctcatcaatttcattaatatattatgaaacacggaatatgtctgtcaagaaaagtattaaacacgacggcaatgtggttatttcaaataaatataaaaacaaatcaaaaagtcttctcctttaagtattggtattagtagtgcccaacattttctataagtggctggcgcgccatgattggttagctatatttgttaaaagttattttcttaagttatatgggactcgatacttaattacgtatatcaataacagtataacaccgattaaggtgtagatcacaccaataatgttttttagtatttctaaaaaaaaaaaaagtcttctcgtaaattagaaaaaaaaaaagtcatagtaaatctttgcgactttgtttaaattggtaaaaggtgaagtagagaaaatatgagtaaagggaaagtctacacgttaatttcatatttaggacttttttttttttttttgaaaaagcatttactattattataaatcaaccgtcattacattactagaaaagtcagcatttgtaatggtcctaaaaatactttttcggggggaccgtcgctaaaaaaattaattgtttaaaattgtcaagaaaaattagtatgatcccaacagattacaacagtaattacaggaataggcgaccgtttttaccgtcgcctaactaatcgtcgggtaaaaaactatcacctacttctcgccacaatttccacaagcccacctacttcttttctatttctcacatgcctgtctatttcttcttacctatttcttctctatttcccataccctaaaatgaaaatcttaactctccaaaaccccacccacgcctccgtaccaaacctcctctctcatcgtattcttccctctctcgatctccctttcttctcgtctctctcgtccatcgatctccacccaccctcctcacgtcagtctccctctcctctctgtcgcatatgtcggaccaccaccacctcccgtcggtgtccttctcatctccatctcatacgtcggaccaccacaacctcccatccgtctccctctctctctctttctctctctttgagctcggtctaaatatatttatttatttatatacttttttatttattatatatatttatttttttatt

SEQ ID NO: 320789 - DNA, 808 bp, Cannabis indica
gtgatgttactccatattttaataatgtaataactatatttattgcaattaataaagatgatgaatttttaaaaaaaataaataaataaaactttaacaataacaaaacaaaaaaaatatattattaaaattttaacatcataacataacttgtacaataattaatgtaaataagtatagaaatctgaggtaaatctataattaatagtagtctcagttttaaaaaaataactataattttctctccacaaaaaaaaaattgagatttttacaaaactgtaattttcagtataataataatgggcaaaacaatagtacattatatacttaaaaaaatctttgttctattctgatatattatatatgggattttctcataattatagaaaaatttaatattgtttatttttatatgatataaataaataatgtaaaaatatataagattaaaaaactaattaaaatttgaaatatagaaaaaaaaaacaattgataaatttgataaaacttctaataataagtatcactgaaaaagtcaccggtactgaagaagtcgcttgtaaagtcacgtgtgctgaaaaagttaccgaaaaagttattgtaaatggaaaagtcaaagttatagaaaaattcattgaaaaagccaacaaagttgtgttgtcgtcggaaaagttatcaaaattagatgtcgcatatataaattaaagagaaaattacctttgtgaacgtagatttaaaatttattataaatataacgatgattattttattatcaaaagtttgtgaatttatttggtccacgtgtata

SEQ ID NO: 320790 - DNA, 1527 bp, Cannabis indica
ttctaaaatagtacaaataagaccctgaactcaatttttttaatataaccaacttaaagataatttctagcacgaatggacgcaaaaaataacataattaattttgtcataatacttttagatgagattattattaagttttattttgacaaaaaaatcagtttggtgtgctatttagtactagctatatattttggaaaataggaggggtttaatttatcatttaataaaatagagggtgtaatcagaaatttttaaactaccccgagtccaaaataatattaacccttataaaaatatataaatagaagttttcttcctcaacttcttttcgttgtaatttttttttgttctgatctatagaaattattacaaatattctcttttaattaattatattttattcattttttaaaacaatttttttatgtgaccataaattacatatataattgtagtacgagaattatttaacaacttaatttcacccatcgatctgaaatccaatttatattgataataaacatataaatattagttctaaaattagatttacgtattctcataatttattatcagactttagttacatatttgtttttatttttgtgtagactattgaattatactagatcaataacttgtttaagaaaataagcaaaatataactggaagagttatttgcaataatttttatagtttaaagaaaaaatattcagtatagaaaaatttatggagcaaaactttacaaggatcataactctggtgagaaaattattgtttaaataaaattataaattgaagactatttttaaatttttaaatggtatattgaagactattaatttaactagtatatatagtttaattaccatggtgggagtatgtgtgtgctcttctgtaggaataaatgtgatcccctggcttgagctggcttgctttgatgttgtttgaaattaatcccatctttaattctatatattgatttatatctttgatggaaagttgggctaggcataatgagtatatatctatatatctatttatagtggtggtgagcataaattagtagatttatatactgagtcaaagtagtccaagtcaagttaattatatatttgtcaatttatctatgaaatataataatgtctcccaacccaataataataataatagtaataataataatattgctcatttccttctctatttttctacatactattaccaaagacattctagttattaattagcaggattttactgagtcaattaatgctcaaattagtaggccaagtcaagaataatactcctcatcatacacaagtcttatttttttaatggtaaatttatacacaaacttcacatttaaatttatgttgcaagtcatttttaataggggaatttttaaaaataattattttctacgttttatttaaaattttacggttcaaaatttttaattataaaaatattcttgtaaagttttaaaattataaaaatacactttgttcagcaaaaagtaaa

SEQ ID NO: 320791 - DNA, 1184 bp, Cannabis indica
aaatcataccaaatgattgcctcattaaaaattttctcacgtgttcctttttattagaccaatagtcattcaaaccccaataacaaaactcttgctaccgcttgatatgtttgctaccaaatattattgttggaccgttgctatagcaactgaatataacttttccaccgcaaacttagttctttgcccaatttgaaatttcttcacttgcacaaccttcttcacttgaccttctacacaggaaaaaaaaacaatttcttaaattcaccatgacatttatttaaactaattatatatattttttcttttttttcttctttttctttcttgaggtgcctttatggaaaaaaaaattctcttgtttttcttttcattttctttttggcacccccaaattacaagtttcaagcatccttcaaggagatagaagtcttttctcgattgacctcttctccccaataatgtttcaatcgttgtccattgaccttgaattctcttcccgacttttcatctttcaccacaacagccccgaaaggatacacttccatcaccgtaaatggacccgaccaacgggacttaagctttcccggaaatagcttcaatcttgagttaaacaacaacacttgctgatttttcacaaaaactctctctttgatcctactatcatgccacttcttcatcttttccttgtacaactttgcattttcataggcaaacaagcacaactcatctaactcatttaattgcaattttcgggcctctcccgcagctgaaagatcaaaattcaggttctttaatgcccaaaatgccttgtgttccaactccacgggaagatgacatgccttcccataaactaggcgataaggagacatgcctagaggagttttaaatgtcgtacggtaggcccaaagtgagtcatctaaccgctgggaccaatcttttctgctaggattcaccactttttcaagaattcccttgatttctctattggaaatttcagcttgcccgttggtctgtgggtgataagcggtggctattttgtgcttcacactatacttggctaaaagggcagccaagactttgttcacaaagtgtgtcccttcatcactaatcaatgctctcggtgtcccgaatcttgtgaagacattcttatgcaaaaatttcatcaccaccttagcatcatt

SEQ ID NO: 320792 - DNA, 2758 bp, Cannabis indica
ataactaatcagattgtaaagggttttatttagggcacaaaacccaacacctagaacatcaggtgttcgtaaagacaaaggcaaagggattgccatcaaaaaaccaaagaagactccttccactaagtagcataaaaagtctaaaattgttgaccaaccataacagaggaggaaatgaaactatgctttagggcatggtgaccagaccaatctagaggtagagtcacgcaaaaaaaaaaaaagattgatgttggagtttagaagccagagtcttggatggataagcatcctcttaatgattccagtaatcatgatgaggatattgatgaagtacatccagtatcagatgatagtggaggaagcctttccacaaatgatctttaaagaagattgaccgctaagaaagaaagaaccaaagcagagaaaactaggccccgtgggaacaatataagaaaccacatcaacgatcgtgtttgtaaaaaagaatcttcaagtgataaggctcaacacttggaacgtaaagttgaggagttgatgaagatcactgagaagatttctagaaaacaaagtggtgtcatgtcagactttgaggaagaaaatacggagccttgtgtgaaaagaatcgttgatgtaccactatcggagcatttcagaatgccacagatgtagctgtatgaaggacatacagaccccagggaccacttgtccaaatcaaccgtatcatggaagttgctaaggccaatgacgatgcaaaatgtatatgtttttcattaacactaagtaagtccatgaaggactagtggaagaggttgtctccgggatcgattcacaactggagagacctacaagaaatgttcagaaagcagtttatagcagccaaggattataacttggaagctagttccttaaccaaagtcaagcagcaacaaggagaaagcttagagaagtccatccaatgcatgatggttgtggctgctaaaactaaggtcactaatgacatgaaaatggtggcccaacgtcaggacatacaactgtatctttgctatgaggagatcttcaatgcaaaagagcaaatacactgagtgagttcttgacaagagctcaaggattcataaatctagaagatgcttacgctcaagcgtatggagtactcccagcacctaccacctatataataaatgcccaacctttgtagatgacaactccaaccatttaccctccaccaactgcttttactactcctacggtatatggactaagtacttctgtgcagccaactgcacagactagtttttctatatttagagctgctcaggctagtatttttgggtttagagctgcacaaaccggatctagtgctgcttctagacaaacgaaccaaaaagtggaagttctagagtctaatgtaacccattcacgaagcaaaaggagttcaaatggtccaaattaaagtgagtctgtgaagaaaagaaagacccaagaatcaagatacactgagtacacaagtctaatagatactccttaaaatgtgtacaaggaaacctgtaacatggtgcattacaggaagcctccgtcaatgtataaaggaagaaaacaaagaagagatttgagcaagaaatgagaatatcatggtgatatcggtcacaccacaaatgaatatgactatttataatatgaaattgagggattggtacggaacgaacacttatccaattgggtaaggatcccagtcatatatccaggacaggcagttgcacacgaacaacttttcattctaggataggatggagccataaatcctcctcagggaataggtcatccacaaattcttggaatataagcgccaaatgcacaagccattcaggtgggtacagaacactctaacaacaatagtagttgtagcccctggtcttggaaatccgtaccctccaagagctgcattgccaatcttagatggtcatgtagtaacaatttctggtagacctcatattgctggaagcactcgaaatgcacaaaagcagtacttgagtgagttgaattaaagtgaagcttgccacctggtactatcacttgcccagcgtgcaaggatgataaatttgagaatgaattttacagaagacgatgtcaagcatgtgcacttcccattaatgaccctttggtaatagaggctcaaatagcaaataaaagagtttccaaaatcctcgtagataatggaagctctgagaacatcattttttaaaggagccttccaagccattggtctagtggaagccaatctgctaccatgccgaattcaactacaagtttttaatggagatactggtattagatcaatttcaaaatcaatttcccgcttcagttgtaaccctagtagctcctctggaaagacattaagaaattcttgaaccactagaacatgttctggttttgctagtggttcctttgtagtatccacttcacttgctaggaaatcgatacacccttcacataataaatctcttgccttcagcactgagattaagggaatctgcgatccttgcactttacccacaaatacgaatgggtcctcgccctctctttgaaaggttaccatctttcttttacaatcgatggttgcattgtactttgtaagccaatccattcctagtataacatcaaaatcttccaaacttaactctatcagatcaattgacaactcccttccttccataaacattggaagggatcgaacccacctgttggagataaccagctctcc

SEQ ID NO: 320793 - DNA, 1227 bp, Cannabis indica
gcaagcactttatgttgtcttgcacaaatgcattttgagggtatcgtctacaggaaagggaagaagagagtgacctcctcggagactccttccgaggtggaggtggagcccctcaaaaggcagaagaagaccacaactaataagaaatgagcctcctagatcgctaatctcgaggtccctgagtctgaaacccaggatttgattcctccttcgttctctgcaagtaccgacgagcctctccctaaagtgactcaagcctttgcctcctcgagccagaccattgaaacactacctgtcgaggccagaaagactggctcagagtttaccacagagtttggagctgcgtattggcatcagttcaaggctctccttccccatgattgggatttaaccaaccatgaggatttggagggagtgctcagaaggagtttatctcacaggctcttggtaagtttctttatccttatttgttcacttcttttattcattttctccttctttttctttttactcatacatctttgtttgtggatttccaggcttctttcatctcttttgccgcttagtggcgaggcttggaaaaggtaaaatacttggagagtgaggtccaaaaattaataggtcaacgcgaggttgtggccaagaaatggaatgatgcctaattagagattacttgccttaccaaagaagccgagaaggtgaagaagaatcttgaagctgacgggaaggagacaaaggacaaaaccgatgaatgcaagaaactaaaaggggaacttgaagctgacaaggtgacacttggggaaagaggctgaaacacaagagcgatgtaacgtcattggccttcgtaccatttatcaagcttggatggaaaatcgaatatggatacaagtttcttggaagagtctgaagaggaaattctgcttactgcgagaagaccaagaaggaggaggaagaagccgatgcaggagaagaagaagatccgtcaaagtctcccactaggtaggcttgttatttatttattttttattttgtttaggaaaatggccttaaggccaagactttcctcttgtggcatttttgtaaggacaaatttgcaaggttggatggccaactttgcttttattatatcttgaatgtctcatatttttatatttgaacttaatatatctatttgtttgcgttttcactcatagcttaaacatcatatttgatcaaatacaaatactt

SEQ ID NO: 320794 - DNA, 1039 bp, Cannabis indica
gcaaggatggctggtgctgcttgaccaagaggagaggtggcggaacgctcgagaactccccaaacctcgagcgttccaactgcagagattcattttctcggcggggtcgcgaagcgacacccgccgttggttcatcatctgaaaaagaagggaccacagcatcatccccaggggctgcacgagcacgcttgagcatactcctgacagagtcccctacttgagttgactgtcgagtgaagtgtttacgggtaccaacagaggaagtaggagaagaccttgtggaagattcattaataacaataccagggggcctagagagaggagggcctgaaacaggcaaagcgatgcctttccctttgacagtgtgggaaatagttgaagtggtcatgattggggttggaatggtaggatgaatgggctggggagaaggggaagtgggggtagggaatgtggaagtaacaatggtggtggtgcggggtggggaatggacacgtaggaactggtctacagcatgctggaggctgtgagccggagaggcaggaggagggaaaagttcctcaaaaggagtggcattagaaatgtcaaaaggattctttttatgttggggttgagccggagcacgaagtgagtcagtatattctaaaatgggaggggaaggaaagttgtcacaacggagaagataacgagaacatttgttgtaggtatgatcaaggcggccacaaaagtaacagaaattagggagactttcatacttgaaacttatccatttgggttcatgaatggacctgaaacggatggtcattcccctacgcagaggcttggtaatgtcaagtaatactctaatcctaaggaaaggaccggagttctcgagcagtgaaagagggtatatttcaataaggtcacccagttcatcagctatgaactgagccaattgagggcttctgcgaccgaaggggatgcggtgggcttgaatccagaaaggagtgtagcggatactttcaggggtgggggtaggtgagacatcagggtgggtgaacac

SEQ ID NO: 320795 - DNA, 966 bp, Cannabis indica
ttcttgtacgaatggatgtcttgcgaatggaaaatgggtgtcttgagaatggaaaaagttgtcttggtctgtgattgtgaataatgtttgtaaatagaatgagttgtgtctgttaaagttaactttattttttggtatattctgttaaatacacaagaatctgttaagtgcacaacaaaataagttagatagccattttatatattaggtaagattatttaagatttcaagatgtgactatttaaatagattgattgataccacttatatcatcttattttctgatagctcatcccaaaagaactccacagtcattttgggatgggtgacctccttcaagttttcctaggaaggatgtgtaaaattttgagaaattcaagaaaatttaactcgctgaactttttagtttaatttttttcccatagtcgtgtttgaacactgcttttaatattataaattattttaaatttctcaaagttttagatagaggtgtacatttacacccgaaaccaacctggccaacgcaaaaaaacccgaaaaataggtttcaattttagtaaatcaagttttggttacactcacttcatcatcggccgagttcgggcttcattaatccaaaacctaataaaatcaaattacactcaaatccacctgaaactcgaatatatataattttttaaaaattttttatatatattttttgaaaacatcaacttaaaacaaaataaaattaattctaaataataatatatcatttttattttttattttcttctattattttttatttattttttgttttttttataaaaaaatatataaaaatgatattatttttttttaaaaaaaggcaagctcaacccgaacccgatcaaaacccacccgcacccaaaatccaaaaatctagtcacacaaacaggtaaaacacttttttttttttgtacgcggtgaacagagtcacacatg

SEQ ID NO: 320796 - DNA, 588 bp, Cannabis indica
aaaaaattaaacttaaaataattttaaaaatcattcttaccattttttttgtcagcttccaaaaaaaaaatcacattattttgtgttaaaacaacacaaaggactataactaatatatgcaaatactctgatccaaatggtgggtattttatgttttatgttttttattgtcacatcctagaaaaatgaaggaaaaataaaattactatataaacaatggtttatgattatgatggataagaataaacttcacataaaaaaaatataccatttaatgtattattaggtgatcaaaattaattttcaaacatcaaacttgtattttgttttcttcttcttattattttttaaatgccccaacccaacttaacatccaaataagggaccaaagaacaaagataaaacaccaaacacaacattgcaacttcttctttggtaaaatgattatattccaaatatgattccaccaaatacaaatatcaattaacaattcaaaagatcatcattttggggcttggctttggaatcatttctgctttttcttttcttctttttttcttttttgtataaaaaatcacttttgtggag

SEQ ID NO: 320797 - DNA, 1246 bp, Cannabis indica
acagaccttttctcaaaaaaaaatatacgttatccctattattaaaaacaatcatcagagtaggtaatgggcagttaatattgtcacgtgcttatatctaaaacaacaataattgcgtgaaatttattactgtggaacacacgatacatttacttataaactacatgcaagtgatgttatattttaatttttttaattgttcattagttttgtaaattacaagacggttatattaaatataaagatagttttgtgatattttaaaattaacttttacattattgtatttcaatgcataatatatatagggccttttttaattttacacttcataacattttttttttttgcatttttacggaattctccatagaaacctctattgcagctagcgctgtaacctaaattgcaacaaaaaatcttgcaactagcgctgcaaccactttagaaactcaaaccgtgaatttaaaaaaaaaagttaaaaaataatatatgaggtaattcccctaatatatattcaacacatttatgacatgttaaagtattataatagttttaaaatgtcaactcgaacacgattcgttgattaaacaagttagacgagtaaatgttgaaaactattgtactccaataaaaataccaaactaacataattatataactctatgacaaataatactaatgtcaaaaacatggattaaataatgttacaatactgaacgaaatatacacataaaatagagaatataaaaatgaagagagggactacaactcaaagcaataagctacacataaaacacattatataaatagcatatataagagatgtgagatcaatatcaataccacatacagcacaatattgtaaaataagggaactaccaaacttgaacaaagtcttattttcctctaccacaagcacttaaggaaaagagaagaatggaaatagctttctagatttatcaagcataaagtatttttagcaatgtgctctcttgatcaaaactagttgttcaaaagtgaacccaaatacctccatttatagtgttttgagggttcacatatgaaaattaaaatcccttcaccacatgggtgttatctgcactttaattggtgtttaatattaggataaaaatattggacaagagagatagaaacatgttgaataataaattcatgtacgtttatggacgttatttcaaaacttgctccagaggaaggacaacaaccataaaataacatgtca

SEQ ID NO: 320798 - DNA, 922 bp, Cannabis indica
ggaggttagttgcaaatacctgaccacttaagggggttatgccgcaaataacacatttataaatttatatgcatgatacgagtcactacttcataagttggaagaacagagcacaatagattagaaacttgtattattgatcacctcaccactatatttacattaagtactttatataacatcttcatttatatactataggcttatagctatcaaaatacaagtggagagatccatgatagtgatagcccaagtcccctcacacaaaacatataactaaatagaaatttataattctttcacattaattaattatacataatattactttattatttttctcaaagcaccttcttctagcttaataggacgattaaaaggttcactaaccatcctaagctcgcctggggcgcaccttaacgctgagtggattagccatctcacaagacaattttaggatctcagatagatcaacaccactttgaccatttgggagccattcaaattcgtgcaacagtgatgccacccaaaagcaaactgtggtcaaacccaaggccttaccggggcaggtccttctacccgacccgaatggggcgagcctgagatctgacccgaatacagagaactctgcctcgtcttcccctgtcacaaatctctgcggcttaaactcaagcgggtcagcccaaaactcctggtccctggatatggcccacatgttgaccatggcggtagtcccctttggcacgtgatacccatcaatagtggtatcggttatggccaggcgggcccacgagaggagtgggcccggagggtgtagccttagaacttccttcaccacagccgtaagatacactaatttggacatgtcggattcagcaacggatcttgatctgcccactaccttgtctagctcatcgtggac

SEQ ID NO: 320799 - DNA, 587 bp, Cannabis indica
ccaaatcttcaatgaaaaaccactgcagcaagctctaaatcatgggttggatattgctactcatactcgttcaatttgtaagaagcataagcaatagccctatcagcttgcatcagaacacatcctagaccttgtctggatgcattacaataaatcatgaactttttttgatctgacggtaaagataacacaggagttgtgatcaatcgctacttcacctcttggaaaattgcctcacacttaattgtccatacaaacgactgattctttttaattaattatgttaagggatttgagatcttggaaaacaattcaacgaaacaatgatagtatgcagctaaactcaaaaaactttagactttagtgactatctttggccttggccaatcctttacagattcaatcattcccaaatcaaccatgatcccatccctagtaacaatgtgccctaaaaaggacactcgatagccaatattcgtactttttaaatttggtgtaaagcttatgttcttgtagttgttgttcatgctccacttctgattgagagtacagaagtgttgggttttatgccctaaataaaactcttt

SEQ ID NO: 320800 - DNA, 647 bp, Cannabis indica
tcggatacttagtgaacactcctctcattaattaactgggctaatccaaaatcatcgataaagccaagacaagcccgacacacatcctccccataacatcccaaaacttatgataaaaactaaccttcattatttttttgaataatgatagaaacttcattaactcaaatctcccaaaatcaagaaagcaattatagtagataactcaacactacttgttgccccagattttgccaaatatacgtggaccgaccggacagggacacgtggatcaaaacatcttgatacatgaattatttgctaagtctttatgaaagaaggcagcatccgggacatgcctcccggagaaggcatacggagccccgtatgctcccggaagcctaattaacatcaaagcatctccacgaggtgtcagacttcccctgagcagtcatttcgcatttaatgccgcatgggaggaaacgtgttgggactgctacacgcaataaagtctgacggcacaacccctaatctgcagctgcgaagtaatgatcatttaattctattgacgactacactgtgaagggtcacgtcagtcaaaagacaataaggacattccacataaaagccctacaacacctagggatttgaccatgcattactcatgg

SEQ ID NO: 320801 - DNA, 514 bp, Cannabis indica
agtttggggtgttttctttttttttttttctcaatggctactttattaaagttgactctaaggtgtttattgcaagttcttctttttaagtagaagctttggttgtgctttatgccttaacttatggcttcgagtgcaagtcacatctctttttttttttggattgcaagaaccttatagattctctggagtgaatcctgagtggcaatcaatcctgatgctcaaccacatttgggttcttaaataaaattttgttatgcaatttcacttgtatttcatgatcttcaaatggtcttgcagattctatcgccaaatgggctcttctacttagtttttttggttgttttaattattggaagttgtccccctatggtgtagctttgacttagtgcccttttgaatgaatctctctttgccaaaaaaaaaaaaataaaagatatattttctcttaattttactttcctaattgcttctctacacatgcttaaattaaaaaagaaaaaaaaagtaagaa

SEQ ID NO: 320802 - DNA, 725 bp, Cannabis indica
tttaagatgaatttataaatcaattagacaagcaattgataaagtgagccaaaacatacacaaatgaatgaaaaatacttctgtttctttattgatgttgaataaaatagattacattgaaacggagttttatttagggcataaaacctaacactactaacaatggtctatgatctgacccccaccaatctagaaccataatgtcagctccatcaaagttctgtagccattcctcattacataacccctatctaatctttccataaccggatttaactcatgtccattacaccaagtgaggtcagtttttgaagagtagaaatcaattaatctacactcatcaatcactgtcctaaaatcctccatggccacatcccttcaaaattacatactctctatttaaatctttttacctaaatttccaatacactatttacttcttccccactctccttttcacaactcactgtttctctcacacactcaaatatttatagttacaaaacttgggtaacaaatccaaaactgtaacacccatatttaaatatttctaaactcaaaagataactttaatatattataactttataattatatgggtcggaatcccgagtttcaaaacatagtttaaaactatatttctattttacaaaactacgttgagagattttttcttttatataaacatgtacaggcaactcaaaatacatcttaaaatatttgaa

SEQ ID NO: 320803 - DNA, 1519 bp, Cannabis indica
tgacgtactcgtgtataagagccaatcattccgttggtgtaagggcccaatggaagcttgaagcggggcgttacaatatatatttaaaagaaaagggaagaaaatagaattaaaaatgaaaaaaaaaattgtacatttttgatgaatatattataattttaattcaaattcaataaatttgagaagatatgaaacacgttaccacattagtcctctttaattttgttaggaatttattttataatttgtttatttgttagataatttattttgtcaaattatttgttatataattaaaataacaataatttaagttgaatttaaatttaaatataaatattaaaaaaattgaatattccaatttgtgattatttcattaaagatatgaaatctctaatttgttaatttttttcatttatttttaatggtaaaggacataagtaaaaaattcaaattcacataaatgagaacaaatacaaaaacaaaaagttatttgtcatcgtaacaatgcacatattttctaactccttctatagtcttcttctcttattataacaatgcacactcgttaaaaatcataacaaacaaaaataaaaaggagcatatcataaaaattaaaattatctttcttaattcataaacgtaatataaaactaatagcaattaagtcagaaaataaaaaattaatctactaataaagccttaaagatgtatacctaagtcaatcaaatcaaactaagacaaatatatgtatggttaaaagaataaaaaaaatactaaagaaaacaatataataataattatagataatctttccctttatagtaataaaactatcttttatatgaccatacttctctttatatatatgtgtattaataaaactacattttttttcagccaaataataataataacactacattcttgtacttacattgacacatggaagccaaataatgcaccaacaccataaatttataaagaaatgtacaaaaataattaatttttttttaatatttttaatagaataactatttcttgccaaaaacaataattataatagaaaataagtagccagtataaccttataatttactcctatttcttgccaaggatcagctctctctcaattctatgtcattacctaactacatatcatagccacaaaatttctattaatttgtaagactataattaacattacttcaacgtttcagatctacaagtggtacacaatttgccttcgtaccaggtaggttggaatcgccccgataatacatttagggctcgtttggaacgccgtattaagtcgtattgtattgtattgtattatattgaattggattatatatcatatttttatataatactatgttaaactttaatttatactaaaatattatatatttaagtgtccataaaagttaatactcatatagttttatataaaaatattgcataaaatacaatttaatataatacaatacaatacaatacgacctaatacggcgttcca

SEQ ID NO: 320804 - DNA, 1036 bp, Cannabis indica
cgaggccatgtacactgcatctttttcttatcatcatccccactccaccagaaagtggcacacatacgatgaatctcattaataagaccaactggtaaacgaaacaaactcatggcataagttgggatggcctaaataaccgattttaacaacacttcacgcccctagaagagaaaaacttcgacttccagccaaaaagtttattccaaatcttatctttaatcgattgaaacataccacttttacttttacctgcaaaacaaggcaacccaagatatttatcatgacaatgaacaagcaggaccccgagaatgtgggccacatactcatgaaaatcaagaggaatactagaagagaagcataccgctaatttatgcaagttcacaagttgtcccaaagcattttcgtactgatgtagagtttctctaaatcgaacacaactagccaccgaggctttcagaaagaaaatactgtcatccgcagacaagagatgtgaaatcactgagcccttctgccacattgaagtcccgagattgtccctcttccagtatcatgcttgataagagaagttaagccctcggcacacaccagaaacagaaaaggggaaagtgggtccccttgtcgcaaatcccgagaaggcgagatatggccaattatttctccgttggtgttaatagcataggactccgatgtaatgcagtgcataagtaacccaacccaaccaggatggaactcgagtttaagccacataccgcacaggatagaccagtcaaccctgccataagccttatccatatcagccttgtatgccggaaaccctttccttcctctcttgtgcctttcaatagcattgagacactcaaaaccaatcattgcattatcagttatcgcattttgggaacatagtagttcaattgagtgggagtgctaaacatagataaggaatctatagcttctataagtatttagaagtgaacgatgattcttcgagcttggctgaatagagataaatgattaaaatctcatttcagtaatt

SEQ ID NO: 320805 - DNA, 2024 bp, Cannabis indica
ttcatatttaggatgttaattcaacatacttgttagtaaatctagatcctggtaaaatattcccaacaagtgttataccctggcttgtcataggtactcctattgactgctggctagccagtggctgcataatgggggttgcttttcagccagagatccctggctagcccccaagctactggttgtcgggatctggctattctcgttgtttaacctttgagcaaaggtctgtcctcactctggcaaggaaagatccgtcctagttcttgagcaacttggggacaatcttccttgaagtgatccaggagatcctggcctcttgtgtcgattctctgattgaaccgtcttattagatcgctggcctcccagttgtgacaatctaattctgcttggtgagatcgaaggatgtaatcctggtcatccatccacctaaagaatttacgtctttgctgagcgaatacatcacaatcagcagtacgtgattcttcagttaggcttgcacgacctactgcttccctaagtttggccaactcaaggtcttctcataggtccaagtgaggctcgcccactcccaagcctgtctctccagtgtagaaccagacttgaggtctagttgttattccaggaggctgctgcccccgggtccttccttcagtgggcggcgccaatggtggatctgcttctagaggtgtgggccagccacttggatccaccgggatgctcgtgtcaggttggccagttgtggtggccagacttgttgcgcctattggggtgacgagattcatcacatctgtagtattcatggggattccaattatggctagaatctgagtgcctggatctacgatctgtaggtcttgagggagacctaaagatgcagatggtgctatagtagttgttcttgtgttcaccatggtttttgatcaaatcacgatatccacgctctcaataaaagtaccaaactattgaccttgaaaaatgatcaacctacagggaggtcatgcatatctgatgcttgccacgtgtgtgcacaaataagaatgaaaatcaatagatagtaggatttattatagaggttcggcccccttgtgatagcatgtaatgacctactctccttttagttgtattatactgagggaattactgtctatatcgttataagtgggctatgctatcgtacccttaggattacaatcaattctggaaaaactcaagtgttggacaaccaagggtgttagacaacctttagtgtcggacaacccaaggcaggcatgtgaaagagaatgaagaagagagagagtttatttgacatttgagatcaagtttctagcttagaggcaacttgagcaacttaggttttcagtcagaggttaatgcctttatataggaagtcttaaaccctatgtttacaattcaaatcccttggaaatcatatagttagttagatatttacaaaagaccaaaatgcccttgtaactaaatgttattcagctattctgttgggcttttggggcccaatttgcagcccatctttgttgtccacatgcaggagtgtcctgtggggcctgcagagcatcctttggccatccaggcccttgtgctggccagtctagctggcgatggtgctgtccacctgggctggccggctagctcctgagagtgagctggtctgtcacttgatccccatttgtatgccagggccttcgtttgttcgggtgctgactcgaccttccttttagtgagctgtactgccacgtgacacttgttctgtccacgtaagcatgccacgtcatgaggacaaaaattaggataccagttatatatatttttattgaggtgtatttttttgttgtattttatatatgttttattgtataatatatcattttattttacatcatgtttagtttttactttatgatatataaatgtggtatataattttgtatgaattgtaaaattattttaatggttgtatataattttgttagtatggtatacatatttttgttggaaattatttt

SEQ ID NO: 320806 - DNA, 799 bp, Cannabis indica
tttagagaaccattaaagatacatctgtttctattgagccagatattataaaccacagctgccaaaataaaagcattgatcctgtgcaaagagccattccctcgcaaagctaaccaaatacaccaacctgcataatcagttggccaccttttatatcccatccaattgaaaaccaaatcaagaaccctgctcgacaactcacaagaaaagaaaatatgctcatgggtttccaaggcatcttcacacatggggcacaaggtagaacttagctcaatctgaaatcgaaccaacttgtcccttgtgagcagatgagagttaaccacctgccaaaggataaatctgtgttttggcactatggttgagctccagatagctttgtggtaattgacccgttttcgaactagactggtattgtataaccagttagtgggaaaaaaatggaatatacgaataacaatataaaatattaaacaataatctctctatagaacgtatttaaaagttgtgtaaatactaattacaatttatttgccaatatgtaaattagtattttgtaattatttataaattaataataacacaaaaataatatgaaaaattacctcatatactattttttaattttttaaaaaaattacaatttgaatttctcatgtaatttatccggtgattttatgtaggttcctatacgaattttagtgacaatttagatttagttgcaatagaggtttcaatgtaaaattctataaaaatgcaaaaaaaaaaaaatctaattttgaagtataaaaataataaaaaa

SEQ ID NO: 320807 - DNA, 1010 bp, Cannabis indica
aatcttcttgtagcctcaaaaatcttcaccttgaccttattaacaaccagtttagaccagtgctctacactattagaattagaaaaacccaacaatggcacctacttgttttcttgagcacgtctttattgttcaaaaactattcttgtcgatagaatcacttgccaaaggcaatttcttgcttaattcattcaacaaccaaaacaagttcttatatgagagtatttatactcaaagacaaaagccaaaatggctaacataaattagttacaattcttccaaatcacttataagccaactgcaaatcaaagtctttgagccagtacttgttgctttcgctagtcgttcacattgtaatattgttgctaaaatggccaactcaggaagtgggaagcagtcaattatactttaattgttagttatcctatttcttaggatttatctgttggttagtagctctatataaagagcaaggtattgtactgaagcggtgggaaaaaaaatacaataaagtactattagtctcttgtatcctaggtagtgtgttatatatacataaactattttacaattttgttttatcaaagttaaaattaaattataataagaaagtatacatcacaattagttaatggtaatgaaaagaaaaattaatctaaagtaaccaatttaatttgtatttttacagattgtattgaattaattttgattaaaagtgccgattaaatgcactatgatcaatagtacagattcataattttgtatcctacaaattggacacaatataaaaaaatcttttgaaaacacatccatccgggggagagtgatccagggaaatggacataaagatctttacaagacaatcaacaactaaattcatttttgctagctaagtgaaaaaaggcactactatcataccattattagtattattaagtatcagatctcataaaaattttaaaaaataactttcaacaaaacctgctgtaaatattttatttttttaagaa

SEQ ID NO: 320808 - DNA, 669 bp, Cannabis indica
aaaaatatttaatttaattttcaaagtttctcttaaaaccttgtggaagcttgagacagggttgatataatatgatgtaggtgtagtagggccatgaaagtcgtttttgcttcgagttgtctccaactcagaccttttataattaatggaagaaattatataatatataaatatatattatgtatataatagaaaatatagaatcacttacgtaaagcatatgacacctgttgaagtacacgcttttgtgcatatatacatgcatgtggtagcaccaaacgaataataattatttcaactatgtcaaatattgtttctagaaaatattcttttaatagcaaatttccaactacatttgatgacatttcttgaatagcggtaaaattacttaaaattttaagtttataagcggcataaacttgatgtttatttttagcggtataattgtaaaactataatttttctctaattttgtcagtacagactctgttttaaatttattaaaggaacatttggaagtaactatactaatatatatttctgtctagacctaataatctacaatctggaccttatatgtagcctatttaagaaaataatagagtttgtactaacgaaattagaaaaaaattacagttttataaacatttggtacttatgccgctaaaa

SEQ ID NO: 320809 - DNA, 1182 bp, Cannabis indica
ggatgaagatggaggaaaagattaagaggagaaggaggcattcttaatctgaaaagaaaagtaaggagagagagtgacgttttgagagaaaagagaaaaattagggtattttttaggttagatcggtataaggaaagagaaattagggtaacctctctcaaaaggaaattgcatgaccgaagaccgtagggaagagttaacaagcgtctgtgcctactaaccatctcgggggtaggagtaggcctcgtcaagagagctatcaaaacagacaaaagcatttgtcataaacttgaaaaacaaagattgatgtaaatgagcatgaagagaacaatcacttacgaagtttgcgaaacatggttgtgccgatgggggaaagacttaacgtccacaagaagttgttcttgaaggatactttatttggcaagtctacaataattttaggctcgataggatgagtaccgagatagaaaaatccccctgaggcattcttccttgatggaacggccttaactgagtaaagatacgcgatctctattggtgtgggacacccccagttcatgattttgtataagactttcaaacaagtgagaatcctataagagataggagtcgattggaatggggcaactccaatgtggtttatataatctttgaggtagtcgccaagaggaagcatggcccctgcattgatatgctcaaggctccaagaacccatactagtcgaaccactagtactagtctcaccactagtcgtcgagttgctgcttgtaaagcgcgcagggggtaacaactgaactcaccctcccgttccaatctaacttggaatgatagcccaagttcgattccgtaggtcttcaacatctcgcatgtgtagcctgagatagactgcaccttcgattctatcaactcagcctcgaaagtgacattggagtcctgaggagtctttgatgtacgtggcttgggaggtataatttcaaaatccaagtcacatggttcaaacgtaatcgtgacgttgggcaaaaacaaaggcttttccataggaataagggacacgctggatgattctagccaagcagcttctcgcaagaatcgatgtttgcctttgaagatttcttgtaagaaacgcctgtagcgactagtaattgttgggttttgtgccctaaataaaaccctttacaatct

SEQ ID NO: 320810 - DNA, 1073 bp, Cannabis indica
gttaaaaaaatatatagggtaaatatatataattttcatactaggtaagtcaaggtagtatttcttaattttttttttgctcttattttttttttaattttattaattttttatataattttcataactggaagtcttctataaaattgagtagctaggttcaatttgctattaatttttaactaaatttcattttatttttaatagtatgttgttcatacatttaactttaaaaacatattaaaaataatttaatataaaattattaatgtagaaaaattactactaatagtgcagaatcaaataaactaaattttaaacaatcaaacgattagcaatgacaaaattatcaaatcgaaaacaaaaatcgaatgaagacagaggcaaatagagtatataaatctagaaataataaatgtagaaaaataaagaaattgacaccaagatatatattggttcaagtccaatagatctatgtgatctatggctctactcgagttctagaataccactgaaatccttctttattgattgagcaagaataggtacaacacagtcgagatgagattctttgttgagttctcactaagtgttcaactctcacacttacaccctagaatcttcttcattaacagaagattcttcttacaaacccaaacccaatctctctattttctatgcacctctctctctacctctcagacttctctttctcagactctcaatcttaatgtgaacttagttcacaatctcgtcccttgaaataacaaggcaatgtggtatttataggcttaggatcaagatcttaaagtcggtggctagaagcaatgaggtgttaagttagttagacataactaacttaactagcacttctttgagcaaaatctccacgttagcttaagtattagagcctccaggaacatatatgagctttcaaactcacggactaaggacactcgctgaagacgcttttgggtaggattgagcctggtggagttgactatccgaaactaccattctaggagggataactagcaaactagaactccatcctggagtgaggctagctatct

SEQ ID NO: 320811 - DNA, 1302 bp, Cannabis indica
gaggctagctatcttgaagactggacacagatatccgaaatctcccttctagactcaactaacattcctaagattccttttgggactggcttccgtgagtgaacaactttccaaaaataatgtttgtggagactttttcatttggaggaactataccacaaattccacctagttacttcaaattaaaaaaatgatgatgatgaagaaagaatgcaaacgtcatggttggtgttctattaatctcattatactaacttctgagattgatcaagttcaagcagtgcttgaacttgttttagtttaagatcttagtcgcaacatcagtaggattatctttagttctgaccttctctaaatcaaccagtccttcttctatcttttctataatctagtagagtattatatctatatgtttgctcttttcatgacaaactaaattcttacaaagatagatggatgactggctatctgaatacacagtcactcctcctctgatttattttaactcataaagttttccgcaaagccatacgcttccttaaaagcttctgtagtcaccatgaattccgctttcgtggcggaaagagaaatcgcagactgtaactgagccttccaatttatacagttccaatttgttaagaaaacatagggagtggttgattttatggtatctttatttgaggtgtagtctgtgtccacgaacccttttaactccaattctccttttgcttttgcatatgtaagaccataattccaagtgcccttcaaatatctcaataaccatttaacagctttccaatgttccatgcccagattggacatgaactgacttaggatgcttaaagcgtgggctatatccagtctcgtgctcaccatcacgtacattaaacatcctagaaccgcaacatagggcataccctttgtttgttttttttttattttcatattgttaggacattgttccttcgacaaaacaaactaaccccctaacagaatgaatgtactctttgcatcttccaagtatcacatcaattaaatctactgagaattctctatcttctacatacactggaagagatcaaacgcacctagtggagataaccatttctctagtgggtaactgttaagcaaaaatttcacatttagagtattaaaagtaaatacaatacacaatttcacctatgctaaatttatagcataagagtttattaatttaagttcgaccgatccaagattataaaaataatctcttaattacaatccttttgtttaagggaaataccctttgattccaattacgat

SEQ ID NO: 320812 - DNA, 666 bp, Cannabis indica
aaacacttaaaattaaaaaaaaaaaaaaaacgaaattggaggacataaatagtcgtagttgtagtattgtagatacgtagtcacgtgatcaagccgcgttaactgataataaccaggggtataattggtaattcacacaaacaggatagatttcctaatggagaccacatgcttgcatgtcatcctcatgacacgtgtgaatttacatacggtttcctttcacacgtgtcaccttgtttcataagattccaaacccctatatgccatcttgcaatatatttatacatttatatatatgtaacacacacatgcatgcatgtattatcttggatttttgctctcatatactaattaatatatatacttattgtaattacgtgtggtagctatatatataggttgatgagtatgattctatgacaacagttagctataataatttattatcaataattattatatgaaaggtgtttgttttcctttttatataatattctagttacagtaatatatattgatagtcttgcttcgttatctgatcatgtgatacagatttggggtgtgactcttacttacccaaattaggtttaagattaatatataatattgggaaattttataatgcatccccttaaaagggatacaccgatacatctctatctgttt

SEQ ID NO: 320813 - DNA, 1827 bp, Cannabis indica
gctttgaagtgcctagggagggtctgggaggtaggcctttttcatttttggaaagatgttgttaatattagtattttatcttattctagcaatcatattgactgctttgtaaaaatgactgataatataagtttccatctttcttgttattatggttcccctatttttctggtaaattggcttgttataccttgcttaatagattatatgatgttgcttcttttactccttggattatcattggtgatttcaacgattatcttgacatcaatgataaatctactagcaatcggccttctcctaatgctatggttcacttccaatccttcatttataagtataatctttcccccatgcctcatattggtaaccgatttacttataagcatggtaacacgtttgaaaggctagactgggccatagtaaacaaaccgtggcttgatctgttcccgaaggcaacccttactcaccttccttattttggatcggatcacaaatgtttgaaagtcctcttctctgattctcaacataaaaaataatagtcctcatgtctttcgattcgaaattttttggctatctgaacctgattttcttagtgttgttcaaactaattggtcttctcagaaccccaacgacaacactaatcccctttcctttttccttggttgtcaatcccattgtgtcaacaaacttcaagattggggaaaaacaaatgtcacttcaaaaacaccatctgaaatcttcagattgccttggaaaatacttactcttcccctgtgcttaatcagattgatcttcagcgcgccaaaactattcaaaatgatcttgatgtagctctttataaagaggatgttttctggaaacaacgctctcgtgcatcctggctgaaggctggtgataaaaacaccaaatacttctaccatagagctttttctaggcgtagacataatactattagccatattactctggaaactggttcagttattcatgatttcaaccttatttgtcaccatttcagagagttttatgtctccctattctcttctcagggtagtgactccacttccattaactttattcttcaaggaatctctcattctctcaatactgctcaataccaacttctcagtcaacctttcagccctgatgaagtccattcagccttgtttcaattacctggtgataaagctcctggctctgatgggcttaatgctcaattctatcaaaagaatggaccacggtggggaacagttttactgctgctgttcttgatgttcttaacaatcaatccgacttttcctcaattaatgaaaccatcttggtcctcattccaaaaaaaaaaagaatgcttcttctctcaaggattttcagccaattagcctttgtactactatctataaggtagttgctaagactatcgctaataggcttaagttggttttgagtgatttgatctctaataatcaaagtgcctttcttagcgaccggatcatctttgataatgtccttattgctaatgaggttattactgccattaataatcgaaaaggtggcaaagttggctgggctgctctgaaacttgacatgaaaaaagcatttgattgagtgaagtggggtttcatacaaccgattctcactcaatttggttttccctcttcctttgtttctctaatccttaggtgtctttcttctgtctctttcaagatctccattaataatactcttctaccttctttcactcccaccagaggcattaggcaatgggggatccactatccccttacctttttctcctggttgctgagtgttgtgataaatccaaca

SEQ ID NO: 320814 - DNA, 912 bp, Cannabis indica
gctgatggtgatggtaaaaaaaattatttatattatatatatttatttattatattatattatatatatttatcctctttgactcggtcaaaaccgagtccttacaggtgctcttcctagagtcatatcgatacacatgtctcacgaagaacttcgaaatacataccgcaattgactatcacaacggtcgagcaccattacttcatcagtttgttgatggaggacaagcacgacaagagcaattagaggcaaccagctatacctttccccaagagatactacgccaaactagagacggggctcggccaacagcgttgtcaaggaaagcggagtgagggtggtatctggctgcaagaattctggcaaccagaaagtttggttgctttaaaagtctttcttggcaagcatcgcttgattgaaatgaggaagagatcgaaaactcaaacctacatctcttttgggcttgcaaagagtggaccatttgatccaatgagtttttgagtggttttaaacattggttccctaccaaaaatcaactatcctgaattcaagagacttgcaaatgctaacaaggagtctgaagtaagccatggactaagaggggataaattacataacacctttgctcaaaacctctttgcctcctttggaaaaaaatttgtttttcaaatttgagatgtgagtccaggctctttctttgatgtaattaaaagcttgtttctttgatctaccaaaacattgagggaggccaagatatttttcaaattcagtacgaattggcatttgcaaataattcgaaataagagtacagtatctaggggtgtacatcaaaccgctcaaaccgctcaaaccgcaccgcaccgcaccgcatgttttaaaatttaatttttatatttatttaattaagcccat

SEQ ID NO: 320815 - DNA, 1035 bp, Cannabis indica
aaacttgccttatgcctgattcatgcatcttgcaaactacgaccttatttccaggaacatcccataaaagttttaactaatcatccattaaaataagttttatcaaaacctgatgctttaggaagattgataaaatggtcaatcgagttgggacaattagatgtaacctacaacccaagaacatcaatctcagaagaagatcccctcgtcaagcatgatacagaacttagaaattatatctagatggagcatcgaatgaaaatggctcgaggcaggagtcataatgatgtcgcctgataacttcaaattccactatgcgttaagattctaatttgatacttcaagcaacgaagcagaatatgaagctttgttggttggcttgaggatagtcgaagccttaaaagtcaagaatcttatatgctacagtgactcacaattgattgtgaaccaacttctaggtgaatactagccaaaaggattaaaaatggctaaatactttaagaaggttcggaagaacttggagaagttttattattttaagaatgaaccaattctaagagaagataactaaaatgtcaatgtactggcaaaattggcctcgcaaaatgaacttgataagttcaatcttgttccggtcgaagttttgaacgactcaagtatatgtgaaaaggaagatgttgagatgataaatgccttgccatcatggatgacaccaatagtcaaatatctactcagcgggaaactttctacagataaaactgaggcacacaacacttgtattcaatacctcgttatactatagtcaagggcaaactgtacacgagaggttgctttatgcctctcttactatgtgtgttacccacagaagctactaacataataaaaaaatccatgagggcttctgtggagatcacgtaggttcacaaagtttatcgaaaaagaatatccaacaaggataatattggccaactattaacaaagacacgcatgaatttgtcaagagatgcaacaaatgccaaaggttttcacatatac

SEQ ID NO: 320816 - DNA, 1064 bp, Cannabis indica
gtcaggttgcttttgatgagttatatattgaagtataccaataataaggggtgtgtatttattgattgtgagtattattttccttttgcaacttgcacgaatggggacaaaagataaagggagacaaccaatgaaacctctcaatttgacaagagcaattccaaagccaactagatagatcattaagtagttgacttgctatacatatatgtgagtgaatatgtattgtgtcatcacattttaaaaattggaaaaatagagatattgtacagtacatattaatatattatgtagtccggtactacaaaatctatgcataatggaggataattataattagttagaatattaaaatttactttacgtcgtcatttgagtaattgagtatttgaattatttttataataatttggatattggaagattttgatcgttgaataaaagttatgttatgtttgaataaatgttatgtttgttttggtaattaaatatattcatgtggcaagtatgtttttttttttttgagatgttattcagggtttggcctggattatatggctaagctccaatataaatattttaattttataactttttatataaaataatgagagcctttgttatgttaagtaatagcatttttgaaaattgggagctcatacggtcggcccaaatatcttggggccttgagcaaaattaaaaaggggaatttacatctacaatggtaaattgcatcttattactaagaataacggagcaattttattttatatgttttataccgttattaatattattgtatggttttttattgacaaatttacggttactttctatttcttttgtattttctttttcatttgaaggttggtcgtataattatattaaacaattatatagagatagttaaaaagtagggccaagatgcaaaatgaccctaaatctaacaattaagttaataaatgtccatttttaaaaaaaattaacaacattgatgataaaattacaattataaccttgaataattaaatgtttggtatagttattttgcacaatagtatatc

SEQ ID NO: 320817 - DNA, 1375 bp, Cannabis indica
taagtaaatataatggaataccatgtctactcaaggatggcggaagcagatgtgaactcaagcagtcaaaatcttaccaaattggcaatcttaccaagcatggtggaagcaatttaactcctcccaaaattaaatatttttttttggcaagcttaccatgatattcttccaaccagtcacaatctatataagtgaaggactttatcttcaccaagttgtttctgctgccactaccacgatgagatcctattcatgctcttttcaggtgttcaattgtccaacagctatgagaattaaataacttttttgttttattgaaaaacatgcatttctcaattgtatgaatttacttacctagctgctagcaccttcacagctagcaactttcagtttttgtttgtttgatttaacaattatagaattgcaggaatgaacttttgcaccacggtttggttctagtgcccatgaatgtactacagtgagttgaagattacttggaccaataccagcaccataacagttccctttcaactattcttcctacatcctcactgtagccaacacatagtgaatcacaaccaccaacatacaaactcaggctcatgtgaacgctacccaagatacaacaaacaacaaaatgggttttggcatggctattcacaacaataacagggaagtattcttgactttgacaatgccttggagcggcatccatttgcctttgataatgcaagtacacgccttgcaccatgctctcacttggtgtcgacatcattttattcaatcggattgcattgaatcagattgtaaaatacttgttaactatatgtgtagcaatgattctcacaatctctatctgaataaatttatcttggagattcaaagtttactatcttgtctccctaaaattaattatagctaaattcttagaggggctaataaagcagctcatcatctagctaagaaagctttaggcttaaatcaagaagctttgtggaaaagcaataatttccatctttattttgtttcctgaagattggtttttgttctttaatggatacatctttcctaaaaaattatgtatcataataatttgatatatcttgtaattgtctggactcaaatttaattttaattaatattaattttatgaagggatattagcggctaaaccacctaaactttacggtttgtaacacttaaccacaaaagccgaatttttggcggctaaactacctaaaccctagttccgttttgctctgcacacctccgtccaaaaatcacagttaagtgccacgatggactgtttgcgtgtacacacttgtacacatgacaaaattttagtggtccacgtaatattagttttaaaaaataa

SEQ ID NO: 320818 - DNA, 695 bp, Cannabis indica
acggccagacatatctttttcagtcaacaaattaagccaatatcttcaaaatccaagggaacctcaccttcatgcagctaccagaattcttcagtacttaaaaagcactcctggttaaggactcttctttcatgcttccactcccgaacctattcatttacaagcattcgctgatgctgattgggctgcctgcattgacactagacgttcaatttcaggatattgtgttttccttggcaaatcactcatatcatggaaatctaaaaagcagcctactgtatcacgatcatcagctgaagcagaatatcgatccatggcaaacgctgcttgtgaaattacttggcttcactccattcttcatgactttggaatccacaacaaactaccctctaccctgttttgtgacaatgctgcagcaatacatatctctgaaaatcctgtctaccatgagcgcaccaaacatgtggaaatcgactgtcatctcattcgggaaaagatcaacaatggcaccatcaaaatgaatcatgtctcttcaaactcaaatattgccgacatccttaccaagccactactaccatctcagttccaccagcttgtatccaagatgaacttaaccaacttctacagctcatcttgagggggactattaaattcaagattagttagtgagttaggactattaaggatgttagtta

SEQ ID NO: 320819 - DNA, 2235 bp, Cannabis indica
ttcacaaattttggtaaatggcttacagaattagtacttaagcataaacaacttgatttcattatccattctcgttcatttccacacaatccattatgattcattccgttagacataaaaaatgtaaattgctatcttagaactcaatttatcatacaaaacgaagagtaaaccctaattacactactgtaataacttagaaataaagatatgttccaactaagatagttaacgaaatggaaatcatacctcgcaatgagaaatcttgcggcgattgagccactgtagcaagcaatcttggtgcacgtacttaatagtaccacggcaagcgcaagggtagcgaagagggttatcaggctcaccagggcttcggcatattctacactcgtcatcgtccaccgctccatcgatataggccgacagctcacaagaagtgattgactgcgatacgccttcagctgctgccataaacggtggtgccgccgcatcttccatgggcgccggcgagaggattgtcaacggccaggatttgggaatttatggactcaaagaatatcaaatattgttaacagagcattgaaaagggaactctaattctctacgctgcgtctttttctgtaatcataaggcggatcatactaaaacgccacgtccctccttacacaacttacaagtcactagtaaacattaaaaaattatagggtaaataaatgtactcatacacttattttataatttcattttttttttagtaaaatggactcacaaaacaccatcaatacaagtggtcctaaaagttaggggataatattctgttagtacattgtgggttgtatgtcggggggaatagtggaggtgtgttggtcggttgtcagcccgtactgaccatgaggcaaatgaggatccgctacttttactcatcgaatccttttttacatccacctcctctccgcaagttttggcaaaggtatatttgcttaaacggacttctaccttcttttatattttcctcttgttcactaggccaacttgatattttgaaaatttcactaagtgttgagcctatttgtcataggtcttttagaattagtatgatcgttctttgtccccttatcattgtactaaggtggcagtgtgcttgcgaatgagacgtacaactgatgcacgatctgttgacgaacaaccacctaacgcatgactagttgacaaatggccagttgatgcgcgcggacaggctagcacgtgggcgcgagaaatgcgctgggcatggggagatcaaggacgcgaggagccttgagtgcagagatctataccgacttgtcactcctcgtgtcggggccttctttgtgcagggatctgtaggatggctcgtgttttatgacttagtatttttcggatagcttttcaagcattaattatcacccgaaatagtgtctccaaaatttcacttagcaaattttgggggtcaacacttgtcccctagtctataaaattctttcaagtgttcttgtagactaattttggtgaaattttctcccgttgttcggtctcatggttacccttttaggcatttatacctttgagtctttttgttatgaccctttatgggggagtgttaagtctaggagctatctcaaccctttttatggtaggtacttatcatgtggtgggagagttagatccacctctttcatgagttatcattttgtttgagggagctttttgccacttgggatttctcgatttcttctcttttgtaaccttttcgtggatggagtattgactcttagagcagtatcgacctcttcttttgattactcatgggatgtaagggagctttgggccccttaggctatgctcaaccttttgtaagatataaggttttattaggggagctttggccccttagacaccactcaaccccttttgtggtataatatttgattaggggagcttttggacttttaggcatcactcaaccttttctaccacatctgtggcgcttggaccgtgttttgaatactagagaatttgtactacacttagagagttgcccctctcataagcgtactttttcttcttctttctttttctttttttttttacccttgtgtggtcattcaacgccgctaggcacttttgctcatcgcatcactttgtttactttgtcaattttgattgacaagtatagtgaactgttggatgttattttaccaggaacttagatctactcac

SEQ ID NO: 320820 - DNA, 1324 bp, Cannabis indica
gcctcatgtggagtatatggacgaaaagaaataagaaagttcatggcactaaaccaaaaccagctcctattatttgtacattagttgaagcctacatcgaccaatttaggaaagttaaagcacctgctactccttcgaaggctctaatgaaaaaaaaccaaatgctccacttcagctactcctattacgttggacaccagcactgcacctcaaattagatggcttccaccggcagcaggctcttacaaaattaatgttgatgctgcgtatgatgtggaaggatcaatcattggtataggagctattgttagagaatatgctagagatgtaattgcagctttctcaacacctttaaggggttgttattctactaaagagatggaagctaatgctattgtctacagtttaaaatgggttgtttcaaaccagtttggctatccactatgtcagaacagattcacttctcgtggctaatgcaattaacaaagtttcttcaaatgcatgtgtatctcatttccatgatttgataaatgatatttctcttttgttatccttctttcctagataaaactactcatggcttagctagatttgctcttcgattggataatgattgtatttggttggggaaaattcgttctccaatctactctgttgttgtttttgattctattcaatgataatgacattgttttacaaaaaatatatatataataataataaaaaaaaaaagtaacgtaagttacttatttatgatatatatacataatactgataataatatgaaaaaaaattatgtaaatttaaggactaagttatgtatacatataatatttaagtaataataataattatattatatgatataattagtagaagaattgtactaatttgaattaaaataattttttttcttagagtttttcggtaatggcgccaaaaatttattggtaccgaaagtgatatgttttacatttatcaactagcaagcgcataaatctttattgtagtgtagaaattgtgaagaacgaggtcgaacctatgggaattgcgtaagattaaagaaaatacttatttaatctaagctattaaaattctaacctagtttcaaaaatagtgaggtttttggtaacaaaataaaataaagtgttttaacagtgaaaataacagtaatagatattttcagtgatatttggggatactattaagggttcaaaatccacttaagtgtatataaaaatatttatgtttatattaattctcataatttaattagtaataaaatcaactattttttaacaaaaaatagatttttattcgcttt

SEQ ID NO: 320821 - DNA, 978 bp, Cannabis indica
gcctccatgtacaaaatggtttgaatcatcaaggccactattctgtaaaatcacaatggagacctttaactccatccattgatatatctcttcgaaagtttcatagatattcgtttggtgggtcctcagatgggtctggtagtgttgcacatgctcaggagaagtcgtctgtttctgccccagtctcaaatacagtgcctcattatccttcagctgcaactaaaccttctccagtttctactgctcctcacctggcttcttcagcggcactattttagggggagtctgacaaagacgaggtgtcatttgctcatgttcaatgaagggcgagatatatatcctcaagtttttttttttggtgtggttatggattgttatgtttcgtttggcaaagacaatttatgtttctatagtttcattttgttggatatcttttgagtctttgcttttattttgattagaaactatgatatgtttttttgtggtcattgaacttaatttgtcaagggggagactataaggtccatgttttttaaagatgatatccaaagtgattcaagtcttatttgtcatgtttgcttgtcataactagacatgaatattctgttagtgtccacgtcaatctgttaagtgttaacagttgtaatgaaaatgatgttaggtcttgtcaggactgtatgtctatatatagttggttctgttaagagatttaactaacttgttaattgtattcttggatagttctgtagtgttgagtagtatcaagtgtgctatcctgtattattccttgttttacaggtttgattgaatatcttggaggcattcatccataccagaaagatcagagcctgattgagctgagttcagactgaagaaatttcaatttcatcttcatcatcagatatgaagagatttcagattgaagcaaagtgttgaagaggaactctacttgtgttcgaatttattttaccaggatct

SEQ ID NO: 320822 - DNA, 701 bp, Cannabis indica
gtatgatttggtatatgtcaaacagtcaaaattcgggagaaaatttactaattagccaaaaaacaaaattaaacttaaatatagtggaattttatagatttttgaacaagagtaatttgcggtataaatacttaagtttaactcaaaaaaataaaaatttaatgatgtggaccaatcaattgccacgataatttacttaacacttaacagctagatacttatagaagttttaaaaatataacttaggtattattactatcaaaaattaaatctaatttatttataactgagaggtaacttaagtatttatacgataaattactcttaaaataattataaatttatcttaaaaaaaataaaaggcctgtcgtttaacacttccttttttctttcatatatataacatctgtcgttttaaacttaatttcgtttaaacttttatttagcccttttcttcaattaatatatattttttttttgagaaattttaattttagagtactgtcattatttaaatctcttaattgtgttaattttattttctcatgtttggaccgaaagaaactaatatggcgtttcgttgggactgggagaaataaaagtataaaaataagtgagaatagtaataggactatgaataaaatgaaataaaatttaaaatatattaaaaaaataataaaaattaaattaattttttaatt

SEQ ID NO: 320823 - DNA, 1249 bp, Cannabis indica
tactaaaacagataaaatatatcagtacattctttttaaaagatttacattatagaattttctaaaattatattagaagtgctttctagtaggggtgtctctcattctaatatttgaaaatattatagcttaattaattctatatgaccgtgtggacgttattgatttttttgctaagaagaaatatattatagtcgtggtaagcatttggaagtgataatactaaattcttaatagttttggttttcttttggaaaaaataataaacttcaccaacaaaataataaaaaaacgaagtgagtaaaactaaggtgccgtttggtaacacttttattttctaattttttaatctcaaaatgaaagtaaaatttttgtttttaaaacttttgcttttgaaaaacaaaatacgttttgtaaccatttttaattttcatttttaaattaaacagaaaacaaaagtgtttcttcaactcatataattgtctcttcaactcatataattgtttcttcaaaaataatctagggattttgacatataaaggtttttttttttttaactttttccataactcatacggttctgtacactatacttcaatttaggagccaaatgtaagcaaatagtgcttattgctttttcttgcagcttctcccaaacttcatcagtcatactctcatgcttctttccctagagtgcctttaggagcctttgttgtactaatatatctttcaccgtgctctaccataaactaaaattgttcttctatcaaaaagtctgatctcaaattttgtggaagatatcatctttgatatttttagtgtagatctgaacattgactcttgataccacttgttaagaaaaaataataaacttcacgcgcaacaaaataatagagaaatgaagcaacgaaattttacttagtttggtaaagttaccaaacccacaaagagagatatattttacttatcacttcaaaattatatacattctctatctcaatctctccacccaaatcacaatacaccctttacttctttctcactctcaccacacaacaaactcacactaatcacttctcttttcacaacatactatttttctccacacacacaccgtcacgatccgagccctaggtcgtggcagatatgtaatattgttaggttatttttagtattaattttagattaagtttagtatatttttaattaagttttaatcgtgtttggagcatttttacgcttgttatct

SEQ ID NO: 320824 - DNA, 2095 bp, Cannabis indica
acctgattaattcataatataattataaatcttaattacttaccattagggttattgggatattacaatcgtatatcagccttcttgtatcaggcctttgaccttcatagcctcagccataaactgttgaatgtagtccttcaatggttcatcttttttttttgtctttgtttcgataagatcctccaatcgtacatgtatttgtcttgaaatagagaatttaatatagaatcttcgagagaactcttcccaagagttaagtcttcctgggaccatcttgaaataccattattaatctattttagctagagttgctagaaagatttggcattgcacatctctagatacttgttagagatctgtttggatctcaaagtattttaggtgaactaggggattttctctcgttgtctacatcttccaagtcggtatttgaattttgggcaaggataaggcatttatatatgccaagaatggtgatccccttgacctgtctagctcaagctctaaaggctttgaaccagctaggccttagagcatgtctcttatttgatcagactgtgcgagcacagaagaatttgttgatgctagggcctgcttgattggcccttcttgattgagctgcaaccttgaattggccagagcgtggctggccataccctgggagaggctatactcaaggccagccaaccttgagtctggtacttgtacatggctggcaaaccctaagctgggcagggcctgactgcccacacttctctgcctagatggtggagtttgtgcgttaacatgggatagatcacaccaatttctagagtttggtggatccaagtgtttgaagtgattagtttcactccttgaattgttgttttgagtgtttcccggtccttgtcagttgaaaattgatcattgggtgactcaatcccctcggggagggagtgctcctctctggctggccatagggacttctggaggtgtttaggcagccatggggacttctttaggtggctggtcggccacaaggactcttactagtggctggtcgatcataggatggatagaaggggcggttgttgagcttgagatccctggctggccttccatgccactggttgtcgagatttggctattcttactgttagacctttgaggtaaagtcttacctccctctggcaagggaagatctatcctagtctctgaggggccaggttggtcagcttgtcgatagaccctccgtgatctatcaattagccttccttgaaatggatgtgtgacaagatcctagccttttagacctattctctagttgaactgccttattagattgcttacctctctgttgcggtaatctaactccatctcgcaagattgaaggatgtactcttggtcatccatccatcttaggaatttgcatctcttctgagtgaatacatcgcaatcagtggcgcatgggtcttcaagaaattcatgtctctgctaagcgaataaattgcaatcaacaccgcgtggttcttcaattaggtcagcttggcagatggcctctctaagtctagctaagtcgagatgttctcctaagtccacgtggggctcgccaattcctggtcttgtctctcttgcatagtacctgggacaaaacccagttgttgttcctatggggtgcccccatggattcttacttcaattgaaggcgcctatggaggatcctccctggaggcaagggctgattattcagatccaccgggatgtttacggcatctttgccaactatagtgccatattaaattgcttctattattttatgttcaatgtcatgattattgtttcaatcttgtttaagacggtcgctaaattaagttttactttaacctactgtcatcttaggattgctattcacctaatagtctaggattctaagtgtttgtaataaattacaatttttaatattgtcgaaggtatttttaattgtgacgaagaatagaacctaggttaaatgaattaaatacttcattaatttgttgccgagagtaatctatatccacaaatctcaaagctttatctaagttaaataaattgcatgcttcgtggatttactgct

SEQ ID NO: 320825 - DNA, 833 bp, Cannabis indica
atatagactggaatcaggagaaaatatcattcgagtagtgagttaggccctaggcatcactgaggactagtgtgcaagcacagtgggtgcctagttgatattggcctcgagctcggtgttttatccttcaaacatcagtttggcttcgagcatcagtcttattttacccctaaaattagatttagatgcttccacaagtcaatatctcatgtacatgtatcacgcgcaagtccaccaacactcatgtgcactagtgatcacacgggtgtcacctagtcgtcactagtgattcattggacatcacccgtgcatatcaagtaaaatttgcaagagaactttcccaaggaaaaataatgaccaaaggatagctatcacaccattcaagcaccaaaaaatatgcctaaatcccaggaaactaagttatgggtgcctaaatgtcaacttaggcgtccaaaagttagcctgattttgtagtcactttttagcggtgcacatcgctcagtaaaatggccataactctctaatgtttatccaaatgatgcgattcaagtagaaaattaaatctattttcaagactctacatgactctcacaccactgccgcaaattttgaagtttcgaacctcaaaatttactcgtgagttcgtgcaaaagtttttagcaaatttcatgagaattttctatcattttattataatttaattggacctccttctctataaaaggaaagctacattagctcattatacacactttatattctctctacatggtcagagcttctctattttcacactttctctctctaaaaattgtgaagtgaagctagactta

SEQ ID NO: 320826 - DNA, 1138 bp, Cannabis indica
aatgaaaaaaatcatgtgaaccatgcaacattaaattttatttctgatctttattaataagtaaatctgattatgttgaaatgagttttatttagggcataaaacccaacagtattttattccccacctcgctaactgggacagtgagcagctggttcaacaaattcacccatcactcgataacctcttaggaacagatgtctaaagacttcaagaaatagttccaggcagtaagagacaggtgacctaaagtgtcttcccttactaacataaagcagcaaccgggcgagatgcttaaggaccacctaagtcattttcagtgcagctgctgcaagggtaagaaacttgaacgatagtatccagcttactgctcttcatgtagggatcatgactgatctctcgacggctagaggaaaaatgtgggatgattagcaagatcgcccagtgaaaagcattagcgagttcaatgagagagctcaaatgtttgtttgaaagaggaagcaaggaaggatatgaagttgttcaaaacttgctcgggaagtaaacccagcactgtctcgacaagcaccgtatcgacaaaggctaacaatccaggaggctctactacaaaggggaaagattactctaaagaatcagccaaagataagaaaatatataagaagcacgacaactacatgccaatctacacaatttataccaagcttaatgaaactcaggaaaacatctacctcgcacatgagcatagggtcgcattccgcaaacctaagcacgtgagacatgcgagatacaaaagagatgcaataaaattttgaaaatttcacaaggacataaggcatacgacagaagaatgttatcaattgaaatgacgagatagaaagcctcatctcacgtggttacttccaacagtttgagaattgacaaggcaatggacaaaaccagccgaattcgcccaataacccaagcaatcagagataacaacctcctcctcttgaaggagaggacattctggttatctcgggagggccacatctcgctgaagaaagtaacgatgcccaaaagagatatgtcaaggaagttaagaatgagcagtcagtctttgctccaaaatcgtctaagaaagctaagactgaggaacctc

SEQ ID NO: 320827 - DNA, 924 bp, Cannabis indica
tattttatttattttgattaattaagctagactacattagaaattgctattaaatgtctttaactttcattcattattgtactattacataatggattgcaaaaattatgaatacttggtactttgtgataaagactgaggtgggttttggtttagtgtaatggaatgagaatggtaatggtataatagtagtaatggaatggaatgaaaataatgtattcataaatattccctatgttaaatttttatactaaaagaagagaaaaggtgtaatgaggcctatattgtaaagacattaagatgttttcaaaacaaaaccagacaatggaattgtaaagatgattctattagaattaggagttcatcaaaccaaacatgaagttagcttttcttctgcagattctaactttgggattaactgtggtggtgaacaaatttcctcttcaaatggtattgtgtatgagaaagatgatgaggctcttggtccagctactcattttgtgaccagctccaaaagatgggcagtaagcaatgttggactcttctcatggactgatgtcaatcctaattcttatagctatacaagtacttcatcatccaaagttactagtactttagactcaggattattccagactgtaaggctttcttcttcatcattgagatactatggtctggggcttgagaatggtaactacactgtcaaactccactttgcagaaactgctttcgaaaattctcgcacctggaaaagtcttggcagacgtatatttgatatttatatccaagtaatgagggtctaagatttcttttttaattttcttttcaacttaaactaatgtatttctttcttttttgtcaaccttttcaggactaattgtagtgcaaatttatgacagggaaaccgtgtaataaaaaattttg

SEQ ID NO: 320828 - DNA, 1872 bp, Cannabis indica
attgctcaatttttattagtaaaatatttagttgatagtaattaataggtaccatttaatacatgttcatttaaattagagatctacacttctttaatgttttaacattagcgatttatatgtattttaattgaatgtgcttttaagatttttattcttatttttgtaaatgttataatttacctatcttgttaatttggggaattagcccatatactattttttaacctttttttttaaaaaaaattttacggggtttctaaagtggttacagcgctagttgtaataggggtttccatacgattttttgttgcaaattagattgcaacactagttgcaataagaatttttatgtggaatttcgtaaaataaaaaaaaaattaattttatattattatgtaatggatttatctaataaaaatttctatatttctcaagaaaaaaaaaaagcaaaagaaaagggaaatttacatcgtatactaacttctgtcatttttttacaaaaatacacagtatttttgaaaaaatttctgtgtggcagtatttttataaaaattaactcaaattccagtatttttgtaagtttcccaaagaaaattccaatttttcttaaaaaattagaatttctatgcatgtgggaaccactcaaaagattggatatgcgctgtgataccaacttttcaagtccatcatcaaatattataacataataattattattaatttttcttttccaaaagtgataataatataaattatcatttacaacatctcaaaattgaatgtagttgttaactaggaaaggaatcttatctttagttttataataataataagaataaaagaattgatatttaaataccatgcaataagtttggactgtgtttacaaagatcaagaaagtttaatatatatcttgaatttaagtcaaattatgtacttaatatatgatattttattgtgtatgaattaaggctagatatctgatttaatataatttttttcttaatctgatttaatttaatcagtaattaaatttaaactattatcatatgatggatccagtccaattagatcttaaaatttaatgcaatcattgattttttaattaaatatttaattacacacttatggttaatatataatattttattctgtatgtatgttaatgttttctaaaataactattgtttaatttaagctgataaattctatcattttatttatgtttagaccatctcatagattaatggtatcaaaattaactcaaaaaataaactaaacataaaatattaaatattttttaatgtaattatacaccaaaatagcaaaaaagcacccacaaatattttttcatacaattaggtcccctaacaaaaataattttactaagaggatgctacatgaaaaaatttgatctttttgtaagaataatttaataataaataaataaaaaaaaattatcttaatcaaacgaaatatattatctgtatgagcttttaggatttgctatttctctttaactcaattttgacaaaaaaaaaaactattcttttactttttaaaaatgttcttctgaaaaaaaaaataagttaaaaatgtagtttattttttagagttaatatcattttagaccatgtgatttgtaaaagttatcgattagactctctattttgttaaatgataaaatagaagctgtatttttttaaatggtacaaataggacctttagttcaattttaaatttttttaatataaccaacttaaaaaaattcttaagacgaacaaatacaaaaaatataattagcgctagttggcagttgcaataggggtttctataagattttttgttgcaatttaggttgcaacgcta

SEQ ID NO: 320829 - DNA, 818 bp, Cannabis indica
aaaatatatgtgaaaatattcaatattaaaaaacaacaaacatataaagtggaatattatttgatagaagcttgttataataaattactcattttgatccatttacaactaatagcagacctaattagtcaattaattgatataacctattataatataccttaattactacttaatttaattaattaatcatacctggtctctgcaactgttgggattataggctgaaccagtttcagaagaagtataatacaagtaaaaaccttcatgcaccttaggattattactgtcatttttaaatatatctgaagcagaaactaaacaaattgttttatcaatttcctcctcaatctttggtaatgttcccctgaaggacaccaaaatatcccttctccccaacacctcctttccttcatcagtcgccaccgccacaaaccctagccactttgatttccccgcttcccaattgggagagaccggcgacgagtcccccttgaatgcagtggaggcgtagaagtacttcttcactttatacttgaaaggattattcccactctccaatcccacccttgtgaataggtttttcatggagtacctataaaggttgcagttattggatttggactcttcaatgaaggaatccaccacagcctggaccctttctccataatgaattatgtagcggcggaggtcagagtcgagagggtcaagaagaccctcccacttcccctcgccgctcaaaactctccaccgttttcctatgtttccggccattttgtctaaaagagaatataataataataataataattgatgta

SEQ ID NO: 320830 - DNA, 804 bp, Cannabis indica
attgcattaactactaaaatatatcaggtaaaaaataaaattatagcgaatattattattacacaataagttaaggagcctggatagaagattgtacatggcttacacacttttcttttgtcttctttacaaatgctaaactagaacaattatacaatcccaagatatataccaaaaaccctaatttggccaactcacttttgaataggacgaccatcagggcacatattttaagtacattgtcttctttggtaagtatatttattaattctacttgaactaattatatgttatcaactcatgtagcctctctacctctccttgtttttttatttttaattattcacaacacataaattaaagcttctcaacttctttcattctctttctcacgattgatcaggtacgtatatatatatattcttttaattgacaagatttggttggttaaattcaacatatattctacaaaatttgttttgttgttttatgataccttttccccaaaatttgtctttacaaagattttctagattctgtgggtcaagcaagtatgtaatctatatttgatcgattaatttattaaaaaaagggcgaataattgagaaaattaggcaattgatcattaacgaaaggtgtttaaggtttttaatggataatattttattctactttcgctagctttcctgtgctttcgttactattaatggagtatatttattatgattgttgaagatctcatcattctgaatctcgattttataagagacatataaatattatatttatagttatatataatta

SEQ ID NO: 320831 - DNA, 1207 bp, Cannabis indica
tcagcaagcctattaaccaattccaaatccattgcgacaaacagagaaaacacaatgagaacaaaatcaacacactgcaaaacagccagaaaatcgcagcaatacccagggaaaaaaagatgataacaccagaaaactgggagaacacaacaatgtcgatcgactgcacccttacccgcaagaactgcccagtaaaaacccagaaaaaactgtaaagaacctggttgaagaacccagaaaatcgcaggataacaccccaccaagccaggaaatcgcaacccaatccagagaaaaccagagaattcgaagcaaaatcaagaaaaatgtcgccggagttcgtcgactggacctttcccatgaaaggactgaacttccaatctgtttcgcagctccgaaactcgtggaagactatcgtacactattataaaatatagagttttagtttgtgttttatataatttttattttaaattatcgtacatagaaattgaaatgcattctttttttttttgattttcgaattattaaaagtatgtttgatgatgtaatgaccgcatttttagaatatgatttagtaaatgtaattagggttaatcattaatatttttatagttattcatgaatttatttaattgtgggttccattattaaaagtgggcattagagttataacttctcaattttggagattttattaaactctaaaggtaatatttgtgttgtatgtaaattatgtaatttttttatgatttttgctcggcgacgacggaaaatgcgatggatggccatttgagtcatttgggtaagtctagaatctttttcttagtcggataaacattggagatgagtagaatactgagtttgagcggtgttatgatttttgaccattttacccctaagcttgtattagcttaagtttaagcatcaaaggtattttggttatttggaatatgggtataggttgttgttttggagcttgactgctacccatgttattcttttgatgaatattgagttaaactttattcgttttagaaaacataaagaaaaaaatcaagaatttttgtttctctttcttccttgctcgatcaccacaagaaccagccaatacttgggatttttctggtgttaattgaagaagtgctagctgaattcaagtggtaagtattcctgcctgtcacgcaggtgacccgggttcgatcctcgg

SEQ ID NO: 320832 - DNA, 977 bp, Cannabis indica
atttaaaaataatataaaaaatcgctaatcatttataacgtgtcacatcggtatgctgttagatactttaagatacttaatatcaatattttttaatatcgaatctcgtatattttaatttaataactattataaaaaactgttaactatttgtaagaaagtctcacagtgttggacttatgaaaagatcattactactaagcactagtaatgtccaacactaccacatcatagtattttatgaatagttaatgattttcaataataattattgaatttaaataattgattaagtcaacaatagtatgacacaatatagtgttgttggacaccacactttttagtatttctcttacaaaattagtcacctttgtttttaggtacttatgttgttcttttcagaaatgaagataagtaaagcttacacaatggtccatcttctcttttcagtaagcaaaagaggaaatgatgcacatgagtctgattttgctattatgaaacaattggaaatcattttattttttccttttcaattatcaattttctctcttctttttttagtcaatttcacatttgtaatcaatatgctacaacttgtttttaatctaaagaaacaaagcaaaacactttcagagaagataatgtaatagaagacaacaaggaaatgttaaccctcaaattacattgaaatattgcatggcaagccacttttagttatcctaactcataattgtgtgtaatttatgtgtgcacgtatcattgctctacaagaattagtaaaatgtacattaagaaataagtgtttacaaagacaaggcttgacatcactaatcacaaatgttacattttaaaatgtcatagtctaagaccacttgaggctagctcaagtggccatagggggtgcgtgtgtattggaggtcctgggttcgagtcccaggttatgctgatgtaatatataaacgtttaaatcaaaaaaa

SEQ ID NO: 320833 - DNA, 1355 bp, Cannabis indica
tgtaataaaatctctaacagaaaagataaaaacacacaaggtttctatacgtggaatcaacaatccttacagattgttactagtccacgggaccacgcctagagataagattcattagataggtctcacaaatacaaagtaattaacttatacatagatagactccttcttttgtatgccacaagcttcatgtattccaccttctcaaacgaatcttgcgggaacttcaagtgcttgaatttccttcaacctccttgaagagtgctttcttccttcgaggcaacacttgaaaagttatctcccgaaagcttgaagaatcttctcctgaatgtagcattgttcttcttcttctttcgtagacttgattacacactcaagacaatacaaaatacataaacacagagaaagagaaaaacacccactcctctacacaacaaagacactcttctctaataatatgaatgattttcaaagttaataaaggagatactaaatctagttactaaaatgtgtatttattatcaatatacacattttggacatctcatatacggtctagataagaccacagttctgttaccaattaaaatttcatgttttataattaccaatttattagttcatttaattaattacagaataataatatttgtacttaaatagtaactatgtaactgtagaatagaataaaaaataaacattattgaaaagataaaagcacacaagatttttatacgtggtatcaacaatccttgcagattattactagtccatagggccacaaccagagataagattcattagataggtctcacaaatacaaaataattgacttacgcataaatatactccatctaactgtatgctacaagcttgatgtattcgaacttctcaaatgaatcttgctgaaacttcaagtgcttaaaatcctttggacctccttaaagagtgcttgcttcctctcgaggcaagacttgaaaagctatctcccaaaagcttgaagaaccttctcctaaaggtagcaccattcttcttcttcttcttcttttctagacttaattacaaactcaagacaatacaaaatacatacacaaaggaagagacaaatatctctctacacaacaaagacactctttttctaataatatcaatgattttcaaagtgaataaaagagttactaaaactagctactaaaatgtgtatttattatcaatatacacattttagacatctcatacacagtctggacaagatcacaactcacaagaaacttacttaaaagagattttcaatcaactcaaaaatctttgtacctatagaacgtgatcagtaggtgttgttggaaattatttta

SEQ ID NO: 320834 - DNA, 811 bp, Cannabis indica
ttttggttattaacctcggcctaaattagtacagagaagagtatggagaccctctcttttgtcttgaaggctggtaacatcccgagacaaagaagcaacatcatcctcgagctgctcggttgatggcatctcctggaattcccttgttagctcgacaactttggtctcagccgctagaagttttttattgacttctcctagttccgtctgcacagtatcaagttgagttcgcgcatttgcagcttcctttcttgccaagattcttgacagcagccgatttagctcgggaataggcatacaccatcttcaaaccagtctgtgcagaaaaaatgcattaaaatttgaactacacaaagaggcataaaagaaaaatgccagaaaagacttacccgcaaaagctctttcaagactcctcccatgaccagctccaaagacaagtcattatccgcctcaaacaactgttcgtttacctctgggaccgaccggctcacatagtgattgagcacgtctctgcctcttttggtctccatgttcaatattaaaggtggggtaggagccttaacttgttcagactcacttcttatcagctcgggtccaccttttgcatcctcagatccatccgaactccctcctggggaacttttggacttcatgactttcagggcaggagggtccacaatagtttgttctttagagaggtcaatgagcacttcagttggttctttctctttggacggagtttcaccgcctttggacttcttggatggaggggataagcttgagcttccccctactctcttcttcaaagcct

SEQ ID NO: 320835 - DNA, 678 bp, Cannabis indica
tcaattcaaaactcaacacactcaaaacaggtctaaaaacacagccccctaaccacgttaattctacagccactcccaagtccctaacccaaaatcaaacttgaaacttgaaaattctcaatctcaaaagtaaggaacttacctccaatgctcctaggttgaacttgggtacaaactctgctcaaattcaaggtgaaaggtgaagaatttccccctaagtttggctggttcaacctgctcgagaaagagagggagagggagatgaagccttttttgatttcttaatttctaacctaaacctattattctaaaaaaaagtttcagcatttacctaatattagcaaataaaacccagcctaatttacactaaaggaaaaaataaatttacataagaaaagaccatattgcccttctctaataaacttaaaccgttaaaaaaaatctagggacatttaagtaattctagttaatccgccaaaccgacaacccaaatctctaaactagtccggtataaaaatccaattcaattcatcttttatcatcgtgacatttctaaccaccccgtcaagttccacagttgtcaggtccaaaaaaaatttattcgaattatggtatctacgatacccatatattccaacataatttttataattaataaattatgctttattattcatt

SEQ ID NO: 320836 - DNA, 1259 bp, Cannabis indica
atatatttataaatcaactaaaaaaaatcatctcattaagcttgattatttaacttataaattaactatatacacactaaaatcatatagctagagattaataagaatggtgagctatattaatatgaaaatattttacctcttctaatttttgtgaacactcccaccaaaatttaattgcattcatatgaaaatatatacttcttaaattttacttttattataaattataaaattcaaattttagtgcgtgtagagatcacttagatcttgaaattattaatatttctcttaaaaaaaaacatttcatatatacttaattatttcatatttatatctcaaaaaaaaaaacttatttcatatttattataatatttaaactagagttcatatattttaattgtgtttttaattacgtacgtgcaatataaatagttgttaatatatttattataaactgcaataataataaaataaattctataaaaattgaaaagataaaattataaatatttttagaatatacaactaaatgtcatcattataattttaattatttagactctttttttttgggtaaatgaaatgaattttattttttttaaattgaattttaatttattttcgactttaatacaaaacaaaaatatgtgaaaatttaaagttcgaggcttaattaagtacaaagaaggtataagtttgagacatttgtcacaaaattgaatgaaaaagaattgaaaggattaatatgatgataaccagatttgcaatttaaataatgcataataataataataaatagaaattggtgacaaaattaaataccaaattaattaaagtgatgagttaagttggagttataataatatttatataatgatgaggaaagaaatgtcaactgcactcatgtgcatttcatatgttcgtcaaattttgtatctgaaacaaaccaacattacactttcgccaacaaaagtactaatgataaaactatataaatatatatatagttatttatatataatagattcattaatttttcaaattaatcaatgcatatatgacatatagttaaaaggtgagaaacagagtaaaataaggcagaggaataacagagcaagaaataacagtagtatgcgatatagtatattgtatttgatttcttagtgaataattacatgaataatgggagtatatataatacagtaaaaggaatattttccttaacaagaaaatattctcttgatcaatgattggct

SEQ ID NO: 320837 - DNA, 3355 bp, Cannabis indica
acccaaacctcaaggctgaatgaattctatacccatccggggtgacaagaatgattcctgcccccgagccatgctcgttggacgacccatcaacaaaaaaatgccatacacactccgatagttctcttgcactatttttctctagcaactgagtacattcagcgatgaagtcaactagtgcttgtgcctttatggtcattctaggatggtacgtgatctcaaattgacccaactcggcagcccatttatggagtagacctgaggctgccggtttcattaatacttgtcgtaagggctgattagttaggacatggatgagatgtgcttggaagtaaggtcgtagcttccttgacgaatggactaggcaaaaggccagcttctccatggtgggataatgtggctctactcccacaaaccgtttcttgatgtagtacgctggcttttgaatcttctcctcttcacacaccaatgcagcctcaatgcatgctccgttacaaccaactatatgtacaacacctcccccatgatttgtttggacaagatagggggttcagtcaggtgtttcttcaatgattgaaatgcttgttcacactcttctgtccattcaatcctatttcttcctcacaataagttgaagaatggtaaacatatatcaatggatttggacacgaaccgattgagttcagctatgcatcctgtcaggctttggacatccttcttttttttttggggaaagacatgtcaattagtgcctttaccttcacggggtttgcctcaatagctcttgtgttaacgataaagatgaggaacttgcctgatgataccacaaaagagcacttgcgtgggttcaatttcatgttgtatcttttcaatatagagaaacactcttccaagtcatcaacgtggttctttgaaagtttggacttcattagcatatcctccacatacacttccatgttgccaccaatttgatccacgaaaattttattaacaagtcactagtaggtagcaccggcattctttaaccctaagggcctcacattgtaacaatatagccccatgtttgtaatgaagcttgtgtgctcctggtccgccacattcatgggtatttggttatatctagaatacgcatccatgaaagacataagttcatgaatagcggtaacatctactggtggatcaatgcgaggaagtgagaagaaatccttgggacatgccttgtttaagttagtgaaatagatttatgtccgccacttcccgtttggttttggcaccaacatggggtttgcaacccatacggagtagaaagcttcacaaataaaattaatggctaaaagcttgcttacttcctctttcaaggccgcaactctaacctcatcaagtaatctccttttttttcatttggcgggcacgtccttgtttaggttcagaacgtgggtgattacattttgacttatacctaccatatcggaatgtacacaagaaaatacttcttggttgtcacggcggaactgaataacagccttcttaatctccttatttaagtgcttcccaactttcgtggttttggtctgttcatttaggttaagagcaatttctttaagttcctcaatggaacccaggttaacacagtcatctcccacgctagggtctatctcttcaatattagaaatttctcttgcttccctatttccacttcattatcattatttacgaccaacatctgggcccctggtcgggtttgtcccctcattgccacattgtagcattcacgtgcagctagttaatctcctttgactattccattcctggtagcagttggaaactttaaggccagatacttgattgatgtgactgcccccagcgtgtacaatgtcggtctacctaaaatggcattgtaggcagatggcaggtctaccacaacaaactctttcattcgggtgactgtttttggggtcgcctcgagtgtcaacgggagagtgattcttcttgtgctggctacgctatctccagtaaatccaacaaaattggtagtacatggttgtaggtcttgcacacttaaccccattttctaaaaggttatcttatataacaagttcacgctactaccgttatcgaccaagactctccttaccctcctgttggcgatttgagatattatcaccagtggatcattatgcggactttgtacatgatgagaatcctcattacaaaatgttatggtttggtcttccatttggcttcgcttgggagcacgttgttctagtgtgaaaggattcttatctgagttcttgagctcattagtatatctcttttgagccctattagtggtccttgcaaagtgtggtcctcctcatatgaccaacacgtcctctccttccataagtggaggaatgtccgggttatgtcccggttgtcccctttgtggttgtgttggtgggttaggagcatagtttctgggtgccatgtgttgttgcacattggcatgtggggctgtaggttgttgagcattcaccctttgtttgttgtattgcctattccttgcatagttagcaagagggcgattacgtataagagtctctatcacatccctcaagtctcaacacttgttggtggtatagccaatgtctttatggtattgtaattacttggatggatccttcttcgcacgacttgctggttctggtatccgaaaggccacccgatgtttgtttgccacatatatggtttcttgtgtctccacaagtttggagtatattgtgaacatgggttggtaacctttactctttttgtgatctcctccattgtcgccctttctcttattattgtgcccagagttattggtggatggagggtgggcagttgttgcctttggattgatggaagttgttgttgtagtagctgaagcaggttgtgttgagggaagaggtaggttattggctaacctggcctcttcaatgtttatataattttgggcccttttcataaattcgtcaatagtgggggcacctctcccttggaggctatcccgtagtaaatatccatgagttacgcctgccccaaggccatgagtctcctaatgtcataaacattcttcaccttggccgcctcgatgttgaacctatttatataggcctttagactctcaccgagttgctgttttaggttggccaaggaagagcattgtgattttcaagacatggtggcacgaaattcttttttaaaatcactagacaattttcccaagaggtgattgaatgcttcttgaatttaatgaaccatgtttttgatgctcatgtcaaggtcaccgggaataacatgcacttcagatggccacttacttggcttgtcctca

SEQ ID NO: 320838 - DNA, 1420 bp, Cannabis indica
ggagaacacacaggtgcagaccacgactgtgaggaactcctttcagctgctagagaatattgctgaaagttcagaacaggtcgaagaagagaacaacacaagagaggggagtaccctctctttccaatggagaagttcctttgttggaatgtccaaggagctaacaatcaacataaacagcatttaataaagcaatttatctatgctcaacatgttgattttgtggtcttctcgagactagagtaaaggccccaaaacttgtgaccttgtattcaaatgtgtttgagggttggtgtttctcttcaaatatagcgtggcatgctggggggaaaaatagtaattgcttggaatccattaaggtttactattgatatcactaagtgcactagccaactaatgcatttaaaggtttcaacagtagatggatttgatagcttcctaagagtaatatatgcatccaataacagaattgaaaggaaggtattatagaaggatttatgtgaactagctactgttgaaaactggtttctcatgggtgatttcaatgatattcttgctaaagaagaaagaatacagagttaaatcttatcctgattcagacttcttgcaatgtgttacatggtgtaatttggaagatgtgaaagctaggggcaactttttcacatggactaataagcagcctggggatgatagaatctactccaaaattgacagaatacttgctaatcaggcttggatcaataaatttgagtttgctgaagcggtgttcctcaatgagggtctatttgaccattctccgggtatcctcactctacatcctggtggaagtcacatcctatgttcgagactaatttgaaggagatgtggaatacaaggataaaagggtccaagatgtatcaggtggtgtccaagatgaggcttttcaaggctaagctcaaagagataaatagagatggtttttcagatttacagagttcggttaggaaggctaaggttgaccttgaagcaatacaagatcaattacagcagcagccgttgtctattgagttacatagcaaagaaaaagtagctagagaaatgctaattaaagtgcaaaaagattactcatcttttctacaacaaaaagccaaactagcttggctagagaatggagataccaattctgctttgtttcatgcttgtataaagcagagaataaggcagaatcgtattctatccattgaaacaaatgagggggaaagagtgcacgaccctgccaagatcacagaagcttttttgagcttttatagagagttacttggttctaaaatggaaaatagaagaaaggttgagagaagaatcgtggcaaaaggtccggtggtgtcaactgagcaagctcaaatcttactacatagtttttcgaaagaggaggtgaagaaag

SEQ ID NO: 320839 - DNA, 1151 bp, Cannabis indica
tggcaaaaatctgcatttaataatttgtatgtaccttcaccatgcaagtagcacaagttcctctccctacataaaccgttgggattaacttttttttttttttgaaaaaaattcatctagtatttctcacggttatccaccgtcactaataactatcccaacggtttttttctaacggtactaaactgatgggaaaagcaaccatttacctttgccaatagttttcataattgacccccttattaaccgttgggaatagcccaatttgtagtagtgagtgcttcgagaagtatcaaaagaaacaacagtagctgaactttggctcaagctggaacatctttacatggtaaaatccttggtcaatagattattcttgaaacagaaactttattcttttaaaatgacagttaggaaaaatgttgaagatcatttggatgatttcaacaagatcattcttgatctagagaacataaagatcaagattaaagatgaggaccaagcaatcattgctctaaactctttgcccactgaaagttatgaacattttgtggacaccatgatgtacggcaaggattccttgacattaaaaaaagtgtaaaatacactaatgtctaaggagatcaagaagagatcaaagcttaaagatgacatctcaggtgaaggattggtggttcgaggaaaagccttcaagaaggaaacaatgagaagcaagactcgaataaggaaaagacaaattcaaaggccaagaggagatgttacatatgtaaccaaactacccatctgaggagagactatctaattttcaagaacataccaaaataaaaatggcaatgcagacattgtgtctgattgtgtagatagtgatggtgagagtgctagggtccttggtgtttcaaaaggacaatctgatctaggatggatcctagactccagttgttcttttcatgtatgcccagaaagaagtcaattccatgactatcaagaaatcaaggcatgctctgtgaagcttggtgacaatagagcctgtgccatttttggaattggtacaatgaaattggtcttagatggaggattggagattaatttgaaacaggtaaggcatgtttttgagattaagagtgttgccctgaattcgcccaaaatgcgtggac

SEQ ID NO: 320840 - DNA, 1526 bp, Cannabis indica
tttaaagaggagtctggtctcgagtttccaggtgagagaaatctcactataacaatatcttaggtgcatatattataactcaaacaatatatatatagttgttaatatgttttttaaaaaaaaaatggaaaaatgaataatacaaatagtttatctaattcccctaaggagtattttatgtaatgtatttgcaatagtcaatcatttgatgggcgattatacactccttcataacaagttatttattgactatttccaaccatgtgagttgggcacttgggcctaactaacctaaccaaatagagtgaacaaaaatacaagtaatatctattatctagttattaaaaaagcaacaactatttctatgaggagatgaaggccttagtcttaccctacaaaatttgggtaagggaacatctatagggaccctctcaaaagaacagcattgatgatagtcttagttggagaccatgataaataaatcattgtcctaaagtgacctccatcacttcctcaaaatggggctatatggagttgataaattagggcacaatcccataaaataatagcaataacaataataaaaagaggattgttattggacactagtgatgcttagcactttctaaacattttaccttacaattgattaacgatattctctaaaaattatcatattaaattatatgagatccgatacttaattacactaatagcgatattaacacgtaggaaagtgctaagcaccatcagtgcctttaacatttctctaataaaaagcttcactacttctatttattttaaataataataataataataaataaataaataaaaaccctttcacatgccccatgacagtccttaaaatcatgcaactttctcctttaaaagtaagactttccttgatttttatggcagcatcttagggacaaatagataccaacaactcagcttgttgggggccccttttgctttggtggcacccgtgagaacaaaatcttaataattattactaccctagctactcattcttacacaaatcttctctttctactattttattctaacaaatttactgtaaagtttgtaaagtacttagtgactctacttatattactaatggtttagctccaatcccactattctaaggtttcaaaaagaccaacaattaggattttataagtgattcaatttttacactaattaaagttttgttttttgggtgcatgccttggttgggtaaactgtaaagtaaacccatcacttgaagaagaagaagaaagaaaaaaaagctttaaattaattactctttctttacttgcatgaggacaaccacaccactcattcttctatattttacaattgttaaagaagtaaacgttatattagcaaatgtataaaaataattattttttgtaaaagaaaaaacacaatgtcatccccatactcattgtaatcagtagattttatctttgtttgcatcatatacatacagtaaaacctctatttaagaatactctatt

SEQ ID NO: 320841 - DNA, 1295 bp, Cannabis indica
ttaatttatttggcttgagctttttgaacaagataaaatatacacgtaagaattttcatagtcctttctaaagggaataaaaaatgttagtcaaaacatacctaacaagttcgactagatctagcttattacgttcataatattaatcgacgatcactgttggtgttttcttcccgcgtacgtgacttttaacataactagctcttacgggaactcttctttatatccccacacactttctagatgggtacaaatagtcaacggtgactatcggttttattgaatttcgattataaagtcaacatttacttgtatctctttcatactaaaccatttaccagtatacttactctgaaataattacaacttactaccaataattcttataaatttatgtatttattatgtaatatattctgacttagcagaactgctacgtcgtgaaattagtataacaaatgttatatgaaagggtatagagactaattagtaattattaatattgtctagttagtataaatatgtaatactattacacaaatggggaaggaatgaaaagagaaaaaattaggattattcctattagagtttggcactgactcgaagagtgcaatttgatacaatcggtaagtgtatcatattgagagaatctcagagagagatttcagtgggagatcggcactatgactgatgaagagcttgttgaattcgttagatccatgatgagttctatgaaactacgtatggagcaacttttcaaggctcaattaaaggaattagatgccatatttgaacgctactgcccatcgagagaggcactattggattcctcacctcaacccgattctccagaggtcaataaccacattgatgcccctgttgaatcagtgagaagtgagatggatttggatgatcctgaggaagctttagacatcgctattgatatggatctcatccgagatggcagcaaagcacaaccaaagttgaatggcagttcgtcgaaggtagaggaaaagctctctgctgctcgaatggagattggggattcaagaatctcgatagctcttgatcgggcgatccgatcatcttgcgtgtacatagaagaaggtgatgctaaaggagtgtttgcgaatcgtaaaatggagctacgtgagattgtgtttggtgttaatggtgattcaccaacgcagctgaaagatcgaaggaggatctttgatcggggacgtcaatggatcttggatcgaagacgacgaacgaactttgacgaagatgaacggagcggaaaggtcactggc

SEQ ID NO: 320842 - DNA, 3602 bp, Cannabis indica
agatcaaaagacggttatcaatagttatttcattttatctacattttgtaaaaatgtggggattgtctacgtttcatgaatggttatcttattacgatcgaaaagaataattgtcatagtgaaaacccctataagaacctaaggggaaatagatctaccattttggaaaggaaaaccctatgagaattaaataaatactcataattattcctcaataatccatatacataaccaagaaatactcagatataataaagactcggagtatgtagattttaactaaaaagccacgtaaaaacatttagtgtttcatatatatatatttattaattataaaaaattaacttttatctacaaggcttcatttattgttaacaaaatttcgagttaacaatttagtgtttttacttaagagcctttgtaaagaaactcgaaacacatctcccctttatttcattacatcatgaaaaatactcaacgtgacgagtcagtcatgaaagaagagacaatacgtcgaccaggaaaagagcccagggggcacaaactcagaccaaccaaggaaggggtcctactgagaggaactccgagagaagtgaccctgatgaagaaattcctgagagaagggattcagattaatttgatcccacaagatacgtccccattgtggagttaaaagatcgacaactctgtcgaaggcttgtagaatccagtcaatgaaataaggagttggaacgggccatgggtacagccaaagtgactcaaaatgatgcactgctagtgcaagaagagcaacttgcacgatgccaacgaggaaggccccgtggttcatgaaccagaagggcacaaggacccaacattgaagaacaggagccaaataatcccattcagcccaagagcaacaaccaagggaaacaagggacgttcctgttgattgataaggtccccagaatcaggatgccacaactttgcggtaaacgcaagcaaggggacaatagacgtctcaaagaaataatgaaaatacaaacaatgaattgcctaaccggtctggttgtcctccacatccccctcaaggacatgggagagaagaaagaggcagtatgtatacatactcaaatagaggtagatttgctaacttatttgaatggcgaagacctacccaagaatcaccacaagaattagaggctaatacagccaagagtagatcaaggagtcaagagcaaattccttgactaaaggcatgtcataacacaagttcaatgatcataaagtaaatatgggatttagttaccccttatgtagtttttggtcgtataattaaaattatttaatgaaactctaatttctatattttttatattcacgtgcaccttaatttcatttgagaccagaataaacgtaatgtttagcgtttgttcacttaagtatattgtcaaataaagaacattgccatataatgaatatatcgtaatacaaagaagataatactcgacatataatgaggacctatcgctacgattcatatcgtaaaacgtatcatttctgtcataagagcagtaagatcgctagataagcaacatatggcgagatgataacaatagaagtcttctcgagtgtaacaaattgaaattatatcgcctgaaaagggtagacaataatatctttaagtacttgcaactcattgacccacatactcatgagtatgttgaaacattaacggaaataggaaaaacacaacttatttcaaaatttcaaaaggctaagtctaagaaccgccctagaaaggctatagcgagaataaatatcttaactaatatctcgtaaaatgcgaataactatctttgaacaccattgaaagatacgagccatacttggaatgtgttacctcgacaacacatgactacttgcagataagatcaaaagacggttattaacagttatttcattttatccacattttgtaaacatgaaacgtggggattgtcgacgtttcatgaacgattgtcttattaagatcaaaaagaataactgtcatagtaaaaatccctgtaagaacctaaggggaaagagatcgatcattttggaaaggaaaaccctatcagaattaaataaatactcatagttattcctctataatccatatacataaccaagaaatactcaaatataataatgactcgtggagtatgtagattttaactacaaagccacgtaaaaacttttagtgtttcatatatatatatttattaattataaaaaaaattaacttttaattacaaggcttcatttattgttacaaaaatccgaattaacagtttagtgttttcacttgagagcctttgtaaaaaaaactcaaaacatatctcccctttatttcatacatcatcgaaaatactcaatgtgacgagtcggtcatgaaagaagagacaacatgtcgaccaggaaaagagcccagggggcacaaactcagaccaaccaaggaaggggtcctattgagtggaactccgagagaagttaccctgagtaagaaattcatgagagaagggattcagatgcatatgatcccacaagatacgtccccattgtagagttagaagatcgacaactccgtcgatggcttgcagaatccaattaaagaaatgaggagttggaacaagccatggctacagccagagtgacgtaaaatgatgcactgctagtacaagaagagcaacttgcacaatgacagcgaggaaggccccgtggttcacgaaccaaaagggcacaaggcactaacatcgaagaacatgagccaaataatcccactcaccccaagagcaacaaccagtggtaacaagggacattcttgttgatggacgaggtccccagaattatggtgccacagcttcgcggtaaatgcaagtatgggaacaatagacgtctcaaagaaataatgaaaatacaaacaatgaaccacctaaccggtctgattgtcatccacatccaccacaaggacataagagagaagaaagatgcagtatgtatacatacttaaatagaggtagattcgctaacttatttgaaaggcaaagacctaccctagaatcaccacaagaattggaggctaatacagccaagagtagatcaaggagtcaagggcaaactccttgacgaaaagcatgtcgtaacaaaaattcaatgatcataaaggtaaatatgggatttagttaccccttatgtagtttttggttgcacaaataaaattatttaatgaaactctaatttctatatttttttatattcacgtgcaccttaatttcgtctgaaaaaatatcgtaagaagactaaaataaacataatgtttagggtttgttcgcttaagtatattgtcacataaagtacatttctatataatgaatatatcgtaatgcaaagaagataatactcgacatataataaggacctatcgttatgatttatatgtttattatgtaatgaagaacgttgagtttaaaatataaatctcaatgcagaacaagtgagagaatattagaatattttttattttaagaataaaatcattgaactaatttaagataaatgaatattttatgttcattgaatct

SEQ ID NO: 320843 - DNA, 1083 bp, Cannabis indica
gatcttcatagggatgaacccccaccattcgatttgaaggtgacatattttccatatagtagcatggcgtgggagacaatctcagacatcgtacataaaaaggcgcggtcagcaggcccgtagccttggcacgcgcgaactgaacttatgcgggccaacaacataccctagactgatgccttctggtgaacagtccattttcctcgcgggagcagagggttccatcttccagaatggagagagtctctagctgacggacatctctctcgtgccctgcatttaggaagacttctctcgcagagatcagttctgcgaggttagcgcttctatcctcccggagtgcgaagcgaggcccttgggtggcttaatgaatccttgaccttttttgattactattcacgtgtcacgctcgcgaaaatgcgaataacactttcaaatcaaataattgaaaagtctcatacccatattaataaaactttgttgtagagccacactattacacataatgcctctttgctcacaattaccaaaagtctcgtacccataaaaataaatcaatttttgtgcgagcattctttagtctttattttttttactataatatttgaagctattaattttttttaattgagtaaaaattaaaaatttagtaaaatagttacttatattttaaaaaaattatattaaaatatcaaatataattttatgatttaattattattaaacaaaataccacagtttcttttctagttgaaacatattatcctaggaaaacaagaaacatattattaagttaaaataataaagaaagtagaattttaaaaaaaaaacaaaataataataataataaaataattttatttgcaccatataaaataataattacaccttattattaaaaaaaataaacttaaacaactttttaaaaattacacttaatatttttttaaaaattttttcttcaaattattttatgtcactttcaatacttattttgattttattttcataattttttttctaaatcatgtatatatatttttttttctaagaaaatttgatatacttttttatttttatttt

SEQ ID NO: 320844 - DNA, 1846 bp, Cannabis indica
tcattttgtaacacaatcctagaatttagtgagggaaacagggagagtttaaagagaaaagaagagagacaaggagggatgttaacagggtcgatcctaaaattttaggcctttatttagaaaaaaaaatgtgatattattcaacatcaataagaaaaatataatttaaaagaaaaaaaaaattgggcctctggactaggtaggccctaggcacaagtctagtgcacctatatgcttaggactagcctagatgttaatgacatggtgtgcgcctgattaacattgttacaactgagttcatattgtaaagaaactttgcttttcgagtgtcttgtacaacacactctgtactgtgttctctctaattctttcaactcaaataaagatctcaagtccttgtagttgtttttgatggaagagtaaataagagtgattcatcatctcttattcgaacctcgtaattgttttgtttattattatttttattattttttatttttaattggtcatttaacttgtttacttgtttatgttttgatttctttgttgagttttgttctttaatagttgtgtttcacaagtacatatgtatttttaattaattagacttattattttgaattattagaattgaataatattgagttctatctaaaaaccaaaactaacataatgtaaatgtaagtaatcatattctcattaatcaatatatcaaaatttatattctctataatatacgatattgctgtgaattcacgtaaattatagattaattaattaacttatttgtatatatttacacatagaattttgaagtttatatttatttaccgtaagtgtgaaaaattattcaagacacaatttttttcttttcttcttatgttaatattataatattttttaacatttatgtatttttaatcaaagaaattaataatctgtcttcgtttgtttatgaatatatcaaaatgaagcagaaagttacaataaaataattaaattaattaattattttattaagcttacattggggacaagaagaagataagtgcaatgatgtttcctgcaaattaatataaacatataaacttaattaatattaataatcagcttaattaactataaattattactaattaaaaccaaattaagtgtaaaagtagtagagtttatattatatatatatatataaatatttattatataacatgcaaaatatatattaatagatgaattaatattaagttataccaacctaatataccaacaaaagttcgagcagcatcagcagaaaccattattgaaatttgaaagattattaagaatactcagaaaaattattaggtgattaatatgtaagagcaacttattaagagcccaaaatattgaattagggttttatattgattatagtacttgatgtatatataaatggaaattatgtagtgtaatttaagaatgtagaaagtggaaaaagaataataatatatatgaaagtagttccacttaattagtattgggcctcccatattagagagaacaaatgcccaaaaatataagattaatttgacttaaagactagtatctatatggaaaaaacttgactatattgattagctatgtcaatatcatcatcatgattgagtattattctaatttcttttaatttattaggatataaaaaagaagcaaccactactagtctagctagaaagaaaaagaagaagaaagaagaagaagaagaagaagaagaagaagaagaagaagaagaagatcttaattcacataaaatttggttacgtacgctatatatattcttaatttggaatgcatgcatataattatt

SEQ ID NO: 320845 - DNA, 1669 bp, Cannabis indica
tttctctggattggcttcgatacttggagcattaataattaaaccaagaaacttacccgagcagactcgaaaggagcactttaagggattgagtttcatgttgtattttttgaggattttgaagcattcatccaggtcctttatacgcccccaaccttcttggatttgacaagcatgtcatccacgtatacctccatatttcatcttatctagtctttaaacattttattcactagcctctggtaggtagctccaacattctttagaccaaacgacatgactttataacagtacagacccatatctgttcggaaacttttatgttctttttctggtggatgcattctgattttttataccccaaataggcatcaatgaagcttaagatctcgtgcccacctattgcttccatgagctgatctattcttggaagtggaaaacagcccttggggcacaccttgttgagattggtaaaatcaatacataccattttttattgggcttgggtaccagttcggtgttaactacccaagctaggtataaagcttcaatgatgaacttgtcgtcacatagtctctttacctcttctttcaatgcttgtgccagttccttgtcgaaagtcttcttttttgttgaacagcacaaaaatttgggtcaatgtttagggcgtgagatattatagaaggatcaatactgaccatatcctcgtgtgaccaggaaaaaatgtctaggtttgctcttagaaatttaattaaagctaatttttttcaagcaacaaacctttgtcgattttgagtttcctagtcgagatatttgggtcgatttctacttcttccagttcttccacccaccttacatttgtatttggtcacccaagtcggggatccatctcttcgtccccgccttgggcgactccctattggacaatactttttcccttgtctaaactctggccggaggtatttccctttttgaccttatttaggggaaggttatagcattcccatgctattctttgattcactttgtggcaccctaacccattctttgatgggaacttgaggcacaaatgaaaaactgatgtgacagcttttaagtcatatagggtcgatcggcctaacatgacattggatattgacaggacattaataatcaagaattgtgccatcagagttgtgctcctcggagcttatccaacaatgaggggtagacaaattttccctagaggtgcaacgctctggctagagaagctatatacaagttgggtacaggggattaaatctttaagttggagtcttaacttctcatatgttgtcttaaacaggatgtttgaggaggctccattgtctatcatagttcgggcaactgtcttgtttgctatctatacttccacaaccaggggctcattgtacgggaagtagacattaatagcatctgcttcagtaaaagttatagtgcgttcccctacccgtggtatttttggctttctctcctcaacggtgagaactgtttctttttgttcgtgttgtaaggctcgggcatacttttcccgagctttccccaagtctccaactcgatgtgggcccccaataataacttgtaaatgcccatccaatggtggaggcattaataaattctgattatcatcggtttgagcgaccctttgatt

SEQ ID NO: 320846 - DNA, 695 bp, Cannabis indica
acgagattaattttggagatgtttcccctacctaggtgcccagcgcatgccccgaggccactatgggtgcccaggttgacgtatctaaacctaggacactttagaactcttgtttttgtccacgaggaagaaagatgtgcttttgggaagcaaatgaagccatctgagccccagatgaaaagacgagcgcccagggtgacaacaccccagtcactaggtgcccaggttgacgtggcctcacttctggtggttccatccatccgactgttattccgcctcgggcattcttcttagtttgctccaaaaataaaatatgagatttgaaatcaagagaaaatattgttcgagtagtgagttagggcccaagcatcaccaggcggcagtgtgcaagcacgatggcgcacattggcgctcaggttgacattggcctgaggctcggtgttatgtccttcaaataatagtttcgctccagaaattggtcttattttgtccccaaaataatttatggatgttttcgcaactcaatatcatatgtgcatgtgtcatgcgtaagtccaccgacatccatgtgcactagtgatcacccaggtgtcacctagtcgtcactagtgattcaccgggcatcactcgtgcatatcaagtaaaattgctaagagaacttccccaaggccaaagaatgaactaaggatagctat

SEQ ID NO: 320847 - DNA, 899 bp, Cannabis indica
acagtgaggtagtcgatgtactcgaaagcgatccaagtgtcacctcctttaaagtttttgtcaaccggtggtgcctgcaatatcccttgaagattaaactcaatgggagctttacagggtccttgtagagacgcgttacttaatttgaatatccccttaggcaccaccactttacttggactactagaagaacatgcatctctccaacctttcagcaaagactataaataacagagataatatatactatcatacgtacaaaaactacgagttaataatacttaacataatgattaacagctctattacctgagttatatcatcgttaggcaatatcgttccattgtttgtcacatcaaataggctgtaatattgttgagagtttgcaatattagatgacaccaccaataggaatgtagccattataccaattatgttgatgatgatcggcttcttgatacccatattgtttttttttatgcttgctccttacctttacgaaacttcctctctttatatatacaataggtatctttcctaatttttacaatgcatctatatatttgattccaacggtcacattaattacttgctttaattaactattatatattaatgtaagaaatcgatttacagtggcttaaacgagacgagaccttttaataggagaaatgataaaagttttataaaataatataaaatagattagaagaaagaagaagaagagaaaaagaaagtgaatgagaatttctcagttgtttattccaaaggggtgaatccctatttatataaatacaagagtcaaatattaagaaactaagaaaaagagaaattaagaaaagaggtatgttgattacaattaatggtaataaataaaagatttggacatccacataatt

SEQ ID NO: 320848 - DNA, 1050 bp, Cannabis indica
ctataaatacatattgtctcatcacaattgtatacttttattaaccagataaataaatttgtttatgatttagagatttaaagaggaagacttagttgatagtattgtactattaaattgcgatatttttaatggatcaatcaggtatgaatacataattattatcaattattattgtactctatattatatacaaatttgtatcctagttcatttgattttctaacagttttgctttagatatgattttagattattagttatagactttctcttgttagagattttggggtttgtatccttatttttttttaccttccatcgagggacgaatgtacagaagagttatgaggggccttcgcccccactgatttttttcttcaatttttgtggttataattttgtagttttttgtattcttctttacaaatttatttaatgactctctttaaattttatttctacattttggccctcatattccctccctaccttccgttcctatttccatttatagtggtatggtactttaaaatgactgtgattacgattggacatgtgtacctcattttgttagtctattggctttgttgtcgtttgcttatccttgtcgagattgatttgcttttgcttatcgatgaactttgtaataattttattctttaattttttgttgaatgaaagtttagatctttttctaaaaaaattatatttgtttactaaaatagataatataaataatccacttaatgtatttatttattaatttattttttttacttattttttaaatttaaactaattaattaataaaatgtaactgtcacggcaatagactagtaattttttagacagaagatacaaaagtctacaattattaggggcacatttgtttttctaaaaaggaagggttgtattttgtttaagggtaaatatcattatctaacttatgttttgtaaaaattactgattgaactttttattttgtaagataagaaattagaccttatatttttttaaaataattttaaatagtattatgaactgatt

SEQ ID NO: 320849 - DNA, 508 bp, Cannabis indica
attattatcttcatcattttttgtcccattaacacccttaactttttcaaaacagctttgataagacttttattgtttaatttttaaatcattaaggtgaaagtaaaatttttatctttgttttttaatttaaaaaacaaaagacaaaattgtgttttgtaaatttcatttttattttttgttttatttaagtgatgaataagaaactaatgttagaaaaagtaggtttgggtccaatgggttgggagcggggctcgggtctgggctcggggtttgactggggcagggtccaaattcagggttctagttgaggtcctggtcagggtccggagtcgggtatggggtctagggttgggtacagggtcttaatctgggttcggggttgaaacttgagtcggggtcaagtttggagttcgagtccaagtccaggatcgggtccaaaattgggatcgagatctaaaatattgatcaaagacaatacaaatagactataattaagaaaaaaaaa

SEQ ID NO: 320850 - DNA, 968 bp, Cannabis indica
aatctctcataagtaagatgatatgaaatagccataaatatcatttttctaacttattatttgtaaacaattaaatatttcacaaaataaccaatttatgactttgaacatattatggttatgataaaaatatgtaggttaatttcaaatttattattatttaatttgtcatataagataattttaatataatatttcaaattaaaaggataatactgttttttaatttaaaatataccaaatattaaaatatctaaccttataattaaataatctgtaaagttaaacaaattaacaaatttttaaaatctaacctaaaatataaaataactaagttttaaatttaaacttaaaaatatcaaaaattaataataatctattaaaattaaatattattaatttgaaaatttgatatttagttttagatattaaaaaaataatattttatttatatatttagcttttgaaattcaaaaaatttgaaatttagtgaaaaatcaccaaaaacttagacttttggtgcaaattccagcagcctgggatgcacgcacttagtgtcggatgtagggtgccttggctaagatttctcggcgcccggagggtttggtgggcgtgatttgcagccaatagtgtctaaagctaggcgtgaccgagctttcagaaaaaaatagtccccttcctgcgcgcattgggtgtcctgtccgaggcacctggtgcgtgcgagcaccatgctcgacactttatcacccaaaattcaatctttcatatcttttttaatttttataaaatataagttctgtaaaaaccaacacgacatgtagaatctctagatcgaactctccaagtttcactatctctacatgtacaattatctccaatctctaaactcactattgttcagctttggccttttctttacctactcatgaaagtgaatctgtgagtcaactgtaacgccctaatgctaa

SEQ ID NO: 320851 - DNA, 1732 bp, Cannabis indica
cacatatacatatatattctatgttagtcttacttcatttccatgttcaagtgtgccggttgacctaaatagaaattatgcgctgaacggaggccctatgtcacaatcacataaagcgggcaaacaactttctaagacctttctagggtcctaaattcaaaactaaaagttttcctatcgataaatagcacaaccatgccctaaatatcgaggaaatatgagaaaaatgactaaacgggaaaactgcttgaaaagtagcaggtcgtttctgtagaaacggactgccatttttcactgcagaatcaaagagtctccaaatcggctcaaaacaaccctaaactctatactaagcttcagatcacctaataacatcataaagaaccattccaagcaacataacctcaaaatacacaacaattcattgttgaaccaagtttgagttcttgaattcaaacatactcaactcaacaatcagccaccaaaacaatctaaaactagcttcaaataacctcacttaactcctaaacaaaccaagataaaacccaacttggacagaactaaaattaccatttatgcatgctcaaaattaaagaaaagttatcaaagcttaaggaagtaggttctagggtttttaccttaaattcaagcttctaattctctcaattccttgctgaaaatcactggaattaggtgcagggtggttggtctccttggttcttctaaggccgaaggaggaagagaagagagagaatgaaataatttttgtttttctcttcatttcctttttattttttttcttaatgattcatatcatacaatcagcataaaacaaaacttgggagtttctactaactccactacaagaaaaaaatctcaataaatagcaaattctaattttgccccttgcttcacccttaagcaatttataggtattggggtaaaatggtccaaaaccataatcccacctaatcttgatgtttcaaatatcaacatatgagtacccccactaaaataaagcttctaagctaacccatgtgactaaatcggttgttcatcgcattttctatcgttaccgagcaaaaatcataaaaattataaatttcatatatgacataaataatacacttagagtttaataaaatctccgaaattaagaaattataactctaatgtccattttctaaaaatggggcccacaactataaatatactcacataatcataaaattacaagtaattagtgctaattgccctactaatccataatctaatcatatgtgttggaacttattttatcaagatctagatttacttacaagtatgttggattatattctataatttaacatcctaaacatgaatttcctaaaataataaaataaacacatataaagtttataagaccttacattggtggcaatgaaatattatggctcattccgttcagatctctaacccttgttcctttctatcgtagagtaataacaagatctgaacttggatctccttcattcacaatcttctacactatgattgagtactgacttaatatgagtgggcatgtactcttcactagaggtttaaaattgatgaagaggaagaagaaggaatttttgaaattctatagaaggaggctcttaattttgttgtctgacagactagtctgatgtaggttactaggttatgagaatgagagtcatcttattcctcttatagtatttcatctagggtt

SEQ ID NO: 320852 - DNA, 3583 bp, Cannabis indica
ctaatccatttcttaattccgggtattacagattcaatgagagaactgttaggagagggtaggatctgattagagatcctctctaaggaagacttatcgacaaatcgtgtagggtctactggtaaacagtccaaccaagttctttgggaatgagatggacttcccctactcaaagacgaacaaatcctgccaaatagatttagtggcgggaatagccagactccggcacctgatggcatggggggccggccaggtatcgtctggctcattaacgaaccccactgggccaacctttggccggcctacagagcaaaattcctctccaaaaaatttgggagcaagtcgttctaaggcctatctttaactggataggtctgggaatgggtggaaacacccaagacaacattaactcaatgagttaaaatcaaagtgattttgttccaccattgaacaatcacttcagacagttggatccaccaaacccaagaaatcagtgtgatcaaccccctgtcaacacacaggtcgtaccgaccaatcaaggaagagaaaacggccagacactgccaagcatagaggtggccgaccatgagaaatttcccaaggtagggctggctggccatggctagctgcctaacctagggttggccggttaaagccagatctctaacctggggctaaccgagcatggacataccctctcccagggtgtggatggccagagtttggccaacctagggctctagcccaactaagaagggccactcaaccaggttctacttcatcagatccttctatgcaagcacagttggaacaaataagagacatgatcaagggcttagccggcccaaaaccatcaaacctttaactagataggtcaaggggctctccatgcattctcgatatacattaatgccttctccttgcttaagttcaagatgccggtatgaaagatgtataccagaatagaagatccctccgcacacatcaagtactgggagatgcagatggatctccaaaaagtcacgggtgatgtgcggtgccggatcttttaggcgactttgtcagaaacagcccaacaatggtactttaagctagctccaggaagattcaattcttggaatgaattttcctaagaattctacacacaattctcgtcctcaaggtagataccatcacagttggaagaccttgtcaaggtgaaacaaagataaggagaacctttaaaggattatattcaaaggtttatgaccgagaccaccaaggtcaaaggcctaaccgagaaaggctgctatatggccatactgggggcatccttcaattgaataacttttagaaagatatcttgaggatctcaaccaacaacatgaaagagttcctcaaacgagcagacaacttcataaaactggaggaagtcgtcaaacaagcccaaacaggagggcaagtcagtaacaggcagtctcaaggtgttgtatagccctaagatttgccaaacatgcataccagtacaagcagtgccagccagccctctagtagcaagaatgctgaaggtaagcacaacaacaatagttatggccagatgagtggccaaaaaggaagtacaacacttcccctacaccacgaaaccaaaaggagaaagaggagaagtacaagtgcttcaccctcctaactgagaaacttgagtccatttacatggccactacggctactttgccatataagaagcctcctcctatcaaaaaggagatgaccaagaggaacatgtcaaagttctacttatttcactgattttggccacgacaccaagaagtgttaaaatcttaagagggagattgaattcctcataaggaaaaacaatcccaacttgtgttgttacgtgcagaacggccaagctcaggcaccagcttcccataatggagaccctatgccaccagcaatggcgggtcacttggggatcataattggcagagcccatattgctagggagacaagcaaggctagggcgcgctatgctcggactctccgtcacgagcctaaaagcaacatcctagtcatcaaagaaagaggcactaagcagctcaagcttagagagttagccatcttctttatagagggagatgttacccaggtcaactttccacacaatgatcccctagtcattacagcacagattaagaacatgacagtttccaggtgcatggtggataacggagcctcctctaacattctttttagatcaacctatgtaaagatgggctctaactaatagacctagcaccttgcacccaagtaatgtacgacttctttggccaaggcattgcacgcatgggatacatcaagctgcccttgacaatcggagagaaccccacaacaagaacattgatggcacaatttgtagtaatcgacgtgccatcgaccttcaatgcgatgatacgtcaacaagccctatacgacctaaaggcggtaacatctatctaccacctatgcctaaagttcccaacaaggcatgggataggatgtgttaagggagaccaacagtgtgcccaacactactacaacctggctttgtctaaagccaaaaaagagagaaaacgcccgctaagagctctcacaaagagtccgacaaagggcaattaagtccagcccaaagcagggaagcagacatagatcctcgctttggggatcttgcaaacagctttggacctgaggaagaactgaaagaattggatgttgatcccactcttcctactaaaaattaaagattgggaaaggtttagccaaaaataaaatcagttttgataaaatttctaagggcaaaccttaacctcttttcatggtcacatggagacatggtggggaaagacccttctgtgatgacccatgcactaaacatagatccaaacttccaacctgtacaacaaaaaaggaggttgttggataatgagcgtgcccaagctttgaaagatgaagtcacgaggttgagcgccaaggacttcatcactgaaccattctatccactttaggtatccaatcccgtgttggtacctaaaccgaacaacaagtggagggtgtacatagatttcaccggccttaataaagcatgtccaaatgactacttcctgcttcctaggatggaccacctagtagatgctacagctagtcaagagatcctaagctttatgaatgcttattcaggttacaaccaaatcaagatacacccattgaatcaagaacacacaagtttcatgatagatttaggtatgtactactataaggtcatgctctttgggctaaaaaatgcagggggcacctatcagagattcgtgattaaaatgttcaaggatctcattaggcacaacatggaggtgtacgtggataacatgttggtcaagtccaaaaaggctggggtcatgtggaggattagatgaatgctttaagctcctccgagagtacatcatgaagctcaatcctctcaagtgttcgttcggagtaggctcgggaaaattccttgacttcatagtcaatgctaggggaataaaagcaaacctagacaagatccaagcccttttggaaatgaagtcaccca

SEQ ID NO: 320853 - DNA, 1989 bp, Cannabis indica
ttagtgtacaataatgattattccaatttttttaatttttacctaaattaaaataaatcttatttaataaaataaataaaagaaattaaagcgtgtaagcaaatcagaaactatttttttattaaaaaaaaaactaaaagtcactcacgatacctcgtccaccatctcactctccaaactcagaaatccagatttgcctccaagaatgatttgcacagccaaccacggagtcctccgatcactttaccaggacgagaaaccagaaactcaatcgcaccatccctctccctaagcccaagattttgactgaacccctcctctctgaagctacatcctcccacgataacgattacacctatgtaattgaagagaggaagagaattatttttgtggtattccatgggtggaagggtatcactgacagaagcaatcccatttcgagtctcgatgattctgaaactgttgcttctgatcaaagttaattggtttgttagagttagtttgattagtctgttaagtctgttggtttagacaattggaatgttaactgtctcattgtatttcgcgagctatataagctcagatattgtacacatttacaatcaatgaaaatactctatttttctcattcatctctctttgtttttccctctctttctctacacacttccgcaactaatatggtatcagagcagggctttgagtaaaatccgttgcattcctcacctccatggctcgtggaggagctcaaactcgaagttcatttgaaaactccaattgattttcagctctcgacaacaatgtcagatcgtattcagatgaagttcaaaacccttactatctgtgtaatagtgaccatcctggagctagcttagttccaaaaattcttaatggctgtgaaaattatagttcatggcaaagagccatgacagtcgcacttgttgcgagaaacaaactcaagtttgttaatggcaaacttcctcatccggacgaagatgatgaagattttgtgctatggaatcgctgcaacaacactgttatctcatggattctccatgtgatctccaacgaaataactgaaagcgttatgtacatggatgatgccacctagatctggttgaatcttgaagaacaattcaatcagaaaaatgctagctcctagggtttttgaagctatattcgtgcgaagcagtctcttgcataaggatccaatagcattacaagttactttactagacttaaatctctttgggatttgattcaagagtatcgaccacaactgatttgcacttgtggagctatgaaaatgattcaaggttaccaggaagaagagagagttcttgagttcttggttggcttgaacgagtcctatgccagtactcgatctcagatcttgatgcaagatccattgccaaacatcaataaagcgtatgcctccgttattcaagaagaaagccaaggtgtttgtctattgttccagctgaaaatgacaagaacggatctagcgatggatctggaacaagctccaactcaggtcagtttgctggaaatattgaacctcatcgacctaaaatggtctgtactcattgtggtatcacaggccatactatggctaagtgttttcggatccacgaatatcctcctggacataagctgcacgggaaatttcttaacaggaatgacaatcgcaataccagtaatcacaccagtagctcaggaaaaccttctgctgcaaactttaccaccagttctgaaatcagtgaagggaacaatggagacaatattgtgggggatcgggacctggttgctagcctaattgctgtgcagtgtcaaagactaatggcattgctatctcagagaacacctaaagcagcaagcagtgctcctgttgagcctcctatggtgtcacacttttttggtaagaagtctttcattcctaactctaaatggattattgatacaggtgctactcaccatgtgtgtaatggc

SEQ ID NO: 320854 - DNA, 652 bp, Cannabis indica
tacttattattgtcatatgtgattgtgttgttctgatttgttgaggtttcaaaactaattgtatgataaattgttgcaactttctctccttttacattactattgtcaaatacgaacatgttctgcatagagaaaacagagaaagaacaaggtagttgtcaaagccttggagatcaaagcttctatgggcatcaagggtgcttcctatggcacattttgggctactcatcattgtgggtgtctgtgcagacggcaaaagtcagtcatcatcagagtttccagagcttgaagccttgtctaggctagattttggtgctgcaatgaaagtcttcctagcaaaaagatttatttctaagtgaacataaagttctttgtctcccctatacaatcttgagggttttattgcaattctttttagtgtgtttgaggtaacgtagtgatctttcatctaaaattaatattttctgatgcaattttcaaaatttgaccatcattgtatgcaagtgcaaattcctttttggcttccaaagattgttcaccaagagaaacagtaatagaaaaataaaaccacacactgattccacttctcttgttaactgttgctttagactaactccatttcctctttttgagaattctgagaatgattagc

SEQ ID NO: 320855 - DNA, 520 bp, Cannabis indica
tgattaaaagtaaaaaaatttatagtaatatggtggttatgtccacttcaataaaatcacttacatcatcagctggtaagattttttcccaaaaagaatagggtgagcctgaatctaaaaaggagaaaatctaagctgataaggagtaagtgtatctaaacccttaggattagcacaagtaacaactaacaacgttgtggtcaaaaggttgaccctcaagaacttgtacatattctcgtattcatgtttattttccttataaaggcaagtaaaaataagtaaatatattatttataaaaaaaaataaaagtatattaaattgatacattttctactttgcacgagtatatatatactattttatttaggaggggagtagaaaagagaagcatattttgaactttgggggtaaaagacaaataaagtagttagaatctttaatatcacaatgacttcgacgagacctacccacccatacactttttttcttctttttttttgtgtgtaaaggccgagatat

SEQ ID NO: 320856 - DNA, 772 bp, Cannabis indica
atttccttgtgtagtagccactagtaccactctattgtggtagtacctataaaatttgatgggcacttccatatccttaaggcagtggtccgataagggctttgaaaagccttaggccacttttcttacttgtttttgatatatagatgttggaaatataaattcactaatgctacccttttccttatgcaaggccctaccactgccatttcgttatgagatcattccgaagatctataccctcaaggatcacttgtgaggattggccatggatggctacggggtttcccttgttttggatttgtcgaaagcttctaatttttagaatccctcgtttccggcattggttgtggcttgaagtttttaggaataaatggaaaaggctttgtgcgtttgggtaagatgagtctggaaagatgaacttttgaactcagaagggacattctagcagaaaagagatgatccatttgaaaatggatctcaccaaaaagtccaaggtttgtgaaaaatcacaagcttgagccacccttttatacacaaagttcagtgagaagaaagctaaagattgggaaatctgacagttggaagatgggcagaatatgaaaagacaattcataatgaacctcgaaaccgtacaaccgccagaatcaaaggatgcattttttctaagaaaggattttggcaaaaacgccctttgtaattatcaaaaagctctttttactaaaaaagaactttttaaggggcaattgttatacccaaaattcggctgcca

SEQ ID NO: 320857 - DNA, 823 bp, Cannabis indica
agctccatataacacaccattttacagtgtgttacagtgcacgacatttactttcttttataattattttagaaaatagtatattgatacactcctatttatttcggtattctaaaaaaaataatttattttttacggttgtgtacattatagttatttaacacatttcacaaaactttaataaatttagaaatataatacgccaaaaatataattcaaacaatctattgtacacgtaaatctttgatacgtgtggataataaattatttgaatactgttttttatattatattttattaaaaaataatatgataatgaaaaaaaattatttttagtgtaatgtttagtgttgtgtttagagtataaagaatttttgacgctaaatttagtaatagtgtgacaccaaatttaatgtataggttggagatactctgcacgtttactacagagtattcagaatcaggttaacgtaatggagaaaggtaacagaataaataaagaataaccagaagcaatatttataattcttgctgaaatttataaacactacgcaagtatacgcaatcaagtagtagttcacgcaagtgaggtcgaaccacagggaattggattaattactactaaactatacctataattctatttggcaaatcaaaagtatttatgatttaaaagaattaaagtaattcagaaaacttaataacacaatttaaagttaagcaagatgagatgatagggaggagagtcctgttgttgtttacccaagtcgttaatgcctaattgctatcctattctttctaaatcacatgttatctaattaat

SEQ ID NO: 320858 - DNA, 717 bp, Cannabis indica
tcacgtttttcaataacctcgttgattagcaatgagctgcacagtacgtttaaaatcacgctaacacgcctatgctagttagggtgttacatagcccctaaatttcttcctttaaatagtcattcattggtggtgtgaccaatatcaccatgattggcagaggcttcctgtagtgtaccatgttacaggttgccttgtatacattctcctgagtatctatgagacttgtgtactcagtatatcttgattcttgggtttttctttttcttttcagactcactttggttaggacccttcgtactccttttactccttaagttgcttactttagattttggaacttctgctttttagtttgtttgttcgggagcagcactgtattcagtctgtgcagctccgaacttaaaaaaaactagcctatatagttggctgtatggaagtacttggtctatatactataggagtagtaaaggcagttggcggagggtaaatggatggagttgtcatctgtgatggttaggcatttgttatttcagtggaaggtgctgggagcactccatatgcttagacataagcatcttctaggtttttaaatccttgggctcttgtcaagacttcacttaatgtatctacccttttgcactaaagatctccccacagtaaaggtccagttgtaagtcctgatgttagagccaccattttcatgtcatcagtgac

SEQ ID NO: 320859 - DNA, 837 bp, Cannabis indica
ctctgtaatgccaaaacgagttatgcggctgcattgaggccattgtggccgccgccgatgacgagagcgtcccacttttgaccgttcctctctcgatcccaggtgcggttgagctttaaacgctatcaaccacaactccgacaacaaaattagatccaacgagcttcaagcaaaccaaagacaagatccatggtgagcttcaaatgtcgtcaaccatgaacggtgagatcactacacagaaaatagatgcgagagagatcgaggcagaaagagacaaaaaaataaaaaaaaatgagaagagagatttctacctgggggctattgaaacttcggtcactgattttgtaggcgaggcagagtgatgacgagtgagacgaaggaggacgagcacgtggtaggacaaaaagcgaggcggactatggggtttcaagggtaggggatcacgatttaaaagagctttgaggatgctgatcgccggagaggggatgggcaagagcttcgcacacgagaaaatattgagagaggaaagaagagagagataaagggtctgaacacttagggttttttatgaaagagaaagagagtgaatataggtgagaagagaaaaagaaaaagaaaggaaaaaaaagaaaaattagcttttttatttacagtttttttttatttcaaattaattttattttatttttttaaataaattttttacatgtaccaataaaattttaccatgtgtacactatgtccacgtagatgtacacgtgaacagttcaacatgacacttaacacttaaaatgaacggaaatattaaattgctaacagaaaacgagtattgggggt

SEQ ID NO: 320860 - DNA, 1283 bp, Cannabis indica
ccacaccaagtggacaatgaagtgaacccactcgtgtgggcccaaatgtcaatacataaccaaaataaatgtatatgaaaaaaggagacataaatactaatatgttctcccacaggtaacaaatggcctaaagttgatctatagagagcactgccacaaggcagctctcgcatggaaaactacaaaactaaataaagaagactaaacaacctaaaagtcaatcatagaaggccaccacaagggaatggaagtactctccaaaattagagagcactgccaacatgcaaccacccttatgcaactccaatcctgaagactctggggcttatccagaagtgccatcttctccattctccttggcttccgctgtagcggtgacttcagtagtagtcgtggctgcctgggctttgcaacaatgctcctcaaatttgcccaagagatcacccatgaagctaaaatccatgtcttgtttttggcaccaacacaagtataatatgaaatattatatatatatatatgaatgtccaaatcatccaaattaatgtattaattaccaccgtaaatgtttgattatatttttctttattacattgatttaatttctcatttttttagtcttattcttgtataaacacgggtttatcctattagaataaataactgagaaaaatcacattcactgtctcattctgttcttctctttgtcttctctcttctcctattttttcttatctattttatattattttataagactatttactattttattatcataattatttattggatattaaatcaagtacattgacttagatatagaaattaatatttactgcatagtttagagaattcaaattatgtaaaacttttttccctcttgactactaatcaaacgttgtcctaggtaacaaatttacttgactaataattctataatgaaaggctaatctagaagtagtaagttattcttggtgtgatccaatacactcaaaaactactggtcatcacttattctttttggttctaatcattaatctcttaaactggagcttaatagtaattagaataacatatttgattttgttaataatgttgagagatgagattttccaattttctattgctgaagcactagatgccttcacagccttggtccatacacatggcattgagttcattcactcatgccctcatacctctgtacaaaatgacagagctaaacgcaagcacaggcacattgttgaaatgggccttaccttgcttgctcaagctcaaatgcc

SEQ ID NO: 320861 - DNA, 1232 bp, Cannabis indica
attattaattttaaaattatgatattgaaaaaaattaaaaactaaaataaaattaacattggcaactacaccgtataccttttcatggtctgatgcagtaaaaaaacactattacaaaaattgtgattcataaacagtgggcagattaataagtttaggaagaataatttttgtttggtaacatgaattttttttttagggtaaccacaaaagattaaagataaaagagagtaagcgatggttagaaatagtacttcaaaatctatattaagtgtacgtacaaggcattataaactttaatatgaggaaaaaaataaacactaattcattctagtatactaaactactctataatgcaagaaccaacaaaaaatctcaatagtagatagtcactaacacttctgcgtggaaaactaatagcaaacctgtatcacaacaagttaccccacaagatatcccttaatattggcaatataatattttgaagattggtttggtatagtcagtcactaaccaaaaggcattccctttgactagtttttactgttagttaaataaaatttcagctctatatattcagtatataccttatacataatagtgtctttgaaaacgtttgtcttaatttgttttcggccatattatggggtagagatcactgcatccacgtagtagagttaagaattatgggcatccacttcctccttcgtatactgaggtagtgtcacattttattagtttaattccgctgatttcatatttcaacttaataggaagagagtcaattaacttgtcacttgttgtggggttctcactagtctatctcgtgttttcttcttcttttcaaatttaattattcgagctgcaattattggtttttcaaagctttattttttagaatttgtgaaacatagagtaacatttctttaaaagagattttcttttgggtttatataaaagtaaaatactcacattgccaaatatcttgtgagaaggtgcaccagaaaattgaatgtccattcttgtcatacccaatattgaaccaagttcgggaaaagccttagataatgtaaagtctttttttggcaagttagttgacaaaataattttttcttttatggtaagattgttgtgcattcatactcaatttcttaccttataaattctgcttttagttgcccttttccttgttaggaaagttccactttcagctgaactttcctttgttgaaa

SEQ ID NO: 320862 - DNA, 883 bp, Cannabis indica
gtatcaatgactttgcatcaattatttctatccaaacaaaaagaagagtttcctgttttccaatctcattacaagattaaaaacttaaaaccctaagtatagtacatgttttccaatgagtgaatacacataaaacttcaaagtgagcagtgcaaactccaaatctaatgagttgagtaacattttgttcttgaaaattagtgatgcattaggtgttggaaatattttaccagtgcaacactgacgttcctatgggtgtaaatagttcttcttgtgcaaccgtattcagaattaaagatggtagcatcacccacatccacaaaacccgcattatgcagtgtgatcctctggcgggagaactctacactctcacttggggggctgaaaaggaagtcaaactgggcctcaaaaatgttatcttccaaagtgactctaagggcgcagtggaggccattaagggtgctttctccaaaaattcagatatgcatttcaacattactgatttagtgactcgtttccttgatactgctaagaaattcgagctttgggaggcctgctggatcccaaggatagcgaacggtgtggcccatgacgtggccaaatgggcgaaccggtcttctcattttggggaggttgaaccgtccaattttcacagtttcctgcatgtttccactgtagatggctgttctaatgacttatagtaggatagtttttttatttgactctattagctcttcttttcgtttgttttcagttagtttgttagttttcctgcctagtttcgttgttcctggcagccgcttttggcttgtcttttgttctctgtttgttcttttgtttgctttgaggcatctttaatcaaaaaaaaaaacaagtatgtttc

SEQ ID NO: 320863 - DNA, 1358 bp, Cannabis indica
atacaatattgctctaggttcttgaaaatatgtgaataaattaggcaccttgatgattaaaatcatagttatataaaatcgaaaccttgacaattattttatcttattcttttcaactttaatttgctattctcgttcttttctattttcttttaattttctaatatcattcaaaattaatttcttagataaaattaggttgtaatattctctataattatttgctttatttacttttaatctttgtgagacgatatcgatctcttgatcactattcttacttatcgatgtgtgcacttgcaagcatatacatatataattcataacaagtttttcacattattgtcgagaatcaagaacttttagttattcaattaatataatgaagaaaatatcagattttaatctaagttttatcttattttattactgatttttttttaattattgttgtgaaggtgcatgcgtaaagctcgtagttcacctctattacctttagatcttgaaattgaaagaacattacagtcaatcatcaaagaactacgagctagatcaagaaagatggttgacaacaccagcaacaacagcagcagcaaaaacactgctaacggtgccaattctatagcaaactaaaaaattcagagactattttaggtcggttgtcaatgatgatttcttgggtgtgagaagacagcaagtgaatgcgaacaactttatactgaaacctatattactcaacatggtgcaacaaaatcaatactctagtttgccccttgaagacccaaacacccacttgtttactttctcaaaaaattgtgacacgataaagatgaatggagtcccaccagacatgatcgaactcaatcagctcaagctcttttcattctctttgagagactgagctcgttcatgatatcaatctttttctcctaatgtacttacaagggaggagattgctcaaaagttcttcaccaaattttttccaccttttaagacttttaaattaagggtaaaaattacttaattcagacaattagagatggagcaactttatgaagtgtgggataaattcaaggagatgcttagatagtttcatcaacatgacatagaagattgatttcaagtccaacttttctacaatggacttaataatcaaacgaagtcacacatttgtaatatcccgataagtctaatggtaaataattaggatttatatttatatatgagttaatcaggtaataagtgggattatgatcctactaatttatttcagtataaaatttaaattttgctataagtgagtaaataatcgtaatttgttaattacggagatttatatagcatgtgtgaatgtaata

SEQ ID NO: 320864 - DNA, 1005 bp, Cannabis indica
agggcataaaacccaacacgttatgctgccgaattttctaaaaaataaaaaggaatatgttcttttgttattctcattatttgtctgctttggttatactgatgagagccatattgatcatgacttgtgcatattattgtttcacatcctagtctctgtgtcatcataggtagattaggtgtgcactcacctgtaggtgaaagacttagaatctgtacagggagtgaattaaatctgagccccagcattatatatggtagttatcaagtgcgactacccaatttttgaatgttgttttctatgatttggtactgagagctagggtctagtggatggtctcgattatatatacttttagtgtcgctctactaacgacacttgaagtcattataggtgtcagttataaactaagaccaaagagttggagtggccattagtgtcggtttttttaaaaaaaaatatccctcaaaccaacaccaaaagtctattttgtagtagtgaaagaaaaaactaaaaatcacacaaaaacaatcacaaatccacttataatctaaaaacaatcacaaagacaatcaatgttctttaaaatctaaaattaaaaaataaattaggtgtcgtttggtgacacttttgtttttttaattttttaatcacaaaatgaaagtaaaatttttgtttttaaaaaatttatttttgaaaaataaaaatgcgctatgtaaccacttgtgtttttcaattttaaaaacaaaagacaaaagtgtgttctgtaaagtttattttcatttttatttttttattttatttaagttaagtctaggtccggggtcggattcgggtttgggtcagaagtcggtttcagcgctagggccgtggggaggggatttgggtctggatctagtcgtaattcaaaagattgattaagaaaaaaaactgtttaaaaaaatagtgaaagcgattttttttgtttttaaaattttaatttctaattataaaattgaaaagtaa

SEQ ID NO: 320865 - DNA, 1067 bp, Cannabis indica
tttttttttttgagaaagaacaacttttgttaatttagttaatatataaaatattaatactatatatgatgttctaataaaaaatattatttctttaacatttgttttgcaccacaataaaatttcactataatcgcactacaaataaaattgacttaataggaagcattttcttttttttttaagaaaccggaagctttttcttaaccttcctgttaaaaataaaagtaaataacttctttttattttttactataattttgaaaatcattaaagaaacaaaaaacaaaattgtaggaaatccttacaaaacaaaaaagaattgtaggggatcaaacgtagccttgaatgagtcacttgtgaacacaatccaacatttcaacgtatattttcaaattttagagatatgacacgatgaatcaataacaaaaactcaatggatcacaaataaaggtagagatccaaagtgctggctctacttaatatgcaatgtaacaaaatgtttaacctttttttttccacaaacacaacaaacacattgttttgagggttgacatctttatatggtgaatactaattgattaaagtcctcaataatatcataaccatgtaaagtaaactaaataaataataataataacaccaccatagcattactttataattcatgtagtaacgggagtacatttcatattttatataataataatataatatggaaagagagagaaactgcgggctacattgctttttgcctctattgcagccacttcagcctcttaacttaaatggctagtttggtaatttcactaaccattttcccacttacaaactcaaaaaactcataacacacccttcactttcactaacaaaaaaaaagtaaaatgatttcctacccctgtatcatatttcacccaacttttcccataaccctaaccccatatcattctattacttttttttttcactcccaaacaaacacttcaaattttcctgagaaaatagcagaaaatctgaaggcgggaaactaaccccaagaaagaaaaaagaaaaaaccaaaaacaaaa

SEQ ID NO: 320866 - DNA, 998 bp, Cannabis indica
aatcaggtacacatacctaattattatatattattattgtgttctatgttatatacaaattgatcttggggtttatattaatttatctaacatcatataccatacatacacataaataacacttctatatccttaatatggtattgaagtcaaataaaaactttaataagtataaaagagtcacttgtaatttaaaaataatgaaaaaaaaaaaattcacttatcatctagctctccaaaactaaaatatgagaacttaatatattagatgtattaattactatactcattaccaattactttttaaattgaacaacattgttcttatcatacacatcatcacaccacatactaacataaaccaataagattaagacacattaagaaaagctgaaaaatcaacttcataggtccacctaatgtttcttacaaatttgaattatacaccaatgtaatgtaactaatcaaattttagcttataaaacaattttacgaaaaatattaatctatgctcaaaacatgtagcttgtagatcttatcacaatattaatatacatatatatacctctctttttatatatgatatgaggacaaaggatgaaccattacttttttttttttttttgacaaaggatgaaccatactttataccaacataaaactaacaaattaaactctaccgtatatatactaagaaaaaattattttaataattacaagataattttttatgattaaatataacttttagttacaataaaaaattacttgcgactaaaatagtatttcaatacaaattgtgactaatttaattttaatcataataaatattatgattaaaaatacatttagtcataacaaattataatttttgtgactaatacttttaattatgaactttttaatcacaacataataattattatttataattagttataattttttttttttacttttagttttaagttttgttttgactaaaagtaagatttttt

SEQ ID NO: 320867 - DNA, 1426 bp, Cannabis indica
tcgaatcactattttctacaataattattgttaatatagatttgagaaatttcaaaattttgagtcaaattttggacttttgtttaattttgagaaattaaagtttgtgcatgacgaacgatgatttgaagagattttgtatcagtcttacaaacttaatgaagaatggtgcgatttcagatcttgacagtgatgacctataccaagagttatatatgttgcgtccaagtttaccaaaagaaaactaaaagagttattgatgtgttgagctacataaaagaagtggatggtagttatccaaatgcttggattacttataggattttgctaactattcatgtcactgttgcgcatactgaacaagtttttccaaactgacattgatcaaatattatctccaatcaaccatgtcttaagaaagattgagtggtttaactatgttatctattgaaaaggatatgaatgcaaaacttaactatgtaaatttaattaatacttttgcatctaaaaatgcaagacctataatatttcagtaatatattgaattttttaagtatatgtgttgatatattagtttaaaatgtatttattttactaagtagtattttaattttattgaaaattacacttatatataaatgatgtaatatatattttttaaaaatatatatacataaaaataggccatttttttttaattttatcaaaatggtattgggcttcatttttttgtcagctctgatgccaacatatcacgtgttcttaatttttttttctatccattttttttctttccttactcaattatttgaagataaatttaatgtcttctcattttcttaaaagaaatatttttattgaattctaaataaactaattttatagaactattttgattggtttctaaaataaaaatggtatcttaaataacatcataaaataatatatattaaaaaaaaatgcctaaactatttttgttcagaaattattttgtagtttcttaaaatttatttaactcattatattttttaattaaagtttaaataaggtaatacaaaaactaacaaaataaataaaatttaaatgtatcttaaagcattaaaacacatacaacaatattagactgaatctaaaactttaaaagtaactcatccaaataagtaacaaaaatcgatcaatatataaaatcaaaatacgttactctggctacttcatgcactaatgactgaccttataaactaatatgagtctttttagcgtgttttattctcactcgcacacttgtcgtaaaaatttctcaggagctgacccatcctgaaattcatcctgaaattagttattttgtgatggtttgccgaaaaataagatacacctttagatgtgaactccatcaaaataataatctttagattgtagtaaacaaaat

SEQ ID NO: 320868 - DNA, 1503 bp, Cannabis indica
aaatagttgaatcttaatctttgctagaaacggagaagatgcttgcaagagttctcagaaaacatcatcgaaattggcctaggttgacattgggaactgggccttaattctggcacacaggaattgttatttcttctcctaaagtaccatttttcccatttttgatgaagacaaagatgatgaaaaagtcatatcatcgatctggtacttgaaaggcacccaaattgagaaattattaacctgggcactgggtgcttgggcaccgggtactctaggtactcaaatataaaattaatctaaatttgattctagtgtatcaaatatgtccgtggtatgtctagttgatgtcctaatacagagtttgacccatttgtactaagacagtcccaaaaactgaaaccctagttgggatatcaccttgggcgctgggtgaaaccctaggtgccaaggttggctttcggggtacaagtttgtaattttagctctcggggcctagatttaattgctccatgtcttcatcgtacaaaatctaaaagataatgagttgtaatcaagttattaaagtctaaacttccatcttggagttctcgaagttaacctgggcataaggccagggacccctcctaggtcgactactatgactcgagtttactcaactctgtgacgtcatacttcttgccacatgttaaatattgatgtctacatcatcagggaaagtttttgggttaacacttactcactctatgaaaatctaagaggagggtgggaagccaacttaagtggtacccagaagtatagaaccaatactcgcgcacatccaaaggatgactccaagaactcatggggcacttcactttcttcctcttcttcaagtggtagaagtagtctttgttcttgtctttcttgcataagacgggttctagctcattaaagaagagaacctttgcgggtctaggcatcatcatctttgtctccttcctgaaatgtacaatcctactaaaagcttgtacttctatgggatcagctgaaagagattgatcctgacgaaagtcaagaaatttgcaaagatttcttgagccagaggtgggctctcgcagtaatgtggccaatgctcaacactccgaagttgtctacactagtgctagctttgcccctccttgagagcctattccagaataggcatgggcattttggaagccacattcttcttccaaatgtgtcagcatcttgtaattacagaatttgttagggaggtggtccatctcccattctgtgctcttaaaatgatcctcctcaaggagcactggttcgacattggcattccaagtcgggtcgttgttgtcgtgacctcaatcccatgtgggttcactgtaatgtccccgctacaagcctccattgggctcttacacccacagaatgaatggctcttatacacgagtgcgtcactctggctgcttcatggaatgacgactgaccctacacaccaacacgagtgtttccagc

SEQ ID NO: 320869 - DNA, 644 bp, Cannabis indica
tatatatatgtatataccttccatgtgtgagtaacagtgttttggatgtgaggttggttttcataggagagctttgaagccatcatggaaagagctgcattgtaccgtacatctccatgttttatgttagaatcaagctctggtctcttgtccaaatttccaataaaggaaaagaaatctgctgattctttgtccggaataacaactcttcctatatataataaaagaagtattaatcatatatataatataagttatgatgatccaaatcgaatatatattgttataattaatttgtggttatttataccttttattgattaaactattggcttcattaatattaaactaatatgactatgaggagagattgatggttgtaatcatgacttggtcaacaattcaacatctaaacctacctactacgtattcccacttggactaattaaatattaattaagggatgctaattaattaattatgagggataatataattaataattgaacattgttattgggcaccagtggtgcctagcaccttctaaatgtgtcgacttgcaattgactagcgatactctataaaaattattatattaaactatatggtacccgatacttaattgcaccaatagcgatattgac

SEQ ID NO: 320870 - DNA, 1376 bp, Cannabis indica
accattcaataatgatccaatgactaaaattaaatgtaaccatgataattacatatttgatgtaaccattgaaacctcctctatatattatgtgtactaatataaatatatcatatgtacaagagtgtatacataaacagttcatattggcaattaattataaaaaataaatgtcaccttaaatttgataataattcagtaatttgagaaaggttttactactaaaatttgagttttaatagttaagtacaactaaaataatagttcagagaatttagccgcaaaaaaactcaatttagtcctaaatgttgaaaagtcataagttgcatcaatagactttttttgtagagagtactatattgagtttctggaggctaaaccctcctaactattgttgtatttgcacttaatcctccaatctcaaattttggcagtaaaatcttccaaactaaaaaactgttagcagatttaaggtgtcatccggttaactacgccactatggactgtttatgtgtacattattgtacatgtggcacgtttatattggtacacctaatattattattttaaaatacaaaaaattatttcaaaacacaaaattatttcaaaacttatataatattttttatcatttaattttttttatttttttataattttatttaattttaaaataaattttgaaataataatattaggtgtaccaatataaacatgtcacatgtactagagtcagggtaggccctgaaacaaagtgggtcatagggaaaaaaaaaatttgggcccttatgttagaaaaaatatggtatttttcaaaatcggtaaaaaaaatgtataattttaaaagaggaaaaaaaaatttgggccccaaggctgggtgggccctaggcacaggcctagcccgcctatgctcagggtcgggcctgaccagagtgtacacataagcagtctatgtgggcagtttactgtgaaaaataaataacaccttaaatttgctaacagttcagtagtttagaaggttttactactaaaatttaagcttaaagaattaagtgtaagtgaaatgataattaagagagtttaattacaaaatactctattatattttacattatatattttttttttcttaaagggttattttactttgtattcaattgagcataatttcaatttctttcctttttttttttttttgtagaaagagagtatcctcaatttcttgaacagtagaagatgacacttaatctcactattttaaatcgggaaatttacaagaattgacttaaaagcttccctatttacttttttaattaaatctgtaatttttttcttttttatcttcgtctgtcttttttttacttttatacggtatc

SEQ ID NO: 320871 - DNA, 911 bp, Cannabis indica
ttttcggttttttcggtgtcggttttttcggtgttcggacggtcggtttactcgatttggtcgatttcttggattttttgcctatcttcaaatgaaaaacacctgctgccatcaccatactacctcacaacatgaactaccaccacacagaactaaaaaagataaataaaaattaaaaattaaaacctatagcaaacactaatttcaagttagaaattcttaaatcaaaaggtcgaaacttaagaaactgaatatataaagtcttgtaccaaaaaataaaatagaagaaaatcattaaagcccaaacacgtatttgttcttggtttatacttgaaaccgagattcaaattaatacaacaacttatatcaaaacattcaaactaatacattatcttttaagataatgtatttattgagattataataaaatgtagagattttttttgttgatataaatgtagagattttattttaaagtaatattaaaatttcttatggtcgaaatgtgggagtgagccacaaatttaatcaaaatgtgatgagatattgtgtgattaatttatttgattttgaactcaaattctaaatcaattttggctacgtgcataaaaaattttgacatattttggtgtcaaattttgttaaaaataatttcaagaaggaaattatggagacaaagtggtcttttatattttaaaattaagatattgtccttataatgaaatgtgaaattgtggaggtgataatccaaagtgaaaagttgaagacatgtttggtgtcttaaactaaagtgtaatttagacatgtttggtgtttaaattagtatttaattttgatatgtttggcatcaaaattattgagaatttaagttgtgtaaaaaattaatcttttatgattgaattttcaaagct

SEQ ID NO: 320872 - DNA, 587 bp, Cannabis indica
aaataagaaaagaaaaagttgagtttgagttaaatatttttgtatgaacatatttttgatatattgtaaaaagagatattttttgatattttttttaattaagtagttaaattaagcatagaaattcaaatttgtgatttcatttttcgttattatagagaatgatgattccaacaattagaaattatttttaaaaattaatttattttacttaaattattatattatctttacaataaatattaaaatgtattagatgaagttctcattaaagttgtggtccaagcataacctgcttataccatgaatatgtttctgcttcctattggtatttatcgtcagatggaaagatccataagtagattttggtggagaaccaataactcgaaagggattcattggttaagctgggacaaacttactgcgcataagtatgatggaagtatgggctttcaagacttttgggattttaatctctctttgttagccaaacaagggtggaggctgctggtttgtgaggataactttgttgggctttatgccctaaataaaactctatttcaatgtaatctctattatttaaatat

SEQ ID NO: 320873 - DNA, 645 bp, Cannabis indica
gcacgtaattttttgtctagtatatatatatatatatgtaagaaagagagtgattaaagaaaggaattaatagatgcacttattagtgcagtaggtgagaatagctccgtcaactcagctggatcgtttaacgtattggacgactgggattgagagctacagcagctcctcgttcttacgtaaggtcgttatcctttttataatttatttaaatttaaataaatatagaagaagaaaaatgttggctcaaacaaaaacaaattagataataataataataatagtaaatgtaggtattaatcactatgcatatatatggatgtgtttacataagggtattctgcggtaacggtcatccatgagactgttacctccactataaacaatatggataagccaaggcaagcaaaagtacatgaaggaaaattaaaaggaaaaggaaaaagaaagttgttttcattgtttctgttggaaaacatgaatctcttatcctcagctgcaggccctccatgcaaagcaacacaacaagaaagacactcaatggaagtcctttcatgattcatgagagcagtggcggaactatgttatggtatggggtggccatggcccccccctaatattttggggaattatttttaatatata

SEQ ID NO: 320874 - DNA, 1572 bp, Cannabis indica
aaataaaattaaaaaaaatgtttggagtgctcttacctttgattttaccaaattagtgtatttttttaacaagttaatgcctttttagtttaacatcttttagctattttttttaaaagttatttaggtagtttagctgatcgggatgcccttacaaattcctaaagcagaaaaattcaagtcatgcaactttataatacttaatcccctttgtgttaatttgttaatgatatcataagtaatcttgatttctaattattcaaatagtaataatctaatttgtgtttagttgtattattctgatattatttatttattatagagatcgttggttatgatacttttgttaccctgttttgcattttgcaaatgatgtaatgtaactcatttaatttctttaaaaaaatgatgtaactcatgtattaagaccatcttcttgaactattttggcgaacattttttattaatttaacgtaaaatttattatttttagtgcagcaactccaataacttaatactaatattacactaaataaatatattttacttgaaaatttttatattttatattattcacattaataattaataataattaatttatgatataattatacatactgtaaacaaataattagtgatcatattttaaatcaaattaaaagaaatgttaagataaaaaaaaaaaatgaaccaatttaaatattcaaaattcaacattataaatagtgtgaaaattcgatacacatcaatttagtgtataagtagtgtattgttagaataaaattatgtgaaaatgctacactaatttaataaaataacacaccatcgaaaatttctaacagaatgtatttttggatagatacttgctcataatttttaagttttccaagtaataagcaatatatagtaatggaagaataattgaaacagtactttgtaattaaatacgggtggatatagtggataatatatgatgatcattcttctttttcaaaatattctgaatgtaaatataataaagatgtaaaattaatttccaagaaattgcatgctttatttttcattatttaatattttttgactataagaaattgcatggttggtgtttcgaaagtgagagtgaaactgtttgagaacatattaattaataattggtacccaaaattttgttcaaactttctcaaactgtaattactaaccgcgtagcctttgccccttttgatcatgactaatgaataaaaagagaagctagattaatagtaaagcaaaaatattatatatgacaaattggttaattaattttattttatatagaaaaaatataataactattaatgataatttctggtgagaaaccgacatgaatatttctcgtacgtgtgaactgaaaatgattttccactcattgtcattattaatgctatttttagtatcactatagtatgagtaggggcaggcaaatactactcaatagtcttttacgtatatgatgggtttgaaatttagatcagtcataattaatttgtgttgaaatttgaaaatttctattggatttttcttttttttttt

SEQ ID NO: 320875 - DNA, 575 bp, Cannabis indica
gattctatggactccggtacgcttccgctattccttaatcttattgtttaattctcatgaattaatttgggctatatacagatttacagtattctaacagacttggcctatacttaatgggttattctccataatcgatgattttttgtttatatttgtttataaatttttttatcttctttccttttataaagattaacttaattagtgtcttgcttctttgataaatctcgaatgtgacttatatctattattacttaaatttttactcattttattatctatgctatcataagttgtttgaaaatttaaaattggatgaatttggtctgagttgtctaaggacaagcaatagtgatgttacataatgcgcaatggggattggaacaacaaggattgaaggatggagctcggtgaaaaacatatgatgatttgattgtttaggttgattgatattactttatttttagattgaatttcaagagatcattgatgggtcaaattgatgaataaaccattttaattgggttttgaatttgtttgtcttatttttatgtgacttaattttgagaaaa

SEQ ID NO: 320876 - DNA, 528 bp, Cannabis indica
aactttgaaagaagagtgcgaagaccctccctctcgtcgttaagctcattgagctccttcgatagagcctcgttttctgcatcaagctgggcggtagatggcatctcctgaatttttttggtcagctcctcaatccgtttgttggcagctaaaatcttcttgctaacttcacccagctcaacccttacagtatcgacctctttctaggtcgtatccacctccttctacagattggtggtggtggtgatattattcagggcagtaaatttgacctaggagtaagcgtaggccatcttcagatcgaggtgcataggaaaaagtcaaaatctacactagtaaaaagacaggataaaaattaagaagaaaatacttacgcgagttgcatccttcagaagcccacccatcagaagctccacggacagctcattatcagctctggccaactgatcacttgttgggttttgtgccctaaataaaaccctttacaatctgattagttatcaatataagaaatttgaagtgatttat

SEQ ID NO: 320877 - DNA, 834 bp, Cannabis indica
tttttttaattattattaaaaaagatttttattaatcaaaactgaaaaattgctacaccaaccagcacccaataaccttctccatacacttacatattacacacaaaatcataaattttttagtctcttttagagatttttctcctatcaacaaatttcaatctagctttcaaaatcattctaatcatacaatctatataggaaatcataaactttttctattaaaaaatacaagtactctgatttcaccaaatgaagtactgatcccacataaacaattgctgaaacatcaaaaaataagatgcgatgtctctttaaagaactctataacagccaatcaaagtaagtatctggccaaatgaccccttcaagccaagattgaataacttgcacaattttcttgaagaaaggacactcaaagaaaaggcgagtatgttagtcatatcctatatcacacactaggcagagctgagaattgatagtaatagtcactaagtgatctttagttagcaagtgattatgatagacgccaaagaataaatttatactttggtgtggataatctataccaaatcaccttacaattatccacatttgcataaggaattggaaaataattatagagcttcctaacacgaaatctccacccttttccagcctccaaaattgcattttgagtgaaattatttttgagattgaggactttgcgccaatactgacttacatcccctttcctataaaaaaaaactttatgacatgtttactaataagtaatgggaatcaatagtaaggtaatcattcccttacatttgtttacttaaattattaaaatta

SEQ ID NO: 320878 - DNA, 1386 bp, Cannabis indica
gtgattcatttctagggatcccccagaaaaacattataaataccccacaaacacactgagacaagggtcgagaattctgggttcataagaattaaggagagtatataggggtgatatccaccaagaacattctttgtaataaatactttcataaataacaaaaactcgtggactaaggctcgttaatgcccaaaccacgtaaaaatttcatgcattaaaactcctacagctttctcacatatatattatttaattggttgccgaaaacctcggtcaatagagtcaaatataatattataaatagaattaaagggttttcaaataggcacattacccttatagatagagattaaatgaaagcccttcatgtatagctttgagttgattgtttggtttcccttttggataattgttctttcattggtgcttgtaattgttatgttagttcaatataattctttcttttgcttaccccaaaaaataaaaaaaaaaaaaaaaaagaaaaaagaaatcgacattttgtcatcttatcttaaatatttatcgtattaaaagtattttcaagacataattttattgtcaatctaaataaatatttataaagttagcatcaaaaaatgtcaaatagtatttttattattgttttttttgaaaggatgtcaactaatatttaaattagctttaatattatagtttttaggttaagacctctaaaatatattattcataacaattggattactactcataaatattataattaatttattttaatttttttagatcttattgggttagaactttgaataatataattatccttaaaaaaatatatatttattatatttgagaaatgcatgttctatccaaagccacccactaatttttgttggttcatttagcaattttgtcagcgcacgagtttaaatcatgatgttattatttattaattaatataaagtattctcttaatgtatattaagatctaagttttttaatccataattaataaatattaagatataattaactaacagcaaaattacctatttagccatgccttagttttattaaattaaataataattcaaactttgtaatttttaaaataaatcaaattaatttattgaatttaatttcggttaatctttttaacaaatttatacactaagttcaatttttcaaccatgactttggttcgagccaaaataattattgtagatttaatcatatttagaagagtaatttgcggcataaatacttaaatttaatttttagttgtaaataaatacttaagtttaatttttggcggtaataatacataagttatatttttaaaattttgtaggtacttaaccgttaaatgttaagccattatatccacgt

SEQ ID NO: 320879 - DNA, 514 bp, Cannabis indica
aaaaaaaaggaaaaattcaaaatttaatttttggaaaaaaaaataaaaaagcaataaaacacaaacacaaatgtgtagatttgttaaaaacatacataagagcattcttttgggttgaactgagaactctgttggtctagttaagttgagaacttcgataattagttgacttgagtgtgtgtgggtgtgactttctagagagagagagaggaaaacattaagatgagtttggttttattatttgaggaaaataattggaactaaataaacacactaggatattttctttgatgttttgtatggtggtatacttagggaccattcttcacatttaagcatgggaagccaaatttccctaatcaaatcacaattatattttctcattatttaagacttatttcaatcaatctcatgtctatacaaattttgtacaataattattatgtatacaaatatacatatatgtaaatttctcattagaaattcatattcttgtacaaatatttatttgcac

SEQ ID NO: 320880 - DNA, 737 bp, Cannabis indica
catctactttatattattttatattatttcataacatgaagcaaattgtcactttcaaacaaaataaattaattaataactcaaatgcttatagcactggattagttttcatgtttagagcaaattcttgtgttgagtaagcaagtacttaattgcatcatatctacttttcactacaattaatccaagaaattggcttttgacatgagttctctgatttgccatcgtgggttacaagaacatgtagtagccggcggtgtcaatcccgaattagatcctcaccggataacaaaggccggaaacaacgcctttcacgatgcagtaaaatgcggaactaatccacttgctgtacgtgtgcagatcttgctaaggctgcattctgttctctcctacaaaccaaacaacaaaggcgacacgcctttacatgtcgcggcgaggttagggaatgacagtttcgccatggttctgatagatcatgctagggaaccatgccatattaatgactatacaagtctgctgaagaaaggcaatcatgttggaaacacagcacttcatgaggctgtgcttaatggtcacttcaaaatagtagagcggttaatagatgaagatccaactttgacaaatttagtaaacaatgccggtgaatctcctctgtttttggctgtggatcgaggattttatgatattgcttccataattttggacacttttcctatttgctctttgttaggaagaaa

SEQ ID NO: 320881 - DNA, 1327 bp, Cannabis indica
tatgaatttaataaaaatattgaaatttttgacacttaaatttaaaatatagtttggcctcccctaacttttcatgctggctccgcccctacttgtcatgtgtacacatgtaaacacattagcagttcaatttagtatttaacagaagtttttggactgaatagtaaaaataaaacagaagtaaagtttggaagattctgcccaaaaagattagtttatagaattaagtgtaacataatagatagtttaagtaatattgtcatcaatatccctaataataataataaaattctctcatacatttatgcctaacatccaaagataatatcctctttaattattattattagaaagataatataacccaatacaaataaaagaatatatatatataaagagagaaatacaattaaagcacatcttttttctttctaaatttgacgttagagattttacacaatggaataaatcatgttattgcacaattcaatcataaaataatacaagaaaaatataagagattaattatgtaaatattacaatattttacactatatataatataggctaattaggatttttttgctccctaaactttaacatgtaccaaatcatgccccctaaacttttctagccgttaaaattctcccagaactatagagattgttagatttaaggacttttatctaatttcattcaattttactatttcagtgattgtttatgtactaaactatgctcccagactttaaaatctaccaaatcatgttcctcgaatttttttttttgatgaatcagattatgtattggctcaaaaacaaagtgcttacaatcttatagcacccaacattgccaaaataatcatttatacatgtaaatcacaaatcacatttctttctatacatttacattattcacaaactaaaaaaccattgcctatcttcctctgaaattttctttggccaaaatagctcaatccgatgagttacccctgttttgagctcttttaacatgtttcctatttctggtttttctttatcccataaacacttgtttctaagcacccaaatgttgtatgtaaggttggccatagcagcagccaatgtcatctttctaaacttattcaccttagctctcccaatcctttaactgagattaaagagagaagtatgagtagttttccaattgagccaagtcttcacagtctgtaggcagctgctggttacagagcaatcaaaaaataaatgctctgcagactcctggtgtgcacagcaaagaagacaggtttgaccctccactatgctcctcaaattttgacatgtactaa

SEQ ID NO: 320882 - DNA, 1076 bp, Cannabis indica
agatatataaactcactgcagatctgattagagataaataagaactgcaatttattcccccaggcagagatgctatcaatcagaccctacaactctagaaaccttatggtgatcgcacctccataggttacaaaatgctgtacaaatagggaaatgatctgtctatcgaggattcacacaccttaactatcgatctgaccaaaaaggatgatgagaaaccaaatatccctgctacagttaacaaaccagactcttttgtgagtagtcatgttccatctagacccactaagttgaagtttgaagggagaagaattgtccctggaaatctatcaaaaaatgaaaaattcatttcaataggtcatttttgcaacaggaagggtcacattcgtcccaagtgctataaactggagaactacttgaaagcgatgattaatcgaccaaatagtttttcacaactaaataaatgtcaacgccgcgaaacttgtcgggaatggaaaataaaattgaacctcagaccaaatgttggattggtggctaaggtgtctctgtctccttttgtggagggacacatgactggaaacaaaaagttgttggttaattacaaagaggaaatggagggggctgtgaaatttggtgatggaaacaagggaaagattgctggtaaaggtgatgtaaacctaaatggtgtggctcagttaaccgatgtcctgtatgtaaaagggctcaaggccaatctcatcatcattggtcaactgtgcgacaacaacttctctgtaagtttttctaaaactcagtgtttagtttcaactaattggtgtgttgtcttaataggaaataggactatagatcagtgctatgtgttacgtgcagtccaatagggcacgttacaaactaagtgatgcccacaagttggccaagtggtggtcaagtggtggcgcatgttgtggtgcatgctggtggcatgctgatgcttaatttgtgaagtggcattttcgtaaatatcttcaatattgtccaaaacgggatggaacttggtattcgccctttatttgggtttacaaatagaatggtgcaat

SEQ ID NO: 320883 - DNA, 1453 bp, Cannabis indica
cgattttgacgttagcgtctaattagcaacttatgttaccctttttattgtcgtttgttatcaaatgaggaaacatttctaaccttctctattcatcgtcaacgccatgaatagtcgcgttaactggcgtaaataatacgttttacagtagtgtaaagtatggtgtcttattggctttaaattctaaaattgtccaaaattgattagagaaaaagatagatattaacaattgatagaagaatcaaactcacaaatgaaaatgaatcaagccaaaataaataaataaaaaaaaagatgaaatgtgtatagtagagtaatagtatttaatatatatatatatatatatatataaaatctgtagttttttttttaaaaaaaaatacatacataatatgtaaattattatacatgtggtgccgggcggttacaaatattactgtatttttttttccctttttttttgaaaatatatatgatcatttaaccacactatactgtaatggaaataaaggataattaaccacagtacactatgccgtacaataagagtttgcttgttttggggttaacctaatgttagcccgtttgagttttggtggtatttcccagacatttttctaaaaagaaaaaggcatcttcgtgtaattaattagtggatgcaaaaatgatcaataaatttgtgtacgactgatccaccgacgaatctataagttcaatgcacttttttgtgagtcataattataaaagataataatattcaaaaattgataagacatgtcaccgctatggttaatagctttatttttccctagtttaacagtaataacttttattttcattatccttacaaaagaaaaaagaaacttttattttcattataaataaatagttaatctattgttcctttaaaaacgaaatttaaaagaaaacaaaagaaagattaattcatttttgaagcctgcagaagataaaggcataaggagcaaaagtaattacagaattgttaggtcactcatgcaaagtaatttatagtaggattatccatctcttcatcgacaagctttcaaatagtaggaatagatagacgttgactttaaaacagtgcaacacaattattattaattaataagaactttagtaaaccttaatattttttttgaaaagtgaggaaaccttaattaattagtaagattatcgggaacacattaatttaaaaataataaaataaaaacatatccatagactgtagtatagtagtctgccactaacgtaacatggacaacaaagaatttcaaagttatcacttataacgttctgtcttactaattttgtattattgtcagggacgggcttaaagcggactaattttcatttttctacagcccatccaattaaagggtcagcctttattattagggaaatttacacattttactaactttttcatttttat

SEQ ID NO: 320884 - DNA, 1122 bp, Cannabis indica
ttctcgagaattctacacccagtattcatccttgagattgataccatcgtagctagaaagaccttgttgaggttaaataatgacaaggcaaacctttgaaggattatatccaaagtttcatggctgaggccaccaaggttaaaggcccaacagaagaaggccagtatacgaccatactagggggcatcctttcattgagtgacttctagaaagatatccaaaagatctcatccaataacatgaacgagttccttgacagagttgacgactttatcaagctggagaaagccgtctgataagtccagacagggaaagtcaacaataggcaatctctgggcactttgcagccccaacacctaccatatgtacaggcaagcactagtagtgccatccaggcctctagtagcaagaacactgggggcaagcgcaacaacaacaactctagcagaacaatggaaaaaaaggggaagtacaatatttctccacaccacgaatctagaaagataaggaggtgaagtacacctgcttcaccctcctaacggagaaacctaagaccatttacatggtaacttagcacattgtcccatacaagaagccccctcccatgaaaagggagatgagcaagagggatatgttaaatttatgctgatatcacaatgactttggccatgaaaccaacgagtgtcaaaacttaaggagggagattgaattctttataaggagaaacaatccccacttgagttgttatgtttagaacaaccaatctcaggcacaagttgctgagaacggagaccccatgacacctccaatggcgggtcacctaggggtcatcgttgacagaccccacattacaggcaaaacaagcaagggtagggaatgttatgctcagacactccctcacgagcctaaaagcgatatcctagccattgaatagaggggctccaagcaactcaagcttggggagcttgtcatctcttttacagagggagatgctgcccaagtatacttctcgcataatgacctccttgtcattactacacaaattgggaacataacggtttcaaggtgtatggtggacaatggagcctcctccaacattcttttcagatcaacatatgaaaa

SEQ ID NO: 320885 - DNA, 1044 bp, Cannabis indica
tgccatatttagtgtaattaaatttttatgccatatatctcaaaacttatctttattttcccatatttttgtaaatagcccttagaaaattatcactaaaagtacaaaattaaaattatcataattaccataattttaaacaatcaagctattattaatgataagattactatatcaaaaacaacaatcggaagtaaaacaggtgcaaatagagtctataaaaccagaaacaataaattcagattataaagaaatcaacatcaagatatgtactggttcaagtctgatagatcgatgtgatctacgactctactccagctctggaacaccaccaaaatccttcattattgattgagcaagaatagttataatacgatcgagataagattctctgttgagttctcactaagtgtttcaactctctcacttacacccaagaatcttctccagttacagaagattcttcttacaaaatccaaacccaatatttttgttttctttgcaccactctctctacctctcaattttttctctctcaaaatctcaatctcaatagaactgagtatatataggcttaggatcaagatcctaaagtcggtggctacaaggaacgaggttgttaagttagttaaatatatataactaacttaaccaactcctcttcgagcgaagtctccacgtcagcttaagtattagagcctctagaaacttatatgagcttttgggctcacaggccaaagacactcgctaatgatgcttctagataggattgggtccactaaagtcgactatctggaactaccattctaggagggacaactagccaactctaactccattccagagtgaggctagcatttctagagacttgacctggagtggacatgatagtcatccgataactgccttcctgactcaactttcattcaacaagactccttccaagatggacaagttagttgtccgggtacaacatctgggagacagctaactttcaagaaatcttattggagaatgttatcccaattttggcactctgacgtg

SEQ ID NO: 320886 - DNA, 2445 bp, Cannabis indica
agatcctggtaaaataaattccaacagtatatacatggcattaaaaatacaaataatcacatagagcttggaacgagctttccaaaaatatatagaactcccaaaacgaagttcggatcacaaagttatgcattatcaaattttaaactcgaatctgcccagaaacaggagggcaggccgcgacactcccagatggggccgcgacactcaagaccaattcccaggtctcaaaataggggcgagccgcggcatgcaaaagctatgccctgacacttgggttcccaaccaagaaaaaaaccagcaacaaccacgaatttcagccactaactaaatcaatttcaacccaaaacttaaccaaaactcaaaaaccatccaataggtttttaacaattattcagagagtttagcacataatttcatgcataaaaatccaataatatacccatgaaatttcaaattaaacatcacacaataacaagcttctcacatgagcatatacaatcaaaactcaagctcacaaacttaaacatcaaacccattcaaccttatttttttccagcaacaatacatcaaataaaacatgaattcaaacctagaaaataccgtaaaatctcatccaatactcaacaatatagaccaaaacaatatcatgaacttcacacccaaatctatcaagattaaacacaaattctctttacatgcaagttcaagaacattacaaccttttgatgctctttcaacaataacattcagcaagaatttcaactaaactcagtaaaagaaagctacctcaattcaattcaaagccaaggtcaacaatcctcaagtaccgagctccaaccaaggaaattttcaaatgattttcaattagaaaaaaggttagaaagagagggagagggagagggtttgaggggaattaaccagaaaaatatcatctcatttcctttaaattcctctcttttatcaaatataattcaaaggtcaaaatgaccaattttcccctagggccataaagcacactcatacacaaacaagggtatttaagttatttcaaatataacacatactcaaataatttttcgattatccacacataaatataatgccaataattaatcctagaattatatttcggccccgaactcgattcggcccaaaatacccagttgtgactataccgcgccaatctgtcagaacacacctgagaaggacacatagatatactataataatatagtccataaggaagttaataaattaatttcactgtttcacccttctcaggtcaaaattactaaaatgccccgagctcaccaacgggatcttaatatgtcttaaatcatataaattctcatatattaaattatataataacacaatttcacaataatacatgattatctagttagggttttgctaatccattgacttaatcctagggtaatacacattgggtcacgattccacatcccaatttctaaaatttttagaggctgtcataattggtatcaggtttcatcacaactattggtgtggtttgtatcattaggtcccggttcgggtcctagtccacgttcgggtcctaggtcttaggtcccagtcctagtcatggtctcagtcaaggttttggactgagttttggttatggttgggttcagttctggtctcatgtttgggtactagtcactgtcataattctgggatggagactggggtccaattatgggtctcgaatccagttctaggtctcgagtcatgttcaatgtgcaggtctaagttaaagtctgggttcgggtcctgagtcctagtttttgtttggattcaggttttggacctaatcccagggtgggtctgtgtgtgagtctgggtcctagtccgcttaaatttttgggtcctcctggtccgtgtcgtgttcttgggtcccgatccgcttctagtttcggttccagtttcaagtcacggggtacgggttcaggtcgagtttgggttcgagtttgggttcgggtcctaatttgggtcttgggcgaggttcatgttcggtttttggtctcagttagcgttaaaggctaggtccaattccgagttcgggtccgggtctagatcctagtctcgttcgataatctcagtccgtttcaagttcaattttgggttttggttcccgagtgtgggtctgggtcttggtatgtgtccgtgtcctagtttaggttcggattctggtctaagtcctagatccagacattgactacacgtcgagtacaagcatcgagtcttggaggtcccgaggtgggtcgtaggtccatgtttgggtctggggttgggtcttcaatcccgatcaaagttttgaggcccaagtttttgtcctagttcaggggcccaattcccaggtttgggtcccccatctatgttcgggtcctaggtcccagtctgggtcaaagttcgtgttcc

SEQ ID NO: 320887 - DNA, 691 bp, Cannabis indica
gttttttagttactattataatttagtataatttgagttaattattattattaaaaaaaaaaaagtgagatttgcgtctaaatcactagtggacggttacgaagggatgaaataataatatgtgactaacaaattttaaagtagtttattatgtttttataagaaatgaaaattgtaatattctactcattgcaaaaggattctctttttattttttctaaataacaattatctttctatcatttgctaaaagaaatgtataaaataaataatatagatgtataacaatattaaaaattatcaataatatatatatattttttttttttgaaaatttctgtttagagttttgagctgagtgagtttatttgttcctttttttttttaggattttcatgagtttagtgtgttcttaggtatatgttttagtagaatttacactattttaaaactttatttgataaatatgatattttttagtttatgtattttatatggtaatttattatttgcaagcccttttatgggatttaacatgctatatttgtgcaaatttaaattttaaagttcatattttatgcttgtgtattttttagtttattattttttaaatatttatttagatatcttgtccatttaatttactttattttatttattttattaatttaattatttttcagtttgaagg

SEQ ID NO: 320888 - DNA, 1269 bp, Cannabis indica
agaattagacttaggttttctaggttagagttaaggcctttatataggaaagcctaaaccctaatttacaactgaaatcttagatatttacatattaaattgattaaatacaaaagactaaattactccttaaaagtagatattttccatcagtttgttgggctgctaaggacccaactcacatgtagcttatagtccatgtatcagaccgtacagagaatcctatcaggctaatcctggctgcccatacactacaggatatggtctggcctaccatggaaggtttgcaggttgaggtctggtcggccatgctcctgctaggtcctagcaggttatgtgcctactaggatcctgcaagtcactgttagctttatcaagagtaggccaacttttagatgtggagaccagcctttggcaagtggaggacatctttgtacactttttccttgtagaggtcatgttcctttggtcaaatggaagctcctttggtctggaagtcaccttttggctagccaacttgtgcccaaatcttggccagccatacaaactcactctgaccggcctataggcttctctttgctagccagatatgttggtaatcttcttgatggcttgcttcactcctttcgattactgtttggcggttttgccatatcttgtatggaaaccctgtcttgctactagcaagactgtattccacatgtactttgtcttggcttacgtggacattccaccttaggtggataaaatttgggataacatttgcccctaagtccctattaaaacatttggtcggatagggactttctatcttcgtcttgtttgtagtagtctctatcgagcagcctcgtctagtcaattgttggagttttgcatggcatccttttagatctttaatcttctctctctatatatgtctcgtcttctcttcttagatacctcttctttgtacctgccattaataagtttcaagcttttgaaaacttttttattctcatgttagtttgtaatctctttggtatattgatcctcatgacagttttggaatgtacaatgtgtgaccttttgatgaaaaagattcaattttgaccttcgttatgattcttgactcgttgagtcataaagaatatgaggtacatgttcgagtttcaaaagaaaaacacacatgaggattcaaaatttaccttggccaacataggaggtcttgattgaaacctggtcggccctagggcttaatcaggggagttggcgagctctaggattttaccc

SEQ ID NO: 320889 - DNA, 1479 bp, Cannabis indica
ggctaaaaatagcctaacaatagacttttgtcggcacatattagttttccccccaaacatttccttacgctacaaaactccccccaactcattttagaccttttgctgacgcataattgtgcctcgcactacaataaaaggaacttttttttacactttaaataaaagtgggataaaaacttttgatcccacatttacatttgaagccttaaaagaatttggagcaagagccttgattggcaaatagataaaaaacggtgttgaaaggggctattttgtgcatttaccaaacgaaacattagtgagactttttatcccggttttaatgtaaaaatcaggataaaaagtttcaccatatgcgggcctttcaatgttttgggcctttacacacataaaaagaacatttggttttaggatttcattacacatctcattccctcccaactatctctctctaagcggcggtgcaaccttccttctatgaatttttttcttctccacgctcaagtagctcaacctttgaaatggtctactattttttttttatttttttatttcaacctccaaagctcgagccacgaatgagtcgatagatcgagacaaacgatgaaggctctactattttttactcatttgatatctcgatccaaccactctgacggtagatttgagattctaacctcgaaaactcaaggtttacatactttttttttcttctttgtttctatctgtctaacttgcttttttttttttgtgcagtcacacagggttgaacaacaagctttgacgcgatgttgatagttttattaagtttattttggtgtgtttatttttgtttttgactattatgaaaagaaaataaaaaataggttgcatgagctccacatccatattcatgggaatatttaatttaaaatgttatgtaattttttttttaattcaaaatttactgttttcttcttcttcatcatcattttttttttctttttctatttttggaaatttctcttactttacttttcttgtaacaatataatatattatgccatgcatgaggattgaggatggactttttttgtgtgtatatttataagggtgcggagtgggaattatgcccattgatatggttactatatattatttactacgaaaatatgcatgaggatcgatcaatctaatatattatattatttcttacaaataatataacaataaatgataaatatgacatgcatatatataggtccacatgagtcataattatcactattactcttttctcttttgacaaatttaattaataaaatgttgaaatttcttcgaacaaattgcaggacttgactctattgatctctatatgaatgaatatatatatatctattctatataaagtgtgccaatataaccgaattcttggtttatgagaaattcatgggtgaatttttatttatattaaaaataaaatagtttattattaaa

SEQ ID NO: 320890 - DNA, 730 bp, Cannabis indica
aatttatttattttttaaattaagtcaacatcatttaaaccattttttttttttgagagagagaaaataaaaatattcatattagacaaatcggacaaaatcaattacataaagatatagctcgaagaacaaaattatcgaaaataggcttattaagtcatattcttacattaaaatgaaataaataaataaaataaaataaaactctaacaacaatattgatccacaatagccaccaccatattatacttctaaactaaagtaacatatatttactaaaattcatctatcaatattagctaatgatgttttaataaaaattgagtcacaacaatctcattatttaaatcataaataagtcatattatagtgctcatcaacatagattacaactatacaaaaatagctagccaattaactctcaaatttaattgtaacttcttaaccttctaaattattaatttatgtttttgtatttattaatataccacgcttataaagaaaaattatgtgtagagtcaaatgggtgaagaaatcataggaaaataccctctaatatatgtacatgcatttttctattttaatactaggtaacaatgccgcgcttcgcgcagctcttcaaatatttttaaactatattattttttaaaatacgacaaactaaaaactaacaaaagaatcatcgtcaatctaaattaataattgttatataaaacatcaaaactatata

SEQ ID NO: 320891 - DNA, 885 bp, Cannabis indica
cacgtgatattgagttacatatatagcgatatgccatgtaatttgtcaccataaaatataccccttaacatttctcctcgatgtcgtttttccatttcatttatttattgtgattcacaaatacaatttttttttctctcttctatccaccattgaataatgataatattcttttttttggtgtttttatatgtgtatataaaataagctaactttctaatttaaatatactagctaggtctaagatttgcattgagatttgtaactatttcatttttttaattatatatatatataaaaaaaaaacatttagtagcatttagtgacaatatagagtttttgtgactaaatgtgatttttagtcacaataaaattactttgtgattaaatataatatttaggcataagttatcactaatttagttttactcacaataaatattgtaattaaaaacacatttagttacaataaattataatttttgtaaataataccttttagtcaaactttttgatgataatataaaagtaataatttataattagttacaaattttattatggttaaaattttttttcttactaaccttatctaatacaattagataatataatctaagcgctatatagtaataagtggaataaattaaaataaaaaaacaattaaaaagtattataatatatatggtactacatctaaatgcatggtgttaaacacttgagatgatataatatgggtgattatatttaattaatctaatgtttttaattataatatatgttcgatcttaaattcagccataaatatattatgttcaaataaaatgaaaaatatgaaattaataaaggcatatgatatgtaggaagttatgtctactctaaatc

SEQ ID NO: 320892 - DNA, 1058 bp, Cannabis indica
aatatgtgtacaattattctattcaatagtcaaatataattttacattgattataagtgtgttcattctacaagtacgtggtcattattattcaattctacaaatgatatatagattttatgcactttgattgtgtgtggtatttcatcttcttgttatctctaatttcttctaaaaatatttaagtagtaaataatgtcattgattatttaaaattattgtattcacttcagaaaatgacattgaacaagtaaaatattattatgcatttcttaaaaacttgttaattcacatataaaaatataagaaataattcagcaatttcatttataatatttcaaaaaatatataaatataatctttttacataattttgaagatagatgtaaaatattatctttaatatatgtcacatgcaataatttaattgttatctaagtcaccttgccattaggcattatatatagatttgtttgatcaatcaatatatttttattcttcttgcaaaaaaaatggtcaatatatttttattgtgtgtattatattcaaatattatatgcatttatacaaggaaagaaataaagaatagactagagtgatatccatcttcatttgtcaatattttaatctaaattattttaattatattattatataatatatgattatgatctgtaggattgcgtggttataaataattatatatacctattttttcgctgtcctaagtacttgtgattcatgaattttaaacaatatatatttaataacatctttgatttcaaatgaaaattataaaataaatacatatatattaataatgaggtaaattttggattatctgtctcacacagtcttttttttttaatttttcgaagggggtctcacacagctttaataaatattttaagagttcatttggtacgacgtattacaccatattatattgtatagtattatattgaattgtattttatacaatatttttatataaaattatatgtatattaacttttatagatacctaaatctataatattttagtataaattaaagtt

SEQ ID NO: 320893 - DNA, 1196 bp, Cannabis indica
ctaatgatgataaatgttgtagttaatactatgtatggttcaacactatctcaaaaaatagctatttttagtgataattttttagtcataaaatcaattttttgtgattaaatataattttttttgtgattaaatataatttttagtcacagcaaaaagttacttgtaattaaaacatagtatttaaatacaagatgtcactaatttagttttagtcacaacaagtactgtgactaaaaacacatttagtcgcaacaaattgtaatttttgtgactaatacctttagccacggaccatttagtgactcataagaatgatgatgtataatcacaattttttcacttttagtcacaagttttattgtgactaaagtaaaaaaaatttgtggtgcgatccagtactcagtattgccattttccacccattacgaggtttttgatgattatgggcctcctaactactaatgaacttgttaccaccttcggaaaccatctatttttttattggtacaatattgtccattttggacttaaatccttgtagatttttttggcaccattccaaaagttctcattctaaaagagataatattcatctttatatacccaaaatcctttcaatttctagccaatgtggaatttgattatacacccaacaattctccgcttaaacaaatgaccacctagcctcccctcatacgattacagatctaaacctgaatccttcaattccaacactcaagatccccttaagctagatgaatcacttcaccagctagattcgaaattccttttaataattgaatccctcgattccaacactcaagttccttttatgctagatgaatcccttcaccaactatatttgaaatcccttcaaatacttgaatccctcgattccaaaactcaagatctccttgagtaagctagatgaatctcttcactagctagatttgaaatcccttctaatcaaatctgaacctccgacggctctagcaacaagattttgttggaatatattttactaggatctagatttactaacaagtatgttgatttacaccctaaatatgaattctctaaaacaatgtaattaaacacatataaagtttaagtaacctcgcattggtggtagcagaataatatgtcttctcccactcagatctctaatccatgttcctttctgtcgtagagta

SEQ ID NO: 320894 - DNA, 1057 bp, Cannabis indica
gcacagtcctagagtcttcaaatacggtaactttttagggcacaaagatatccttaactttgctagggaaatctttcaaggctttggttccaactttgatggttgagccctgatctttgttttcgttttttggattattgtaatgtttgctatgtatttgtgattttcagctggttaagtgtttctaactctcttaattttatagtgtatgatgccaagaaggtcattgcagccttccaaacaaatattaccaaccaaagtaatgccttgagagcgatcgctggtgtcatcaagaaagttcctaagtcaaaacctttcgcatctcaaacaaagcctaaggagacagtacccccaaaattcaaaccaaccagattggttgatgcattactaaacccagaggctaccattcatgtcatcccactgcgtcagattccaccttttgcttctgctcctctggctccagctgtcaagaaaatggagaaaaaaatcatcgatctttgcaaagatgaggttctagagaaatctcttcttcaaagaagtccatgaatgcagaggagagaactgctaagaaggctatactcgatgccttggcagccaagagaagagagcgagctaaaacgaacttagcttatgatgactcagtggggagtactgcccccggagactttgaagaagtgcacaaaggtaattgagttcctcctcgatttccaatatgacctttggctctgaatgactacgaggtggcactcgatgaagaaaaagaccaactgataaactgcacttgggattttaaattaggggacgtgaacctactttattgataactttcttcaagcagaatgttgagctatcatctcaggacccatccataaggttgtctaggaagttagtggtgttgggattttatgccctaaataaaacccattccaatcgaatctgatttgtcatgaataaaagattagaagtcatttatgtttacatgttgttttcatgtttatggtttaatatacatacaaaatctgttaagtcccgaacatatagtcatttacaattacag

SEQ ID NO: 320895 - DNA, 622 bp, Cannabis indica
ttttaggggttcataaaattataattaaaaaatagaaaaccataaaaattaaaataaaaattgtaaatatctataaaaaaatataaatatataatattattttgaccgtataaacattaaagaggttagaaaattgatagatttttaattttttttgtgtaaaagctttctcttcaaaattattattttatggaaaattgaaaaaaaaaaaaaggttgaaaaatataaagaaatcaggtataacgataatcaaatacccttataataaccaaataagtaacaaattaccaaataatagtacattaataagagaatattcaaatagaaaaaacaaatgttaagtattgctaaaaggtatcgttggtgcttagcaccctcctcggtctcataacgctattattgtaattaggtatcgagtcttatataacttaaagaatagcttttaaaaaaatatcactaactaattgtagggcgccacctataaaaagtattgggtactaatgatacctaataacaatactttttttataaaagatagttacattcagttgctcgggtttcgcttaaatagaataatggaaaaaagattgacgaagccaatcgagtgcgtgtgagagatttt

SEQ ID NO: 320896 - DNA, 549 bp, Cannabis indica
ggggaggctgcaatctctagttatctgagttattgggatgatttggctggtttgcctcgttcccttgacgctttacatactgtctgaaatatccactcaacattagacctccatctcatcttttagttgtcgacaatcttcagtagtatgccctatgtctttatgaaattgacaaaattttattgaatctcgtttatgtcttgcatgtctcattggttcaggcttgcggaatgcaaccctgtgttcatttacgagaaagatattttcacgggtctcattcaactcggtgtataatgtgtaaatcgaaacatatttgtcgtgctttttcagtttcttcttatttttagatgattctctcgagtcatcttttcttttggtgtttgaaccacttagattatctactttggtcgatatggtacttactatggtagtacttgttctgggtttgtttcccgagctagtcttcggcaacttaatctcgttctttacttcctctttgtgcataaatacttgcgctctttcattaaattcattaatgttccttactgg

SEQ ID NO: 320897 - DNA, 1460 bp, Cannabis indica
tgaccggcccaaaactcactgattttgagctgaaccgagcatgcggataaactttctccctagagattgaagcccttgagttacccctaaagttcaagatgccgacctagaagatgtatacgggcaaagaagaccctttatcacatctaaaatattttgagatgcagatggacctgcagtgggtacgaggtgatgtaagatgtagaatattccctgctacacttgcagaggtcgcccaacaatggtacttcaagatacccccaggaaggtttaatttgtggtagactttctcctcagaattccacacacagttctcctcctcccgtcaactcccctcgcacctaaaagacctggtcgaggtaaaaaaagtgtcaggagaatccctcaaatattatataataggttaatgacaaaggctacaaaggttaaggggttaaccaaagaggaaaggctggctgccatactggggggcattaagttgcttgaggaattgtgggaagatatcaaaaggtttggccccgtggggtccatggcagaatttatagatcgagcagatggatttattaagctcgaggacgctgttggtgtgtggacacagtcggacataagaaaggtcagcaacgtatctcctcggcaggggcacctgctcaaaatccacattgccgtagcagctcaaattcgaatgggaagaggtctaataacagtggcaggcaaggtaacggaaaaaggaatgttcattggtaatgccaaacacaaccctagagaaaatgccttaaagtttactgccttttttgtcctgactgacgacctagagacaatttacacaacaacccagtctatggtcccgcacaagaaaccctctcccatgaagaaggacgtaagtaagagagatacgtccaagttctgctgttttcatccagattatggccatgacaagaacgagtgcaataacctgaagcgagaaactgaattcttgatcagaaaaaataacccacatttgtaaaaatatgtcaaggtcaatcagaatcaaagggctgcccaaacatacgataattagaatctattaatgcctctaccagtagacatgcattaacaagttattattggggggccacatccagctggaactcgggcaaagctacggaaaagtatgcccaagccatacatcatgaacaaaaggaaacagttctggttgtagaggagagaaaggcaaaaataccatcggtagggaacccagtataacttttactgaagaagatgctattcacgtccacttcccgcacaacgaccccttggtcgtgcagatagcaaacaagacaatggcccaaactatgatagacaatggagtctcctcaaacatcatatttaagacaacgtatgagaagatgtggctccaacttaaagatttagttgttgggttttgttccctaaataaaatccattttaatataatcagattt

SEQ ID NO: 320898 - DNA, 1253 bp, Cannabis indica
ttttttgacaagttaggcatctatatacttagtctaccacatccttctttatgccacactaccaataatagggttttaagtcctggtacatcttggttgtaccgagatgtcatgaatatggagtggtctgcgcttcatctagtatctcttttttgagctcaacactgcatggaattcaaactcgagccttgtaaagtaacatcctattctgacactcagatttctttagcttcaacagctaaaatctcttctcgagttttcactaattcagaatcttccatttgagcacttctgattcttcctaacaaatcagattgaagcatccaattattgagtttgccaaccacaaactcaatacctgccttaaccctgtcagccgctaactgaggagagattaccgtagtactaaaaacctacccgggacctttcttactaagagcatcaacaactacattggccttcctgggatgatacaaaatctctaagtcataatctttggctaattcaaatgactaactttgtctcatattcaaatttttgtgtgtgaatacttgagactcttatggtctgtgtaaatctcacatttctctcaatggagataatgtcgccaaatctttagtacaaacacaattgaagcaagctctaaatcataaggtgggtaacgtttctcatattccttcaactgacaagaagcataagcaatgactctattagcttgcattagaatgcaccccagaccctatctcaaggcatcacaataaatcataaatttctctcgatctgacagcagagccaacattagagctataatcaatcattgcttcaacttttgaaaactagtttcacacttgtttgtccataagaatcattgattcttctttgttaattctttcaaaggcatggaaatcttggaatatccttccataattgacaataatacctaaccaatccctaaaaacttctaactttagtaactgtcttcgatttcaatagtctctaactaactcaatctttctgggatcaaccataattctatctttaccgataatatgacatagaaggacactagtggtaaccaaaactcacatttcttgattagaataaagcttgtgttctcatagtcgttgtaaaaccatcaacagatgttgttcacgctctacttctgattgagagtacaaaaggatgtcgtcaataaatactacaacacatatatcgtgaaaatccttgaacactctattcatcagatccataaa

SEQ ID NO: 320899 - DNA, 649 bp, Cannabis indica
gcactttggttatccacccatataacaggacactgagacagagtaatgtgcagttcagacaataaggaaacaatccaacgtagttcagcagccgtgttagctaatgcatgaaattcactctctgtacttgatcttgcaactacctgttgcttcttggctgaccaacttattaagttgtcacctagatagacaagatatccacctgttgaacgtcgatcatcaacacaggacgcccagtcagcatcagagtaacttgtaagagttaaagaagttgctggtttgagcataggccttctgagatggtgcccttgagataccgtaggaggcgtttgcaggcttcccagtgggagacagttggggctttcaaaaattggctcaacttgtttgttgcaaatgcaacgtccggttgtgtaagtgcaaggtattgtagggccccaattgtactgcggtacaaagtcggattatcaaacaagtctccatcattaagagacaacttggtggaactgcttatgggagtactacagactttggcaccttccatgttaactttcattagaatgtctgttatatatttcgtctgagaaagaaacaatgccttgttgattacgatgaacctccactcccaaaaaaactaaatgaaacttcacct

SEQ ID NO: 320900 - DNA, 1187 bp, Cannabis indica
aatgaattttatttagggcacaaaacccaacagttttatgctctaaataaaatttatttcaatataatcttatttactaattaataaaagactgaaaatcattttatgttgttcgtttcacttgttactttcatgagtatatgtttaatatataaattttattaaatctcgaatatatagttactcgtaattatagtgttttcaacacaaaggaaaatattcatgattatatgcttcaaaatattagtcccatgatacactggatttacactaacgtgataatcagcgatgtggtttgcttataattggataagtggaatgcctttttcagagcattagtgaagtaaacttgtatacgatgtatcggttatacatcgatctggatcgatattgacggtggaaaatatatcataaacttattattatatcttttctaagctagtgtcacttagttgatcttagattaattaatctcaatcataagatggttaagctttaccttaattgtattatacgggtttttaaacttgttcgtgactagcttacctgtaggattagcccatacttacatgttgggagctcgatggtacagttaagtgggagcggtaatcatagatatggaatatatagcttttatgactatttaaaaataaaaagatggtttccttagagcatggctaaacgatataaatggaagagctcttattttagtaattatattagtttaccaaaatatcatttataaggagctaagtattttaataataatatacattgaagggtaaacggtaaatttatccctattcgatgtaaaccgtctatagagtatcattgattatttgaattgaaataataaataattcatagtgtatctatatttggtatataaagtcacgagccttagttgttggctccatcataggtttcttccccttctattgggcgacattctgttgcttcttggataaattgaggatcgaaggatcgacagcttcactcttcctcttctggagaggatttgcagaagaaagagtcgcaagctccttgttagtctttgacttgcggttaagaattggggcactcttcagaaaagtcatacttgcaaaagatatgttgggttttgtgtcctaaataaaacccattacaatctgattagatatcaatttaagagaatagaagtggtttat

SEQ ID NO: 320901 - DNA, 703 bp, Cannabis indica
aaaacctagttggggctgtcaacccgggcactcaatgaaactctagttgcccaggttgattttgaggtgcttattcgtgtattttcagctctcgaggcctgaacttggatgcttcatgtcttcatggtacaaaatactgaaagatagtgggttggatagaacttggcgggatccaaacacccaatctagagttctcgagtcaacctggacgtagggctaggtagccctcctaggttgacttgctacgatctgagactacctctgagatgttttctttcttctcacatatcaaacattgatgtccacatcatcagggctacttttggtgtaaacaacccgtatatgataacaataattcacttattaatttataacaaaatgatcgtgagtacttaccgaacattatttgatttattttatgtataatgtaagatggttattaatgacgactatatataggtaagatacagtgatgacaattgttttaaaattatatgaccaattttctataaatttattgtagtgatgagaattatcttgaaattatattataagcatttataaatttattgtcttttttttttagatttctattttgtatggggttgtttacttttaaatttttcttttactataacatacatttagaatgtttctttgtacgactactttcttttttataaaattgtacaatgattttttt

SEQ ID NO: 320902 - DNA, 867 bp, Cannabis indica
cccctcttgactggtccacgtattttgggcaaattttggagcaacaattataattaattaaatctaaataaggaaagtctacctattagtaacctgctattacaggttaaagaaaaatgtaaccatatagttacaataaaaatgtaaccattgaatagtcacccatatatacatatatatatactaccaaataatgatatggcaccgaaaaaagtattagacaccaattgtatctttgagcatttctcgatatttttttttatatacgtaggtgttatctcaatttttgcacaaggtgacgtgacactcaacagggtgacacgtgttgtacatttttgggcttggacggagtatacccatttataattctgtctaagataactcataaccaaatcagttaagactaatctttcaacaaataccatccagacaagtctcatgcgatataatgttcctagcatatcagatatgcttaggaaggtgccattctccggacagaagtgtacgatgattgaagatctagatgtttttcttaaatatgtccacgactatggcctaattagaatccctatctttgttggattaattgtatgcgactgagagaattttgagatttgatatttaatttttaaaatttttctgttagggcttaatttgtgttatttttaagtaggttttcaaagtatttttaataagttataattttgttttgtgcaattttactgtaacacccttacttttataaaaatattaattttatttacaagcgttaaatgcgaaaaatcatactgtcacctttttattaatacttgaaaatgttcacaactagctagttttcataaaaaaaaaaaacataataaataataa

SEQ ID NO: 320903 - DNA, 1252 bp, Cannabis indica
agctattgaatcgtttggccattgaaacagagaacaaagataaacgaaagagatgtagagaagaaagatgagaaagaagaaagaaatgtaaagagagagaatgagatacgaaagagaagaactcattgcattatgatgagtttgttacagctttatctagaagatgagtacatgacatattcgagatttctcgaggaactgctagtgggatgaaatggacactagtcctcaaagggaaaactaactaaatctttgtcgatgcaattttcacctcccccaactgtcactcgagatcatttgcacacacaagaaaaagggaggtgagcaacctgacaaagcgacacggtatagacaaagttctggttaatcgtacccaatgatacttgctagaaaattttatcgtacaaggctaggtatcagcaaagtacagtctcaagtgtaaaaacttggaaaaatgttgagtcttaagttgagcatttgactataatagactcaccattaagtttcatacagagtttctaagggaaccacatatgagactaaggttgtatatacctataaggctaagacaggattcttgtcaaggtcaaaagaggatagaaaactggccacctgcttggaaccaaagcttaggccggccagggttccatagctttgagaaggtcggccagggtcccatgacctagccaagaaccggccagggtcaccaaacccaggcatgaactggccagcttctagggtgaaaccctagaacatgccagcccccatgaaaaaaccctagggtcggccagatctcaaacaagacccctggggccggccagggttagttttcgaacaaaatgtgtgttttttaaaacttgaacatgctcttcatgtaattcgtgactcaaagagtcaagaatcacaacgaagaccaaaattgaatctttttcatcaacaattcacacactatgcattctaagactatcatgcagatcaaaataccaaaaggactacaatttaacgtgagaatcaaagaatgttcaaagcatagaaaagcttcaatacaacaatggaaaacccaagtacacaagtagagaacggatttgaaagcttacctactagtagaaaccttcgaggaatatgatgggaagcttagatcgtcaaaacaaaggaaaaatcctaagtgttggaggactatggggcatcgtcctcaatggaaagtgaagagctttctttagttgccttttttgaagagagagaatgagaagtg

SEQ ID NO: 320904 - DNA, 1450 bp, Cannabis indica
tacagcaacatacctccaaaaaaaatcttgccagaaagtagggattaagggatggatgcaaggtgtctaatcctgcacggcataacacacagaagtggtatcccaacactacctctaaggagcgttaccaagaaagaagttggatagctattgaaaaaagtgcataaaggctctatgataattacgtcaggggcaaagccaaccgagtgtaaacaggatcaaactgtagcattggcctggcctatagaaggttggtcgaccatgaccttaataggttggccagccatagaatccataatctggtcggccactacctccacatgttgtccatccatagcctcattcaactggtcaggtaatgctacctcaatgtgactagccacctagtcttaccctggccagtctgatcctctagcagtctgctctcatactttttctacaaggaccaagaggtaaacaacatcttgctagcaggatcccttgacaaaatgaaaagaagaagagaccaagccaactcaaagcagcatggctgcccacaaagatttaccaggcccttcgataaacagatctaggaaagaaattcttcgtaagagatttactcctaaaagaatattcttttacagcaaaaatcctgcagcaagcatgtttagaccaaactaaggaggtccaaaccatgttaaaagataacagtaaaggtgcatacaagtctggcgagtacaacgaaaacttggagttagtacttctatccaaacactgaaatagggaacatctcaataagtactctcactagcaaacttgtcaatcagttcctctagtgtttcactgtacagtgacccataaaagagctagtacccattgcttttcagcatggcctcccatcactcttcaatgatggttgttgcgcagtaagtcgcacaagggtagccactacgtgattttaaaagtagacacaaaattgtaagcttttgttacacgtaagactaattgtgtctaaacaacttgctagtaaagttaacttcttaaagttattctttgccagctccacacgtgtacaccagggagcaccccaagaaaattcccaaacaatgaaactttgtgaattgtaagtaaccaagagactgtaagtctgtgcgttcacttggggagcacctacaccgtacaatgcattgaactagcacgtagaacttatgcaaagaaatttttacgcttagaataagctactaaccctgtctctaagtcaagtgcaggtatactttgtgtaaagaccgtttagctttaatctggaaattagcagataattagggtttaattatgaaaattatttattgatattaaaataattatttatgatgatatatttgaatttagaatgcattttgtatgtcaaatatagaaatttcataattttgtattttcggtgcccgacaacattagaacgcggtgtatggct

SEQ ID NO: 320905 - DNA, 586 bp, Cannabis indica
ttacattttataattctaacatggtatcaaaacaaaaaacaaaaataacatcttacgactattcaatctcaaataaaaagaagttgatcaaaacaaaagtagagcctaaaaaaaaaaaaaaagaaccaccaaatccaataatacaatacattacattatattcagaaagagccaccaaaaatccgaaaaaaattgttccaaaaagtagagttaaaagaaccacttgtaattcaaggatagtgagccaaaaaaaaaaaatagaactgtgatcgagttgttcaagatggtaagcaaaaaaaaataagcttaccttattgagggggatgttagagagactcacattgctattgtgtggaaagataatagaatatataagatgcataaactatactcctcccgttaccaatattgattttgatatggaatctcatgattcttgacaattagggattgtttggcttcataatttaaaaactgttttaagttttaaaaaacagaaaacagtttttaaaaactaataggagtcatttggcaaaaaaatttaaaaatagtttttttgaaactgaattttaaaaaaattaaaaaa

SEQ ID NO: 320906 - DNA, 751 bp, Cannabis indica
ggtgaatgaaaaattgacaatcaatggtgcttataattttgttttgtaacagtaagactttgttcaattttctatttaattgtgtaccaatttggaagttatgtctatcataatgtattttgaaaatgagaattaataagaaatttaaaacctacctcatccaagtgttatacaagttgtgctctttattgttcacatgaaaaatttgaaagctagatcacttaaattatctttcttttttctttgttttcaatagtcttaactttattggtatagaagatttttgtactgactcgatgactgaagttaaacatcctcaataccaagtactagtcagctttttttctgtgaatggtatcttgggaggcaaacgtcatccttcctcttgtgccaccttgaggggcatttgttttaaagaaactgctgcaacacatgtctggatccatcttgccactatgacacctatagcatgaatatttttacttgcatttacacctgtaccgtgtcctaggaataacttattctggatattgtatgtatatatagatgaattttgagagcataattacatgccacatggatttgtatttgaaggttttagatattgcttaatcctggtctactatctcaatctgttagcactacttattttccattttggtattctatgcagattgtgcaaaacgtgacccagaggtgagtgaagacagtgagagaacttgcagctactggcagaggagctgaagcgtaa

SEQ ID NO: 320907 - DNA, 1807 bp, Cannabis indica
tcttgttcttatttgtgaaatgtgatcctaattattgaacatggccaagttgatcattatgactacttactgtctttttttataagcttataataactttctctcatcaacaatatatatacttgaacgttattataatctacattggaatctgtttcaaataaataaaaaaagaaagaagctagattggaatcagtcatgcataataatataattgactagctacatcactggtatttataaatcattattaatcaactgattatatatagcatctgtgtttatattatattagatatatgttttgaccgatttgtttctatttttagattaaatttacacattgtgaattttaatttatgggaaatggactcgccaacttgttacgtgaatctttcttttcttgtttatatttatgttctctccatgcatggttgtgctgtcacttcttaaatggttatgtgaacacatgtcttcgtgagcggttaatctctaatgattagttttgcgtgggagtttgtttctttaggggttaactttgttttgtctagtttggttatgttcttcttttggatcaggaggtggtgattcttctatttcagaatttgcttgtggttagttgtatccccatttagttatttcggatttttaatatgcgtctttcttataggtccgagataggattgcatctcggtcctgatcctgtcttagttgtgttcatgtttatcctgaggtgttatttaatagaggaatgttttttagagaaggggatgaccaatttcaaaaagaaagagaataattcagaaattatatcgtgtattctataaatactatgtgaaatttcaaaaataatatgaactcgtggagtatgaaaaatttactctaaaaccacgttaaaaacttttttgttatttatatttattattattgtttattattattctagagtttatttatcctattaagttcatttattagttaacaaaaatcggcgttaacagtgaatatcataaattattattttttaaattataattttaaatagaatataattaaattttgtataattttatttttaatattacacaaaaaaaaaatattagaaacttaaatacaaattgaaaaattaaatcaaacacattctcatcattattcacattcatattacaatcaatactactatgtcaaaaaaaatggtatatgtatgatttatgagataataatatctaagttatactttttgaaacttctataaatcgttaaatgttaagttaataatcatatgatagtccttaattaattaagcttttatttaaaatttatttaaacatactaataaataaatgacacgtatatattgacttaatacttaaatattagaaatttttacaccaaaaatacaaattacacactttattacatataaacctacacacggttaaagcaactttttaccttttctctaaattttattacacatataccacatacacatcacatctatgcaccagtcacgtcaactcccctatcaaccatcatgcatccctcaatcacttccctctctctttttcttttgttttcctttgtatttttttattttcatttctaggtttttttttttttttttgttaaataaacaaataacctccattgttgaaccttaactccccacaattcctcaaccattttccctctcatttttgttcttcaaaattttttctaactcccactaaactatcccataacctttttctctcttttctttttgtttcccaatctttatataaaatggatgtgacccgttctt

SEQ ID NO: 320908 - DNA, 1155 bp, Cannabis indica
cacagatgctaagcccattaacaattgatcaccaacaacatgggctaacacagcaaagaactatccaatcaacccaagttttaataaaaccaataaaatttaatgtaagcccaaataaaagtctaacatcttaaacaatgtcattatatttgcattataatacttcgtattgatatcatataagcaatccaattacaatagcaaatcataataaataaataaataaaactttaaataaatcctagaaatttgctgtgtattagttaataatgattctaaaacttagactagggtaaaacaatggtttgaactttgaagtttataaaagaatatgtggtaatttgggatgggaggacaaagaatcagagaaaatttctattaataaaaaaagaaagaaagaatgaatgacaaagataattaaaaaaaaaaagaaattacatattgttgaaggatttgagcaaaggaagaaagaagaagaacagactttgttcaaacagagagaaaaatgaaaaaaagctcaactttattaatgaactgaaggtgtttatatacaccaagaattacaacagaaccaaaacaatacaaccagaaatttaacaaacaaagtaacagaaaataacagaactttaactaaccaactgtcaaaacagttagttagttaacattccccctcaaatgaaaagaggaggaaacaactttgagtttggccttcaagtaatgaaatctgtctttgggtaaaattttggtcaaaatatcagcaacttgatcgacagaaggaacataacgaactgagacttcaagattgagaatttgatcacgcacaaagtgttgatcaatctcaatatgtttgcaacgagcatggaagacagggttggcagcaagagcagcagcctcttggttgtccacccaaatgattggaatattagcaagagtcacctgcaattcactaaacagggactgaaaccatttaagttcagctgttgtgttagccaaagcgcgaaactcagattttgtagatgaacgagcaacaacaggctgcttcttagcagaccaagagatgagatttggcccaagaaatacagcatagccacctgtagaacgtcgatcatcaaggcaactcgcccaatcagcatcagaattgttggaaattatttt

SEQ ID NO: 320909 - DNA, 1930 bp, Cannabis indica
taaaaccaataaaacttttatttaaataaatactttaatttaaaataataagttaaatcatatttaattatttgaataaatatttataacaagaactgttatagattttttttgaattagatatttaagtttgaagtaaatatctaataaccgattgaggaaatctcttaaccacttgaaagaatctttcaactactttgaaggaatatctcaaccaccataaatattcgtaactacttttcaaattcaaattcaaataaatatttatcttttcaattaattaattaacctaaaaataaatctattgggcacattttataggcacctatcactctgtaataacagagtgaatatgacgccaccaataccttaagaagacagcgacgatgtctttgttcagacaacactttatcttttccctaatttatttaattaataaattttaaaataaattattagtcggccaaaatcaaaatcaatctcgttaaaaatccctttctaattggtaaatgtaaccgagtgattagtcttttctaacttatccataagacttattttctctactcttttcaaaatctcaaatgaagcctcttccccacctttcataacttgacatagaaaatgattctcaaatccttgcatggcttccttcagttgtctaaccaaatcgcccagctttatgtcataaccattattcttaacattattttgaagattaggatcaaaaaaatgtagttaccacaacaccatataatgtttcaccattgtgaggagacttcatttgaggacgaatattaaaagcttatctagttgtaattgtgtcatatggtctagactttgcccaaaaatcttccattgtatgttttaatataaaacaagtgaagtccatgttacgagtaagttttggcacgcattcacgtttcaccatctctatgagtgtttgtatagcttcactattgaaaatagatttcttgctagtataatctccatctttagcaaaccatcaatccattactgatgagtactcgttgataaaatcagtttcttttggaggaaagagaatagtacttgcatcaaaaagattagggtttattaccttatgagttgaacccgtaaaaaaaaacagcccaaattttacttatccccaaattttattaacaataaaattactagattttcaataattcaacaaaggtgtctctgatactacttattaggatttataagacactcaaaaaatatacatttttacacatctaaatatattcttaaaaatactttaatataaaaaaaaatcctaaatcatagaatatttactaaattaaaaaaagaagaatatgaatacagataagcacaaacactaacctgaagtcattgtaagagattgtacagaaagttatgagggataggagagaatacagtaaccgtttcttgggtttcttagggaccactacctatttatagactcatcataaaatgagttttaagtacttataattcgcctctcaataaattataaattaacttatggtatctacacattatttccatgataatttaatatctttttttatgcccacaacataattaatcacttaaatttatatcacattttataatagcatatatattatacatatatacccacaataggattttaatccaacacttttaattttcgtaacttatatccacatgtcatgtccatatttaatgctcgaaatatggacatatcaccatgcttccataccagagtccccaaatttgaataattacatttttttacatacacaaaggccccaaaattttaaaaactttcaatttatatataaaaattttaaacatatatcgcatatgtttagggccggccctgacttttagtgggccatagaaaaaaatttattttgggcccttatttagaaaaagaaat

SEQ ID NO: 320910 - DNA, 1029 bp, Cannabis indica
attatacactaagtgcttccgcagttgatatgtgtcgcttttgtcttcctatatatagcgtacttgatgcctcgctatttgcacttagcgacatatggtttctcgctaatatactaagtaagtttgtatattgattcctcgcataagaccttacagtcagcatgttacaaatatacttacttacgcaattaatgagttattccataaaaagcgatttcattgatccatattccctttatattgacacgtgtcctctactgaattacaaagggtattttcatcataatctgctttttgaaaagacgcgtcctttgattttggcggctgtatggtttcaagagttattatgaatcgtttcttcatattttaccctactcctaaccgttagatttcctaatccttggccttcttgtcactggactttatgtataaaagggcggctcaagctttccatttttcacaatcttctagttttttatgagatccatcttgagactggattatctgttttttgctaaaatgtcccatctgagttcagaggttcaccctcccaaattcatatcactaggatgcaccaaccattttccctctccatttgttcccaaggacttgaaacctcaattggaaccaaaaataatggattctaaggctgaggagcttccgactaatccaaactaagggaaccccttagatcgttatgggcgatcttcacaagtgattcttgtgggtaggtattatctcttatgaatggtggtttgagtcggattatttatattttttgttgctctattgacccttctcctttttttatgtctccgcaggaatagacatagatcttgtgggcgatcttagaggtccttcccaggctgacagggaatcccgaaggaaagttggcgcagtttcaaatgaatccaggagggaagttggcgtggtttctatcagagaatccaaccaacccaagacccaaaccttcaccagaagaccattgtgccaacctctctctagtatcgagaaatttcctgaggctgg

SEQ ID NO: 320911 - DNA, 3680 bp, Cannabis indica
ttaagtaggtggccttctgagcggactttgctcaaaggtttggaaaaaaaacgactagcactcaggtcggatgaccatctttaatgtatagtcagtctagaaaaacaactgttttatgttttaataatctaaatatcagttagattatgtaattgcttttattattcaataaatgtatgttactacgttaataacacatccagactcataaatgaataaagatataaattatcattctaattgtgtctattattttcttttctatagcaagttatgtaattaccattaaaaatttgtacaaagggtctgcccgaacctggtagccaaaaagaaaaaattaaacttgtacgatgcaagtgagcaagagtcctaagtctgctcgatcacttggggggtaactatacttgtataaaggcataggttaatagcaagctcgaaaaacaaaacatttgcatgtataattatttaaacataagagaaaatatttattttgaaaaataacaaagcatgataactctggaattacaagctgcccagccagctagttatcttaaaacaaaatgaaatattatccaagttcaaaatccacttggttggccatattgtactaaaaaaatgcccctaggccaaactgaaaataaaaaagaaaaaaaacaagaaaaactacacttggagtcctcacttctttgtacaggtcagaagtatcatcagcggctgggttctcattgctttggttggccagagcatcgatgttgacttgccttggattcttctttgttttttggggccttaaaaattattcacttatttatgaaaaattttatgcatttaaaagttcatatactgtagtgattatgcattttttttgttatcaatattgtattagaattctgaaatactatgatgatttatgaaatatatatttaagtaattttgttatcttaaattagatttttgacatttcaaatacaaaagaattaagtttactaaactttagagtcccatgtagaccaattgtattgtaccatgtaggccgatcggaatgggccacgtggacaaaccggtgtataccacatggactcattcttagatgtcatgtttcatttgccaatgacatgtaaaccaatcttcaaatgccaagtggctctattattgtatgtcatgtgtgccactatggtagccatgtcagctataatatgatagaacatgtcatgccacctaagatgacatgtcatcatccacatcacatgaagacttgtcgtctgtttcacaatttagtggggtccacaacttattttacctacaaatattaatgtgtagatggtgactctttccccataaatatttacctaccaacatttaccaattagttattcgtaagtaaacatcatttcctaccaataatgatggtttacctacaaatcttatttgtaggtgaataccctttttttcttgaagtgaagcccttctactgagctataaaggatagaaaggcagtctgaaaaaaatgaggtaagcagaaggaattaaagaataagggatacaaaaaattttacaaagttgataataaccagctgtaggagatcaacacttcttgtcataaggctttagaaattgcccttgttgatcagatctcactcttcttgctgaaaggttttgaaatagcaccaattttgtgtagcgtactacgagcagggctgcgagccttcaacacctgtgaaaggtggcagggggcaagaaggctctaggaagaccatctcaggttgagaccctgagaatttgacctaatggatagacccccaaggcatatccactggaactcacagctactagcactgaagaattggcaataattttttctggctcgatcgaatgcttggttaaaccaagttttttaccagtagtctttttaatcctctttgaaactaaggtttgacctaaaagtagcttccactgaggtggtcctcttcttacagctcttggtaggaccagtcggactgcaaggaggaactttaaagtcctagtctgcgagacaaaaaagaccacatcaaaacttctataaataaaaatataaaggtggcgaggctaaattacccacttaaaatatcgccataatcatcggatgaggaggaactgctataataattactaaattccctagatccagtaatcatataaatatcaaaaggattaaggggagacatatcccaatttgattagctggccctatcaaagttagttccatactgcctagagatcccaaagtaagaattattacaacttaattgggcatgatgttcagggtacccactatcgaatctatgggcgattaggttaatgcagttctaaatgaagaatttatattgactatccttaaactgaactaagtttgttcgattaaccctaagaacagtaggagaccatccacattgactgaaattattacctcgggaggcctcgtctttaggttcctgagtggttatattcctaaggtaatgaatgtgagccacatagtcctgatcttcttcttcttcaggcacgagaacttgctgctaatttgaaaacttgagggttttgcaatcattagtgcactgatctctgttgagaagggcatgcttttaaattattgtcgtgcaacaagaagtttgccgctcgtaggccatagggaagattaagaagaatctcatgtctttccttgatttctggggtggggataggcctcttggtgatcattggaaaaatggcaaaaagaaagaattagttcaagtacaaaaaataataactcaaaacaatgaatttgagagaaattaatacttacatacaattttgaatcttgtggtgttgattggatataaactagtagtccaaaagaattcatccttgaactccttttctttgggcagcctcacaatgatcttgcaatcactagtatggatcccaagataacaggagccccctgctccattcttccttgcaaaacaggctttgacagaatagaaatagagaatttctaagggtattggacactcccattttcaaatatgaaagggattttaaacaggctaaaatcctatatgaatttcgggcaagttgaaatggtgcgattccaaggtagttacagaactctttaaagtaatccttgaggggaagaacttctccaacccttatatgctttacactccaagcacctattttggaaggctcgctagcgcttcaaccttcgtctatatataggttttcaggtgggtaacaactaaattctccctaagcaattgagtggatgtgacattctttctcattccttatacaacatgatcttaaaatgtctccaacataaaggccaatgcatctaaccctggattcgatcaattctgcctcaaaagtgacagaatgattccatggagtcttggatttgcgagccttgtgagccataagttcaaattctagtcatctggtgggaaagtaacaatgattggtagcaaaaatattggcctcgctaaagggataataagtaaactaggccattctagccaagtagcttttttcaaacaacagcatttacccttaatgatttctagcaaaaatcttctatagtggttagaagcttcttcctaattagacctaatgaggttgtaaagcccgcttagttaatttggaaattagcagttatttatgttaat

SEQ ID NO: 320912 - DNA, 1557 bp, Cannabis indica
ttttggacttaacagattttgtacacattaaaccataaacacgaaaactacatgtaaacataaatgatttctaatcttctattgataacaaatcagattgtattgaaatggattttatttagggcataaaatcccaacaccaccaagcacctcttcgacccttattgtttataggacgagcctcagtatattcctcctcagcatagtccaagccagcttccgggacttctcagatcttagagataggttctccctcctcgttgtagccaccaaaagtcagcacccgaactgcctcctcctcctcttcctcttctccctcagccttaggaggggtagcaggacaaagctcgccctggtcctcaaattcttggacttcaaagtccctttcagttatctctccttctttgatcaaaggcctggcttgttccacaacaattgcagagaacagactagcaaagtgtgggtcactctctaaagctttcctcattgtttgctttgtctgtgccatcattgtatgcttgggatgagatttaagttcagttgtatgtcgagaaacgattacaacaaactcaacaatagcagttcccttagcactggagttggacgggcttcgggcaaagtgtcatcaacaccaggttgaaccttgtacgctcaataagcaagaaaataatgcctccaacctttctttaactcccagacgaagcatctctacccttatccacatatttggttggggtaccagtgatattgcacctcgggctccggcgatagcgtgtgttcactacttttctcccaatcctcaaaactagaatttgagatattgtcactggatgaagatgaactggcacggagtcgatgatggccttcgtataatagttggagtaaatcctgatcaatttggtgtttgcctccccaaatattactagggttcatctacaaaagatgggagataagaatgtaagagttggacggagggaaagatgaaaaatagattgtatatgccaccaagccagattaagaacaaaaagaaagggtgatctaagagagaattactcagagatccattgtaagagctttagagagagaatactttgttctttgtctcacaagtcaatacaacttaaaggggaatagactattaccactaaccgaacttctaaaaattctggtattttctttattacagtatttgctttctattatttattttatttaatcgcgttaatttatactcactgttgttggctagaagcaaggtaaacactaagatatataagaaaaagaatattaaattaaaattaaaataatattattaatttaacttattgataattaaaagaacagtttacatattattaatattatgaataataatgagaatggaaaaaataacaaatcataatttatttattcaaattaataaataatatttataatatatatgtctcttatacaattaaaaatatttaaatgtatataataatcaattattataaaaggaaaaagatgtatattttactattaaaaaattaagattttttataaataaatataaaa

SEQ ID NO: 320913 - DNA, 2437 bp, Cannabis indica
cctactgccgaacagacatatacaaaaaaaatataaagagaaggcaatcaaatagcgggagtcccaggcttttggtaaggatcaactaggtctgaaggagccggaggatcattagtctgggcggaaggagcatcaacattctgatcggtaggagaagttgaagtggtcgcctcacagttctcattggccccctgagccatgcagtaatcaagatacatgtctttggacatgctgaggtagtcaaaattccctttgggattggccttctagaagtcatcaaaaatctcgagaccggctgtctctaaggtattcgcatccctctcaggcttctccaccttggaattttggctctcaacctctttcttaagccctccaacctctgtctcaagttctgcctccctggtcttcttgtccttggcctcatcctccaacctgcgaagaagagtccgaagacactctccctcatctcggagactagtaatttcctgagataaagaaacattatctgcctcaagctgcgtgctcgatggcatatcctgcagctccttagtcaactcagcaaccctggtctcagttgcaaggagtttcttatttgcctctccaagctccttcctcacgacctcgagctgagctcgcacatccacagcgtctttcttggccaagtccacgtccctttgtatcgtgttagaagttgcaaggttcttgacagcagccaatttgtcttgagagtaggcataagccatcttcactccagcctgtacggagaatgcattctgaactatccaaaggagaatgaaagaaaagtgatagagggaacttacttgagaaatttccttcagaactcctcccaagactagctccaatgacaattcactatccaccccgatcagttcttcactcactttagggagcgaccgagccacgtagtggtgaagcatatctttgcctctcctggcgtctgtgcagaacaccagagttggggtaggggccctaacttgttcgaattcgcccttgacttgctcagatccagtcttagcttgctcagatccgtccgaactccctctcgagaacttttggacttagataccttcagggttgaagggtccacaataggttgctcctcggagagatcaatgacctcatcaactagccttttctccttggacggagtctcactacctttagacattttggcctaaggagacagacccgacctatcccctattctcttcttcagagcttgaatcatcttctgagacatttttgtatggaccaaataatacagtcaaaagaagatacaaaaaatgagaagacataaagatcaggaaaaattaatgcaagttgaagtactctgcacgctggcgggagcattctcccgaacaattaccgatggagcgtcatcatccaaagagtcttcctgctcctccagggcggcttttccttttcctttgacacggatttatgacttagcaggcatgccatgttccctaatccggatagtgtgttctatttgtgcttgctcgatcgggagagttttcttcttcttgcgtggcctctcttgctctgaatattcttgagcctctctctcctgctcagaatattcttgagcatactatttggctccaacatcaccctacaacttagcctcacgcttcagttgaatgagctccttctcctactcgactccctcagctcagcccgacttggatttctttttcttctccttcacagacttgggtataaaatctgctgggtaaagctgttacttcacaaagttgggctctgtggtcaacaaagtgatattctgagtagcctccggcagttggagaattttatgggccctttccctaagccttagtgtgaagggaggacggtagtatgcggggatctactgaaaccgagtatgagcagtctccatgccagtgacgaagtaatactcgtgaacaaaatgcccaatttttctatcctccatgtccacggtgcctgtcagccacttgttgtccgaatgagagaacttaaagtaccctaacctgctctacttgggggtagacttcaaatcaaagagccagttgatatcgtgcgaagacggctcaccccatccttgaatagcatagaggatgcacaaggcaaataagtacttgatgcccttgggtgtgaactaggtcggacaaaggtggttgtaatttgcaacccttttgaagtgtgggtgcaaaggcaacattgccccttattttgtgtggcactcgactaggcacagtacccttccttcgggctagttgcccggtgattggtagaaggaagaaagcactcaagttcacccagatagccttctccaaattttttaggtggtcctcaattacgagtgatggaggacacacccatttagccctcatggcacctttcctcctatgagggaccgcctcggcatactcttggg

SEQ ID NO: 320914 - DNA, 557 bp, Cannabis indica
ccactttatgccaatatcaactactactggtgggagcttcataatcctactagtttttatccctaaggtacatactatgttatgtgtctatttgacctacaaattgtcttacttagttgttattgcccaaacatatttccttattgcaacattattccattggacaattctcctaaagtccaaacctccttcactattaggcttacaaaactcctcctaaaaaatatatccaggacatcaaacatggaatctccatgccataaaaaatcctagaaaataacattaattttgtgaagtattatcttagacaaaatcataatttacaccaataagcatgaatagtgatgagtaccgagttggttgatgcaacacactagggctgttcattaagtattcgatccgattcaattcgcacgatccaatccaatccaattcaatccgtaaaatacggatatcccacttgtgcggattagattagattgaaaaatctaaaatctgcacttgtgtggattggatgttgtttgacctcaaaaagtaaccgatccaatccaattcac

SEQ ID NO: 320915 - DNA, 1670 bp, Cannabis indica
agggcacaaaacccaacatcatgaacatgtaggttgtggctaatcttcaggtatctctattcgatgcataatcaacatccacgaaccctttgaattctagtttttctttatcttcctcataggtcagaccataatcccatatgccattcaagtaccttaataaccatttgaaggcatttcaatattcaatgttcggattggacattaaccgacttaggattcttagagcatgagcaatgttcggtctggtgctcaccattacatacattaagcatcctaacaccactgcataaggtacatctttcatttcctctaactctttagcactagtagtacattgttcttttgacaggatgaactgtctacccaatggtatggatgtactctttgcatcttccatgttgaacttttgtatagctttcttgatgtatctagattgcttcaagctcattgttcctttcttcttgttccttaaaactttaataccaaggatcttctaaaccggtcctacctctttcatctcaaattctctcttgagtttggatttgatatactcttgatcaatgattggtctttgctcatgatgagcatgtcatccacaaagagcagtaagaacacagttgtagatgactttagattttcatagtataaacagtgatcataggcaaatgatgtgaacccaatttgttgtatgtaggtatcaaaccttttattccattatatatcttggagattattttaagccatataaggacctattgagcttgtataccaattcaacttgttgacccgatttttcatcaaaggatataagaacatcgtaatcaagcaagatgaacacaagaaatagttaatcaaagtaaaacaatttgtgaaagaaaatttgacaaagatcacgagattttttatagttgttcaccccctttcagcagtaataggctagtcatcttagagtgtttattgatcttcatgcttgaggagagttctccaaagttatgttctttaagagttcaatcctcaagtgagtttttagaatgatagagtgggagctcatgagaattatttcatgagaatcaaaatcgaggtccctttacaagtgacttcactctccttatataggttttcaacaagaatttaagatctcttaaccctagaaacaccttttgtaattatggttgggctaggttttaaatacaaaatcacatttcaaaataaatatctttaaaaaaaagataaaaattccacatgttgacatatttctatcacgggtaacacatgtttaggccatgttgttggtaggtcacgagaagcatgagctgctaaggtgaggaccttcccttggacattgatgacaagcatgctaaagccctccttgggccaatgtgatggatgtgtgaggcgtcgaagttcccttttgggtcaagatgatgttgaggccgagatgaccattttggtctgaggtgatggaattatcctttgggctgtagtgatggtgagatgattgagccaagatgatggtgagagaatggtgaggtcgaggtgatgagagcctacccaccacctctgcaactcgaattctgaccaactccacgaaacataaagcaagctctctgtcaatgatatacaaggaagagagagagagagagagagagagagagagagagagagag

SEQ ID NO: 320916 - DNA, 1256 bp, Cannabis indica
ttttttttttaatttttgatgtattagataacggtagcaaattacaattcaccaacagcaacatcatcatcatccacaacatcagtaccaagatcccatcattaattcacatgaaacatttatttcctagtttcttggaattatttattattttattgtttttgaacaaagttagttattatagttgtgaactgagagtaattagttgaattgtttggcagtttagtataatgccattttttgtaatcaatttttgagtctacagcttttgtttattgattcaatccaagaattctttgtcaaaatatttgtaggaatgaaatgaatctatatatcttcgagtaatttgacaaagattgaataagaacacaaccttgtattgttatatctcaattaatgtatatttctttttgtcaaaaatcagaaaaatattatttgacctcccaaaaaaatacggtacaaaaataactataatcataataattaaaattaataatttacttgctattttggtattgtacattttttatttttacttaaaaaaaaaatattctatatctttgtaaaatatatatcaattattatgtagattttagatatttaagtaaacacattaaattatcactataatactatatgaaataatttcacttattttgaaataatgtaagaatttctttttaatgatatagggaacaccttatttaatttgtatgttttaggaaatatatatgtcactataaataaccttacatttaatataaaaaaaataaagaaattgtgactagaagtacattattaaattatcactatatcgtgatgaaattacaaattttattattttttgtactatctctgcaaaagaattatttaattaaaaaattaaagaaaaaattagaaaaatatgagaaaaaaaaatagataaaattaattaatcagttaccttgtattattcttctcatattttatgggaattttacaaaaatactgctttttgaccaaaactttacatttttactgggacacggcaaaaacaacttttgtactgcccaagcccaatttcattacttttgtactgcccaagcccaacatcatttcatttatactgtgtgtgtggggaaacaaccttcttcgtgtgtggggagacgccggagacggaaatcaccaagaaaaaaccattaaaaccggcaagaataaacaaaagcagtaaaatcgacgtcaataaataatcatggcaaaacaacagtaaaacaaca

SEQ ID NO: 320917 - DNA, 1347 bp, Cannabis indica
atttttttatgtatttttttttgtacggttgttttttagtttaggtgtatttttctgttatttttatgtgtttttttactaagattgatgttttgctatttttctgttgatttatagctgtctttttgttatttcatagttatttttatgttgttgtttatgtattctatagttgttattctgttatttttatgtatttttttagtacagttattgtttggttatgtgtattttttatcgtgtatattttcagtttatttcattttatgtatctattgttgtatgtatatgcattttgttttgctatttttatgttggcttttagttgtttttaagtgggttccataattttttttgttgaacagttattttttagttgtttttttatttatgtttatattttatgatgtatatttttaatttattcctatttctcgagatttttggaaacagaataaaaacaataagaactgaagaaataataactgacagagaaagtataataaggaacacacatgtttttatgtggttggggcgttaacaagccttagtccacgagtcacttttattcagtaatgtattacttataataatctcccaagtaccagagtgtatattcgtatattcgtccgagcaaaattacgtatgatcattcaacccctaatccatgagattaattggatatttatagtagttggagaattatattagggttttcccttttccctctactggggaatttacaactgaacaatgtccatgagctcactcatgaagtccagcccatgaaggatacaatctgctgactaagcgaattgggcttgagttgatcaggtcaaaaccatattcgattataatgggagaatattctgaaacaactgccttgtgcatatgatggaaagtttcctctttaatctcaatatgatattattttccattctaacagctgttgtttccttatttataggaggaaacaaatagggaaactagaagagtcttccagaaatgatgcacttccccctccgggctcacgactccagaactgtcttctgaactcaatctgtagaaggcataaggtatcctgagtacagaacaaaggtaacttttagaaggacacgtttggatggcttggcccactttaccatttatgagagtcctacttatgggtttggaatgctggtacggaatcctcatgtcctgtaatgaccgcttttagtaattgggattagtaaaggcaattagcactaatttctgttatttttataattatttatgaattgaattatttgtggaccccaatattagaaatgagcattagagttataatttctcaatttcggagatttt

SEQ ID NO: 320918 - DNA, 2936 bp, Cannabis indica
gagtttttctcttaaaaacgcaatctaaaagttgctaaaaacgaacactaaaagtcctatgtatactccataaaaatcttatgatctaaaaaagataaaatttggaaaaatatggaatcgtgctctcatcgcgccgaaggttgaggctcgtcatggccacgacttgttgctaaaaaaaattctattatatgttcagattagtatttcagccataacttcttcaatacaactcgaaattagacgattcaagatgatttaaaaatctaagaactagatatataacttttatgttcagctccaagttcagttttgcttctaagattctcaaaatttacaattaagtcatgtcttgtaagaccgagctcgccggcttccactattttccatcaaaatgtactaaaattcctccaaatgactccaaatgcatgattagtcttaaaaatagcctaacaaattaaaatcacactaatcaataatttaaagaatcaatttaagaatagcaatacataaattggccatatttataagacaaaataacgacttatcacaagcacaaggactttgtttcaaaccatataaagatttgttaaagcaaaaaaactcgccgtaactcccccttagaaataaacataggatgttgctccatatatacctcttcttgaagatctccatgaaaaaaagtatttcttatatcaagttgatgtaaaggccaatggtgagttttcaccatggaaatgaaaagtcgaacagatgttagtttagcaacaagagaaaaagtatcactatagtcgactccataggtttaagcataacccttagcaacaagaagagcctttaatcgagcaattgttatatctggattaactttgaccgcgaatacccattttcaccctatggcgtgatttcctgaacgtaaaataaccaagtcccaagtaccattcgtatctaaagcattaatctcttctatcattgcatcaagccaaccagattgagatagtgcttcataaacatttttaggtatcaaaatataatcgagagaagcaaccaaggagcaagaagatgaggacaaatgattataaaaaataaaagaagaaataggattggtacatttgtgtttacttttacgcagtgcaatgggaggatcattgctagggtccagatctgatgaaaaatacgtaggtgcaagacatgaaataagaagcagaggaggcagatgtgtgggacgcttggagtacactttaataggcagaggaggttcttttgattctattttgatacctaaaactgttcgtgaagcattgtatcaagaatgtagatgcttccagattcatgtcctttactaataatttatttcgtcataagatcctgaaataagcaatgatcaagagaaaaaagatatacaatagctaagatcacaagtaagttggctaacaaagatcaaattaaaagaaaaattaagtatatataagatggatgacaaatgaagcattaaagtatgagtaattataccagacccaacaacatgagatggtgacccatcagctaaggtaatagtagaagtggaagcgtgaggttgaagattataaaataaactagtattacctgttatatggtctatagcactagaatcaatgacccatttggaagataaggaaagaagacacgaatttgatttacctaaataaacaataatagtgatagaaaaagatgaatacttaagagactcctgatactgtaagaatttgacatattcaatcgtagaaataagaattagcattctagaagccattacaaatattatgtttgtcccaccaaactaacttaaacaacaaaccaaccaataaatccgataaaagggcaaacatattaagaccacaagttgggaacaaaaagagatactgagctaacactcaaaatctcacaacaaaaataggagatcccaaatctttacaagcacaaatcaacgaagcatataaggcgtactcaaacacgaagaaaagagaaataccaaaccagaacttacgagtataaaatagatgcgaatagtcgagagaggagccgaaaaaggattggagaccgaccaccgttacaaaaatgttggatgcgcccacacgcactggcgcgtggggtgcgtgacagcaacaatgggtggcgctgacaacaacaatgggtggtgcgtgagctgcacgtgctaggattttggtgaccagacttcgagtttggcaaatcgacaactaggcaagatttctgaatgggcggtgagaataaaagatcactccaattagggttttcaaaaaaatgacccttgaaaatgaagaaaatcaaatcctaattacaaaccccaatttatgatgaaccgtaattttgaattttaaatcccaatcctaaactctgccttgataccatgtagaaaatggtaaatgaaaattatgtataattcaatagattcaatagaataacaagtaatatatacaaacctagagaaacttaaaaatgaaactaggaaagaaataagaaactaagtaattacaattattcctaattcctacagctaatatacaacttaagtatattctaacaattccaatgaccaataagttcctggatgagcttagcactctttactgaatagagtccaaaagattctttacaccagtaccaagagtctcattcttaatataatatagactaacccatactttgtaaagcatgttattagttatctcatgtttgggtttctctaaatattttatattgtctgttaggatttcttttcctaaatccttagccatctgatattaatttttctttagctaggcctgctgaccgtccctaagctggcttgcttgaggtctatggttttgctactgtaattgtttttagtcttttttgacatagttttgagtatattttatttaggttattgcgattagtct

SEQ ID NO: 320919 - DNA, 1778 bp, Cannabis indica
gtttctactttttaaccctaattacccctagatcaatctcaatcgtcagatcaaataactccctcatctgacgactgtcgtacatcacggattacaatccgtgaaagtacaacaacgagacaaaatcatatccctaaatttgttatattatgcatattttttaattcttagttatcaaaatccttcacagaaactaaaacaaagcaaaacctttatttttaatatttttggggcttttcatattcaattctcataaagcaatgtctacaaaaattatgctcaaatctttcacatttcacactcagcaaaatatgtatcatagattatgattcataccacataaccttgcaaatttgacaattgacgaagaaaaaggagtcatgtcgcaaaattcaaataaaaaaaaaactctaaataaattttttaataataaataaaaaaaaatatagataaattacaatgcacaattacattaatagatataccttaccgcttgcaccgagataatttatcttctcgctgaaacttgtgtctgacaatgagaatttatcataaaactgtgttccttccaaactccaatcgttaattatctaatgaaaaagaacaccttttaacttcatcaatggaagtcaccaaacaaacaaagtctatcaccaagtctttattattttttttatgaaaattttgacactaaaatctttcaaaaggatatttataatacttctccttattaatccttattaagcttaacttttttttttaatttttttttggcaattattagtattttttttaaaaatcttttttagagtttcaaattaggggctggtgtattacatatgtaattactaattttctttttcttttaatttaaaaaaaagtaagtaactttcattttgctgatatcacaaaattattaaaaaaaataataataatataaaaggaattaattaaatattggtattaaatacgggagtgacacataataaaaaaaatatatgtatgtacatacgttttttgtgactccccctaagcattatccaaaatgatttattacatttaaaaaaaatcgaaacacgtttttagcataataaattttttataattttttaaaagtttattaactcgtgtttgtgacttcatccagctaagagtttgttcgattagaaattgtctgtataaattctttgattgattgaaacatagttgaatatctcccaatctttctctttatctttcatttctttccttgtttctctttctttcacattctgatcaatatgtcgagatacattaatatggtctcaaagcggaatttttcactattaatggcgttgctactatctctgaccatgggggatctctcaattcagggatcaattctggtgcaccacaattgaactgatcgaagaacaaataaattgtggattcctcgactgtgtacttcaaccacaatctcttaatcagacttaatgatcataactatctcctatagaaatagcaggttatggccagcttccatacgaggaaagaggttgttgcacttcatctaaggagctgctccactaccacagttactctccaataaggattgagcttccattgttagaacttgttttactaagattttaatttactaacatgtttgattatcacaaaaataatatcctaaaatatgaaaattttaaaacgacataacacatataaagtttaagattcctcacatttatgacaacagaaataagtgacttctgcttaatcactctaacccttgattc

SEQ ID NO: 320920 - DNA, 927 bp, Cannabis indica
tgctgaatgccagggcccagtggccattcgttgttgttgtttttatacgtatatcatacaacagatgctacaaaaatgcatcaatggtccaacatgacgataatgtgttgctatgttattatgtagtatgcacaaaacacaatacaaataggttctcctggcaagatactatacatgttatttgtatgatttttaagagtataatgacattaattaatcaagcgcatagctcgtaacagcaattgatgcactcaaagcaagcaagggcagtgcatatttgcgtcaatagaattgcgctccgattgttgacgtacgaacaagtctgaatgaaacacatacaacaaatcttgtcaataactctgctgcagcatttcccagccgtcttcaccagcacatcagttacttctgcctttggttcttccatcaccttattagcagccgtggctgctaagtctccgaatcccataccaaaggttcccagtgataacatcttctctatgttcatctccgccaccttctgctgcttacctttgttcttcacctattagaatattgaaagtagttgttggcaaatgaaagaaggcaagtgatgatatcccttttttgtctaatttaggaatagactaattagtaatttttttccataaactttcacatgtactaaatcgtgcctcctaaatttttttggccgttaaaaattccccctgaactattgagattattaaatttaaaaacttttgtctaattttagtaaaaaaattctaacatgaatgaaagttcaaatggcatgatttagtacatatcaaagtttgaagtgcatgatttggtagatattaaagtctggagagcatggttaagtttagtacataaacaatcactgaaataataaattgaatgaaattagacaaaagtccttaaatttaacaa

SEQ ID NO: 320921 - DNA, 1110 bp, Cannabis indica
ttaatgcaatttagtagtaggtccacacatttaaatatatgtaaaaatctgatatatttcgttatatcaacatataatattaacaagtatattagacactatagtgttaattagtacttagcattattaatactagctaggtgtaataatattgataacaaagtaaaatgaatttacttgtctagaaagtaaacttttctaattaattatatctcaatttattattattatttttgcttttccttttagttaagtcatttttttttataaaaattattaaattaaaatatgtaaaattacaataataatatcatttttttaaaatggataatgtgatccttgtgataatatgagatataatttatatccttgagcatttatatacatgaaaaatatatagtacacacttctaatttattttggcattcatataatcttttattcaattattttaataattatgtattttgtacttatttaaaaacatcagtacgtacattctttatttttttttttaaataatttatatttttacaaataaaattcaaaacaattacttactatgtgtaataacatatttaaaccttcaatgctataaattatttttaattttttaaaaatttataagtgattttaaatactaaattaaatactggtgtgctattatatcaaaatagatagggcactgctatgggacactaaagtacctaatatctctatgacataacgtcttataattagttagggttttctataatttttattaaatttaaataagtgggacacaatattaaattacacctcataagatactaggcatcatgggtgctctttaaaagttctcaaacaaattagagtatatcaaaaaagtattgttattgagcactagtagtgtctagcaccttttataggtggtgtcccataattagttaacgatattttctaaaagttattctattaagttatatgaaatctgatacttaattatactaaagcggtatgctatcaataaatatgtcaaacaccaatacagtagaacctctatccaagatacacttgggaccaagaaaataaatattctaattgagaggttataagtaaatagagtta

SEQ ID NO: 320922 - DNA, 506 bp, Cannabis indica
aaaataacttatatattatatctatttagatatatattataattatatatttaaaatcctaattaaataattagataaaatggatccatacatattttatatttttaaatattgaaattaacttttcatttatgttttcttcctttcgtggcttattatataactatagaaatccttattgctagtgcttttgttttttctctaagaaataaaaatttctcttcgtttctgaattgattaattatgaagaagagaaatgttaataaaaataccgtgtttaattactatttttatacttattcatgtaatattcactatttaagctcatcctattataaacatgtttaaataggcaaacgtgtgtactattccataacttcatgtatttgattgcattattttactctattatctatacatattgttgaatgtcttgattacttagtttttttttcgtgatgaatatctaaaaatatttattattaattattatatttttttttttt

SEQ ID NO: 320923 - DNA, 811 bp, Cannabis indica
agatcctggtaaaataatttcgaacaaatattgatatagatgtatctctgcttttatattctgattttgtcaaatttttatctaagctctaatttatgtactatggtttcccttatctcttgctttgaatcgatttctaaagcttgaaatttcatggaggtgtgcttgaaatgttgccagacttgtacatacatgcgacgatagtaattatcatctttttttctttttatatatagtttttcagtttcgatcaatttcttaatttttattcttctcttgcttttagttgatttatgttaattcattaatcctagtttgtgcttatggtttgagcaatgtaatgtttattaaattaaaattgaacatcagaaagttgcattaatagtttgaatgtagatgtacttgtgaggagttcttcaatttagttatatacttgaaaattcttgaatttaattgcaagacaattatttgataaaatgtctcaaagagataatttattgaagctaaagaaatagttgaggaagcagagaagcagagtaagactaatggtttttcttttgaagcaaccttccaaattacaagctttctttttattgatgtctttttttcttttctttcaatcaatgattcaacattacactgcacagagtgacactaatagtaatatgttagaataattttattgagcgctaacttttactagacacagagtaacaacaaaaattcaaaagattaatgaattttgtatctaatagatatgtggaaattctcattagatacatatttatatgctaagaatgctttattgaga

SEQ ID NO: 320924 - DNA, 2297 bp, Cannabis indica
tcagttgtagaccgacactaatattgtatacatattttttatattttatcttttgctttagtttatgttttagcatcttatagataacagatcctaattaataattatttattttggtagataattgaagtaaaaaagtgtagcttgacttttgcgttggtgaacaagtttgaccaaacacgttaaccgacaaaaaaatcccttttgtaacagtatttttttaattttgtgtcaaaatttaacattatgctaatcgtcaattctttcatttttcctctacacaatttaaatattctttatttttgatatatctcatttttttaaaaaaaaaatatattaactacaatagagtagtgtttactcaaaaattgactctggtgacatggacattaatatttgacacgtagcaagaaggaaaacattcgcagagttaagtaccccgagtcatagtattcaactttaggaaggctccttaattctgcacctaagttgacaccctaggctaagtttcaattttcaagtccatcttagtgcaaatggctcaaaatttgtacttacacatgaataagaccttccatgaacattcttgaggcaccagaatcaaaataggaacacattccactggacgcaactgggcacccagcctcaatgttaaccttatgatgcacctagcacccaagttgacatattgtcagcctatggtgcttccaactaatttattttctaaaaatgttccccatgaattttctttgtcttcatcaaaaatgagaaaataggtgctttcgggaaagaaatgcatcaacttggaggccaaactggtggcgtagggcccaggttgatgttgggctttgtcattggcacctaggttggcatatttttaacctgggccatatttaaagatgattatgatgaagtctttaggctctgttttcatcaacaattaagatacatttgcttttaggaaaaaaatacagccatctaggagccagaataaagacctagcgcccatgttaactaggagctaggttgtatgaggtttatgaaaccaaattagcaaccctaactagtttaattatgtataatgaggaagtatattagtatataatttaatatatggaattaaattgataaattgcattttaagagcttgttggtgtattagggctattttcgtaattttgactcgagaagggtaaaattgtaattttatgatatgtcatgcttatgggctatattattatatagtatgtgtgttctgtctatctgtaagtgttttttgacaagtcggcgcagtatagtcacaattgggtattttaggccgaaccaagttgggggcccaaaatacatttttgggattttatttttgtattattgtgataaatgaggaattttgaaacattgtgttatatatgtgtgaatagaatgaatatttttcccttgtttgcatatatgtggatatatttggctttgggagtattttggtcatctgacaatttaatgtattattcaacaaaagtaatttttggaaattagaagaaaccaaattttgattttgaacctcttggccgaccctctctctctcccttaatctcttcacattaatttcttcgattttgaaaaaaaaaattgattggagtggattttagagagattactagcttgaagcttgtggattgtggtaaagcttctaaaccctttttgttgatattaaattcttataattgaatactctttcaattggtgtttgatgatgttcatgattttcttgaagtattgatgcatgttgtgatcttaaattgaaattttgatgattttagtgtattcaagcttttggggctatatagcttgtatctagatggttttgtatgattttagggttgtttcacatgttgaatctctgggtttaaagctgggatttcttgtttcctttaatggtttgaaggctttgaaattcaagcttaaatcatgtgtaatgtgtagattatgttcatcctttgggtatgttgtgaaagtgattttaatctttgttttggcttagaattgttgtgtaaggtatgagagatataaaatttgagtttatgaatgggtttgtttgagttttggtatgaaaaatttggcatttttataccttcaaaatttttttactgggttttccgaaccaagtggccgcggctggattttcggtcaacgcgaccaaaacctatgagagagccatccaattttcctgattttgttttggccataacttttgatttgagactccattttggatgttcattattgttgggttttatgcc

SEQ ID NO: 320925 - DNA, 1164 bp, Cannabis indica
gcataaaacccaacaattaatttgtacaaattagtggagggtctaaattttgatattgggggttttattaggggccaaaaatgaaattttcctattaaaaataccaattgaaaattaaggtatagctgatgccgattgatgttaatgttattgctcattattcgtcgacgtgcatgtatcaagaattaatagttacttaaagtttatacaaacaaaacaaaaaaatgaaaaaaaagataaatgagattataaatagatggaaaatatgcattataaagaacaaagaaaaaaaaaaaaaataggttaaaaagaagaagaagaagaaagacttgatatgatatatatgtaaaataatatatttataaatatatataaatagatttaaaaaaaatacgttaaaagagagatatataaaataatatatatttatggttatatatattttaaaaattggagatagtttagggttacatatttaattttttttaaaaaattatgtgtatagaaaatagaaatttattatttaaatctataaacctaataaaaaaaattaaaaagtaagagaattaaggacagagaaaaaaaataattttagagtgattttagaatgacatgttaccgcctcatacttctcctttatatatatatagatttttgttaatattcttatatttacatggtgttataaaaataaaaatgagaattgcatattgaaatttttaaaaagaattgtgcgtgtgtgtgttttgtcttatactacttatatgtgagtgagttgtaagatttttattaaacttatagctaccaaaacataacccatagaattttggtaattgaagttcatgaaatatataaataatataagtaacaaaagaaatgataattgaacagaataagtatgtgttaattttgttggaactgtgacaataatagttgaataactatgcattttttggttgatgttacgaaatttatgaacactacgtaagtatacgcagttaagtagtaagctcacgcaagtgaagtcaaaccacagggaattggattaattaccactaaattatacttatgattctatttgccaaatcaatactttttaggaattcagtaaaataattcagaaacttaaaataacaagtgaatattaatcaagatgagagaata

SEQ ID NO: 320926 - DNA, 3119 bp, Cannabis indica
aaaaaaaaaaagaggaaatatttacccgagtagcttccttcaagactcctcctaggaccagctccaaagatagctcattgtccgccccgaatagttggtcactcaccttaagaagagatcggttcaagtaatactagagcatatctttacccctcttggcctccgtgctcagcgccacgaccgttgaaggggtcctagccggatcagacctgtccgagctacccctctaaaactctttgacttcgagaccttgtgaactggaaggtccacaacaggtcgctccttggaaaggtcaatgacctcgtcaactggcgccttctctttggacagagtttcaccgcctttagacttcttggccagaggagacttacccgagctgtctcccactatttttttcaaggcctgaagcatcttttgatacatttctacacagataaaatgaagcagttagaagcagatacaatatatgtgaaagcataatttaagagaaataagtgcaagttaaaatacccagcatgcgggcaggggaattttcccgaacaagcacagacgacacgtcttcatctaaagaatctccctcgtactccaccaggacaaccttcccatttccccctacagaggctgatggctgagcaggcatatcaggttccctaatcttgatagcatgttccactggtgcttggtcggtcgggggagctttcttcttcttctttctcggcttctcctgctttaaatattcttgagcataatgttgggctccgtcgtctccattcaacttagcctcacgcttgagttgaatgaggtctttctcctacttggtatcaccaactcggtttggcttggccttcttcttcttttccttgaagggcttcgacacaaaatcctcaaggaagagcttgtacttcacatagtcagcctcagtggtcgacaaagtgatgttttgagcagcttctggcagttgaagaattttttgtgccctctcctgagtcccaatgtaataggaggacggcagtacgaggaaatttgctgaaaccgagtgtggacggtattcatgtcatgcacaaagtattactcatccacaaaatgccttattttactgacctcagagtccacagtacccttcagccatttctcgtccaattgggagaagtaaaaataccccgacatgctctgcttaggagttgacttcaggtcgaaaagccagttggtgtcgtgcagagatggctcaccccatccttgggaagcatagaggatgaaaagggcagataaatatttgatgcccttcagagtgaactgagttgggctgaggtggtagtaatctgcaatcctcttcaagtacggaagcaaaggcagcattgcaccatgattagtatgagcacccaaccaggcacaatatccttgtgttggactagttgctcggtaatttagagaagggaaaagcatttgacacctcccaggtatccatccctctccaaattcctcatcttggcttgggttactatagatggacgaaaaacacaccgagcttctagggtaccttgccttctttgaggaacaacttcggtgtattcctcagtgacgtagtcaacaccttttactaagacatcaccagcctccgacacggttccctttccttattgtaatcaccgaagcacaatctccgagcaactccctcttccttgacttcagatggactataaaaatggacctcgccctgatcctccacctcttggacttcaatgtccccttcattatccccttcctcagcagcaggtcgaacctgttcagcgctcagcatcgtggcaagccgagccacgtgaagatcagttgaagcaatcctctacattgtttgtttagtgcgggccatcatcctatccctggacggtgcttggttagtgtgcctagcaatagtcacgacaaaggtggcaataggtacaccaacggcagtaggatgtggttggcccacgggaatagtatcaactatatctggccggacgatgtatgtctagctggatggcaaatatcgtctccacccctttctgagttcccagttgaaacgtctgtaaccttcacccacgatctggtcgggataaaaatgatgttgcacctcaggttctggggaaggtgtacattcactactcacctcccagtcctcgaaactcaaattggatagactgtcacttgatgaggacggactagcatagagacaaggttggtcctcgtacaaaagttggagaagatcttggtcgatacgatgttctcctccccaaaactcaccaggattcgtctacaaaaggtaggacacaagatgagtatttggccgggatatcaaacaaaaataaataaagtataccgacctggtccgaccataagattaaaaggggaaattttgcatgatttaggtttattaaccaagaatttcaagacttcaaattaaaggttaattttcactaaaccccgaatagcaagcgaaaaccgaatatcgtgaaattaaagtcagaatgccattacaatcaagttatgtggtcaagcacaataaaaattccatattcctaaatctaaaatctttacagttttcctaaaaaaaagttcaaaactattgaattttctacaaagaaaacccagaaaatcaaagattcaaatatcaaaggagaaaaagatgaagaacttactcactgttcgaagctttgaggttgttcggatgacgctgatcggcactttcttgaaattcttccaaggatttgagagaaaagtgtgttcttgctctaaaatcgtcaaagtaagaaaatgttaaaagtggtttattaggaatttttgccctatttataagaaaattagtaaagttgtaatcattttgaaatttaaacgcctccaaaaagtaaacattgggaaatcaattaatcaagtacctgaagaacaaccgtcaaaagcgtgcaaatttctggaaaggttcgaggtacgaatcaatcagcatttatgagctgaatattaaagagacctttggtcggaatcacattggatcaccaataggcgcatcgaacacatgccacccgttcaaatatgaattcaaaccgagtgaaatctacgcgcaacttcggaagtcccgtgcaaacttgagg

SEQ ID NO: 320927 - DNA, 965 bp, Cannabis indica
ggtttaggtcggtttacaaatttttttgtacaaccctaattattagtgttaatagtgtaaacaaataataacatgcattcattcacacatatatatatatatatactttatgctatcttacctcgattccgtattcaggtgtgccggtcagcctgagtagaattgtagctcgacactttacaaagcccaaaaccacaatactcaaaatttcgatgagagacacattaaaacacttctcgaggactttaaagtcaaactagaaataaccttatcgataaaagacatgacaataccctaaatatcaataattcagggaaaactaaagttcctggaaaaaccccaactcgtaaaccagtttcccaaccaattaaccggttcactggggtttgctgagggacaaaccgctaaactagtttcttaggacccactgaaccgattaaccggatcagtgcggggaaacccaaaaatcaatcccctaaacacaaatcaatcctaaactttccaattatctcaagaatacatgtatacactataatgaactagattcaagcattaaaacataataaacaacccagaaaataaaatcaccattagagttcaaagcttgagctctcaaactccaacctcacccaaacttcataactaccaaccaaatcagctccaaccaacctaaataatctcaacctaacctcaaaattcaacctcaaaccatcccaatacatacaacaacttaaaatcataattcaacaccaaaacctaactttcattgcaagaaacacaaagagggagagactatggagaattaccttgagccaaagcgctcaatatacaactagaaatccttgatttagaccaaactactccaaccctagttgctgacccgaaaaaatcgagagagaaagagagagttgtaaagagagagatgtgttttttctagattttcttatttttcttctaacttaagt

SEQ ID NO: 320928 - DNA, 616 bp, Cannabis indica
ctaataataatttgaacatttctcttatgtctttcattcaagaaaagtgaatgtgagtgatatttatattatttatattgtagggtactttttggagtggtgaatcgatgtgggacactaaaataaatacagtacacacaacacaactatgcaaattggggaatggctagattttggcagagcatataacccaactaaaagtgtgtatctctcatctcacctcctcatgtggattagcttctttcctttttcttaatttttttcttatttttttttttaaaaaaatagtaagagtcagttgcattaaatgacaaaagaaagaagtatgtatataatatagatttattaggtagatggtccaagtagtgagttttaatttgagtatagttcttcttatctcagccagcctaacagttccacctaattaactaactctatatgtgtgtgtgtgcgactgagtgtgatccaacaccttttcatgtcactttaacatacacttcatttctttataaaatttatataaaaaataatgaaaatcatcatcatcatcacattatcatctaatatgcaattgtgtagtgtaatattgggtcctactcctacatacaaattgata

SEQ ID NO: 320929 - DNA, 821 bp, Cannabis indica
gaggaagacctggtggagaatgaccctgccctgaaggatgttttttagccacctctgaatcctaattcgtctctagctgcgatttagagacaagaagatgctcgttcggattttatccaattcctccatgccaatgatcaatgtaacagtgccattactcagggtaagaacttgattccccctatattgcgatctatatctgttgttcggaatttagatagctcttttaagcaatctggtgatactgataaggtcaagattactttagacgacatagaagatgagatctccttttggtctccctctattgtatgttatgttctaggggcaaaccctccacttcatgtgattgatggttttgtgcataggatctggaagggtaaggttgaccgagtgaaactgctttctcatggaactttcataattcaatttcactcagtggatgatagagatcagattttgaatgggggctttatattttttaataggaggctggttataatgaagaaatgggatccaaatgtgaacttcaagaaagaggatgtgaagagtgtgcctatttggattcaattggaagatttggagttgaagtattggggccaaagatcattgtttaagatagttgggcagattgggaagccaattatgttggataatgttacaaaggaaagagagagattgaactatgctagagttctgattgaggttctaatggaccagcccttgcccgatatgatagaatttgagaatgaatttagctggaatacctcagttgggttagatacgaatggaaaccggtttcatgctcacattgtcaaggt

SEQ ID NO: 320930 - DNA, 1002 bp, Cannabis indica
ttgccttatttgtgcttcataggcagcttgaactttttgttccaattaatgaagtttatcaatgctttcttaaattttaagtgttggtaatcctccaatatgtccttgaatttagatatttggtggaattgaagtatagcaaaacagttttagttttctagtgactgtttttcttatgggcaacttaagtggcaaggctatatggattaaggccaactcaaattagcaagttgctaccttctacataatcactggtcattcagagctagggaacagaattgactgcataaaacacagaaagaaaacatagttagagttatacagatacctagaaaaatatatatagcccttatgaaaattgcaacaaaagaaataggactgttctaaattagaaaaaatgcttatccagggaatgcatttattaggatatgcatggtacaaatttgttattaatttacaagttgaggaattgacatcttcttcatttgactctgttaaaagaagtttgtcaaaaccagaaaaatctatttttctctatgtaacttattgtcacaattcacagagttttgtgtttgttgtaacctatcgaattcagtcttaataaatgctcggatggtactactacaaaatgtctcgtatagatggtttaggaatatggaaatgtatgctcatgagtatagcagatatgataggtgcaacattacagataccatgcatgcagtttttgtttgaataactacctttgggccatgcctatggaattatggcccttatatttgtagttattttctcactacaggttcattacactgcaagatttgctgatggaacagtctttgatagcagctacaaacgtggtagacctctcactatgcgcattggcgctggcaaggtgtggatttcttcaggttactctattatatatccaatttgaatgtaatgtcactttatttgatcaataatattttgtttctttaaatatcaatatgcatgtgtttgcca

SEQ ID NO: 320931 - DNA, 511 bp, Cannabis indica
tttgaagtattaaattgaattatatactatttgttctcttgatcttatagagaagtttgcagtaagtcatgtagaattgataatttaatatggtgcactacttgctttttgttatgagagaatctttgttagataggccgcacagtaaactcaaactcagataaattaatttgaataaatgataatttattcaaatatcagttcaaatgttaatgagatttgttttatttttattttattattttattaatataaataatattttattattttattaaatataaataaaaagtcacccatgaatttctcataaactaagaattcagttatataggcacactttatatagaatagatatggaatactttttaatggttattactcattaatggataataaacaaatttaactataaatattaattttaaaaatattaaaccattagattttggtccgatagcaaataataaaagaaaaatttaaatttctatgtttaatttaactacttaat

SEQ ID NO: 320932 - DNA, 769 bp, Cannabis indica
atctccttactgatttttttttttaattttcgggcaattgtttgatttggtggacgaaaaaataaatattaaaacgttgtagcaacacaaaaatgtaagaattgttcaaaaataatgtatgaatagtatcaatattaggtattttatttcgtcaaacttgatgaatatattaatttgaaatgtattatttttttttctttttattgaaactagcaattaattcaacttacaaattcttgaatattactttgtctttcaatctatttacaatcaatattgttttgtatgcaatgtaacacaatggatagttttgactttatgattaccaaaagggctctattccacatcacataaaacacaagtattgaaagtcataatataaacttctcttcttagattactcactttgcaacttgatgaaaaaatatccctaaaatacctcccatttatatattagagaagagaaatttgatttttacatattcttaaaaattttcatgaccacaaattagagaagggaaatttgatttttacatattcttaaaatttttcccttgaactcataatatttaatatttgtgggatatgatacattttataatatccctaaaataccccccatttacattacccctctctcttttcttctctctttatttcactacactgtcaaccatcgggctccatcgggcccactatcgagcccatcggacccatcgggccatatcaaattctattttttacacatgcaatcgggctccatcgggcc

SEQ ID NO: 320933 - DNA, 2123 bp, Cannabis indica
gagagagagagagatacattttggaaaattgtagagagatgaaactttttagatccatttaggaatagggcttttgtacctcacaaaatcactttcctcaccttcaagtcaaagttttatcataatttatttaggaactctctaggataggatttagattagatgggctttagaaaaagataatggacccttaaatcaaaggcaaggctaaaatacacttaaggcccaatacttttaatttttcccattttatttcatataatgaaagattcttatcttttttctagatataccatttatctaatctatttatttgaatattaattttacctgtttaataattattaaataaaattataatttaaatatatttattaattagacccataaattgtcttaattaacaaataaatcactacttctcttttttttttctcaaattagtccaatcttagtgaaatttcttaaataagacatcgtctattttagaattctaattgacttattaaattaattaattgagtacaatgtagtattatctcagataatgtgaggaccatgtgcctagaaaatcaagttcccaataagtagatctaaaatttactaagtaaatttcttgacatattaattcctcttgactctactatagattcagaattgtactcttgatcacatagaatactctatacaccaaatacagatacgctataattattcattatttcaatttaaataatcaatgatcatctatagacggtttatatcgagtagggacaaatttatcattttacccttcaatgtattttatccttataatacttagctccttgtaaatgatattttagtagattataattactaaaataagtactccaccatttaactcatttagccaagctctaaggaaactttcatttataaaatacttacatatttatagaagttatagattacatatctatgattaacgctctcactcaattttactaccgagctcccaaaatataagtatggactagtcctacatgtaagcaagcaacgaacaaatctatgaacctatatagtaaaattaagctaaagtttaactatcttaggattgagatcaattaagtgatattgactttgaaaagatataacgaaaagtttataatatcttttccattgtaaatatcggttgctatactcgaaattcggttaccatttcagtggaggacacgtgtccagattaagggaatatggatcgatggaatcactttaaatggaataactcattaattgcttaagtagcagagtatatttgcaactccctgactgtaaggtcttatgcgatgaaaagatatacaaactgttgtttagcgtattaacgagaaaccatatgccattgaatgcataaaacgaggcatcaactctgttacatctgggaagacaaaagcgacgcatatcaactgtgaaaacagttagtgtaaaatgcaaaaattaagtacaacagttaagtggactcgagatataataagcaaggtgcctatctcgctagaggaaggctcattcctgtaacttcccccagttaacttcaaacatcttttcagtgagatttacaagtcagaagctaacgtttaaatgtctaccgaggaactctatgttaataagagctgcggttaggaagcattaagtcttcaaacaaagagacagcaaggtgtacatcatcgacctcgggaagataaaggagaaaagcttcagatcgctatcaaggccatcagaaccaagttcctatcgagatatcccagaacgctacaattaaagacgtgtttaattgcacgatcatttttaaccctgtaaaagcgggaaaatcatagctgtgtgattttcaaataataactgcaattatactgcgtgatatgtaattaaaccccatgattttagtgaaaaaaatgttgtcaaaattacagccaactttgtaattaatttcctactatgtgactataaatagtggcaagtaagatcaaaaaagacgacgaaaaaatcatacagaaaaaagccctgaaaaactatcagaaatctaataagattgacttgtagactatgcagaattttaactgcaaaaccacgtaaaaaaatcccttgtg

SEQ ID NO: 320934 - DNA, 1806 bp, Cannabis indica
ttacactgtgacaataaagcagcccaacaaatagcagttaatcctgtcttccatgagcgaaccaaatatattgaaattgattgtcatattgttagacaagaggtacaagaggggattatcaagacatctcacacctcaagccaggcgcagattgcagatatttgtactaaggcattgtcgccatctcagtttcaagctctcaaggataaaatgggattgtaggacatatacactccaccttaaggggaagtattagattgtaaggtgttgtgtgtatatgagttagttagagtttgttgtactgagttagttaagtgtgagtgtttctgtttactgagttgattagcgtattaaccgattctgttttgctctgttttctgtcttgtgtatatatacacactcttgtacctgtgttccgagctaatgaaaattcacattttctttctcttcttgttactaaaacgttcttttctcactaaattttttttgaaaatatatatatataaatgagtttgacaaataaaacatggacacatagtatttttttttaacaactaatgaatttgttgaatgggcacaacaaaattttagatattgaagttttggtattagtgctacaagtttcaaaatttagtatttattagcaacaaaacaacaaaataaatatttatacgaaaaaatttatatgttgaatacaatttttataatcatgatccaaaatattttaaacactcatattacttttatctttttgaagcagaaagatttctaataaaagtgtcattttacacataattatatgactgcctaaaaacaatacagaattgattggacgtaattggtagtttaataattgtattacagagagattagtgagattggagtctgataacatattattaattaatttttgtgatgataaagaaaaatcaatgatttggaaatgaaaaagcagctggggcaatgtcaatgtgtggagtgaaatagagacaaaaatggggtgttttagtagatatgggcggtcgatgatacgtgaaaaagccaaacaaagagcacaatccaacactttgagtggtcggctagccttgaagcccggaaggaacacacatcatcactctcacgtataaaccttatctccaacacaacataacacactaagtctactgctaacccttgcttggccttagctccatcaatatcatttcctagctacctatatatatatttaaactcaattactcaatcatcatcttttaggaatcaaattccacatcatactaaatcacttgtctccccactttcccctactatgtccgagaaattggaatcaccccatctaatctactcaacccaattaatttgttctctcatttttacaattttttttacagatactcatactaccattatatttactattttttttttcattccaaggttgggacgatagctttataaaatatagtgtgcagtgcagctacaatataccataccgtatcttcggtgtgtgtggtgtaactgcactaccactttttacttttatctaatctaaagctaaacatatgcgaaatttacaaaaatactaaaatttgagttaatttttacaaaaataatgtcacacggaaaagttttcaaaaatactgtgtttttataaaacaccaataaaacacaaagcagaacaactcaaaacaacagtagaacaactaaaaaacaccagtgaaaacttaacacagtatattgcagtataaaacttataaacaaacacaataaaaaagtaaaaaataccgcctgacagtatttttgtaa

SEQ ID NO: 320935 - DNA, 2199 bp, Cannabis indica
tggaatccaattcagttcattttttatagtctaccattatatatgtcaataaacttagtagattctatttgttggaacaacaatttattttttataatacatagtaaactataatcaaacatacgtcaataaacttattagtttattttgatgtcgaagttgacgtacttcttcttcctcgaagcaacgatctctggtttttgttttttttgttgttgtgatcagctgataggtttattggtcgattgaattgtagatcgatttagagagatgatgatttgcttgttgtatacaacaacgtatttgagagatatgatgatcgattctccaattttcagatctgtcgaggtctccgtcaatggtgtttcttcgttcaagtttggtttggtttctttccgtttgaatcaggttaaccacgcgcagggatgaccgagaaaagtggagttgtgggcgcgtctccttcatcgccggtggttccaaaattattgaagctaatcacggtaagcttgatgacgtgtcacggcatacacatggattgttttcatttaacgttttttctgtaatattaatgtatataatgtatatatataaaaatttccctataataaatatatattatacatatataacacacataattaaaatcttcttaattgataaataatatcatatttacttatttttctaataatatgctttatttctaatttttacatattatttcataatttaatataatatattgatgaattactaattttttatgtttagttaggtagtcattacaataggctaaaatatgcatgcaccacactttaagcccccaaatgctcttgggcaattgtaattagccaaaaacaatttttttttggttgtatttgaggttgcaataaaatttttgcttgcttactaaaaaaaagtaaataaataagtcattatggtttaaaaaaaattctaaaagaataatggattcttttgaaataatgagatctatatataatatatataatacaaaaattatctttttaagcactcaaattaaatatcccatctaacacctggatgtttgttaataatatacgacattcaatttttgaagttgttaggcaaataattataaagcaaaaaatgatttaattattattattttttattagataaatacttttttagactcaatatattgtaaaaactattgagtggactatttgttttgttaaataaaaaattattaaaccttgtattttttaaaatagcataaaatagtaccttaaactgattttttatcaaattaaaatttaataataagttgatctagaggtgttataataagaacattaaaatttttttgtattcgttcatgctaaaaattatcttcaaatatattacattaaaaaaaatcaaaaattaaactacaaagtactattttatatattttaaaagttaaaagaatcaatttttttttaaaaaaaaatttagttatctcgtaataacttttacaaaataaatacaaaaattattcacctttttcatcttcaagcaacaaaacaagagaaaacaaataaataaacattgtcctagacaattgaacaatacactacgacaatcataaagttgaatcaaaatcatatctttatatataaaatgtgattatttaattgtttttgttagtttaacaaaatattttaagaatataaaaatatttcgttagatattagtagaattagtctatataaatacaaataatatttactttagattaatttaaatatatatagatattaatattatttatttttagtcaattgaatactaattttagattaatttatgtatatataaatattaatatattatttgtaatattattaatttttattgttacttttaatattaaaagtgtttaattttaatattttaaaattttatatttatttcctcaaacttttaaaactttaaatatttataaaattaaatatttttttaatttataaaattttaaaatacatattataaaaataaggggttttttaatttttacacctcaaaacagtattttttttgcatttttacgaaattctacatagaaactcctattgcaactagcactgcaacctaaattgcaacaaaaaattgtacaaaaatttctattgcaactagcgctgcaaccactttagaaacccaaaccgtaaatttgaa

SEQ ID NO: 320936 - DNA, 510 bp, Cannabis indica
tgcacctgattgtgtacacctcatgtttgacaggtgtccttgtggtctaagattgtgtgggagataatgattaggcattctcttagaatattcccttaaggaaatctttattgggatttgtattctccacctgtattggaaccgttacattatactgtatctttgtaacaattactctgcattataaatatcagactctcaggctcaagttcagtgagctgagatttcattttgtcaaattcttctctaattttacttagtatcagagccattctcgccctcgtcaatggctgctccacatgatcaaacagaaggtggctcaatcaccagcaccaacatagacgttgcttctccatctcatctcctaaatacctacccacaacagccaacaactctcgatcaacccttctccttgaaactcgacagaaacaattacacattgtggaagacaatggtctccaccattgtctgtggtcatagactacatgactattgttggaaatattttac

SEQ ID NO: 320937 - DNA, 1920 bp, Cannabis indica
ccccattacccatgcacaaaatggattagtagaaacaaagcataggcatgttttagaaaatggcctcactttacttgctcaagcatctatgccactaaaatactgggatgaagcctttagaacctctgtttatttgtgtaatagactccccacctctgtcctacagaatgtctctcctatagaaaaactcttctctatttcacttgactacaccatactcaaaacatttggttgcaaatgttttcctaatataagaccttataacaaacacaagttgcaatttaggtcttcaccatgtacattcttaagatatagcttaaaccataaaggctataagtgtctagatgcctcaggtcgtgtgtacatatcaagggatgtcatctttgatgaaacatcctttcccttctccacactaccaaaacaagctactaactcttattcatattctgatttttatacttctgttgtgattcctacagcaactaaggcctcacctgctgttaacaataccagacatgcaaccattaattccattgcccaaatttggcatgttgtttggtgcctatgcagggttctagtacaagtcacacaacaccagaaaccactattgaatcaccagtgcaacccattgcatcttcaacaattgttcccacagttacaacaaatgttgttgatgaagttctaatgcctatacaagagatatctggttcaagctccagagatgaccatacagagattctaataactgaaaatacactcccaacatccactaatgaacaccctgctacacttgatgtgtaaaatattgctccacctgtgcaaattgttcctgctaactctcagcctgctgctgctactcagaacaccttggtcaattctcactctatgcaaacttgaggaaagtcaggcattcacaaaccaaaagtttacatggtcattaaaattcccaagacagtaagggaagcagtacaacatgagcaatggaatcaagcaatgtctaatgagatgctagctttaatacgaaatgcaacatacacattggttcctttaccctcaggaagagagcctattggctgcaagtgggtgtttagacacaaagaaaactcagatggcaatcacaacaagttcaaagcacatcttgttgctaaaggctttcatcaacaactggggtttgacttcacagagacatttagtcctatgtcaaaccaatcaccattttcattgtcatcactttagccttgtctcatgattggtgcatcaagcaactcgatgtgaacaatgcgtttctaaatggtgatctcaaagaagaagtatacatgggacaacctcctggccttgaagtaccctcatcacctcctcttgtctgcaagcttcgcaaagcattatatgggctcaaactggctcctcgagcatagtttgataaattgtatcactgtctcattcaattaggattctttccatccaaatctgaccattctctattcattcagcacacttctacatacacattgattcttatctatgtggatgacatattagtcactgggagtgatcccaaagttgtctccaattcaataacatggttcaaaacaatttaacttacatatcaaatgtaatgaccgcattttataatatggattagtaaaggaaaatagcgttaattattgataattctattaatttaattaattgtgggtcccatttttagaaatgggcattagagttataatttctcatttctaaagattttattaaactctacatgcattatttgtattatatatgaattatgctatttttatgattttgctcgacgactacagaaaatgcgatggatgtctattttaatcacatgggtaagtctagaacctttttcttagtgggatatatattggagaaaatagaataccgagtttaagc

SEQ ID NO: 320938 - DNA, 776 bp, Cannabis indica
acttacattaaaaaaatatatatctagttttattaacacttttaaataattatatgctaactcaaaatttcgctaacataaaaaggatttttaacaattgatgaatctgtaataagttctataaaaatattaattataaaataaagataaataatttatttacatgattttgtagttaaaatctacatattccacgaatcattcttattcctaggttttttgtgtacaggatgtattttgtagaattttttttaagtcaggaaatcggttgtcccttctacaactcgagttttgctgtttataagattatgatagcagttatctcattcttaattaaaataaatttatcaaacgtgaacatttctcatatttcatatatctatcaattggtgggaataattttaattattatttaaaatgaataattgttattttataatttagatatccatcatgttttcatcgatcgagtagcttcattacttctcgaaaaacacattgagtgattgatgtatgttgaatcatgatcctcctagcgaataacagggattgattagcccttcttgctggtcgcttaaaagaatgaagtttggttgaagaatttctgtcctcataaataagctttttcaagttgtaaaccttatgcgagctcacttaaatgtattttatctcacaacaagctttctagtctgtgtaggttgtgtcttatttctcgtgatatgcaagatgagcttttttttatggcacattcgcctcgttgatcaccttgacatact

SEQ ID NO: 320939 - DNA, 1442 bp, Cannabis indica
tgtaacaagctgggcatgattgacatcacatctatgctccagcttgagggggagtgttaaagtattagctgtatattagctgtaaaagaattagatatttagtagtttcctattttagtctcctagctttgtatataaatatgtactattctatgaaacatacacataattcgattcactattttctacattaatcaagtttcaagctaggaaaattagtgcttcttttgaaggtagatcaaggtaagccttgctattctcatcattttgtattttgaagaaaatagattggttttaagtatggtttcataaattcatttatttatagggttgtgtatattataatttgtttctgagcttaaagtagtttgtgagtaattttaaatttgtaagggcttttagttgttgtttggttgaaagctttaagtttgagttcatggaactctaccttgagctttaatggtggtttgtgaatttggatggaattgtgatgtttgagctatggattatatttagaacttgtagtaggtttgtcttttaagtttggtagcaggtaatttggagaagtagaatacgagcttttccatttctgtagaggaaacagttaactgttccattgaaaacaatgaatcgcttccccatgcaaaaatgtaggcaaacgataaaccgttagggatgttctgggatgctagattttttgtattttatcaatatttagggtattaccactctatttatcaatatggattttctagttttgagtttaagtcctggaaaggattaaaatgagtttaccagtgtaccgttgttgtgacatagggccagggatcgtccagtgttttccactcaggttgaccggcacgcttgactttgaacttaataagaaagtataattgtaccacagaacatgtcaatatatgattcagtaatcaccgtctataaaaaagagttaaaactctaaagattttctcattaggcagcagtataagaaagagtcattacactaatctaaatttgtcgttaggtttcttacttatcatttgtctcattaggaaacaatagtgacattgtattatcttattaggcaacgatataaaggttgtctcattaggcaacgacaagtgataattacttcattaagtaacaatatattagtttgtcttattagaaaaatatttgttgttaatgaatgtttatattggatagcatgatttcttacttctgagtaaagtatgtgagaatctggttatgatggaatgagtatgtctgattatatctctgtatagatgtatgttgtttatgttttttgcttttcttgttgagtccttgtgactcacggtcagggccggccctgaaaatatatgggcccaagacgaattaaattttggggccataaaatatatataaaaaaaatatcaaaaaaagagtattatgggatttga

SEQ ID NO: 320940 - DNA, 1070 bp, Cannabis indica
tgggtgaggcaatgcaagggtgggaataataggagataatatatagagaaatttacatagtatattaacttttgtcattttttcacaaaaatattgtcagacggtattttttatttttttactgtatttttttttataagtttcatactgcagtatactagtgttaagttttcattagtgttcaactgatatttttaattgttcaattgttgttttgagttgttctgttttgtgttctattaatgttttataagaaaaataacgcttaaaaaaaaaattacgtgtgacagtatttttataagtttccctaatatatatggctaatcaagacaacgacacactgcggacccattgtgatggtgggccaccgcttcggtaggaaatgggtctatgtagagactacaaatattaagagacttgtatgtaaataattttctacccctaaattaaaataccatcttttcttatgagtttgaaacaaattggagtgttgtacatgcatatataatatagatattgttgatgtactagtatgcttttctaccgtgttggattagtttaacatttctatgcgtaatgtgtacttttgttattcaaagtccttattagataataaatcactagtgcaccttcacttcacatatatatgtgggacaaattattataacttcatttttgttagttgttagactaaaactattggcttatataacaaccattatatgtaaacggaatgaaaataattttttttacataaaataggaataaaattgtgtacaatccatcctttaattgtaatagctgatatattaaattcaaatttataaaataaaaatgaatgtgacaattagaatggataatcaggcttttaaactcccattaactctttagagacatgttgtggaaggaaattggacaacactaaaaattgtgagtattcgagttgaacaaaagcacacatttgtagattcgcgagtattcacttagagtggcgaatagacaaagactagatactactacaaaaactaattggattagatcagttttttgattggatatccaattacaca

SEQ ID NO: 320941 - DNA, 601 bp, Cannabis indica
aatatgaagcttattgtcatacaaatgaatcaaaactctcatcccaattataaaacataaaaggtcacctcttttccagaaaattagttaattagagatgacccacgttacaaaaatagcaaaatgaaaaaccaaattcagtttatctgaagatgaaaaggacagagagaaaaaagagcggacctcgaagctgatcacataagttagtgtgaaggccgagactggagaaagagcaagtggcaaagacgtcacctttagttttgttattctttgtatcttcttctgttttgagggctttgggtctcctgaccgccattgccaaaggttgaagctctggttttgcgtggttcctaatctaccacagctcctaaaattgtacaccgtactccgccgtaaaggaaaagcggacaagggtttcttctctacacttaaatctcatatagtactacacgacgtcgttttgcagttaagaataataataataataataataataattagaaaatttttaaatacccaaaaataataaaaatttaatttacatgtacaattattttaggagttttttttatttttatatttttaaatttagttttttttt

SEQ ID NO: 320942 - DNA, 1157 bp, Cannabis indica
gtttttgaattcaagtgagttggccgacctgaacggaaagtctcgtgctagatggattccctaatcacataatataactgggtacataacacaccgaaaccctaatccagaaaacccaaacctccaacttaaagctctgttaatgataactgaaactacaataccctaagaaacagggaatcacccaaccaaggctttgaaatggacacaaattaaggaaattaattgtttggggaatctgccaaaactggttaactggttttacaggtcctggcaaactggttaaccggtttacaccaagtttccccaaacaattccaaacctgcttaaaacatgtccaaatcccaccaaacactctagaacacctataaagacattccacaatatattctaagaaataacagcaagagaaaaacttaaaatccaaaagtaccattaaagacccaagtttgattttccaaacccaaacttgttcaaaatctacacaatacatcaaaatcagcaaccagaactcaatatcaacttaaaatgaacctagatactgagacaaaaccaattctaaccctaacagccactaaaacttaaaattgcatgccataaccaattagtacttagagaattcaagatgtaagagtttctagggcttaccttggttagaacttcctcaaatccttgatgaaaactcaaaaataaaatgaaaaccctaagtgtttcccctagttttgccgcagccgaaagagagaaagaaagaagctcaagaatgtatttttctctaatttttgattttcttctaattttcttattttttccaaaaatgcatcacatagactcaatgttcaacactaaaaggggcagcagtcaactctagcagaagccacctaacccccctcttaaaattactaaaatagccttggtgcttaatttaaagctaattcaaggctaggggtaaaatggtcaaaaactataaccgcgctcaaactcgatattctatttttctccaacattaattccacgaagaaaaaggttctagtcttacccatgtgattcaaatagccatccatcgcattttccatcgtcactgagcaaaaattataaaaataacataattcatatatagttcaaaaatacctctagagtttaataaaatctccagaatt

SEQ ID NO: 320943 - DNA, 776 bp, Cannabis indica
cacaaacagaagcagagttcatatattttttcaatctcacaaatagaagcaaactttaaacaatagtttagaaaaattaaaaaaatatatatataaatatatatggtgtaaatacaacaaaatattttctgaaacccaaatttttttttgcccaaaagcatttccttaaagaataatcttgtatattaatacaaggcagccccatttacaccatagaatcccaacaaaactgccattttaatgaataagtgaaagcatattttagacatacctgagagttagagtagaccaaatagaaagagacgagaagggagcagtaagattttggagatttcaggtttttggagaaaaaattcacaaaatagagacctcaagaaaatatatcttattcattcaaaaaaatatatatatcttgcagttcatatatagtttcagaaaatactttgttgtattcgcaaatgtaatctttatatataactatatatatatttatactacctgagtaaaaactttgctggagctttggatggattacagggaacttggacggagcttcggtgggggcagcatcttgggcggagcttcttcaccggagaaagttcagatctaaaaaaaattgaaaaattcctttaaaactcaataaataagagtgtgagagatggaaagatatgacttcagctggaaaaaaaaaccataattcacttaccaaaatagttagttagagttgggatagtggtggagcttgggctagagttgggatggcggtgatatatacc

SEQ ID NO: 320944 - DNA, 1041 bp, Cannabis indica
aattcctttatccaagttctaccacaaacaaaataagtaacagaataaattaacacaatcattagaataatattaacaaaaaaacacattacaataatcttaataaaacaaatgttccgtaacaattagttaagaaaatcataacaataacattaacaaaaaacacattacaataatcttaataaaacaaatgtaccttaacaaaaatatttccagttccactttttcgaatacttgggtcccgattagaatacattattctaattggcttaccattaacaacagaaaaattcatcatattcaatgctcgagaagctgtaataaaaaaaaataacaatacaataataagaaacaaaagcaaacccagaaccatagaaacaatccataaaaattcaatagctattgaaatgaaaattaaaacagcaagaaatgaaaattaaactgaagtaaagtgactaaccttcttgtggattactaaaattcacataaccataaccaagggagcgtcttgagctcagatccctgcagacccgaacagaaacaacttgacccatttgactaaacatttcaaaaagctgggtttcgttgatagaggcatcgagatcaccaacgtacagagacgtggttaccatctgaacgacaccatttgcagcgtttgtgacaccattttgagcaggaacctcaacctgaacctgcgccatttttttctctttttcgttttttataggtagaagaagaagaagatagagggtcttcggaaaacaccgccggagaaaaaaaattcaacaaatgatccaaagacgaaaacgacggtagcgaccagcgtagaatgatggcggcaccgcaatcgaatcgaatgaggaaggtttgtttatatatggtttgatactgccctcgttaactaaaaccctagcctaatcaaagacgctattacagccgttggatcgacctgtgtcctaatctacagttgctcttagatctgaccatgcacgtggaactcctgtacagctttaagtgttgttttagaaagaaaaaaaaatt

SEQ ID NO: 320945 - DNA, 3114 bp, Cannabis indica
ccttgacatctcttgcctcttagacttattccatttgttgtaaatcccatccccaatctgtccccaaccgagtcttcagcccctttgtactcatattctgcttgtttttttacccaggccgactgcactatttgagtacactcttcgtcctcagcccaagcactttcaaagtggaatcgagatctccatcttgtcgcgtgttgcattttcaaatggggatcatggtccattagaagtaaaggacaatgatccgaatttgtgcgatccaaatgacgaactttcatagtcgggaacatatcaaaccaatctgaattaccacaaacccgatcgagtctttcaaagataagatcatttttcctcccattacaccatgtatagtcattcccctcataacccacatctctcaaatgacatctatccaaagccttcctaaagttgttaataagatacgtcggtttaggaaggcctcccaacttctctttttggctcaaaatctcattgaaatcccctcccaacaacccaaggtccagtttacattctgcttagccgctttaggagcttccatgagtgaaaccgttgactcggatctgggtcgccatagaagccagtaaaacgccaccattgtccattctcaattctaatgaaagaatcgatatggaactgagagtaagagagaacctgggcttctatgtccatagaccataataagatgaggcccccactctttccacgagcttcaaccgtaaagcacccaacgaaccccaacttgactctcaaagcctcggccctcacagcattaaatttagattctgaaatgaagactactttcggagtgtattgattcaccagggaagttaaggaacgcaccgtccaagggttccccaacccttgggcgttccaaattaagagattcatggttgtaggcgaccctgaatttcagggttcgcctcttccatgatcggagtgactgccaaatctcctaaaggagaaatgttagttacgttgttttccatcttcccttttcgagccttagaatctttcttaactgctacccttcttctattttcttttgcaatgtttttcgagctgcttcccactgcaaatggtgtagatccatccagaaccagggcatcttgtgtgtatgaaacagggacattataaagatcttgatcctgggtttctttggccaaaattgtggctgattttttcagttttccgtactccgcatctccgtaatcttccacaattcgacgctttccacggctaccatcttcacatcgtttctgtacatccactgtcccattattcccagcctttacactaatattctgtggtgaatattgagagttcttgtccatagtctgctgtatctggatgtgatcaagaccctcagtacttaccacttccatagtatcacacctaggaacagaattgcttatggtattccttccctgattagattttggtgcttgccgtacctcttccaaagtatcaaccctctcctttccttgtctgtttcccagtaggccttctctacctccattatctaccttaagccatttgccatacgcagcagtatcttccttcccttcctcatggataacgattggttcttggtgacaatctttgtggttgtgcccaattcttccacacttaaagcacataaatggtagttcttcatattggaatgcaatccattgtttctttccttcccagggaagactaaaaccaggacacacaggtttgtggatcgacatccatatgcgaaagcgaaaaaatccatcagcaaccattttagagacgtctgaattgtacaccgaaatcacttcccctgcctttgctgccattcttgttgtgttctttgtagtcagaagatccgttggaactccccaggcccgaccccatataggaaagctagtcaaatcattcttccaagattcatttgaattctccattttccccaaattagaaataccatggcattttagatagtattctactttgaattgactcagaagcaaatgtaaaagataagaaaagacctgaatcaatcttctctttgattttgatattccattcaccctcctttaatcgccatatccctcccagcaccttcttgaggaaacccctactgtgatcagagttcgtacagaggcgaccccgtaagttgtatcttgcgatcgtgatagataagcttttgtccacttcccattcttcatcttcatccgtgacttgaagattatgagttttctttagaatttcctccattgcagagcttattacctcaatcccagagaacgggaacccttcgaacacgagggaagaaaacagggacaaggctgagccgacccctgaatgcattgccttgcaagcaaaaatgctgaataaatattatgtacaaagaaaatcatccaacctgaacctagaacatcgcggcgagttcacagaatcggatatggcggcgaccagcgtagaaatcacattttatttcgttcttaattattatttactttaaatgtctaattgaagcatgcaacccaaaaagtacagcaattgataaaatttaataatcaatttttgtgatttcgacaaacctttttataattaaaattttgctatgacacaataatatgcttgcttatcatgcagttcatacaaaatatgaatcgattaattaaattgaatagaccaattattaaatataacttatatattttgtttaaagaatgacctacacaacttctataaacatatatttgttttaaagcattttcaatttatgtttacgctcacacaaactgtacttatattattcatgtatttttactttgaattcaatgtcagtacacactaatacatactctatctctctctatctccatattttgaataattctctccttcctaggaatggcaaattggggttttttcgcggatcggatcggggccccgacccgatggggcagtcccgccccggtagaatcgaatcgatattcgggtctttgccccgccccgccccgccccggttaggtttttttcgggtcggggatgacccgatccgctaatgcaatacttaaaaaaaaaataaaaaaatatttactactctgcattcat

SEQ ID NO: 320946 - DNA, 885 bp, Cannabis indica
ggactaatttttgatgacagcgataactctaatgagtgttttagaattttttcagtgacaatgtcaatttcggtgactttttcgatattagcagcaactccaacgacttttcgacattgataataactctgatgaattttcttgcactcactgttgactttccaatcgccggtgacaattctgacgatcaatgtacttttatttgtttctaaagtttattagaaaaatatgaaagggattttaatattatttatgataatacaagtgacatattctatatatatgttaagtttttttattttaaatgcatattttgttttcctatcaaaaaaaaaatgcatattttgtttattaagttttcttactttaaatatgtcatactttttttttttgaaagtgatatgaattatactatgacaattgttgatgcataggaatttctcgtcataagctaattatctagccaaagatatacaaactcagaatttgaatcgctacaaacaaaatgacttatataagactaagttatctcagacatttagacaaaataacttgagaccaccttcaagagacatccgatctaaataaccaatttgaccaaaattacatacaaaataaataaatagagaaaagtgaattatcactatacaaggataatgtattgaatttttaaattaagataaaacacaattattattttaacaagaaaaacttatctttgaaggtttttttataaaggttgttaccattgtatcgaaactaatttgttattaccaactattagagctaagtctttaaggcaggaatatactagtcaatataacttgcactatatataaaatttgagagattaattgatgcgtgttgtaagccacaacaaattta

SEQ ID NO: 320947 - DNA, 581 bp, Cannabis indica
atcaatttcttttattttagtcaagagataaatcttgaactacaatatacacaaataactttcttaggagacaaaaataaaatcgtggcgagattagtctatactctttataattcactcaatataattttttaacagttttgattttcaaaatgaagaaaaaaaaaagttttaaaaaaaattttaaatttttattgagttactcaagttgtattttttgttttttaactggtaaacttttaaaaactcacagaagctaaataaaaaaaaattatcccgcattttaagttttaaaaaatgtaaaactattttcgaattctaaaccaactccaagccttactattaaaaaattataataaaaaaagagatttttttttaaaaataaataaaataaataaataaaagattactttgttttactgaggtttttcgtcttcttctacctctgtcagcgactgtaacctcagaaaataaatatacaacaaaccgtcaacatataccgctgctgcttatgtacttattcgtattatctccaaattcgaatgcactagcggcattgtcatatatatgtatatatatat

SEQ ID NO: 320948 - DNA, 1042 bp, Cannabis indica
cttattttaaaaatgttagattaaaattagatgcagagttaataatttggtatagtttaaatataaaaggttattataaacatcttaatttgaaacaagagctttgagtatgaatgaaaaaattatgaactttgcttaaacacattgccatgtttcataattttatatatatattttttattaaaagcaaaaataaataactttaattaactaatcatagtcataaatttctcagatccattgactgacaattagtttcttatggtttgcagtttaatgtatcatgaaatttgatgatgaggatttgaatgtacctgaaatcaagtgaaccaaactcttgatgtatgttgcaatgagataggtatattttatttacttaattattgacacaacattttcacaaaggtaataatggttgtggtgattttaaacaaatcttatatattgatatgacacatttctcattatatattactagagaattaaaataataagtttcaaaatttcttaatgttaaatgaatacaatcgattgaattttcttgtttagtttttgtgttaattttgtgtgcaaatatcgataatcttactgtatataaataatttatttttattaatgagaaatgtttgtgtggaactaaagttctacattggttaaaaattaaaaagatcatgaatatacaatacaaggatggatactatctctctattagtataagacattttaagaaggtgcccaagaacaaatcatgaggacttaagtccaaaaaagataatatcatacaaaaaatgaagatggatggtgttcaaagtaccaacaaaaatacctttcattcttgaagaacaaaatttccagcaacatcgttggtcatttgaagttaggagtagtactattgtacttactctttaatatggtcatttttatattgatatctgagaagaaggcttgagatttagtggttagaccctatatgcaacatatgcaggcccggctctggcataggcgggctaggcctgtgcctagggcccacctagcccatggg

SEQ ID NO: 320949 - DNA, 1072 bp, Cannabis indica
cttatctaagctattgattaagactatgaattattaatatgtacatgttgttggtggaccttttctaaaaaagataagcaagtggaaagcactttggtccaatctaagttatttgaataatgagatatcaacaacaataataataatttcatttaaaaaacaaaacaataataataattattatcaaagaacattaacatgtgaattacacataaaaatattgaatttaatgaatagatgggccggcaatgctagtctaaaattcatgcatttatttattgttgacataagtttaagcaagcttctctcttataataataagaagaagaaggagagggtgtttagcaaattaattagtagtgtgtatatatttattgaaattatttcgttaaactttcacaaaataattttcgacacccctggctctaaataccttcctttgattctagacataaattattttgaaaaaaaagtatcaaatatatcattttacaaagtgcattataaaataatctatgttccctaatcactttataaaataagctaaatgattttgggagacatgaagtattgtctttaaattattatactaatttttctagccttttaaaaagttcctttttctttttatttggtatctaatcatctatattatggctatacgaatcacggtaaagtgatataattcgaaaatgacacgaaataaataaatttaaatgacacatttaattgtcgcatcgtgtttgtattttaacttttaacatgtttaataattttggtatattcctgtttattttaattgtgttatgtcatgaaatcttaagttttatgaacatgtatttaggttgcaattaaataaagatgcatccaccaaattaaaagcacactagcttcatgacagatctaggcatgtactgctacaaagtcatgcccttcgagctaaaaaatgcaggggtcactattaaatgctagtgaacatgatgtttaaagatctcatcggccgcaacatggaggtgtatgtagacgacatgcttgtcaagtccaaaaaagttgggggcatgtggaggaccta

SEQ ID NO: 320950 - DNA, 1668 bp, Cannabis indica
ccgcatcaacattcacattaatgctatgaacacttggagcactccattgctcagccccatctcccagaatgaacccggtgaacagtagctcattgtttgaattctgagcaacacgccattgattaaggtagtttgttgcagatgcaacgatgccttcgatccccataattaaccttatcttgccaaactttatcattcctagcattccagattgcccagcacaaagccaccagcaagtttgcattatccaaatcaaatatttcaaaatgatacatgcaccatcccaaaaaagagaactcctgctgcaataccgtgccaatattggtaacacaggtaacttacatgcatatttattttatacacgtctaacttgttatttcaaattttatttttactattataagttatttaaaaaattttaaaaatagaaaaaatatctaaaataattaaaacataaaccgtcctatcaaaaaattaaaaaaaaactttcaaaattattaaaaattatctcttccaaaaggagaaataaaaaatactcattaggagcataagtgatgtttccctcaaatatatatttatacaaaaaaaatagttattaatgcgcatcaatctagcatattctgaattgaatcaaaaaaaaaaaaatccagcatattctgaatcgtacatcctgtatatgatatttagttttgttaattcgtcaaatctgaccacaattgcatgatattatttttaattggccttgttgactttgtcataatattcgtttcctcaaatctatataaattccctattgtttattatcaaacactcaaaacaactcattaatggattggtgactctgacagcacaactcatgtaaagctttattttataattttccgaagaagaaactatgggcgctaacaagaccaaatatatatataggtacggaaaacaaagtatcataagtcaattatcaaatgtatttcgaagtgttctcaaaaaaaaaaaaaaaaaaataataataaataaaaatgtatgtattacgaagtaggtgcgtgaacttatatttgtaatcatatttttaattttcattaattatatttaaataattatttaagaaaattatatttaaataagaacataagtatagtacaagttcacttattgaatataaattaccagtcattttgtctaaaggtaagctcatttaattttgttccttattatctactaataagtaaaatttttttaaaaaaatataataattaacaaaaattaaaaaaaaacaaacaacaacaacacaaaaaaaaaattaatattatgtatgtacatatagtttttacactattatatatttactaataaacaaataagaaaaacttaaaaaaaataagcaagtaaaatttatttaaaaatacgagagaaaaaatatggtaaaaaatgtacaaaagattttaacaaaataatattttaaaaaagcaaatcgagtaaaaaatgaaagattttttaaagggtaaataccattttggatcctctgttttacaaaagttaccaattggactctgtgttttgttaaatgacaaaatggaccttgtattttttaaaatagtacaaataggaccctgaattgattttttgtcaaaataaagtttaattataatccgatctaaaagtgctatgaca

SEQ ID NO: 320951 - DNA, 1375 bp, Cannabis indica
atagtgtttgagaggtgaaaggaaagatgaaagaggatttacctacgttgtcaatgttgagaccagttccatttcccatgaaacatgttcaggacctgtgtaattgctactagaggcaagattggaggcatctagggttaggtggtgagtaactcctgtgtccgggtaccaactgtcatcagcaacagtatctgaagtggtaacataggcttgcatttcagcaagattagcaacaggagtcatttggttaaaagattcaggtcctgtagttttgtcaaacctgtaaaagcattgtttcacagtgtgtcctaacttgtgacacaattggcattggggctttgaatttgatgaagctgtctgtccacgaccagattgaaaatgaccccgatttcctccattgttgttgcctcaccctgaattatacatccctcgattcatttgttgttgcataggttcatatggacgaaattgaaaaccacgattgaaacctgatggcatttgtgctccaaagaactggtttctgttgggaaaactatattgaaatggtctggtgtgagaaagattttcctcacttttgctaatgtcgagagctttagcattcttatctatgcgagcagattgagccattagtagagcctccatttttggtactgtgtaggcatctttcctggttgtgacagaagttacaaacacatcatattcagcagggagaccattgaagatggcctcgatgtggtcttgatgagattgtttgtgacctattgttgcaagaagatcaaccagacctttgatctttaacagatagtcatttaaaaaacctgtcgtcttggtatttctaagctaagttttgtaaagactgatatttgcaacattaagggcagtgtaatattcattcaaggtagtccagatatgagctgttgtatcgcatccaaccatgcgatttgtggttttctctgacatggacgataagagccaagatacaagaagattgtcctactgttcccaatcttcaaattcaggattaacctttttttgagcttcatcttcagcagagagatatcgtaagggagcttgagtagagtccaggtatttctagagtttgctgcctttaatcgaggcaagaacttgatgttaccacggcaagaaattgtgttcatcaagtttaattgacagtgagtgagagaacgatataggaaaggatcttgggagaagagtttgcatttgattctgaccttgagcctggttcaatcttgaggctccaccattactagccgtttggtgttccatagctgtgaacgactacagctctgataccatgttatgttggagagagagagagagagagagaagagagagagagaagagaagagagaga

SEQ ID NO: 320952 - DNA, 1077 bp, Cannabis indica
aaccaagaatgttaaaccaagaaatgccgttagataaacacttttaatatatatatatatatatatatatatagatcacatcagtatttattcttcgtgctactatcaaatattgtatcctcgtttattttcttattacacagaaattaaattttagtgatagatgtatatcattcacaatttacttgaattgcaagcaattaagtaagaaaaacaataataaaaaaaaaggcataaaagtaataagcccaatattatatcaatcaaaggatttgatttgattttcttttgtttctgtagagagaggacaagacaaacagaagttgaatataaagtagtagtaaattcaatcaaagtgttggaattgctttttctcgagagagagggcattacaagtgcatgtttgactgtctttctacctccaattttgtccaaattaatgagaaatacaatattaattattatattcttcataatatcattcatgtccacatgtcaaaacgttacaagagagtctcgaaagctccatgagaccttataagaaagcagattcaatagctagtggatcgacattcattactaaaaatagttagtgacaatttttttaagtataacataaatttttttgattaaatattatttttcgttataataaaaattatttgtaacaaaaatattattttttcattggtgcatctatgtgagccatctagctaagtctaaaaatctccaacaagaatcaatccaatctcaagactagagaagaacacaatgtggagctatcccactctacctattaccattaacctcttcttaacataagacatatatatatctcatacccttataaccctaaggggttatttactaattaggcttaagtggcgcaataatgatatactataattttatgggccaattatagttttaagggtgctctcatgtgtctttaatataatatacaattattaaccatcccattatggtagaaaacgaatattgggcacatagttaatgattgtgtttgaaaaatcgtgtttttgcaaatgttagttgtatataagaaaatataaaaac

SEQ ID NO: 320953 - DNA, 583 bp, Cannabis indica
ccttagtattacttgggcatccgagagcgtatggggctcagcatgccttctccgggaggcatgtctcggatgctgacttatatcacaaagacttagcaaataattcaagcattaagacgttttgatccacgtgtccctgtctggttggtccacgtatattgggcaaaatcaggggcaacactgcaattgatattcgacatggttcgaactcgagctagtggttctaggagttctgggcaaaatcctccgccaaactcttcttctacgattccagatgctccacaaaatgacgatccgataattcctctagctcctatgattactggaaaaaactctactaactagaatcatcttcttcggctacctcatgaagatagctccaacccatattatctcagttcaggggatcaccctggcctcatcttggtaactcctcccctatctgatcataatttccaggccttgagactcgattttgaactatctgtgggagcaaaaaacaagactgtgtttctgtcggaaatattttaccaggatctagatttactaccatgtatgtttcattaacaacctaatatgaatt

SEQ ID NO: 320954 - DNA, 824 bp, Cannabis indica
gtcccaagaactcatccatgccaagtatgcaaaaatccctttcttcaaagttgcaaccctctatttctaggcagcaacagttagaggttgttgctaaggctaaattgttgtcaagacctcagatcaacaagccacaaaaacaaagttcatcccaccttacatcatataatgacaactgccccaagaaaaagccaatgaagcaatactctgacgatgagggtgatgagggtgaggattaccaagccattagtatgatgatcagacaaatgtttaggtataatcctaacaaattcgttggtcgtgatgatgatgatagcaacatggtggccaactttgacgatattcaaagagaagagaaaagaagtgagagaatggggagaagaaaagacaaaaaagagcaacttttgatagaggaagaagaaagaagagagagagaagctaagatgagaagattaaagaagctaaagtttgagcattagaagtattaatatttgatattgagtcttgagaatggtggaattatacaatctgattttccttctatttttaaaaaatatttctactatcacttattttaaactttaattttagttaatgaacaagcccataatgctttttttttaagaaaaacttcattgtaatacttattgtatattttaagtacattaatcttttaataattgatttcttatatttttaatttatttttttatgctcacattgttttactattttttttttaagaaaaaaattacatttgtaattaacttaagataatgttacactaaattgattttcaattaaaataattaaacattaatcat

SEQ ID NO: 320955 - DNA, 906 bp, Cannabis indica
tataacatattataaaaaaaaaataactagcgaaaatgtgactattaaataatcacttatatatatggtgcttaaattctctttctatgcatcaacccattatcatcaccatgttaaaaaagttaagctaataagaaaaatgacaaaattaattattattatagagaatgatgtataatttaaggttctatttaacttttatttggatcgatataggcattttagtttgtttggaaatgactgtttaacttaattaggggtgaatcaaaactcataagatttacgataagatttgtaaattaataattattatatcactaattactgtttcttattttattcaagaacttgtgtgaataaattgggatactatgataattttctttttttgtttggtaaaatttcaaataatgtatagcaaaagtgcaaatttaagagattagcgaaaaaatcagcgtaaattaatattttagaggtgactgagaatttattttggatagttagatattatgttttatgtgggttagtgtgttatgattatattgcccttgaattagttaattagatttatacccttaaagggtatttaggtaattttgttttatatgattatagacatcaccatttattgtagaaaaatttagaaaaaaaatcaaatctctctcccttaagccctctttcggccgaaccccataagacccgaaaagaacccaatcattttcttcatttcgcttcaaataatgaaggattgaacaagtgttttgcgagtcttaatctttggaattaattttgaggaataaaggtttaggctaaaggaagaaaaggtaatgttctagttgagaagatggtgttgggaatattttaccaagatttaaatttactaacaagtatgttgaattaacatcc

SEQ ID NO: 320956 - DNA, 682 bp, Cannabis indica
accgcaaactgcaccgcaccgcaccattttttgcggtgcgatttctgcagttttttagtttcgtgatgcgggtacaatttgaaaaattggaaaaactgcatgtgcgatttggtttgaaaaaatagtcaaaaaccgcaccacccgcacagcgaacacccttactcgaaagggtttcaacgtaaatgtttgtgtcaattattttaagtgcttgttacattttagagatcaaacatctaaagcaaaaacaataaccaaaaagttgcgctcaacccaattattcgcttacaaactaagtgataggagctacgctcaacccaactatttatttacaaactaagtgataggagctatgctcaacataactattaatacaaactaagtgatgagagctatgctcaacctaactattcacttacaaaataagtgataggagctacgctcaacccaattattcacttacaaactcaatgataagagctacgctcaaccatagatcaagtagtaagagctatgttcagcctaaattttcaaatcatatatcgagtctttagaattgtgttcaactgtaacttaataaacaaattttattcaatgatgaaacgatcagcgaaactcgatatactcagtcaagctgctccaaaatctaagttttagtgacactcactaagacttagactagggg

SEQ ID NO: 320957 - DNA, 1083 bp, Cannabis indica
ggccccccatccaggcccaacaaatcttttaacaaaaaggccctaaaattatatttttaaaatatcatattttgtatttttactattatttattaaaaaaaaaatataactattttcttaaaatatatatacctaatttgttttttaagattatacattggatattttattaagtgttattccaattactatacggggtgacgtgatactcaatagggtgacacgtggagttcattttaagacttggataggttatactcgcccaaggttcctaccagaacaactcaagactaaatcgacaaaggttagttcttcagcaggtagtattcgaacagtaactataccttgtaatgttccgagcagcatgcatgtatctagcaaagtatcactatcaacacagaaggacgcaacatttaaagattacttaagatattttccttaattatcaccataattaaagtttaattaaaacaattttgtactactgaaaaattaatggaattaatatttagtttcctgattattgtcctattattttggataacaaacccttgtatctttcctataaataatgaagtcatttcattgtttagggatccaaatttgaactttctagagaatcattttgctgctaaaataattataaactttttcgagaatattaagaaactcacttggtcagaccttgtgatcttaattattctctaagtaatacaacaaaaagatgagtaggctattatcattatcacgggctgaacctctataaattcttgtgttcttattacttattattatttatatagtaaccaatcattcaattttatcgctttaaagactcagcatcgttggctaaaagcgatgtcaatattttggtgctttcatcgagagcaaaagaacataatttttttcctccatcaattttttgatcctcttcaatttggctaaaatagttttgacaaggagatcttcataaacatgagtggatatatagaaatcaaaatttgccaaatcaatcatgttatgatcttctacatcctaggtcttcccgttccttcatctggcttatgttcgtcatgtagcatt

SEQ ID NO: 320958 - DNA, 927 bp, Cannabis indica
ataaatttttttaaattattttttaataagtaaatttatatttttttaaaaaataatatagatataaacaataaaaattttgtataatataatcttaataatttatagcattttaaaatttatgatttatcaaatatttatgataattttttttagttgatttatagggtttctcttcatgctacaactacaattatatgtgccaaacaattggccttaatatcaaatcgaatcagaattttatgttggaactttttttttccctttaattccttcacttttaaatattaatatcaaataattccttcacttttttccctttaattactcttatatactattttttttttcttcaaatttacggtttgagtttttaaagtggttgtagcgctagttgcaataggggtttctatacgattttttgttgtaatttaggttgcaacgttagttgcaaaatggatttccatgtaaaattccgtaaaagtgcaaaaaacaattattttgaaatgtaaaaatgaaaaaagtcaaaaaaaaagttacgtagtgttgtaagaagtggtatgtccaaataatacatagctctgattttctttttttgaaagcaaattaaacactaaatgcgtaccaaacttgaatcacatggctggatgtataactcaactacaattgaacttttatttattagatcaattatgatcatcaataatggacacatatcacacccattaaataaagtaagggtctcgtcctcaccaaaaaaaaaaaagaaaaaagatacgaatgtataaatatatataaaaattagtgtgagttgtacctagctaaacagtaaatatgttatcttcacaaaaagtactttataatatgtggactcatcaatatctttacagggatacgattttgtcccgtgatgtactttcacggaat

SEQ ID NO: 320959 - DNA, 653 bp, Cannabis indica
ggatgttaattcaacatacttgttagtaaatctagatcctggtaaaatattctcaacaagtggccttagagccatggtaatgatttactttcatgaaatatggatttaaaacgatgatattgtttatttggatgtgttcatatttgtttatgtgttatttgatgattttaagtgaattacaaaattttttcatgaaaataatttatttggattccttgtgaaaagttaagcaattttggtttttacggaactcaattctgataaaaattgaaaaagatatgaagggttaaaaatctaataaacatgggtgtcaagatggtgccaattgcaccaagaagtcggacacagggggcatacacgcgcgcgggaggggaaaaattgtgtctgaagacacgatcaaccccaacattcagacacgacacactacattccatgcacgaggaccctgcacacgtcgtgaaatcccgcccatctgaccctgcatttctcagcttaagcgcacaaaagaggctaggtgaaatattttgtgaaatatttttatagatgtcctaaccataatatttttaaacttataaattttttattttgtgaaaatttttaattgtttataaatcataagttagaaaaatgatattttatatcatattacttat

SEQ ID NO: 320960 - DNA, 1492 bp, Cannabis indica
taaggttttcttaaactcttataagtttatttcattgttttagaattcatattaggatgttaatgaaacatacttgttagtaaatctagatcctggtaaaatatatccaacattcttttgtttggcgaagcattttttggggtaaagagttgttgcagaagggtatcatctccaaaatcagtaatgggcaaaacacattcacctaccgtgattactggattccgggatatcgacatgtcaccctatccaattcggttcctgacaaggtgtgttcctttatcaggaatgacatgacctgggatttaagccttattagaaactattttctgcctcacattgtctaggaaatcacctcaattccccttccccttcaaccctctagtgatactttaatatgggagcccactaaatctggtgtttacattgtcaattctggctaccatattagtctctcttctacctcccctcatgatattacttcctcttcctccccttcaccttggtggaaacacctctgacatcttaatatcccgcctaagataaaacactttgcctttcgtgcctcaaactcaaccctcccaacacttaaaaatctagcttttaggaaaataattcagtcctcaaccagtgatcgatgcggaacccacgttgaatctatttctcatgccattttcttctgcaaaagtgttcgaagagtctggaaaggtacaattttctatgacgatatttcctcttctccccctactaccacttttcatgacattttttataatatttatgctactctaaccaaggaagatgaagaatttttcctatgtgttgcctgctttatttggcataacagggacaaggctatcaaaggacaatcagtggatcagaccaaagtagtagtgaacctagcgcagagcttcctggcgaactacaaatcatcaggatcagctcaaaaacccaatgaaccttgtgaatcggcctcccccgatctcatcttggagacctccttatcccggtcgtataaagctgaatgtggacgccgcaggcactaaagattctttaaaagcgggttttggtggagtcattcgaaaaagcgatggtttggtggttgcagcgtcgcgttcccttacgcgggaggagtggatgtcaccactatggaagccaaatccctccttctctcattgcaatggtgtattgaagaatgctttcatgttacttgtgtggaaacagattgtaaagctatctcggatgctcttaagcatcccaaagaagatctttcttgctttggtgatataattaatcaaattcgggcagctttgtctctcctccccggtgcctatgtctcacacgtcaaccggacagcaaatacgttcgtgcataagttggcttcttgggccaaggggttagatgaagtagaaatttagattggtgatgacccatgtaatctcaaggagtttctttctttctgatgggcaccattcccctacaaaaaaaaaaaaaa

SEQ ID NO: 320961 - DNA, 2463 bp, Cannabis indica
taggacataaaacccaacatagacttcatggcgtaagggaattattgaatttcccttttttgttgttatgttggttagagctgtcatggttgcgcttgcctctaatattctcattgttggagaattggtggagatcgtctgtattggccggcacgtcggataacagttggggaaatatgatgtcatgtatctattcaacattgttctgccctcttgtttgggcttgccggacatcttcttccaactttatgaagccattagctcgcttaaggaactccttcatgttgctcgttaagatccttctgatatctttctagaattcactcagcggcaagatacctctgagtatgaccatatattttccttcttctgtcaagcatttaaccttggttgcctcagccatgaacctttgaatacagtctttcaaaggctcatcttgtctatgctttatttcagcaagatcctttaatcgtgaaggtatttgtcttgaagcaaagaactggatatagaactcttgggagaattcttcccaagaattaaatttccctaaggccagcttaaaataccattattggggaatttcagcttgagttgccgaaaagattcaacatcgcacatctttagatacttgttggagatctgtttgtattttaaagtcttttaggtttactaggggatcttctttccccgtgtacagcttccacgttggcattttgaatttgtgcaagggcaaggcattgatgtatgccaagaaggtgagccccttgacctatctagcttaaggtctgatggtttcgggccagccaagcccttaagcatgtctggtattagatccaactgtgcttgcacagaacgatatgttgttgtaggggcctggttgattggcctttcctgattgagctgcagacgtggattggccagagcctggttggccataccatgggagagggtatgttcaaggctggccagccctgagtctggctattgtccatggtcgtccagccctgtactaggcagggcctgccgcccactttttcttgactggctggtggagcctatgtgttgacatggggtagatcacactaatagctagagtttggtggatctaactgtctgaagtgattctattcacttctcaagttgttgttgtcttgggtgtttccacccattcttaggcctcgcgggttaaaattagccttcgggttactcgaacttggatgtcctaggataagaattcaccctattagttggccagaggtgcaccactaaggtgtaggccagcctacggttggccaacagtgggtgttattgtgccagagacccttggtcgagcccttagactaatggtttctagggtttagctgttcttgccaccaaatcttcgtggcaaggcttatcctccttcagattggggaaggtttgtcctagttccaaaagagattggttggacagtttatctgtagaccctccccgatctgtcaattagtctcccttaaagaggatctctaatgagatcctggcctcttctgaaagttctttcattgaactgccttatcaagtcgctagcttctctattacgacggtctaattccacctgataatatcagaggatgtactcttaatcatccatccatctcagaaatttaagtctttgttgtgcgaatgcatcgcagccaatagtgtgtggtttttcaatttggccgacttgacagatggcctctctaagtctggctaaattgagatcttatcccaatctacatggggctcgctaatagtcaattctctaattcttagccttatctctacagcatgataccgacgaccgaatttggttgtggtacttgggggctgctccacgtgagtccttcctttagtgggaaggggcagcagagagtcctctctaggaggcatgggttgattgtttagacctataggaatggttgtgtcaaactagccaactatggtagccaaattcgtggtgcctgtcaaggtggtaggagtggccacatctctcgggttcatggagattccagtcgtggctagaactttaacactaggattagtcaccatcaggtcttgaggaagacctaataaggctaaagttgtagtcgtagttcttctcatgttaactaagtcatgttatcagataaattgacaactcgctctcaatgaaagtaccaaactgttgacctcaaaatttggccaactgacagcggagtcgtatttaatattgatgattgccacgtgtaacacaataagaataataaagtaaaagagacactagattttatagaggttcggcccattgagttagcgggtaatgacctactccccttttggtagtattgatattagagataatattactcagatcacaagtattgtggaatctgtagtagctctcttaagattacaatgtctgaatcagtaggtaaatctctaatgtgagagagagagagagag

SEQ ID NO: 320962 - DNA, 1185 bp, Cannabis indica
aaaatgcttgggccggccctggagatatgtaaaaattgtattatatttggcaaaaaataacttgtgatatatttacatcaatttttagcatcaatttttttattatgtatgattgtcaataagtgaacctataccaggcgcgctatcaattttttgttttgaatgattgtcaatgagttttgttcttttcttttgagttttgtatttatagcatcataagttttgacggggttacgtgtctagggcatgtcctccaaacacttagtaatataaaatgtatagattaaaaaatatgataaatatattattatgagaataatatttattaagtgcttatgaataaattatataagatatgatttatttaatctacattttgtaacttacagtgtaacttggagaggagttacaatttgttatcatgtgtaacttttctttacttgatcataatttaagtgtaataaaagagttattataaaaatgaattgttggaattcaaatctatgtttatatggttgttaggaattgaattaatactcatttagatggtataaatgagttagaaatgtttggttttagtttggtcaaagtgggagttacaaaactcaaaaaaaggtgttgtggaatttacactaggcgcgacatgttgcctgaagtagttgttggacaaaaaaggtcttgaacgtttagttttcaatcatagattttgtgtaaaccccaaccaccctaaataatccaatttatacctaattaagaacctacaatagtcatgtgtgcatggtatttgatttttaagtgtgatcatcctaaccactatatatagaggtctaaggtgttcattttggacaatttagctttctatcaacaagcacttgctagaaaacacaaggcattataattcccaaagttattttttagagaattcccttagtgcttagagacaaaaaaaataagcttttacaaaaaaattgtggtactgatttagatgacacaacatttaaaatattatttgccatctgaatagcatattcccagaaggacgttgacagagttgaataggttaaaatagacctaactatttcaaaagtgtgtgattttttctctcttcaactctactttattgtggagtgcccggggcagtatattgcaattcaattccaagttcaattaaatgatctttgaact

SEQ ID NO: 320963 - DNA, 936 bp, Cannabis indica
aagaacaatgaaaatgttctccttctagtccttaaagttattaccattaaggaccggtaccaaattaaggttagcagatacactagcaacagttgaaaagaacaatacaattacataaataacagctcttattagaatctaaacaaaacaataaattcaaataatggttaatcccatctcaatataccaaacacaatattaatatttagtctttggacagtaatattaattgtaagtagtactcttattgtagtgatcaaatattgacaataaattatgtcaaataatatgtaatctttggactaatacattgttcacaaaaaataccttataattatcacatatttatcaccacaaacatgcatgaaattcatccaaatattaactcacatttgagttagttaataaatttatgaattacaaaagagatcactttatcgatattttgtttaaattaattcaattaaaatattggatagacaaaatatatacaagcaaaaattcaagtcatgatcacacatcatataagacgaattctaatatgaaatcatgtgcttctatatgaatattatataaataacatttatgaatgaaatttgttttcgttaaaatcgagaaataaacctgatataacattcatgaatgatgacctataatagtatattattaatatacatgcttaaaccagatatatgtgtattacattgattaagttgcgatagaagtaaaacaaaaacaaaatcagaagtaattcaagaattttcatatcgcatatatcacatatccgcatatttacatctaatttgacccctcatcaaattagaaattatccttatggtatccgtatattaaaatcatgacaatcaggtctttaaatcataaactttattctaaaatagacaacataaatttgacttatttatttgatgacccaac

SEQ ID NO: 320964 - DNA, 1594 bp, Cannabis indica
cattactcataaacaaaaaaaaatcaaaaaacaccattatagacttgacttatttgtactctgttcatagaagtaaagtatgcaatggcttgtgcttgttatataccatataattaacgagccatgtatatatgcagttctgttctacacttcaaacactgcaaacaaagctttcctgaaagacagagccagctaccttttaagcgaacggatagcaaactagatcttttagtccagaaaaatttatgatttatgatcttataattaaattccaactctgaccaccttatgtcattggcatttaaaattcaaacgtatacctgaaatgcatgcatcaagagtagaaacgtaatcgattgtagttcttctcgtcaacagaagaactactgtccagaaacatattgatacgtaacagcaaaaagacacaagattaacacccaattgtataagtattaactctggttatgaaatacactgaaatttcagtatacttatgtgatgtaatatttgcacaaaccacaagtactagtatttgtatgatacatgattgtagtttcaatttgaaggaaactacaagaacatcataaatgtcaactagaaaggttataaaacaatgatgctaaaataagatctctaaagcaaacgataaattaaaaagcagaatcacaaaacagtgaacagattgtattacctggtaaggattatacccctgcatcatatgcatttgcccaccttgcgctcgattaaaagcaccaccctgtggatacattgggccgccacttgcatttgatgggccctgcatgtttggcatcccatttgggaagccaccaacctgttgaggaccatttgtaggcaaggatccagagtgcatctggttcatgcccatataatgcccttgtggcataggtaccatctgattcatcgtaccttgcattccctaaaatccattaaaaaatatcactaatatattagtgtcatgaaactggtgtttatctagttatagcaggattaacttcagctacaaaatatgaacgtcagcatttttagattgtatctctatgcagctttatgataggaatttcctatcaaattatctagaacagcaagaaagtaggacagaaatacgagtattgagagaaccagtggtaatgtcaagagctactgctcaatatgaattccttcgccccttttcccttccctactcactcatatatataatactaataccccttacaattacccatttgccccctatatttaatattctaaggcctaccacttcatcgcaaaattaatggcaatggaggggagtgctaatcacaatgtttcttgtataggacaagaaatggaaaaacttcattcatgtagaaacgaaaaatgagtagaaaagtaagaagaaccttttctttctttgacagtgtgttgaaatgagtagaaaagtgacaagaaaaacaggacaagcaatgggaagggaaaaaaaaacagctagaaccaattagatcagataaagagcttaagttgcgtttgattgggaggaatgaaaacataaaaataggaatgagaatgggaaaaagaataggaatggaataaaatt

SEQ ID NO: 320965 - DNA, 913 bp, Cannabis indica
ccatttcacttttatttttaccagtacaaatatacaccgataaaaaggttttcctctcataaaaaaatatgcgggaaacttcccacctacttttttaggttttttccagtgcataaatgtgctggtaaaagccttagcatgtcgccaaaagattttttcacgcgggaaatttccctctaatttttgggacctttacccgacgcatttatgcaccggcaaaagtaaataattcactaaaactttttgtgccaaatggctattaagtttctaggttttgaattgcgtcggtatatgtttcctttaccgacgtaatagtgcgctggtaaaagtaatgcccaaataaatttccatttcctaggatcccctttcaccgataaattttaccggggcatttggccaaatgcgctggaaaaagtcttatttcttgtagtgtaaggccgagatgatatgttgaggctcctagggccgaggtgatgcatgctgaggcccttagggacgaggtgatgcatgtcgaggctccaaggttaagatgatgcgtgtcgaggccctaaggtcgagatgatgcgtgttgaggccccagggctgagatgatgcatgttgaggcccctatggctgagatgaggcgtgttgaggctcctaaggccgagatggcttaaagggttatgggggtgttggcttcctacctagggacaagatgatgtaccaaagcttggttgagatccccaaaatggtgaggtcgagatgcttatagggcatagatgcatggtgatgaggcctaggtgagggagactgaggtgataaggcctaaggctatgtttggtaggaaggagagatagtaggatggatggagagtgtagaaaggatggagaggatatttgttctcctttgtgttgtttggtgttaggagtatatg

SEQ ID NO: 320966 - DNA, 1901 bp, Cannabis indica
cactagattaaatattatctctttagcaacaaacttgtaactcttgtaacatttatttgatcaatcaaaaatattatatcaaaatataacaaatactcactcatttgagtcctattaatcacccaagtttgagtgaaactaatgtctctaccacgttagcaaacaattataattctagaaaagaaaaaattacaaataataaataaataactaaatatacaactcaaacaaagataaaaaaaattagtataaaaaataatcaaatatcaaataatacatataaaaaaaatcagattataaataaaatttaatcggtttccttttcagtaccaacatcaaaacaatattaatatacagtactatattaatcaaacattacaaagattagaaaaaaatcagaaatacattcaagttcctagcaaaaaattttctacacaaaaataacttaatcataactaaataaaaaaaataacctcaataaaaaaagagaaaatatattccaatacactttttaatcacaaacaaacatgaagacctgaacaacaaacaacaaacaacaaacatccaaatcatattatattatttatcagaaaataaaaataaggtcaagaaaatttagatcaagacctgagtttgtagtactaagtaggctctacgacaatcgacgattcgatggcgacctaaacaacaaactcctgcgtcggctgagatacttttagcaacatgaaactgaaaataataaaaaaaaaaagtaaaataagcctccttcctgtttcagcaaagaagaaaaagaaaaagaaacgaacaagaggattagagaagataagagaacttacatgcggtgttatctcaggcaaggcctccggcaaggcaacgatgatggcttttatgggtgtaaacaattgaagagggccctagaaatggcagaggcgcggaggtactgcttgttttttttcttttttttttttgtaagaatgaaggattctcttatgctagggtttttttggtaagaatgaatgatgaagagaaggcagacggctgttagggttagaaatgtataatagttatatatgtatattaaatacttattgggccgacccgggttgggttgaatgggttacacttaaggcagcctgtaaccaacccaatggccacaggttgggactttcataacccatttaattttggcccaataaaaaatggtcgtttcggcctaaaaatgggttgggttggccagtttggtcggcccatcgggttaaatactcacccctaagtaaaacaacattaaaacaataataaaataataacaaaataaaccagttacagaaaaagggtaagtttgagaaagagggtggacttggaagtacagtagagatggagctaatgctttgagaccaaagagacttcggaacataaacttagtgggagtttttgaaagatttctacaagaagctcatcatagagcaatctctctatctctttcttacacacaaccacactcttatcgttctaaattcttcttcttcctcctccttcacatactctttttttttttgttacctactacaaaaaaaaaaaaaaagaggcttagcttttatttgggtaattgtagaaaaaaaaatagaacaagatgatgaacaggggaaaaagagctcaaatacattgaaaaataaataacgtgtgtgtttagtgatttgctcaagaggaatatatatataatatatatatatataaacacgcatatgtataggactcttctactgtgaatgctctatttgtagggcatttaatagcttgttctaattggataaatgcattataatactataatcttgaatgcaatatatttaaacttggattgattaaaatatttttttattcaactctattttctgacattt

SEQ ID NO: 320967 - DNA, 1300 bp, Cannabis indica
actttaaaaagtcttttttttttaatttgaaaaactaatcatagcttaaaaatgcttaccaaaacatggccaatatatctttcttgtgcacgaaattttgtagtgtcttaacttcttttgcagaaaagattttagtgattatgcaaggttttgtttcaagacatttggagacagagtgaagaactagataacattcaacgaccctcgagttgttgctacacttgggtacgataatggtcctcatgctctggaaaggtgctcgaaagcatatggaaactatagagttgggaactcagctacagagtcttaaattgcaactcgcaatatgatccagggccaagactgggatcaggaccaagtccaggtcgagatctaagatctaggtccaaatatatgttaagattcgaggtcaaggtcttggtacaggtttggaatctagatccatagtccttaatcccgaacttttataaatattataatattaaattaatataaattatttattacatattaaataatataattatttattatttaatataatagaacacttaataaaatatttatgttgttgtaaaaattttaactagcacactaattaatatatatatcatttaattttagttttgaaaaagtaaaacaaaaaaaaacatatatataataaattaattacaattatatattcgtaacacataacaaacaataaacattaaaggtcctattgaaatgtttgaccaaattaggttaattaaagctattaattttgataggttttgattatagttagaatataaaaaagatagaaaataactaggaaaaaaaaatctataatttataatattatacgattaattaattagctagttctctcctgcaaagggatgtatttgaaattattctttgagaattgcttttaaaacattaatcgaaatattattattctttttttttttcttaacaaatattattaatatcatgatatttacacttttctgttatagattttattgtgtttttgaatttaagttcttattatagcattttttttataaatattttctaaaacaaacaacaaattaaatatctttaaaaaaacaaattaaataaacgaataaaaacataaacgaataaaatgtcaaacgaatttacataaacgaaaaacattttaaataataataataataaaaattgttgactaactaactgtaggtatattttccttcttgttgttttttttctttaattttcttaatataatttgttattatcagtttcttatcgaccgaagagtttttttttt

SEQ ID NO: 320968 - DNA, 1898 bp, Cannabis indica
ccctcaaacgaaaaggtgtctcagacatcttgagtttggatcgaaggtacaaaaatctctttgttgacaagggctttgtgagtacatatgcaacttgatctatggctggtacttatcgaacagacagtttcttggacagtatgtgctccctaacaaaatgcatgtcaatctcaatatatttggacatggcatgaaacacgggatttgttacagtggcacactttgattatccacccataggacagggcaagagggagcagtgatttgaagttctgaaagtaaggacataagccatttgatttttgcagcagcattcgcaagagatctgaattcacttttagagcttgatctggccactacattctatttctttgctgaaaccaagttccctccaaaaaacattgcataaccacctgtactcttcctgtcatcaacacatgatgcctaatcagcatcagagtatccctcaagaattaaataggttgttggtgtgatatgaagaccatgggagatagtgcctttgagatacctcatcaaatttttgtaggccttccagtgggtgttatttggagcatgaatgaactgacttagcttgtttatgataaaagctacatcaggtttgatcaaggtaagatattgaagggcccccaatgtgtttctgtacaatgtcttatcaataaatggttctagctccttccttaagggagagtttgatattggcactagtaggccaatttcaattatcaatatccatggggagcttcacaagtaggccagagatatatttggtttgtgagagatacatcccagtagaatctctgtagatttccacacccaggaaatagtgaacaaggcctaagtcctttaaagaaaatgacttatttaagttaagaacaaatttgttgatgagctttatgttgggacctataattacaaagtcatcaacataaattagtaaaattattgggtttgcaccagctccataagtgaataatgaagtatctgatttgaagagtgtgaatccccattgtaatagggtgttctttagtgtttcgttccaatcacttagagcttgtttgagcccataaagagccttgtgtagtttacagacatgagtaggtctagactcatccacaaaaccttctggttgattcatatacacaatctcctgtaagttgccattcaaaaaggcatttcttattttggatttttgtgccctaactaaaactctatttcaatgtaatcttgaatattcaattatcaataaaggaacaaaattattttattacttatttaatatattgcttggttcacatgtttatttcatgatcatttatttgatttataaattcatattaatccttatcacattgttattcatgattgatgtgatgtctacacagtggaaagtaatcaagattatgtgattaaatatagtcccacgatttatcagtacataggatttccactgatacgataatcaacaatatagtttacttacacttgggtagtgttatgtcttttctaaggcattggtaaagtaagcttggattggatgtattcttatacatcggactagattaatattgaacttggataagatatcataaacttaccattatatcttttaatatcacttagtttatcttagatcaatgatcccgatcctaagatggttaggttctggttcaattgtgttatttgtgttctttgacttgttcattaaaattgactaattgaatctttcagatacttacatcttgagaacatggtagtacaattgagtgggagtgctaatcatagatacaaaatctatagcttctataattgaatagaagtgaaacaattatttccttcaagcttggctaaacgatattaaatagtggagtactcatttt

SEQ ID NO: 320969 - DNA, 2080 bp, Cannabis indica
ttaaaaaagatgatcacataatattctattaacccccaaaacaaacaatgtagagtttgaattatataattattagcaccaaaataattattgattaattatcatatctatctagaagtggtcattgtttaccaatgacgtatagataagcagattctcagccatataaatacttaataagattaattaataataattaataataaaaaaaaaatatataacaacttagtgaagagataagcatatatagctcattacgtcacgtaaacttgtttgttaatttataaatatggaccacaactatattaggtattattattattgttgttgtttttatatgatttttttttttaaaaaaaaattgttaagtacaaattttgtgtacaagctagttattgcattgtgaatattcatattcatatgtatatatataagtacaaacatgcatgagcatggcatgacattcattgtacatgactaataaacattaagaaattaaaatcatcacaagatatatggatggatttgagatttgattcacacttgaatttattttaaataaatatttatatttttggatagagatgtttggtaagagtgttaaatatgtaatttgtatatagctttaaaatttgaaaggaccttcacccaatttcctacaaacactactgcacagtgcatatattttttaacaaaactttctattttcttccactaaaaaaaaagaaggttttttttgaaaccaattaaagatgtatttatgtttagaataatgactaattttgtcagaaaaagcattaattgataaaaaaaaatccacaataaagagtacttatggtagaaatattacatttgtaatggtcaatctcttcagataactaataggattaaaaaaaaaaaaaaacaaaaggagagaaaaattcttcatgaaatagatattttaataccatatattataatgaatgactaggttactattatatttgatattggcgggaagagataattttaaaatctcactaattaaaatcttttactaaaatccagtcacagagaagatcgattcataaatctggaaacagtttaagactaagagataagcggaagtttgtctttctttatcttaacttcctcgacacggaagacctattgtctcttcaggacccggagtggtccaaactcagagtctacccaactgatactcagatgggtacttgaagggcccattgtggacactaaccgcctaagagtcttgcagacgtctaccttggatgcatctcggatagcccaacgatggttatgctttttctgacacagaatcaaatcttgccccctgtgccagattatggtagtgtgtgcacctcaccatatctttttgctagtctgttattccatgcctctacttttaaatgttgaaccttttgccgacatgtgtccccgacgtacaatggtccccaattatccaactattgcacacgagcataattttttccaagagacccaatagtcaggtctcttttgcatgtaatttaccctattagtgggcttttagcagaaaccctaggtgggtcatgccatcatgagcatgtccatagccgtccttagcttataaatacttttctatttctatatgaatggggatcacaacctaaatagtgaaagctctttaatattgctttaagctttcttattcttcaattgaaactaagaacacagagttaatgtttcctacaaaatattgtaaacacatcaaacacaccattacaagctaataagcgaacttgtggattaagattaattaacattcgaaccacgtaaatttccatctaatttatttatgcattttattatttctttagcttctaaatatttaatttttaagaattgcggtaaagaatataaatataaaatattttttcaataattactacctgttaatggttacttaaaaaaataattaattgcctcaaataattccattgatataattttgactataatcaaataattatgaaaaaaaaaattcggttattattattataatagaactcttataaaaatatgggtgactattcaatgg

SEQ ID NO: 320970 - DNA, 1636 bp, Cannabis indica
gcatctgattcctttcacagaaattttcttgacccgccacctctctctactatttcttcttctttgtttcgaaatctctaagtgatagagtagtcgcccacacacagacaagtagtacctcaatcatagtgaggaagactgtgaagatccactttcaacaagaggacattcgggctcagatcttgataatactctgcaacagaaatgatacaagggtttagagatctgagtggaaggagacatattattccgctgcacccaatgtaaggtttctctttctttatatgtgtttatttatattcgttttagaagttcatatttaggttgttaatcaacatacttatgagtagatctaagatcctggtaaaataattccaacaccatgcacgatgattggaccaccacctctactggtctcaagttttgtgccctttacctgggtgagacctgaaggccccgtggcctttttccctcactgttgatggtggtacaatctcgatggggacacaagaattattctctatgttagcgctaggaccttcggtcctttttctccgcagtccataatggtttgaccactgttcaaatagctcgaggacctttacggtccactcattgtgtgcaaagcatgcatgtatcttttggtcctttatgtatttaagacttgaccgggtcttgggtcactagacccacctggtgctgctcttgtcaagattctcgtggccttccatggccactgtggccatggtggcacgaacaatcacttaacattaattttattaataatgagattattattttaaagtttggaattcctattttttgtgcagaacagagaaacagactttgcatgctcagacctagggagcaattaattttaaattatgaattgtttagagtagctttgtctcaataaagtatgtggcaaaagatttctaatgatgatgaatcgtatctatgacatctgcattttggccatattggcctagacagaattaaaaggttaacaaagaatggtcctttgagagaagtaaaagttggaactcttttggtatgtgaatcttatcttgaaggtaagatggttataataccttttaatgcaaaagacaatagaggcaaagaacaactcaagcttgcacacactgttgtgtacggagctatcaatattcaagcttaaggtggttatagatatttttcactcttattgacaactattcaagatatggtcataattacctatagccaagaagtttgatacatttagatagttcaaagacttcaaatccttaactgaaaagcaattaggtaaatcattaaagacacttcgatcatatcgtggtggagagtatttggtctatcaattcaaaggctacttgttggaagaagggatcttatcccaactcacaacacctaaacacctcagtagaacgatgttttagagagaagaaatcaaaccttgctagacatggtcagatctatgatgagtttgttggaaattattttaccaggatcttagatctactcaaaagtatgttgtttaacaccctaaatatgaactttttaaaacgatgaaataaacacatataaagtttaggaaaccttacattgggtgcaacgaaataatatgactccttcc

SEQ ID NO: 320971 - DNA, 944 bp, Cannabis indica
aaaatatgatatttgtgaaataatatataaatagttttaaaaaaaggcaaacatataattaatggggcccacatatggctggccacttaatccttattttagctattagttttaaaagagaattagtataaaaagaatatgatagtttcataatccaactaatacttttaaacctaattttcattctgtcagacaactagagttttaagacctccttcttcttcttctaatttttgaaatctcttgagtgttcttcaacaatattcgagccattagtgagtgagtgcatgcccatccatatcaactttagtactcaatcatagtgtgtaagactgtgaagatccaaacacctgaaagagaatcaggctcagatcatgataatactctacgatagaaaggaacaagggttagagatttgagtgggaggagtcattatattccgctgcaatcaatgtaaggttactcaaactttatatgtttttaaattctattattttagaaattcatatttaggatgttaataaacatacttgttagtaaatttagatcttggtaaaatatattccaacactatcgacacaaaaccagaaatggagcacataatttgcaccctatggtgtatttggattgagcggaatcgagttgtccacggtcacactaccaaaccagcgaagatcgtagcctcttttactacaaactacttgcaaaatttatacacttctcaagcgaagtttagacctgctgctactcaactatcacgaccactttctattgctggcagctctcgaaaacaaccccatcacctctcttattgtatcccatggcaacctccacgattgaatgccataaaactcaatgtggacgttgttggaatttatttcaccaggatcttagatctactcacaagtatgtttattaacctcctaaataagaactttctaaaa

SEQ ID NO: 320972 - DNA, 1459 bp, Cannabis indica
gccatgggtcttcatcatgggatttgggtggccatagggggtaccccaaaagtttgtcagcccatgcctaggcataagggccctggccgacccttggctgggtcacgggacctggccgatcctctctcaacttgggaaccctggctagcgaaagcgaaggttccaagcaagcaaccaagtatttatcctcttttgacctcggcaagagtctcatgacagccttataggcatatacaattgtagtctcatacgttgtccccttgggaactctgtataagacttgtcagcgaatttattatagttgaatgtacaacttaggattcaccataggtctaagtagttataaatgagacggtagttcactgatacccagccttgtacaatgcaatcctcaggtatggttggccagaaccttgtctataccttgtagatttgttaggtttctcacctccccttgtctcttttatgcatgtgattttgagtgttggtctagggaggtgacaaccactttgtcatagctccaatcggtcttacttttaagatatagcatctagtttgtcctctttctacttttttagtgatctctagactaatagtgatacactatggctagaactaagcagtcgtattatagtgcaccaccatctgatcctcatgtttccagggtggaaacaatgagtagatttggcatggtggaggaggccacacaacctctcaatgatagagatccagaggtcagccaagtagaggtgcctggggtcgactagtgtgttgagagcttggacactgagtccaaggtggaggaggttgcgcttgttaggaggaggacctataggacttaggatgtattctccaatagccctctaggttcatatgataatgataaggagccattgaacgggcttggtcagacctcggtaataggtttagaccatgtcttggtacaatcttcagagcctcaagttcttgatgctgcgtcacaaggagatcagtgggtctctccttaatctattttcactgccaaagcttttgacagagtattggagagtcaactggtgagaggcgtccaatgtgagggaggcatcaacgagcacattgggtggatggtatggtcagagcgccatatctagtagggggtagtgctacctttgcacccatattttagaaatatagccgcttacctttggatgtgtccaacacaaatcaccccaaagaatattaaatacctctccacgatgtttgttctctatgcaaagctaagctgacctcatcctactctgttgagattgggtattattttgatttgaagtctgtgttggaatttattttaccaggatcttagatctactcacaagtatgttgtttaaacaccttaagtatgaactttctaaaacgataaattaaacacatataaagttaagaaaaccttacattgatgtagcggaattaatgtctcctt

SEQ ID NO: 320973 - DNA, 1678 bp, Cannabis indica
agatcctggtaaaataatatccaacaactataatcatgaacaaatatatgttctaaacttaatagaatttttacattatatataatcatgaaataaatcatgtgaaccatgcaacataaaatgatttctgatcttttattaattagtaaatctagtttatgttgaaataagttttatttagggaaaaaaacccaacaccaacagggctaaataatatttagattcaatggtatttgggtcttttgtaattaattaataaaatatacaaatatatagggtttcaagttataatctagggtttaggcctcctatataaaggccttaactctaacatagaaagcctaagctcagttaagcctaacacttgcctccaagctctaagtctaagtctaaaaacttctttcttcttcgcttcctctctaacatgcccatagaagcattatgtctacacttaaggttttccattcttctttcagacattgtattcctaagggttctatagcaaatcccatttatagtgatattgatagtattaaccctcattattaatacaactagaaggggagtaggtcattacccgctatcacaagggggtcgaacctctataacaaatctgtatgtttcttactttttattcttgcttgtgcaaatacgtggcaagcatcaaatctaaatgaccctgttgttggttgatcattttttgaggtcaacactttagttctttcattgagagcatggatatcgtatctgatcaaatgccatggttaacacaagaagaacccctgttgcaccatttgcatctttgggtctccctcaagacccacagactgcagatccaggtattgaggttctagtcacaactggaatccccatgttcacttcagatgtggtgaatcctatcaccacaatgggtgccacaagtcgggccactacagctggccaaactgatacaagcatcttagtggttctaaatagcatgcccttgcctccaagagaagatcaaccattggcgcctcctgctaaaggaaggacctagggccgacagccccctagaataacaattggatctcatctctgactctacgccagagagactagcccaagagtttgcgagcctgcgattggcgagccccatctagacttgggagaatatcatgagttagctagcctaagagaagttgtagaccttgcaggcccaactaaagaaccacgcactgttgattgcgatgtttttgctcagtagagacacgaattcttgatatggatggataaccaggagaacattcttcgatctcaccaggcagatttagattgccaccactaagaggctagcattctaataagacggttcaactagagaatcgatagaagaggccaggatctactcagagatccgcttcaaggaagacatatcaatagattagggagggactatcaacacgctaatcaacccagttcctcaggaactattacaaatcttcctctgccaaagggaggacagacctttcctcaaaggttatgtaaagcccgcttagctaatttggaaattatcagttaattgggattaattatgaaattatttatagctatttaaataatttatgatactgttatttatgttattcagcagtttttatatttcgcatttccggtgtccggtattttggaactcggcgtt

SEQ ID NO: 320974 - DNA, 1644 bp, Cannabis indica
ttttgagacaagtagggggcaagatggtcttcacttatctcaaaccaagtagtctcttgatcttctcaaaagaacacatatgttggaaggcaaaccgagtcccactcctatgattcaaagcaacaaactctacctacaagacaacccaccgtttgaagatatcactcaatgtaggagcgtcattagggcgctgcaatactgacctttagcagacatgacattgccttctctgtcaacaaactgagccaatttcttcaagctccaacccaaatcattggcttgcctgcaagcgcatactgagatatattgcagggagtgttggcaaaggcattcaattcaccaaagcaactaatcccgtcattgaaagcttttgtgattcagactgggctagttccattgatgatcgaaaatccacttcaggcatatttgtttactttggaggagagctaatcagctagagctcaagaaacaaaaatctattgctcgatcgagcacagaagccgaatacagatctctagcttaagcatgcacaaaagtcacttggttgcagtcactcttcactgaaattggaatagaatacaatcgcacttctataatttggtgtgacaactctggagcacgtcaactcgcttccaatccagtgtttcactcgagaaccaagtatatcgaaattgatgtccacttcatacgagacaaagtgatgaacaaatcgattaaagtcaaatacataccatccgaggaacaaatagttgatatattgacaaagtctctgtctatcacaacctttcattacctcaaagacaaacttactgtttgtcactcaccacaacacaacttgagggggcatgctgaaatgaaaggcccaaagtcagcccaattagaagatgaaatcaatatatagagtattatcaatcctttatttcctctgttatttccttcaatttagctcttataatttatttaccctaacgattaacaatcactatagtaacataattttataaatcttgtggtcactactccgaaataccacgttataataagttgcccaaaaaataaaaaattgtagaacaacaatactcttttgtataatagttgatctaagaacactcttgttaggaccgttgggtactgatttgattttgggtacactttcccaaaactttcgttccaatagagatagtcttcattcttatatatctaagattctttctatttttagtataatgttagagtttaattttatccacaactctaaaaataattaaattgttgaattaaatatactatggttggttgaaactacaatttctacattattatataataatatatatgttgatcttttgttgaaaattattgtgtaaatattaaaccaataagattataactctaagaaaaataatataaaggattaaaatattatttaaatgatgttacaacattaaacaaaatatacacataaaataaaaaatataaagatgaagagaagaattataactcaaagcaataaattaatacacataaaatacaatatataaaagagatgggagagcaatctcaatatataccacatacatcacaagtgtataataagggaatcaccaaattaacttgaataagatcttacacctttgtccaaaa

SEQ ID NO: 320975 - DNA, 1213 bp, Cannabis indica
aaaaaagaaaagaaaaagagaaagaaaaagcaactaaataattaaacaagcaaaacaaaatacttgatccctctcattgataggatccaaaaaaacatttaggtcctcttgatttgacctatccattacatatggtgaaatatgatctcatggtgctcaatattatagaatcttcaactttattattataattattattttaaatttttcttataattgttataaaatttatagcttttatgcaaattgcccaaagtagaaaggaaggttttgaaaaaaaaaaaaaatatattgagaaggcacttgcaaagtggacaataaacttttacactgaactttctcacacactatatgatgagtgcaaatgttttgtctacacataacaagcactagctatagtcattactttatataatgtttggtcattgttttatttataaataataatatatatgaagatgtcactacattattgaattaaaatttaatttagctccttttggaaagaaaacaaaatctttattattagcaaattaaatttaatgatacgattattcatttatttattcctagtaaatataattctttacatcttcacttcacccaaaaaaattggatttcctattaaagaaatgatgcatgtaagattaaaatcagctaaaacacattgtgaagttaatttattaattatcaacaaaaaaactaaactatatatacagactttgcatgttgtaaaagtaattatcgaaagtatactatggatattatattgtgggtgcgtattggatgtcaatgtcatcattcatatatataaatatacttatttttatttgtggtataaatatttaattttaactttcaattgtaaataaatatataaatctaatttttgacgataataatatctaaattatattcactacaaggaaatgttacttttattagtgcagttcactactgtgctggtaaaaataacttttactagcgcttctcgcaaactgcactgacaaaaagtttaaagttttataagcgtacctttatagttgaaaaactaaatttttacaaatgtcaataatatatatcaaaatatataactgtatacgcctgcaaaaaccagttttgcagcgacaatatataacagacagaatataaaaataattgcagaaagttaaataacttgacacaagagatttgtacgtggtatcagtgttct

SEQ ID NO: 320976 - DNA, 2281 bp, Cannabis indica
tttttaatccatataattaaatcataaaccctagttgaaataatataaaagaaacatgatgctctcattctcatacaactcacttcaaccaaaaacctagttttctaactttgtgagacaactagtagatgggagactgctttccatagtgattttgcctcttgttattcttcatcaattcaggccatagtgatagagtaccatggccacacatagctagtcaagtactcaatcatagtgcggaagacggtggttaaccaaaccgaaggagagaaggagatctagactcaaatcttgttattactctgggacagattgtgtaataccctaggagttagaaaatggattagcaaaccctaactagttaaatgtgtattattatggaattatattattaaataatttattatatgtgaatttatttgatatatgatatgttaagaccccgttggtgagctaggggcactttagtaattttgacccgagaagggtaaaactgtgaatttaatttaattacgtgcttatggactatattattttatagtatacctgttttttcttttttcaggtgtgttctgacaagtcagcgcggtatagtcgcaaccgggtatctcgggccaaaccgggttcgaggccgaaatataatttcgggatgatttattgacattttattgatgtgttaataatttaaaattatttgaaataatgtgtggctaatgacttgtttttccttggaatgtatgtatgtatgttatttggccctaaggtcatttcggtcattttggatatatgtgctatttgtaattaaagtaatttctagtaaatgaaatgagaatttctggttttccttttgccctagaccggacccctccctctcactatactcctcttcctttcacttgataattggtgtgaaagtggtttgattcaagcttgaaatttggaggtgattgagttagatctttatttgaagcttgaggtagtttttacagcttttaattttaagttttattgctgaaatttaagttggtaaagcatgctttttggatgttggagttcttgtatgcatgtatgtggaagattagcttaatcttgatgccttgtgcttaatgttgttgataatttttggttattgttttggattaagtttcaagagaattttagggattttattggtgtttctaattttttatgcaactctgattttagtgttgtgcttgagtttgtgttttgggatttgaagattcaaggtgtgagtttgaattttgttgattttgctcaagctttggagctttggttggatgttgttgattaatgttggaattgatgttgttagctctctgttgtgatgattttatctgcaagaagttaattttgggtatggtttgattaagatttaaatatatggaaaagtgtgcatttttagaccttaaaatctagttttctgggtttctcgaacctagtggccgcggccaaaaacctagcagagagccatcccttttctcgattttgttttggccataacttttgactcgggactccgttttggacgttctttatatcgttggaaagctcgttctgagctctatatgattatttttattttgactgctaattttataatatgtgaaagtggaattaaggattaaccctatatgtgtaaatcccggaatttgtgactaggatcacaggcacttggttaggagcaccccgggatttggaatctcttctattatgagacatcaggtaagacagtagttagcatgtagagtatgtgcggtggcgcttatattggaaatgatatatgtgagcaattagaaaccgagattagagttatactctaaagtgagcggtttattggcctagggttattaccctagtgaattgttaataagtattgatatgtcatgatatattatgtatattgagattatgaaatgtgcgtttaaggcataaataaactagactcggtaaattagtatcttgagtctaattaaatgcggtctagggttattaccctagaatattatggaggtaagaaagcaatgatgtatggtaagattgctaatcaagtgaaagcatggattagggttgttaccctcaataagagttattttgagcatacagtaatatgttatatgagtgattattttagtatgcaagctagggttattaccctaagattctatatgttatagtataaattgtgggcatgcatttatattaagagttatgtgaataagacttaactgggttagacctggtatatatcaccaggata

SEQ ID NO: 320977 - DNA, 718 bp, Cannabis indica
ttttgtactatatggacacgtgttatccaaaaatttaacctttaaaagtagaggctacatgtcttttctcctttaaaagcaggggtatgtaatattcgtctattaaaaagatggtggaggtgtgcggactattatgcttggatgtagggaacaagatctgatccttcatcagatgaagcatgactatcacttggtgatctggcgtgcatcaaaggtagacattcgcgacactccaaggcagtcgacatctgcattaggccctttgaatacccatctaggtatcagttggccaggcttccatgtttagacccatccaggttcgagaaaggcaacacgccttccgcatcctggaagctaaagcatggccgagtggacttccatgtattctttagtcttgtacgatcatggttctatgaagttactctatgacaggattgtagtggaggactttaattagggtattattaggctagtctcttccattatatgccacaggctacatgctcaaaaacacggataacatttaaccctaagctttcaggactctctgagatccgggagcttgtagtgctcgtccgtttcttgggaatgaattcttgacacgcggtaactactggagttgtggatgcatcccatgagttgtcatcaaataacggaacacaagttgaaggcatcacgggcgtggcacactgttgggaatattttaccaggatctaaa

SEQ ID NO: 320978 - DNA, 887 bp, Cannabis indica
acaaaacacagggtccaattggtaacttttgtaaaacaaagggtccaaaatggtatttacccattttataataattagcatttttgtccttagtattttcgacactatatgatcttttttctaaaatatacaatttgttaaaaaaaatttcttaaaatataaagttatataattatgccttgttatctcaaattggcatgtccatataaattaagatagaatacacgtggaatatagccttgtcaatatcagaacaaagtcttcttacaaggtatgataaaactgtcaagcagcaagcgaaatgaattaagcgagccattaagtagttgtactaacatgtctggccaaccaaagggagtctataggctagccaggtgagctagtatggtcggccaaggttcgagcataagctggccaccaaaagatgactttcagatcaagaaaactttcgttcgaccaagggagcctgacctttacaaggaagaggtgtacaaaggcctccacctccaaaggatgtgctcaacctgtaaagattggcctcaacctccaagggctggcctccatctacagaggctaaccatcgccaagacttagccaactctagacaaagctagtagaaacatgacctgctagacctcaacttgcagaccttgtatgaccagccaacctacttcttgtaggtgcatggccgaccagcttttccgttgcaggacattaatgtgcaaccttcatccgtggacagcaagccaagctgcgagttgggccttgaccgcccactaagatgctacgaaaatatatactttcaagggacaatttggtcatttgtatttattaatttaatatgtaaatgtctcttattttatctgctaattagggtttaagctctc

SEQ ID NO: 320979 - DNA, 540 bp, Cannabis indica
gaccttatcttccttttgcataagtacaacaataatggcgtggttacacaatgccaagtataaaagcaaatcctctccttccatgagctttaacaaaataggagcttgcgtcaaatactccttcagcttctagaaagcggtcttgcactcctcggtccacacaaacttctagttgcctcataacattgaaaaatggaacacatttgtctgtagattttgagatgaaccgagtaagagtggctattcgcccagcaacactttggacgtctttatgttttttgagagaaggcatgtcaataaaggccttgatctttttgggattggctttgatttcctgggagcttacaatgtaccctaagaacttcctagaggagaccctgaaggtacattctttgggattcagcttcatctcgtactttcttattaccaaaaaggcttcttcaagatcttcaccatgctcttcaaaggtttaggattttacgagcatattgtctacatacacctcctattggattttgtgccctaaataaaacccattac

SEQ ID NO: 320980 - DNA, 542 bp, Cannabis indica
ttgcgccttatcaactcatcccccaagcttatcgtctgctctcaggcttgtatattttttatgttgccaagaactgggctccacccagtccaggtgaggtcttttacttttatgaacttttgtccgtccccaaaaagggggacaaactaaaatgcagtttttacaaactccaggcccaccctgccaatgagggtccagtgccttctaacttttagaagaacatgaaggaataccatcactgatttttcttctccttcggtttcaaagctgtcgagcatccggagttgcttaccgaatgggtcagggttcctcccatatatcgtaccgctcccactcagctcttcttacaccacgcgaaagtttttgattgttacaataaggatgagatgaatgtcggggaccttgtcacgaccgtgttgggttttatgccctaaataaaaatccatttcaatgtaatctattttattcaacatcaataaagaaaaaaaaaagtatttttcattcatctgtgtatgtttcggttcactttatcaattgcttgt

SEQ ID NO: 320981 - DNA, 1181 bp, Cannabis indica
tcttttctctttcttttatatttttctccctataacccaaatttctagctgcactccctctctcttttgttctccttctcgcatagctccggcaagttacctttggtcaccttcaacccaaacgaacctcaaaactgacttcccgaccttacaaacccaacctttcaacctccctttaagccctgattagtcgaacattggaaaatttcatacttccttgttctctttctagcctcgctagatctaattctccctatctcgaaactcttcgccgatactactgtagttggagggatttgctggtttgtccctggattcgtcgtggtttggtgggtacgtcacagaagaagaaggaactggggaagaggagatctgattgtttcagtcgcttaacaaagccttctgaacagaaagggtgaatagctagcaaaagttagatttggagggttttaccattaaaaaattagtttaagtggttaagtgacacttatcatagagttcaaggagttttaccgctaatatctcccattaaaaatttgtcacgtgtacacttgtgtacactgtagcatgtccacagtggtacttaacagagccttttgagcgaaaggagtagaagtgaggtttgaagaattttattaccaaaaagcgatttatatggttaagtgtcactaatcatataattttggtagtttttccaccaatatacctttttttgtagaactttgtttggccatttttgtaattttaattatattaaaatatatattaagatataatttttaaatgatatagagaaatatatggaaaaggtggtgtatggtgtaatgtaagtgtgaataattaggggtgttcattggactatatctaatacttttaggcctatccatatgtgatccaattatgtataatatgttaaattttaccattcgatctgatcggatcaaattaatttaaatcatccaattgatccaattagattgattttattcatttgatgtatatctaattcgcgcttattaaatattttagatctagtattttttggatcgcatcaaatttatttaatattttagatcgagtattttattagatttgatttgattagatccattcaatttaaataaaaaaataaatttttaaatgttaattttatatatatatttatctataataaaaaaata

SEQ ID NO: 320982 - DNA, 790 bp, Cannabis indica
atcagatcaatccatttggtagagaaaccaatttttgtcatgacctccctaatgaaacgccattcaacctgatcgaacgctttactcatgtcaagcttcaaagtagcaatgccacaacgaccaactgttttatttttgatggcatgaacaagctcaaaagcaacaagtatgttgtcagtgatcaagtgatttggcaagaaggcactttgtgttttggcgatgacatgttggaggacatttttaaagcggccaatgagaaccttggtgacaagcttagagatgacattacaaaggctgatgggtcgatagtcatgcacccgttgaggttttttgatcttgggaatgagggtgataatcgtcttgttcaaactagttggatcaacgccatcatttaagacacgtacttaacactgctttggctaccacctcacccacagtagaccaattttgttggtaaaacattgaggacatgccatcaatactagggctcttgttgggcaccatggattgttatgcatttttgactccagtagcaaggaaaggtcttgtaaggtcatcattcatcacatcagtaaccatttgagaaaattgcatttaaggtttgagagagagcctcctcatcaatagtatcggcagtgaaaactgaagcaaagtaatcttgaattgttactgccattttagatcttgaatgagctcgaaccccagcctcattaataagagatttaatcttattattggactttcttgcaaaagttttagcatgaaaaaattttgtgttgcgatcacccga

SEQ ID NO: 320983 - DNA, 1812 bp, Cannabis indica
aaaatatattccatcagaggttgtttaccttcctcaacaatactaactctccctctcatcacatcatagcgatgtgagggtcacaagggggtgccctacgacacgtctctttggtccttgccatggcaagtttagagtgcttggcaatagtaactgcaatcttcgcggtaggaagatctccaactcatagattagcccgatctgtgggcaacgtatcgggcacactaccctggacaatgtaagtctacaaactagggaggaactgcctccacccctagtttagctcccagatgaattggtcgtaaaattcactgcatatttgctctaaattgcggtgatactggacttcaagttttggggaaccactgctcacctcgtgatcactcgaggacctatttaaagaaccaactaaaggagttcgacgctggtcttcaaagagaagactgagcaaatcattgtctaattgattttcacctccctaaaagtcacgctagttcatctgtatacaaaagacaaggggaggtgagcaacttgacaaagtgaaaagacttagatgaaataatggtcaaccaaacctaacgatactagccagatagttctattgtacaaagcaaaaatcaacaaagtacgagctctaagtgcaagaacttggatggacttcgagtctttagttgttaagtgactaagatagactcaccctaagaaaggccatatagagttcctaagataatcaagtattagaaaagggttaaacaggcttgtaaggccataataaagtccttgttagagtcaaaagagggccaaaaattggccattaccttaggaccgaagccatgtgccagcgaaggtcctctaggcattagcataagccagatagggtccctgatcaaaacaagaatcgaacagggttccaagttgaagcccaaaattcgccaggtccctaaaatgccaccttgtgccggccagggtcacaaacagaccctataggccaacctatgtgttctacggatcgaaaaatatatttttcgaagactcgaacctattcttcgtgactcaaagagtcaagaatcaaaacgaggctcaaaatcgaatatttttcattaggaaatcatgcattatgcatcctaaagctattatgcagatcataatacgaaaaaagattacattctaacgtgagaatcaagaatgcaaaaagcttccaaaagcttgaactcaacaatggcagaatcaagaaaacaaatagataatgggatttgaaagcttacccactaataaagtccactaaagatgcttgtgaaaagtttagatcgtcaaaacaaagcaaaaatcccaagagatggagaccttggggctcaagttgtaagagaagatgaggagtcttcttttccttttttcttgaaggtaatatgaggagagaaagagagagtaagatgggagtggaagtgaatagctatgcaaatgaaccttatataggttctgatgagcatttccccttagaaacttagcgggtggttacactgcctacaaaatggccatgcagaatatcaatagttccctagtgggaacgtgtgcaggaaaaaaaaaaatcataatgattggcaaaaagccaatttatcatgaaggggtcatatcaaaggccaagtacctagccgacaataagttgcccgagtaaggctttaacagtcagagcagaagttggaaagtccctatctgtacaaacgtccacacagggacttgagagggcaaatgttatcccaattttcgcccacatgacatggcatgtccacatagacaagattgatgccacgtgga

SEQ ID NO: 320984 - DNA, 671 bp, Cannabis indica
cttgtatagctgtatttttacaaatatattaagtgtcaatttaagatcggttagttcaaaaaactgacactataaagtattcccagtttcaagtgtcggtttacaactgacatttataaaatttaatagtgtcagtagtcaaccgacactaaaacataaaacaagatttaaaaaaactaaaataaacgacctcttagttttagctcagtttagaaccgacactaaaaataaaaagtttaatagcctcttagtgtcggttctcaaccaagaccgaagattacataaaatccaacagcgtgaagcactcacataaaccctaagcccgaccctaatctttaatcgtctttgcacatctcgaccaaaaccaaaaatattcgcctccatgttcccaaacgctcaacccagtcctagcgttcgtcctcctccctctcttcgttcttctctctcggctcagtcgcaggaaagcaccctttctcactctcgctccgccatctctcagctccacctccacaaaccaaactctagccagtcgcagatggtctctccctttctctttctcattcgctccctcctcatctctagtaatttttatctctctaaatctatctttatatctctctaatatgattttgtcccgtgatgtactttcacggaatgtattccgtggtaca

SEQ ID NO: 320985 - DNA, 718 bp, Cannabis indica
ctcttcatcttcttcttctttcttctcatctactttatattattttatattattttataacaaaaataatttttttgcacattttttgtaattatgttatttttattgtacatttatgaaaaaaactctaatatataccataatataatctattattttataattagtttgtttgtatttttagattgaaaattaaaaacaatatcgaacctactctaaaacaccacaatataaaaaacaacttaaagaaagttatgatttcatcgctactggagttctcgtgaacccttagaagaaaagaagaagaggcataagaatgaagtttttttctttattacacatttttgtttagctcgcctcttcattgaaaatccatttgttcaatggcttaggggctgtttggcttcaaaatttaaaaacttttcagtttttaaaaatagaaacagtttttaaaattaataggagttctttggcaaaattttaaaaacagtttttaaaaactgagttttaaaaactaaaagacaaaaaacatacaaaatgttgttttcaaattttcaaaagtactatttttaattgtctaacatattatattttatattttttgcttcacatactcggatcttagatcggacccgaatgggttcatattatggtagtgctgttgaaatattgatttttttagtagtaaaaaattaaaaatagtttaaaaaaaacttgt

SEQ ID NO: 320986 - DNA, 1363 bp, Cannabis indica
tatgtgggtttgaagctcaagaatcaatggctggaggtattttgatccttattcatagtgtatatatgtttgatttaatttcgcattttatacataaacatatatattttagtttatacatataaatgtctaacaatgaatggatggtcagcaacaaaggtaataatttgaggaggcttgttccgaggaggcttgctcctcggacaaaaaaaggtggcagcagcagcctctgtcccatcttcattcacttcgatacaacacttttgaagcatagcctgtataaaaacattagaaccaggagactgagagtaaaccatttttgagaaatctgcatcaacctcattgaaagccaaagttaatccctttttcttaactaactccttagcatccacattatatgagaatttcatcttgggagtcaacacacgagaaagtttaaccttccttagatgatcattaagactctcaggcgccaacaatttcgtatccaaattgaacttttccaccatatcttgtaatccatacggatcatgagcagtgacggacccagaatttaaagtgagggggggcgtaaataaatttaaaaagaaaatataaagtgtagttagtggggtttgaacctttaccctctaacctatttactaaccaccttaaccattacaccaaggttactattatgtcaataaatatcatcttttaatacatatatatgttgtaactaattaaaatacatatacatttttttctcgatttttttttttcagggggcgactgccccccctcgctacaatgtgggtccgcccctgatcatgaggaagaagcaagtacatagacaattgtatttgtttcccacattcaccaattacgctttcatatgggagtttgagaaccttgaaatcatcaagggatgcatagtcgtgagaaacattatgactattcatggaaggtacttggattgtttctctgttaagaatgtgaaactctttatcttgagtcttcgagaccataaaaggatcttcccatgatcccttgaaatatattgcattagcaagacgaagtggaggtgccaaatttacactcttcgacaaaagttgtttaatgagacctcttgtcctccttttccacccgtaggttcacatcttccctgactttatcaccctacatttcaaaatttacaattgaaatgaaaaagaataaaatgaacaaagtaaaacaattaaagatataaaagacgaaattgttcatacctcgcgcataaggtcaacatttttcacttttgccttatagattgttttcgtgatttttctgaaagatggaattaactggaattgattatgaacccataaggcgtttgcaactgaaa

SEQ ID NO: 320987 - DNA, 1293 bp, Cannabis indica
catttcttttttctttcaaaatatataataataaagcattattccccatcccatcccattcccatgtgaatggacgggtcccacacactctctgttggttatgggcaaggcatgatcatgtgggacttactctaactctacacacagttttttttttgaaaaaaataaattaatgtggggtacatcaccatgtgttattgtgccatttaaataaatataaatataatgacccagatttgtttctcgaaaaatagattcacgtaccattcaatctgagtatgtatggaaaacaatatataactgttttgacaattaaatgtgtgtatcgttataacttacttgggaaaagtataacaataatataattaacaataacttttcatttcttaaaatataaaagctcagtcatatttgtggatgtggtcttgttattatcacttatgatatagaatccaatgaataaagtttgttatagggttttggaatggttgacacagttttttctttaattattattataaaaatatataatatatagtcattaatgtcatcttgaagattataatgtgaatagaggacagaatgggttgttttggaattagattcattgcgcttgttgtttccaattttcactacaatatattttcttttccactctctctcacttttcaacatttgtttcttcttttgcttttttgttttcgtatttatattgtctttcattgtttcccaaaagaccctctttttagcttaactgtatgaaaatcagaaaagaaagttgtgagaacaaatttacgaatggtctttctcataacacacacacacatcatgaatgatgttaacaaataatagaaaacaagttcttttcatatattatttcagtacatgcaaaaaaataaccaatatcgatatatcctaattcctaagagattgtaagggaatattttcatgttgtatctgatcgtttgcaaaataataatatataaatatataaacatatacaaattttcattatatatatggtgtacaatattgtatatgatctacttattatagacaatatcattcatactcatcttttctattttctatattttatcaaaatcaacgtatcacattgattacttcaaacttcaatttcataactattagagaaaagtgaacgtacggtgaaaattgtaagaagaatgagtacgtaattggctaacatgatctatcttttgtcccataatatttgcaagtgaattacatatatatatatatattaaaagtgcctatctaacggcatttctt

SEQ ID NO: 320988 - DNA, 452 bp, Cannabis indica
tcatgaaaaataccttgggttactagcatactcggggcgtgacaagcaacaaatgttcagcgatgtaaaggagaaagtttggaggttgatgaacacttggaatgagaagattttttcggctgagggcaaagatatactcctcaaagcggttgtacaatcgatcccaacgtatgctatgagctgcttccgcttacctctcacggtttgtcaaaattttgaatcgatgatgtcaaacttttggtggggtagaactgaaaaatggttctcgcattcactggcgaaactggaagttgatttgcaaaaccaaagctgagggtggaatgggtttccgatcttttgagcaattcaatcaagctctccttgctaaacaagcttggagaattattgataaccacctctgttggaatttattttaccaggatcttagatctactcccaagtatgttgtttaa

SEQ ID NO: 320989 - DNA, 1692 bp, Cannabis indica
aaaaaaccagagaatttcgaaatcaaatcatttcatgttacagacttgtacctacaaagaaccttacacctcaaaacccgatcttgaacataaaacccgggcataaccatgatcttaacacgactcgggccattcaatctctgcctttccatcaacatatcatccatgtaatgtgaatcaaagttggtgttctcttccaccctcagtattcccaatggaggattaaacgaaaaggcgagcaaatgaagcaaccaaatgcatttcgaagccacaaaaaacgcttgaagaagttgttcagaccaaggcctagtccaattcagtgttgttatgatatgactcatcttctgatcacaaaacttactgaactcttcactgtaatacttagtacctttcctcaacacttcattccaactcaagtttcttagcgcgacaaatgatgcgaattgagcttgtctatcttgataagggtcaagaatctttggtgagccattcttctgaaacacacagttctcaaaatcttggtagagtgattggtttataatggcttctaaatggtaaagaactgcttttgagtattttgaattgagagaaagtttatatggttgaagaagcaagttgagattatcaacaagcattgtatcagtctcttcaatctgaatcacaagtgttttacagaattgttttactgataatcttgcttctgatacaatctgtaagaaaccttctaccattacttcttcactaacaggcatcaagttttcagattttcctcttttcggaaagtttctgaggttttcaggagcaggggagttcttaccttgtgttgcttgtctcaaagctttcttcaactcttcacagtaagtttccaaacactcaagcttctccctcaactccccaagagaagatttcatatcagaaacttccattaaggctgcatctcgattctcatgagcttcaatgagctctttcctaagtgcctcaattgacaaaatcccagactctctaaacacttgagatgacacatcttcagactcagttcgattaggagagttttcgtatttgttgttgttcttcttcttcttaaaccgagggaacaaccaagacatcacaccaccaccaccgcgattcttaggctgcgaatgcatcgaggaatgagagtctgtcaagggaacaacaatgttggaagtcctcctgttcttaattccccctccactatcagattccgaagttatagttgcaggcctgcatctattacacgacgaaacagcgttgaaatctcccaaactgtttctccttcttgacttgaacatgtcattttggagaggtgaggtttgcagcactgtgatatggttagcataagaagttcctatcatagatttatgatcctcagctacacatgtatgagactctaagttggttgttgttgtgtcacaattaaccaacccttttcttgaacaagaattctcttttttgtagtctgataaaactgtttcatcaccagttccacttcctaatccatactcatcccaaatttcggataatgttctacttcttggttcattttgttgatacccagatactgtttcatcttcataactctacaaaaaacaaaaagtttcttactatacttttaaaatctaacaaaatataaaattagcctctacatccgaaaagctaatcataggttcttct

SEQ ID NO: 320990 - DNA, 1543 bp, Cannabis indica
cctagttgaatatttccttaaatgaaaataaaaatagtgtctcaataaacagaggtcactgtatatctcaccaatggctatagagcaacactatgtgggagtccatcattcattgccacataataaaatgcgatattaaggggatcccacaacataaattgagcactgttagcgctaatatattcctctcagcaatttagaagtaaaaaccccaattaattcaataaaccatggttagaaaatatcgaaaaaagaaaaagatttttggttctggtttcgggtagaatacacatatcataatgatacgtagggatttagaaattcaggctaagtttaccgtcaaagagagtaattgaacttttgagttcttatgttgtgtaaccttctcttgagatcttttacaacatcttttgcctacctgcacattcaaattgatagttttatagtttatcaagtaacaccatagacattcatacaaacacatataagtacatacataattatatatgtacacatatctttatgaaaaaggtaagcaggtaaaaataaatggaaagaaatcgtctttttttttctcttccaattttaatttaaatacagtagaatttaagcaataacatgttgggtgaaaagagtgactagcagaatttaacagaaacccaccataaatctcttattaaaagcagtatattattattctcaaatagatttcttaagccatgtttacacttttgacaacctaaaaaaatagtgaaagaataaatgttttctaaaattttgtgactattcttaaatttctatcaaatccacaatttggatatggaaaaagactaaaactttgcagaagactcaaaaagaaaccattaaaaaaattaataaatcgatcacaaaaataaaattatgaagagacatatcatacgctaaaagaagaaacaaaaatcaaagtcaagctcataacataatatttatgtattataaaagtactctcctctccaaatagtagcaatattttatcttcctccctcaatcgcattcaattgcggaaattcccaacatttcgatcgtagaaattttttatcttcctccctcaatggcgttcaattgatgaaattgggattaaacatttcaatcgtaggaatttttctccccttctcctatcgcaaaaaaaaaaaaaaagaaggctattttatattttttgttttcaaaaatttcaatcgtatgaattttttttgtcttcctcagtcgattgaagattacatactgaaaataaaaatgatgtagactttgtgggtaccaaaactataaacactgtaattttcagatttgagattttgcattcagattggagtttgggaacgctttaatacatctccatgtgattgcaaacgaaattgataaagcttgggaggacaaacaaagtttccattccaataccatctataatgtactcacgacttttgcttttcttcatagttgatttttgggaaggaaaaattccatgagtttgcatgctataaactgtgtttgagtatttggaaaaagg

SEQ ID NO: 320991 - DNA, 936 bp, Cannabis indica
agccgtgtgaatagaaaccaccctccccagatgattcctagcaacaacagctgtgcacatactctccaaacccacgcgaacatcacagtttaattttatccagtccagtggtggaggcatccagatgtccttcccaggcggagtaggactatgcaagagagaagtatgtgcatctgcaaaagaagaacaaatatggtcaatacatttaagaacattaggagtgcaattattgtgtatgacgtcgttgcgcatcctccatatgttgtccactacaaacgaggcataaaggaagacatcgtccactcggagaccccggctattaaggctccaaatgaacttcacccaatcccaaacacgaacaccggtgtcacacacagggaaaatcccccacggagaagacctccataagtgcatcgccacatcgcaggttagaaacaagtgttccatagattcctcacccctaccacacaacggacagctggtatcatcaatctgaagtcttcgtttaatcacagctctaacagggagagcttgggaaaggatgcaccaccagagaaccttatgtctctccatgatgttactattccaaagtttattccaaagcgcaggggcaacattacactggggagctctctccaaagcctgggacagataagccgatttactagagaaccgcccattactttccaaggtccacatccaactatcctgacccaaaccagggggggtaccatttttcagaatagctaacaccgtctcttggtcaaacagatgtttaagcttagggacgtcccaccctcccgaaggcaacattagatcagcgacacaactattatccataacaacactttggtttggtttcgggaagaaacctttcaagtgagggatccacggatccctccagatgctagtgtctcttccatcagccaccctttt

SEQ ID NO: 320992 - DNA, 994 bp, Cannabis indica
ctagaacaaaaggagttagttggatgagttggaaaaaactaagtcgccataaggatgctaggggtcttggatttcgaaatctaagggactataacatggcttttttgggaaaacagggatggaggctaattactaatgaaaattctcttgtggctaaggtgtataaagctagatatttcccaaatggaaatttcttcaatgctgagttgggtccgaacccaagctttatttggcgtagtatatgggaggctcaaagtttggttaggatgggggctacgagagctattagtgatggcaaatctactcttattttagaagatccttggttaccaggtgtagagcataattttgttacttcttatcatccaagcctgattggaaggacagtggactattttatgcaaattgagagtaaagtctgggatgtggagctgctgcaagatatgttcaatgatcaggacagagacaaaatcttgtcaatacagttacttgattcgttttgctctgattcttggtattgggctgagtaaacctttggattttactcggctaagagcccttacaaactgctgcaacaaagcagtggtgattggccaatttctggtgcagaaaaatagtggcagcacctgtggaaaatgcaagttccaaccaaagtgcagcatctggtgtggcgagctatgacaggttgtctacctactaaggtgcaactctctactaaacatgttcatgtggatcttacttgcccattatgcaacattgaggttgagactatctcacatgtgttgatgcaatgtagatttgtaaaagcttgctggaatatctcaagtgttaatgcaccaggtgatgaaatcacaaactttgcaaactggtttggaaaaatgttaactgaagctcggacagcagtgatggaagatgcagcaatgatggcttggcgtatttggatggcccgaaatgatatcctatggaataaaaaaagtacaaaagcttttgaagt

SEQ ID NO: 320993 - DNA, 1086 bp, Cannabis indica
ttgtaataaccaaaatatatgttactattcttagatatctcgacgtggactagtaattttttttacatgtcaattctttgctagtgataatagaaagtagtatatttccatatttcatataaacaggtgacatttatttaaagttttggcctttataactttgtctacattgttaggttcatgttggcatattacaattaaactagtagctcaaaatcctagaacatgtaacatgaaaaattcaattattaactttttctttctatgcaatgtttagaaattttgaagaggtagagatagttagtggaccacgtggcagtcaagggtattaatagaccatttcttgtaagttatatgtcatttgcatttaaggaataaattatgtgaggtaaaagaagttatggagcttaaaagaattataggtaatttatatatgattttaattatagttgtctttgaactatttatatgaattgaggtgtcataacatacttggtgtagaaaacatgtggcacattatagtttccattatggtgatataatagatattaagtagtagttagttagagaaacaagtgtgggagagaataattcaaaatatatgaccaactaaggttagttatgcatggagacacaagctattcaaaattcaaaatctagtctttggtggagagtacacgtaggagattaacatggatcttaacaagtacactatgaagaccaagcaaggtctttgttcagctcacaccaaggagagtttttctctttattcaacagattagaccgagtatgatgagagttgagaatatagtgctttaaaatgatgtctactatgttatttatttaatatttttaaaaactacccatagttagtgatgagttagtaggaacgtgacatagggttagctagagtcctatatatagagccttagttattcattatttactcattactcaaagccatcacttatagctccaaagccaagctctcgagattctcactcttttatcccttgcattcatcttagaccaaagctactactctctagtccataatagaagttataatctttcatatttttcatt

SEQ ID NO: 320994 - DNA, 1254 bp, Cannabis indica
aaaaatattatttacaaattataattgttttttttttgttagggcctactttttaatattagaacagggcctctaaaatatttgagacggccctaggtgtagatagtaaggatccgaaggatcttcaagaggattcctctgttgtacgatttattggttcagacgactttgcacagttggattcaaaggatctccaatcacaactagtccgccattattatctgctccatgtgttgtagtttgatcatcaatagccattgttgaatcgtggttggattaggtaaagagcgcgctgatcacaaaacaaaaatagagaaattgtttgagcaagggacaaaaaaatagagctcgaggaaagtgctttgccgaacaagaaacacaacgaagaagaagaaagaatcaagatcaagggaaagctttattttcatgctctgatactatattctggagttttatacataaatgaaaaaaaaaagttattgaagaatggaattgattgaattacaaggagaagagaagccactatatatagaatgaacagtagaaattaactaacttaaccacattgctaaccaacctacactaataagatatcttaaaaaaatggaaaaattaactaaatgatcaagttagtgatcgtatacactagctaattaatcacaattcttaattgtggggattatctacaccaatatttaaattatgaaatatagaaaatatatatatatttgttggaatatatataaataaggggaaaataccattttgaattctgtgttttgcaaaagttattaatttgaccctttattttggtaaatgacaaaatagatcctatatttttaagattttacaaataggaccctgaattgattttttgtcaaaataaaacttaataataatctgatctagagatgttatgacaaagttggttacgtacattttctatatctgttcgtaataaaaattgtcttaaagttaattatattaaaaactaaatttttttaaaaaattgaacttatgatcctatttttaccattttagaaaatatagagtcaattttatcatttaacaaaacagataatccatttaataacttttgcaaaacatgagatccaaaatagtatttatccaatataaatataaatataaatgactattttctcacctaccaagcacataaacttcgtttggcattttctttgtttaattttatttgggaaatttgaaattatatgcatattagggactaaaatt

SEQ ID NO: 320995 - DNA, 980 bp, Cannabis indica
ggacgagggtagctacagattgagatttagagtttttcttggccagagggatagagtctaagaccactgcctttggatcatctgaaggagtaacaaccgaactcctctcagcggtcatttaggagtcttggtgctagaggcaatgctctttggcagtgtgtcgtccaccttagaaagtttggctggagacttttggccggaggcatcacccgaccttttcttcaatgtgtgcaatatcctttgagacataattgtacataagtaaaggagatataaatcaagtaagtataagcaaagctaagaaaaatggtctaccctacatatgtacaagagcaccctcctaaacaagtaaagaaggagcatcatcagaagagttctattcttcttgctcgacaacaacgacttttccctttccttcaaccttgatggaaggatgactagtctcttcgagaccatctctgattctgacaggccactcaacatgtacttggtcactttggggagccttcttttgttttttcttcttcagagcttcatgatcatgcgcaacttccttctcctaattggatacagccccgtctgccacctgctcggccccttgaccatcatcaattgggtaaagcttatacttaatgaaattggccacaatagccaaaagtgaaatatttcaagtgtctaaagaaagtcggattatcttctgggccctcttcctaagttctagagtgaaaagaggctggaagaatgaaggaaggtgttggaaactagtatgatttgtaggggtgttcattggatcacatccaatggatttggacccatccgagccaatccaattatttattggatattggattttgccatccgatccaatccaattaaattgagtcatctgatccgatccgatccaatagatgtattggattggatcggttccatccattggatactttaactggttttttattggattgaattggatccat

SEQ ID NO: 320996 - DNA, 2478 bp, Cannabis indica
aagtgtaagcttgaatttttatggaacttcagccttccttcccgaaagccgaagcttgcttcataaaaattcaacatgactcttgcatgaacgttgtttttcgtgcaaggaagatcactaggggtacaatacatcttcaaccctccttcctggaatggaaggactgcttgaagtttgtcttactgttatacccaaaatttagcaggaggacacgtgtcaagataaagggaatgtgaatcggtgccatatctttttatggaataactcattaattgtgtaagtactagagtatatttgtaacccgctgactgtaaagtcttgggtgaggaatcaatgtacgaactggtacttagagaattaacgagaaaccatatgtggcgaaaagagaatagcgaggcaccagagaagaataacacatacctcaacttacaataaataaactaagtatggaagtcgaatcggctcaaagtacaagaatgcgagatgaccatctcactacgaggaaacttcctatggtttcatccaactaatggaagcgagactcataaccttggtaagtcagtagatttccttatatccgcaattgacgcaagatacatcttgtcgactttgtaatgaagaatgattccagctcgccattgggatcacaacagtctagtttctgctgagacatctccagaatcaacaattaaagacgtgtttaatacacgatatttctgacccagtaaaagcgggaaaatcacagctgtatgactttcaaaaccatgcactgcgtttacattttgtaatatgtaattagatcccacgaattaagggataataactgtaattacattttggttagccttgtaattaactgccactatgcaattataaatggtggcagacaacctcaaaaaagggacgaaaaaaaactcttatacaagaggccctaaaaaaagactcagaaatctgaataagaatgactcgtggactatgtagaattttaactgcaaaaccacgtaaaaaatccagtgttcatatttttacttttctatagtttttctgtgttgaatcatattcgttaggctcaaatttggttaacaaaaatctgcgttaacactaacccctcgtgatactttccctttgatcttttcaagcgaagtctaagctttaatttttatgcaactttagtcttccttcctgaaagccaaagcttgcttcataaaaatttaacgtgactcttacatgcacgttgtttttcatacaagaaagatcacggggggtaatatacaccttaaaccctcctttccagaatagaaagactgcttgaagtttgtcttactcctcgtgatgctttccctttgatctattcaagtgaagtctaagctttaatttttatgcaacttcatccttccctcccgaaagctgaagcttgcttcataaaaattcaatgtgactctcgtatgcacgatgtttttcgtgcaagaaagatcactaggggtacgatgcatcttcaaccctcctaaccagaatggaaggactgtttaaagtctatcttactcctcgtgatgctttccctttgatcttttcaagtaaagtctaagcttaatttttatgaaactttagccttcctttccgaaagctgaagctgacttcttaaaattcaacatgactctcacatgcacatttttttttgtgtaagaaagatcactaggggtacaatgcgtcttcaaccctcgttcccaaaatggaaggacttcttgaagtctgtcttactccttgttattctttcccttttatcttttcaagcgaattttaaacttgatcttttatgaaactttagccttccttcctggaagccgaagcttgcttcataaaaattcaacaagactctcgcatgcacgttgattttcgtgcaagaaagatcaatgggggtatgatacatcttcaaccctccttcccagaatggaaagactgcttgaagtcagtcctaccccccgtggtgcttttcctttgatcttttctagcgaagtctaagcttgaatttttatgcaacttcagccttccttcctagaagctgaagcttgcttcataaaaattcaataggactcttgcatgcacgttttttatagttcaagaaaaatcactaggggtacgatacgtcttcaaatctccttcccagaatggaatggttgcttgaagtctattctactcgccatgatattttcccatatgcccttcaacgttttcaagaaaagtcagtgtctgagttccttgtgcatgtttagcctttcctagcgaaagccaaaagttcatcaacacagggcttgacaggactttcggacctcagcctaaaagaaattccccgtgtaaggaaacaggcccagctttccctccaggtaaccaaaagcctcatgcaccgtaagaagtctataatctcccttatgaggttcatgtcatggagggatcgtgggagtgttgggaatattttaccag

SEQ ID NO: 320997 - DNA, 1098 bp, Cannabis indica
ttttagaattcatattaggattttaatgaaacatacttgttagtaaatctagatcttggtaaaatatatccaacacaattgactcaagacatatacatctaactgggggcaactctgccacttatatcatcagatgaatcaaattgccaacactggctagtcaaaaacacctaagaggaactccctcacactaacagaacttccaagggttattgccttttacacatgttacgtaggttgtcataggttcatcagcacttcacatctgcatttggtagtaagtggtcctacgtttctcgcaacgaccacacttgaattgatcagttgttgcttctctttgtaaaccgcgctcacaatcgaataaagctttctcttcaggcattttattttgctgctgcctctcatcagttgccatctccgttgtgctcatgtccacaagcctctctgccttgacttgtcctagaagaacatttctacagaaatcatggttttttggatccttgagattaaacattaaggatctatacttgaccttctgtgcaccagtagcaccaccccaattctcaaacaacattgactccacagtcactgcaacccgaatatgatcgcaggcattatcatcatccaacatatctccatctgcctcactagagtccttggacaaagcctcatgaagcatgtcacgtactcggtctcgtgagacatcatgagatatgatcatagatgtgatcttgggagttgatgaagcactcattgttgctggtttcatcacatctctgtttatctttccaatcttgacattctccagagaacacttttttctcaatttgaagcttctttctgtaacgccctaaataattaggcacgctacccaaaatatttaggaaaccctaatctcctaatcgggattactaattaaaatattgcagaatttaaacttttatatcaaatagaatgaaaataaacttgcaatacatttaaacttttaaattgttgggatcccaaaaatctttagaaactctattacaagtcatttctttctagctgacctaaacggcaaaatagaatgcaaaagttcatcacaggtagacccttaac

SEQ ID NO: 320998 - DNA, 1223 bp, Cannabis indica
agcagtaaatataccgaagtcgaaacgtgtttggacttggaacgtggaactggaactggaacacttctgtgagcagtgtcgtctttgcatgccgacttctgatcccaagaccttctagccgaatccaaactcaatctcctcaactccaaaccctctctcggtattctcttctctaacgaaccatttttggaaacccagttcctagccttgggcttaacaacgtcggattttgactcacttttctcccaacccttgcccacattcttatcattttctgttattttacttttggtctttgaaccctcaaaatgggctccaacttcccggagaggaagcaagtcactaggaaccaaatcaataggtttccctacacaaggagagggtctcctcttaggaatgggcttcagcccgcgaagaatcggaactggagaagccgcgtctagacgagtaacgtaaacgaactgacccagctgaatctcgtcgttgtatattaagtccaagtcctgatcagagatggaggcgtatgcagaatgaaccgagtccgaaactttgaggaagaaacctctgctccgccatggatcggcatcgtcggctccggagagtgacggtaagatctcgatgacctgaagaagggcagagcggtggcctccggtgactctgacgtccttgttggctgcattgttgagaagcttggaaaggacgccgggagtgagagagaccattgtgaaagattagaggaaggtcagtgaaggtgatgggcattggctttggcatgggcaagttcagaaagacagatgttctgcatttttgaaataatagaaaactgagtaaccaaaagtgggacaagtcactatcgaatctcaatgaacgcattggggattggggagcttatagctatgaaactggcgcggaactaagcctttttcttttcttttcatttatttaatttttatttgggttatttgctgcaaaaactactaaagtaggtaggtttttgcaactaacccccaattctaaaattttggtggtaaaacctcctaaacccagtttctgttagcagttagcccgtccatttttgggtgttaagtgacaggttggaatgtctacgtgtacacaatgtacacgtggcacaatttaattagtccacgtaataaatatttaaaattaaaatataaaaattaattattttttaaaataaaaataaaaaaaattatttaaaataa

SEQ ID NO: 320999 - DNA, 3157 bp, Cannabis indica
gttcagtttcagtttcggccttaggctgtctgggtccaggccttgtccagctttgtgccttgtctgagtcccaaatcaagacatcgactatgggtcttgtccaagccccgattctcgaatcttatggacaagatctggatcccactaacaggtcccagtctggtttcggttcatgtcctaggtcccagtatgggtctaggtgtaggtccgggactaagattgtggtccagttttgggtctcgatcccagttctggttcccgagtcctgttcaactttcgggtctcaatttaggtttgaattcgagtcccgagtcccagtttgggttttttatttaggttttggacccaatcccacggtgggtctgtgtccgaatctgggtcctggtgcggttacagttttgggttagggtgggtccagttctgggtttgggttcgggtctaggtcccgttccaacatcccagtccggttcctgttcaagtttcgattttggttccttagtgtgggtctgtgtcttagtatgtgtttgggtccttgtttgagttcgagtttaggttcgggttgtggtctgagtcctagatacatacacagactattggttgggtccaagaattgagtcttagatcccaggtctcgaggtgggtcgtaggtccaagttttggtctgggtcgggtcccagatccctatccatgttctaaggcccaagttttggttctagtttgggggcccaattcccaggtcttggtgccccatctatgttcgggtcctaggtcccagtccaggtccaagttcgtgttccggttcgggttaggttccggtccgagtccaggtcccggtttgggtttgggtctgagttcgggtcccagtcccattctgggtcctggtttcgggtcccaggtctgagtctagttcttcggtccacggtttagccccgatttttgcgtctgtgtcaaggtctcggtctaggtccaggtctcagtcttggtttaggtcccaggttacaagtcccggtctgggtccaagtcccggtatgggttctaattagatttgttgtttaggtttaggtcctgtacagtcccaagtctggcttctagtcccagtcctggtctgattctggttccgggtccgggatcgggtcggacctgaacgtgggacccgatctcagaccctgactctgacatagacatggatcttgatatgaacctcgattcgaagctagacccggacacatacccagactgggatcgaaacttggtacttggatccggaccgggacccaaaccctaacctggacccatacccaagacttgtactcggacctagacctaaaccttgacctagatccgaatccggacctcaacccagacccaaccctagactcgcaccaggactaagaccccgacctagacccggacacgaaatcgaaatcagaacagggactaggacccgaacccaaacatggacatggattgggacctaggacccagacctgaacccgagccttggaacctagactcggatcgacactcgagactcaaacccgaatctagatttggactcaaacctaggtctcgaaccttgatctagtcccgaaccgagatcgtaaactgaaacccgaactcgaactaggacttaaaccctgactgggttctagactcggaccggggcatatgatcaggacctatgacccgaacctagatgggggacctggacctgacccgggctttggaacttgcaccgagacccaggacctgaccctagacccggaccctgaacaaggacccgaaccaggacttgggacccgaagttgaactagaatgagacccgagacagggatccaaatctggacctgggcttgaacctgacccatagtcgatgtttggatttgggacccatacaaaaactcaaacccaaatcgagactcggacccaaacccagacccagaacgggacccgtaccccatgacccaaaattggaagcgaaatcggaagcggactgagacccgggaacaagaccaggggactaggacccgatctttgtcccaaacttggaatctgactaggtcccagacccagacccggacaaggacgcaaacccgaatcaaaactcggatcgcgactagggacacgaacctgaatccagacacggacttggagccaaacctgaaggccccagactaggattggagactcagacacgaaattagaacaagaatcaggaccaaggactgggactgggacacaagacccgacccctgtctcggtcctagacctggaccttgacacaaacatttacacggacacggactaagacccaggatccgaattggaatgagactgggacccaagattaggatctggatcttgacccacgaccctgggcttggatccaacctgtagtcagtgtttggatcttggaatcgtaccaagacccaaacctggaacaatttccagaccaggacacaaacccagaagtggaaccgggacccaaaatcaaaataagaaccggaattaggaccatggaacaggaattggacctggacccagaaccggatctagacgcggaaccgaacacatacccagacctagacttggtccatacccggatctagacccgaactcggacctagacttgtaccaggacctgcgaccctgaacctagaacactggaccagtgacccttgacttggaccagaccctgacccagaccaagacccagaccgaaacctagaatcagacctgaacccaaacccagacccagacccagtgccaaactcgtatcaaaactcgaactcgaacttgggacttagacacgaacccgaactgagatcaggactaggaccccgatccaaactaggacaaagcccagaacttggacttggactagaactcaaattgggacttagacccgggacccgagactcagacttgggagctgaaaaaccaaaacgtgacctagatgggggacttgggccccaaagccaaacctttacctagacctagaccaaggatccaggcctagatgggggactctgacaaaaaactagtccctgaaacttggactgagacccgaaactcgaccccaaactcgagacacgggtcccagaacctaggacctgactaccgggacacaaccccaaacacggacccaaacccaaac

SEQ ID NO: 321000 - DNA, 917 bp, Cannabis indica
gtgaacataaattaatgcaacttcatgttgtaattttttattagttatcttttaaagtaattggattttgttttaagggtggtaaaacgtgttattgtattattgtatcgtttttgtgttgtttatttttgacccgtttttgtatttcatgttaaatttattggcttgttttcgactcgcatctaattttctcaatcttaactcaattcgtaaaaaatcatgacgtgttaatgttgacccactttgacctttttatttaaggtttgacttattttgctatatagaaaaaaaaattataaatttaagaaaaaattataaatttagtatggcttcattaaaaaacttatatacatctatttatatgtagtttaatatataataaaatttttaaattttcaaatattttcaatttttttaaaaaaattaaattaattttttttaacacaatcactaaatatatttttttacatagttatattattattaataattttttatattattttatttataaaaaaaccgtatcaaattcatgtagttaggtcgggtcgtctttaacacatttttatttcgtgtcaacctatttttaacttgcatctaattttcccaaccctaacctgtaaaatttatgttgtatttgtgttcatgtgccgtgtcgaaactcgttttatcactcctactttgttttagtttctcttcttcaaatttgtaactaaagtacatatattttgtgtttgcaaagtcggtaaattagtttaaatatttaataaaaattaaatattaattttaatgtgcaatattgtgtttatgcctcatttatttatgctcacactattatatttgtaacgtccccgcttcaagcctccattgggtccttacacccacggaataaatggctcttatacacgagtacgtca

SEQ ID NO: 321001 - DNA, 652 bp, Cannabis indica
aattttgaatattttataatataaaaagtcgtattcaaatattctatttcacgtgcgtataaaataaaaaaaattacacgtataacagattgtttgaattctatttttggcgtattagaataaaacaaaaaaacaaaaaatgtaggcacgcgaccatcatctcgtctaaagactaagtacaaatttaaataaattatagtggcgcttgataatatttttttaatcagttttttgttttcaaaattagaaaattggaaataatttttaaaattatattctataaaactatttttcactttttaattttttaattgagaattaaaattttgaaaataaaaaaatcacttttaatatttttttaaatagtttttttaatcaatattttgaactctgactagactcaaactggatccaaacccggtcccggcccttgacctggacgtggactcgacttcggacctagacctaacttaaataaagtcaaaaattaaatatgaaaataaattttacataatacacttttgtttttatttttaaaattgaaaaacaaaagtggttaatagaatgcgtttttgttttctataaacaaaattttaaaacaaaatttattttatttttattgataaaaaataaaaataaaagtattactaaa

SEQ ID NO: 321002 - DNA, 818 bp, Cannabis indica
cttcccagctcaagttgagtgctaagttgaacatcattttgttttacctgaaatgtgaaaaactacacctttctcattatttttaaatgggaaatcacatctctactagttacaatattattagtttcaacagagagaagtctataaccttctacacaagtaggatatcccaaaaatatgcattttattgatcttttctcaagtttgttctctacattgtgtgcatatgaaacacaaccaaagatttttaaatgagacagagatggaggtttacctatccacagctctttaggtgttttcaattgactttttctatttggatttctcttaattaagtaacaggtagtgtgtattgcttctccctagtttctttaaacctgcttctattaataagcatctaactttattaagaaaagttctattcattcgttcagcaacaccattttgtgtggagtctttatcacagttttatgtctttttattcaaaactttaaacacaaattagtaaattcatcatttataaattcaaatccattatcagttctcaacactttgattttagaatttatttggctttcaataagatttttctagttcctaaactcttctaaacagtcattcaaaatgtttcccttgggacaactgcccttgattcttcttggtcatcttttggtcgtttccttttcatctacttatgttcttcttctctcccttctacatgagcctcattttgcaaggctgctgtcatagactcaatcaggttgtaaaggtcaaaggggctattgaaccatgatcgcaggcctcaaacgacgcatgaa

SEQ ID NO: 321003 - DNA, 734 bp, Cannabis indica
aacaactataaaaagtgacccaaaacgtaggctaaaaatagcctaacaaattttgttcgacaacctcacgatgatccttcaatcattcgtgtgggtcccaaggtaataaaaaccacctgatcctcgtttccttgcgggacaggccttcacagagtaaaaatataagatttcaagtggagttggacattcccactccataatttggtacaagaccttcaaaaaggccaaaattctatatgaactcggaaataattgaaaaggggcaatttcgagataattgcaaaaatccttgtattagtctctcagagggagtactgctccaactctgatgttcttgaggctccaagtgcctatcccaaaagagccactagtgctacaaccctcttctcaaattattcttttaggaggaaaatagctgaattcccttggagctacggacctaacacgacatcctttcttttacttgatgccacatgatcttagtagatctccaacgtatgctcttatggatctaactttcaaatcgatgagttctacttcaaaagtgattgtgggatcttgaggagtcttggatttttgagctttagaagtcataatttcaaaatctaagtcacctggtgaaaaagcaacagtgactcgaggtaaaaataagggtcttgctaaaggaataatagataaaatttagggttcaggccaagctgcatctcgcaaaaaatgacgtttaccctcagtta

SEQ ID NO: 321004 - DNA, 1589 bp, Cannabis indica
aaaatttacaaatggtcttaaataattatagcgtaatttttttttactaaaaaatttcttaagtatgaagtatattgtagacttatcataatttttttaagagaaatgctaaagagtactagtagtgtctagcactttcctatgtgttaatatcactattagtctaactaagtatcgagtattatataatttaatataataatttttaaggagtatcgctagtcaattacaacacgatatatcgagaaagtgctaaacactactcgtgctaatagtaatactctttttataatcttgtattcataatactattgtcactatttatcaaaagcctacattgttatgatttaaattattaattaattgttatgatttaaattattaattaattgttttgtatgatttcaagcataataattattaatttttttaaaaaaattataaatttcataacatataatcagtcattgctgtctaacttgtcttgtccacagctttgtttgtgggcctgcattccaaccggtattctagaagaaaataatattgatacttttgaaaacaataaaataatcttaaatataaaataaaatctttaatagaaggatataaaattggttaaatttaaaagcactaaaagaaaaggttaaagtagattcttactattggatattgaaacaagaaaaggtgtaaaaagaaaaagaaaatgattttttggtatttatcaaaagttggcccttctagaagactagaattacaaaaaggctaattaccattttttttcttcaaattttgacatgtattatattatgttcttgaacttttcagaccgttaattttatttttttttgaattattgaaattattgaattaaaattttttgtcaaattttactaacgagagtctgacgtgaatgaaagctcggggatcatgatttagtacatgtcaaaatttaggagacataatttgtaaattttaaagtatgggggccacgatttagtacatgtgcattcgttggttagtaaaattgaacggaatttgataaaagttcttgaatctaacaattttaatagttcgagataatttttaacaatttaaaaagtttaaaactatgatttaatcatatcaaagttatcaagctgatacaaaaattctatttagccttacaaaaattcaattttcacttttggaaaaaataaaaaacaagttgagtaaagtttattaaattaaattagaagaaagaaaaaagagtgatgagtaaagtggcatgagaagtgagaaaataccaagtccatagtgtgtgcatggtatggtgccccttggctttgagtgagttttacttttcttaaggatatcacacgtgtgcaccctaacacgtgtggatctcattcaaacaattcttatataaaacatgagattcataataatacctcattaatgtttcttgagttttaaatactaaacctaaaagcagggccggtcctcaaacaaagtgggccatagagagaaaaaaaaattttgggcccttatgttaaaaaaattgtggtatttttcaaaatcggtaaaaaaaaatatataattttaaaagagga

SEQ ID NO: 321005 - DNA, 1564 bp, Cannabis indica
ttaagttattatgaaacatatttctatcttcttcttctttttttcaaaccaagggtaaattctatgtatgtagttggaattatggaatattaataaataataaatagtttgagttaaaagactttcttgtcacagcttttattatagaaactgattaaagggaccgtgagttgtctaaactctaaacccttcaatttattatattgacatttctcgttgatgaacactaatgtttttcaaactctgcataaatattaaatgcttatttatttttttctgttttgttttgggatatacaagtctcattacattgttaaataatcacagaggaaaagatatttttttttgtataatcaacaatcaatttgagaaaaatcacatgttacagttaatttgttgctcgagttagtaattatatttcaaactttatcatctagaaaaatttaagtgacctgctaatttttgtaactaatagtatttagttaaatctaaatttattatctaaaaaaaatccaattagtaattaaatttagaatttagccagtcgatcaaatctaattagatctcaaaatttaattattaattaatttagatcgatttttttaattaaatatctaattagacacttaatttttattattaacttaaaaacataaagaaaaatacctaaaaaatctgaatgcaaacattcatttaagtttaatactatataaatatatcatccttacaaatttaatgcaactaaaattttaaaataactaaaacaacaacacaactaactaataaaatagaacaaaatatcaccaaaataaatacatagaataactaagtattacaaattaacaaaaatatatagtaaaaatataatcaaaatagtttttttttattatatataagtataaataatttttttaatatgtatttgtttatcgagattttcgaaaactaaatatatttagaacttaagaaaaaaataacagaataaataacaaatacgagatttttacgtgattcaggcgtgagctatccttagtccacgaatccattttattaggctcattggctagtaaatgtttatagaaattggaatacaagggactgaaaatctatgttcctcttattcatcttcaagaagaagcttagtaggaattttcttgtagagtttttatgcatatagtatagtattattttctatcttccaagtgtctccccccgtatattatggaatgtaggtgttaattccatttttggcatatttaattgacaaaaatattttattattcattgtatattttcgactggtatgctttaatatggtttcctattttgtgtattcaaacttgaaaggaaagttgtctagctttcctatttttggaaaaaaggtaaaaatagtaagtttggttacccatttcttttttatctaaccagctggtatattctgatcttgtgtgagtttcccattttcttagatcagatttcttgaagagaaaaccggagctaaactttccttttctataaaaggaaagttgtacttactgcccacgattctgtaggtacagaaacg

SEQ ID NO: 321006 - DNA, 784 bp, Cannabis indica
atatgatatataatccaattcaatataatacaaaacaatacaatattacgacctaatacgacgttccaaacaagcccttagagtactaaatatgtataacttcaaaatataaggtaccaaataagtattattaaaaacataaaagtatcaaatatatttttcgaataaagttagggtacaatttatacatgtatactatatcaacaatgaaaatacatttatacatgtataatatatcacgcatttcatgcattctctttctgttttaccatttaattttttactacaatttttttttttattgtggttgatgttttagttatttaagctattttataaaaaaatattatttcgttaaaaatatggttcaaatagattattgcacacacgattctttcattttatatgggtataaaatagactatttaaattttcttttttatattataaattgttttgaatttttgtaaaattttacaaaacattttaaataactatataatgtacacgatcataaaatatactaaaaaaatttattgaatacaaaaatagtagacaatgcatcaatatttttttttggagggtgcatcgtactacccatatcatttaatgctcatttcaaatatgtatatatatatataggttctcttttaatgagtattatgcatgaatgagtggtattagaaaattttttatatcaaacaaatctttcctatgagcttgaattgctttattagctaaaaaaagataaaaaaaaaaatatttttggcaaaaaaaaaaaaaa

SEQ ID NO: 321007 - DNA, 778 bp, Cannabis indica
aaaaaaatattaaaaattttaatcataatatgttgaaatattagatcacattatttaatcttatagtaaaaatatgagaataaataagtaataaaatttaggggagtaacttattaatgaataaaaataatgtaatacgtattacagaagagaagagattgaaatgattcagcttaaatacccttgtatacacgtgtgcaaaagaaatttaaaaaacgaatgctatatctgagaataatataaaggctagcaattctgtaatttgtttcaaattttcattgcgggtcgtaaatttcacttattgaaatatgtcataaacttggacacttagcctcataataaaattgagagaaaattacactgtgggacgatttttgaaatttattactgtatataccgaatattttttttatttggtaaaagtagctatttttttaaattaatttgacatgtgtacacggtaactgttttgagagtggtttgagtgttaaacacgataccatttctcattttctctgtcaagccatcactcaatcacttccattttctttgcttttctatttttatttcctctcatttcagcaaagttttagggtttctctctgttagggttttgcatttttagttcgtttatgctgcgtattagaagtttaatgtctctatcaccggaagtgtctggttcgaagaagaagctggaaaaaacagaggaagttgcttcgaaaataatggttggatctggtgtgaaggttgttgattctgataaggagaagaaaaataa

SEQ ID NO: 321008 - DNA, 1558 bp, Cannabis indica
ctaatgaagcttgaatttcatgtggtggttttagctgtatggaatccttgggacaaaagggccaaggctatttctgatttgggtgacgaggactacaaaaccatgttgtgtgtggattctgcagctgtggaaaactcgattgtcttgaaaccttttgaagaatggaaaggccatcaagagatttctactgtttcatcaagctactgcagtggccagcttgatcctagcaaggttcttcgtggctttcgctgatttgtaacaacagccttaaagatggtgtcatactatgccaggccggggttttcaatagatgaggttaggatgaaagagccttgctttcactaatatttgaaatgaaaggttcatagccagaagttttacaacaacatttatgtgagttgttttatttaaattatgtgcatacactttcttgttcatcatcatgtacttgggattttcttgaagtgaggataaattagatgcaaggctagtaatatgtgatagtgttctttgccaaaatccaatccactgtagaggttgagctactgaaacatttttgcatgctgcaacatttgtaatggtgtggaacaccagtcttgtatcaaaatattgtataaaataaatgaccttcataatttttatatatattattgctctttttgagtatataaacaagagaaatgtggttttagaaaaaacagacacaatgacataaagaataaaaacttactctgattgaaaccatttcttcattcacttagaagagagaaagcatggattgcccgaaaatctctttcgcgacgaaataggctctgcaaagaagttcactctcaatcctgctcaattcaccccatctaattactttgttgtttttacagtctaaaactctataagaaaatcacaaaagcacacaagttaacactttgatagtcaacccaaaatcaccattgattgccttgccaacttctgacaagtataaaaccctgcaagtccaaacaatggatcatgtaaagtattggtgaaatttcagtcatgctctatatgatgatgatgatgatggtatgtattatgtgatttaacatatagaagtttttggaagccaacaaactactgtaactgtcattataattctttttgtatacatatctttgttgaataatgacaaaattatttggcctataaccattttgaaaagactttttcatttcattacatctttaattaaaaaagaaaaaacgtatcacaatgtgttttcttatttgtataaacatcttagtcactaaagtaaatacaaaatattgattatcatcaatcactctataacattattcatcatgaacagagctccacagaatttttaatttttttaattaattgtaaattttatttgactaaatttgtagttaaaaaaatacatgtttagtattcataaaaaatttgttatgttttattaaattaaaattattccttagattctctctagcactcacaacagttttttcttttaaaatacatcatcaaaattttactttatctatttcacaagaaacttttacac

SEQ ID NO: 321009 - DNA, 1857 bp, Cannabis indica
accttatgaattattataccacaaacagcctgattatactcaattaaaaatatttggatgtcttgcctttgcttctacacttactgctcatagaactaaatttgattctagagcaaaagcttgtgtttttttaggctatccccaaggtgtgaaagggtaccgattgtatgacataaatagtaagcaaatctttatttccagaaatgttgtgttccacgaacacatttttcctttccataaacttaatgatgaaacaggtaaaatcgatccattcactactgctgttctaccctctactggtattaatgatacaccagttggtgactatcctattgacaacatagctattcctagcaatgacttaaatgtgcaggacacaacaaatgcaccagcagcagacataacacacacaccagcagacaacaatcacacaccagcagacacgactcacgcaccagctgatataacacatacaccagcagctgaaacttcatcttcagcagttcttcctcgaagaacaagcagagccactaaaccccctgcttatctacgagattttgaatgttattctgtccttcaagacaaacattctacgcctcactctattgataaatatatgtcatattatcgattatctgaatcttataaagcctttattcttgcagttacttctctcaaggaacctcaaacttatcaacaagccatccaattcaaacattggcttgacgcaatgaatgcagaactccatgctttacgcgccaataatacttggattgttgtacctttacctccaaataaaagagccattggatgtcgttgggtttataaaatcaagcttaatagtgatggttctatagaacgttttaaagcaagattagttgctcaaggatacacacaacaagaaggcctcgatttctttgatactttctcccctgtcgctaagatggtcaccctttaaattgctacttgccatttccacaatcaaaaactggcatatgttgcaaattgacatcaataacgcttttcttaatggcgacctcaatgaagaggtctatatgaacatacctcctggactaacagtttctacttctgctcctacaggtaccactcttgtttgcaaattacaaaagtcgatttatggactaagacaatcatccagacaatggtacaaaaagctcactgatgcactacttcaagaaggttttcagcagtctcaagccgattacaccctcttcaccaaaggacgggaagacactttcattgcattgctcgtgtatgtcgatgatatcgtaattacgggccccaatcttaccatcctgcaacaacttcaagaatccctccatcatcaattcaaactcaagaccctcggcaatctcaaatattttcttggttttgaaattgctcgaacaaaagacaacctcttcctttctcaaagaaagtacacattacaactacttgaagaaagcggttacattggtagcaaaccagctaaagctcctatggaccctcgacacaaacttgatgaccaggaaggcgagcctctcaccaacccatcacactataggcagctcattggcaaactcttatatctgactttgtcacggccagatattacttatgcagtcaatgtcctcagtcaattcatggcatctcctcgcactccacacttacaggccttgcatcatctcataagatacataaaaggtagtccaggacaagggatcttatactctgcaaattcatccctgcatctccgaggattctcggattcggattgggcttcatgtcccatcacaagacggtccaccactggcttttgcatcttcatggggactgtctcatctcctggaaaacgaa

SEQ ID NO: 321010 - DNA, 948 bp, Cannabis indica
aggacaatagaatagaatagaattgaggttttcaacttttattttcaaccaaccaatgttctcttatatgaatttatcaatgttgattgctttatgtattttctccacttggaatttcataattttgtttcttctctgtttgattatttttgttctatttatatcctaattcatagttggaaagtattggcagtatttttgaaaataagaggaaagcttttcataaaccttcttatattagagagtggggtgggttacattacttttgttttgtttactgtgagcttccataagcagattactcatatgattatttatgtgctctatttgctcaacataaacttggcttacacaacatctttcatttattataacatacttattgtttagttctttcctcttctggggtagagtgggagagtgctcttgccatagaattactgttttgttattaactgtaaccatggttttcctccaccacaagcgaggttattagtatatatcggggaggatcctgtctaagacaagaggatctcttttctttttcgaaaaaaaaaataacatacttattgtaagtggtattagcacaaataaattagttaaatgcctttagttatatacacttagtagtataccatgatctgagttgagttgttctgttctgtgagacttgacttagctatatataaatgccttcatttcatacattgtatgatgtatgtgcttaattttatttcaaatgtggttttaggggttgaagtttcaataaggtcatcgtggtggtggtggtggtagggacggtggatgagcacagcaaggacgttggtctaattgagctaagtctttttctttctttttacttaatttcttatagttaaaactacaactttgtttgtttgcatgccttaattaggtcttattgcttttttgtattcctattttcataat

SEQ ID NO: 321011 - DNA, 1394 bp, Cannabis indica
aaataaaaataaaaaaaaataatcgtacccaaaatctgtacgcaaagaaacacaacagccaaataataataagttctacaagaacaacaataataataaattaaagttaaaaggggttttgtacactaaagctactaacaaatgaaactggaaaccttttcttgcttctttggtattttacgtggtgcctctgccactctttctccctcacatccaatagttcgcactagttccatattggaggctgtatactatagaattatttttgtgataacgtattaaattaaattaataatataattaatgaattgaaacccatgaccgctttgataatgaggaaatattcaatagactacgtatgtaaatagaacattatacatataacatcatatagaatgtccagtaaaaaaaaacttgtttttgtggtgggattgatatggagtatagtacatgaccccaaattatctattttcttatattttttgtgtgaattgttgattgggtgaatttataacgtaataatatcatatttattttaaacagaacctaatgctatattattaaactattttttatttttaaagaaaatttccaaatgttcatttcgttataatacaagtgttagaatttcttagaactaagtaatgttattttataattctagtagagattcatttaccacgtgttttacgtaaaaattttacatattattttttcttttattatttttttatcactttcaaaaaattgtgttaactatttcaatatatatatatatatatatattagtattgttgactggatttttagctaaccgatgcggagtcgtaataaatgagatttaaaccaaaatcacaataataaatgcaattaataacaccggaattcgcaataaatgtaaataaaagacaccaaaatttaaagaggttcggccccggatgtcggtaatagcctactcctcttgagttttattgatctgagtagcaaaagtcaagaaaaggctcttgattgcaaagaatgagaagtgtttatttttctaagtgtttcagattacggatccccttcccatgtcatgggtgaccccttatataggggaggggggttggtgcttctcgcttcaggagatgcgaccaacgcggagctatctcaagcgtctccttgattttcggaggtggttggagtttgatatttaggatgatatcccactattttcgtgggttgacaactgtctttgagcttttcgcgggatttgaacatttgaaggagtcactgatgacaagggtcccttatgggtgtgacatggtcgtcaaccacctttaaggattaagcccatacttgggggtaacacccagggactctcgctgagggggggatgacaaccatcatagttaggt

SEQ ID NO: 321012 - DNA, 1289 bp, Cannabis indica
atcttttttgttttgtttatcgtgttctatagctatggttaagaaaatgtatgcaactaacaataatggatatcaaatgactctctgctaggaatttcatcgaccagtttgcgtgcaagttgatagattgagagataaagagaaaagggaaggagaaagcataataccttgctgtgctgttcttgcaaccttagtttcagcagctattgaaacagaccttttgattgaggaaaatggtaagtgagtgtggtttttgtgaagaagatgaagccattggattttagggtcacagccattagagaaggattaactaagacacaatacaatagaagcaaatatataaaaaagaaaataaattaggtattaattgtttttttaataataattgaattataggactatattaaacttttttttttttttatatatacattaatttataaattatataaatctatacacacacgataatttatcaatcaaattaaatatctttaacttctaaaccatatattaccctataacataaatcagttgtgttgtgtatcactatacaataaatagatttataaatggtttgtgtggatgattcatgattgatataaggcacaaaatcacaaaaatgtggcttttttaaaagataaatattttttataggaaaaaatgttaagaaataaatagtacagggagctaggtgggatacttaactgtttctctctctcttttaattttttccattagataacttttgtgaaccatacaaaagaaaaaaaatgaattttaagtatttgtgcatggtttcttctcaaagtgtaattttgcaattttcatatttgggcttttacattgagccttgatccattgatcattattatttgggctttcaaagtaggacttggaccttctcacctactttcttttgtgggataagttgaaaaatatatatatttttttttatctattaatcaatataccctcactctcgcatataatttacattaacctaaaaaaatctaattgagacatcatatataaaaataactatatcttaaagaatataaaaaaaatagaagtaataattaaaacaaataaagtaacatggatatacaatataatttccttttcacatttgtcatcttcatttcatttttactttatatttacaccccataaaattataaatacaccccattattaaaaaaaatataaacttaaataattttaaaaattactcttaatacttttttaaaattcttccctcacattattttatgttaattttaatactt

SEQ ID NO: 321013 - DNA, 3094 bp, Cannabis indica
gaaatataaccttaaacccaaaaaatttcaaacttttgggttttgaattatttttcaatattttcattcttttaatcggttgagtactcttggtcggcatattttcctgtttattgtttgatatcctgaccaaacacccatctcatgttgcctttttagaccctggtgagttttgggaagcgaacaccgaattgattacgacctactttaaattctgtacgaggatcaccctcatctccgtgccagtctgtcctcttcgagtgaccgactttccaattcgagctttgaagattgtgaggtgagtagtgaatgctcttctactccagaacctgaagtgcaacaccactattactccgagcagatcgctggagaggggtacgacttcttcattttggaattgaagaatggttggaggcgttatctgtcgtccaactggacatacattgtccggccaggtgttcctgacctttacctgttggccttccaagttcggggaactttggcatttcaattgttgttcctactgttacgtttgcatgcttacaccagtatctgtccaacagtaggatgatggctcagacaaaacaaacgatgtaaaaggccaacgcatctgatcctcacgtggcgtagctcgccacattttcgagtgccaaacaggatctacccgtctagcaggagggagatcatgagggggacattaatgtccaggaaattgagaaacaggacgacgtccctcttggcagcccttccgaggttgaggaggaaaaggaggctagacctccaaactttggaggatataatgcggtcagggagccagtgtctacgaagggcgaagtcttagtcaacggagtggactatgtcatcgaggagctgactgaagcagttcctcacaggaggcaaggtgccttaggtgcaagatgggtgagtcctccatcgaagatcactgaagcgcgcatgaaggagttggaccagtctggttatctaggcggtcttaaatgctacatcgctgcttcaaatcaccgagccacaaacccgcggaaggggatgtgtgcttggtcgcccacaccaaataaggggcaatgttgcttctgaacccgtacttcaggaaggtcgcagattattttcgcctttgtccaacccagtttactcccaagggcattaagtatttgttttcccttatcatcctctacgccatccagaaatagggtgtgccttctccgcacgaggtcagttggttttgtgacctgaagtctacccccaagaaaaacaggttggggtacttctacttctctcagccatatttcaaatggttgacaggcaccgtggacaaggttgtgagcaaaatcaggagttttgttgacgagtattactttgtggaaggcatgggcaccacttatactcggtttcagtagattctgatatatttccgtccacccctgacactggctcttagcgacagagctcagaggtttgttcaactgccagatgcttctcggaatataaccctgttgacctcggaggccaattttgtggcgtacgagctgtagccagcccactttatacctcagtttgtgaaggggaggaagaagaagtctagtgcttgccgggctgggggagctgagtaggagaaggagctcattcaacttaagtgtgaggcttagtttaagggaagtgcaagagccaagcagtatgctcaagagtattctgagcaggagaaggagctcattcaacttaagcatgaggctaagtggaagggaggagctgaggccgaacaacgtgctcaagaatattctaagcaggaagataaggctaaggaaaaggaggaaaggccactcaaaaggaagaagactctctcgacctggcaaaggtccatcaaacatatgatccagatcagggagcccaatctacctgctcggccatccacccctgtagaaggaaaggggaaagccgtcctggaggagcaagaagacttgtcggatgacgatgccccatcagtacttgttcgggcatattcccctgccagagggcagggtactctatcttattttcagctatcttaattatcatgccttcatatgtcttatgctttttctgactatgttacttttattacgcataaacacgtatcagaaaatgcttgaggccttaaaaaagagagtgggaggaagcgcgagtaccccggccaagaagtccaatggtggtgagacgaccccgtctagagagaaggcatcagccgaggtggtcattgatctttctgaggaccaaactgttgtggaccctcctgtctcaaaaatgaccaagtctagggattctagaggaggtagctcagacaggctagagcaggcagagggcggatttgagctgatcaaaagcgggtccgaacagattaaggcccctgctccacctctagtactgcacctagagaccaaatgaggcagagaaatgatcactcactatgtgacttggtcggttcctgaggttaacgagcagctggctgtggcagacaatgacctttttctagagttagtcatgggaggagtcctgaaagagctttcgagggtaagtcttttctgacagtttccttttgtctttcttcaattagttaagattttgatgttattccctgtatagaccggtttgaagatggcttatgcttattcttgagctaagtcagctgctgctaagaacgcttccatttccaacacaatgcggacggaagtggacttagccgagaaggatgtcgaggaagccatagttaaccttggggctgtccggatagaactgggagaagtcaataagaagcttcttgctgctgagaacaaggtgaccgaactgaccaaggatctataagccatgccatccaccgaataacttgaagccgatattacctctttatctaaggatgtgaccaaccttcaagaagaaagggaggttctctagacacttttccacaggttggaagaagagaaaaaagcaaaggaggaggagcttggagacgaagttgagaagtataagtcagagaccgagcagtagaaatcggaagtggagaggctcggagggaaagtgaatgccctagagacagctggtcttgaga

SEQ ID NO: 321014 - DNA, 1214 bp, Cannabis indica
ctatataccgttttgaagcttataacgagctctacaatatgtgttgtgttttagggcaaaaatataagttttactttagtgtataaataccacgaggtttggtaagaaaccctaagttgtcctttacaaatattaagcagtattttgggataaacacttattagtttaccattgtgatataggaccgagatcatcggggatgttttttcacttgattggctgacatgcatgaatctggatcaaaagtaagaaaagtataaatgtaccacatggcatgacagatttcgtaattatcgattgtctgattaggcaatgataatgtgaaatatataagctcacttgtttcggtgatgtgatatatggatgtcagactatgtcatgggcttgcctaattaggcaatgttgtatacaagcgcacctgattaggtgatgtgatatatggatgccagactatggtacgggcttgtctgattaggtaatgtgatatacaagtgcacctgattaggtgatgtgatatatggatgctagaatatggcataggcttgtctgattaggcaatggggtatatgaatgccagattatggcatgaacttgcctgattaggcaatgcgatatatgaatgtcaggctaaagcataggttctcttcattaggaaatgcgacatgtggatggtaggctatggcctaggctcatctgattaggtgatgcgatatttgaatgttaggaaatcgcataggcaatgagatatgtagataccagtattctggtttttcttgtgaggcagccgttataaaactatgactataaactgaaactgtttttaggtttcttcctgttggtgataattgtttaggcataggtggtagtgacatgtaagtgtcaggctatggcacgggcttgtctatttaggagatgcaatacattaatgccaagctcgggcatgggctcgtctgtttaggcgatgcaatacattagtgccaagttggggcacagactcatttatttaggttatgcaatacattagtgcaaagtcaaggcacgggctcgtctgaatagacgatgctatacattggtgccagattatgacacgggctcatcggattaggtgatgcagcgacactatgtatgatgtcagattatgatacagacttgcctggttaggcaatgcaatatatgattacttttatttccatgcatatggctagttatgttat

SEQ ID NO: 321015 - DNA, 1799 bp, Cannabis indica
ggttagtgcttccgctcatctttgtcatcctcttcttctttaatttagcaaatactatatagatttatgatttagtgttttataaatcctaacgtaactaatttgtactcagtttgagtaatatatatcgaacttacataacacccccctaaaaaaaatggcaatgattaggtacgtttgttaaatatgtgtactggagtggagcaatcatgcacatgtattaatatatatacatcgtaaaattcaagtatactttggtactaaattaaaaatatatatatatatatatttacgtaccgtcttgttcatatgtttgtggttgtgagaaattctgaacaataaaaatctcaagagcattgaggataggttggtgagtagatgtggtagattgtttgaacaagtagtttattctgttgccactgactggggaagtgctaaatctagtagtggtgtacaagtattcaggagcaaaaggttgatcattgccattccacaacttgtcgttttcatagattaaaaattctcttgactcatttgcttgaagcttttctaggtcagcaaagtgcatgtacacgtagtatttagcagtgggatcttcaggctcaatagtcacattttctcggatcatagcggtggccaaaacacttgatggtggggtgtaattgattacggtaccagagtctactgtcagcgatgtgcttaaaattttggcatctcccatattatagggctgccatatacgatcatatacatcctcttgaaatctaaatacataaattatatttagtaataagtcatacattcataaatttgtatttaattcaaaagtgaaatatgataattatatgtttatatagttgcattaaaaatcatgaaagtagctgaaattaggatgttctatttaattttttgacaaatatttattaacaagaggtgtgctaattaaggagactctttttgctaatctaatgacaaatgttatttaattttgcgactattgtctataattaggcataagttgttaccttattacaattatgttattctaataagattattatactaaatttttacttatatctgaatgatattaaaaaaaaaataattatcttaaacaaaatcatagcacatggttagaactttttattaaaataaatcatcaccacaatgtattttattttatcttttaaattaatcaaaccaaacaaaacaaatcaacaacatcatcaataatcaacaaaaaaataagattcaaacaaataattatatttgtccttgttttttttttattattatacaagagtaatttactattttggaattatattttagggaaattctttaatagacacctataaaatggactcattaatagttccactatcatgtattataattggtccacataggaaaattgtagaaaattattgtagattgtagtgtattgaattaaaattccatttgaattagtcaaagtgggatatacttatagacacttaattattattatttagttgattttgtcattcatatatactcttaattattatttcattggtccacctggctaaacataaagtattaaaaaaaataattataaatgattaaaatggaaaattagttctgggaaaactagaagtcattctcttcatcgctcccagaccgtttttttgtaatttcatttttgattgattcttatttcaatatattcaaagttttaatatcatttcagaacacatatatctctaaaaaaatatttcaagaaaacaaaaagaaatttattcttgatcttgatctgt

SEQ ID NO: 321016 - DNA, 1076 bp, Cannabis indica
tttaatttgacacgtttttcaaaacaattctttgattagcaaagatagcactgtaattattaaagcactgtagcgtgccttagcattagggtgttacaatatcagcctatactcagtactctagtcgtgtcgatgtgatagcatcgatctcgtacttaagccaaacatacatctattggcatccagtacaactctacgtatactaatactgctatcaaagtaatctaacatgctccataaacatgcacgctaaacatgtaaatacatatgcatatcattatacaattcttacctcgattccaaaattaggtgtactggccaacctgagtggaactgctgctcgacgttttacaggctcctaaatcaaaatatttgtaaatctaatgagtggcatgctaaatcacttttggggacttaaaattgaaactaaaagtttccctattgatggataacatggcaataccccaaatattacaaaaaggggaaaaactagggttcctaaaattgccccaactggaagactagctccccaatcggaagttcagttctctggggtttcttggggaccaaccggaattccggttcctacaggtcccactgaaccagtcgaccggttcagtgcaggaaacactaaaaacaccacaaacacctcaattctacaccaaaagctcccaaaccttccacaatacctatttgcacaacaataaactaaaaccaagcaataaaactcaacaataaactcaaaaactgaaaacaccattaaagaccaaagtttgagctctacagcacaaaccttaaccaaacacatccccaagccaccaaacagctctaaatcaactcaaacaacaccattttaacttcaaaacataaattcaaacaactcatacaaccacacagacctaattccaaaattcacacaatataacctaacttgaacttagaaaatcaaagagaaaggtgctaagggggttataccttgaattgatacactaaaattctactagaatgctctaaattgaagttgaaaaatccaaaattccttcttgcttcttgacgatgagagagagagagagaga

SEQ ID NO: 321017 - DNA, 512 bp, Cannabis indica
acatttagtcacaacaaattgtaatttttgtgactaatacttttaaccacaaaccttttagtcacaacataaaaatcatgatttataattagtcacaattttttcactttttagtcacaagttttattatgactaaaagtaaaattttttatagtgacatacaagtaataattttaaatttctgctagtatatttcacttcaacccaaaactacttctatatatatgcttagtttggaaaattattcgtccatctgattttttttttttttaaaaaaaagtactaattcctcttaaatttctttctactacattaatgtttgctagaaatagtttcttaatttatctactttttttattatgaattaattaaggtctaaaaattataccctagcttttaaatttaaatttattaattccctgctatcttatagaatatatatatctattctatataaagtatgcctatataactgaaattcttggtttatgagaaatttatgggtaattttt

SEQ ID NO: 321018 - DNA, 731 bp, Cannabis indica
aatattgttctgatttttaatgtttcataacagttgtataaacatttagctaacaattatttctccacatattactattagggtacaagaattctcgatcagtaaaaaaataaaatactgataaataatttcttacatatacccattcacattttatattttttagttgcaattagattgcacgtagctggctcgcggcatatataattgttgcagtacagtttcaacagtaacccacgatccatgcttcatggtatcgaaacttttgtctgatgcaaccttccgtcaactacccagtaacctttgtgtgatgcaaccttcgatcaaccacacagcatccttcgtctcatgcaaccttcgacacactacccaccaaccacccaacaacattcatctaaatgtgtaagtgatagtgttatagtgagatttctctcacctagaaactcgagaccagactcctatttaagggacacgtgtattcagatttccaatgaaagctgaattgtccgtgagagacttcacgaagtttcaacctcgcccaggataaagccagcgagtatgacctaagtcagatcgcataaccgtagttcgcattatgcagggtagacccaactcgcatgtgccaggacatatgcgaatatcccctctatacttatgcgagagcatagagaccaactctctatggtgcgatttggtcccaaacgacccaatagccctgacaagccgatata

SEQ ID NO: 321019 - DNA, 646 bp, Cannabis indica
ataaataaaattaattattttgtatattttgaatggacattaatggtaatattaatttttatagctaatttacaccttgtgcattggagcacaaatacaaaaatgagtcaaatataactttatggtatattttggatcaaatttaacttaaaatatacaccatccatgggagatggtcttagagtataatgtgggctaataaatgcatatataccacatttatagtacattttccttgcaaacaaaattataaatttattgtccttaaacctaaaatcttttgtaaaattgaagttttcgttcggtccctgatagtgtcttaaatagtacactatcctaacaaattcaaacgatagtacactgacgaaccttgatgaaaattataattttattaacattgagtatttatgtcgtaaaaaagaattattgagtttatgttcgttacaaattcaaaactttagtacttactccacaattatccctaatttttaacgggataagttgaggaatacctactttttttaattaccattaattaaaaatactctcatattatatttcattatatataatctactcatttttatgagtaagttgcctaatatacccttgctaacacgaaattcactttcttagcttaactgtt

SEQ ID NO: 321020 - DNA, 602 bp, Cannabis indica
agaaatctcactataacaggttctaccatgaaaaccttgatatttttcctaaaaacactctgaaatcaaagtatattttaacgttaatttatgaactaggttgtagaggttcttacaagctttctaattatatatagaacgtccaaaatggatagtaaaaagttacggccaaatacaaaaattgggtctactagaataccagaagttacaaattggaattttaattgcaaattctgatgtacgggcaaaaagtaactcaaaaaatttgatttctagccttccaaaacccattcaaaacatcaccaatgaaaaatcaagttcttgcaaatgtcaataattattacaaaaaattaacaagtatttaactataatagtctgcagcagcagaatgtaattctgttactgcagaaaatagttttgcagaaacaaaccagaaccagcagaaataaaaatgaatgtagaaaataaaatcacttaacacatgatatttgtacgaggtatcagtattcattcgaatactcctagtccacggggtcacgcccaaagaaagaaatcaattaataaagtatcaacaattacaaagacaattgacttaaacaagt

SEQ ID NO: 321021 - DNA, 2136 bp, Cannabis indica
ttctctacctcaagataaataccaacacaactggaggaccttatcaaaataaagttgtttatcgagtttcttggcaaccaaataatattagaacttaagaaagtattagaggtatagataataaaataataaacaagggatttttaagtggttcaggcattaattatccttagtccacgagtccattttattaggttctttggctagagatcgtacatacaaatacaaaagaaatggacttcactccaccctaccgtgttcctcttgaagaagaagaatcttagtaggaatattctagagttgataatggggttacagtaatgtgtttacagagaatgctccttcgatccttaggtgaagctgaaagagaaaaagtcaaggataggaaattgaatcccccttcctgtgtgcctttaggtgtatttataggcccatccctgggcatgggccatttcgggtggatctttgcaaggatgaaccgcaccgttgaattagtaggtggtaccatattttccatgtggagtttaccgatgtcaaattatactggttgtactagcagtgctttggatgcgtgtcgctctagggtcgttcttatttgaacaacctttatcattagtcgttggatgttattacacagtagacaaggatacggatgctctgcatggcaacatggcatgggggacaacttctaacatcatagcaaagagggctcggccattgggtctgtagcctgtcacgcccccgaagagcccctacgggtttgaggtgtattccgggacaacgttccttggttgaagatccatattccttgttggagcatacggtcttggcttctagagttgagtgcgtctctagctcacgggcgtcttccatggggcttgcctttgggaagacttctcgtgcgggaatctgtttcgcaatattagggctctttccttcctggagcacagagcaaggcacttgggaaaccttaattatttcttgactttttcttgattaatttccacatgtcatgctggcaaaaatgcagataacatttacctcccaagcttccgagacatgccatggtttgggagcttgcagtatcttctttagggagatctttcgcgcatgtggattttcagaaagaccttttaatgttgtacgtcagtagccgttaaactgaagtgtcattatgtaggaggcatgatttctcccgttttcttgtcagagttttaaatgctgacttctagactccttcgtgcatgctgggcgcgtatttttagggaactcgaaatggcagcaattggacatggacagtttcttctttgagcgttttctacgatacatgtaatgatgggagtcgtctgttgggaagtgatgtatcctttcaaattctcatatccaatcatcagacatctcttggggcgaaccgaagcgctcgcttcgtgtgaaatgtaccccttccagtcatcccataaatacttacaacaatcaatccatttttcactcttcttgcctgtcaagtcacaacctttcaagttctcttcttttcaatcacattcgaacgttgctgtcattggacacttgttttatgccaaggatagcacaccgaaattgcctacctcatcaattggtaagttcttcgtttacttgatagtctttgagggagccacaatattgtatttgcttctgggacgccaattcctagtggcgtcattcttgggaatgatgtggtcacgtagtgacccttctcattctgttgtgccgatctgtggatatgtacaccatgtcatctctggaataggtcggtgcctgcaatgcaacgaaaagcagttcttcttccaagaagagatagaaacttgtggtgacggattttggcatgggggcatcgggggatcaccccgaccccttatgcccagctgaggctgggccagcctggggccctcccccatgctctatcaagaacgcctaccgtgggggttatcttccccaggagggtggttcccttcaaccctcttgaaatgcatgatatatttattttttgaggattaatttaatattgttataattgttgggttttgttccctaaataaaacccatttcaatataatcagatttacctattaataaagatcagaaataacattttatgtt

SEQ ID NO: 321022 - DNA, 797 bp, Cannabis indica
tgctcctataataaaggcaaaacagatgccttcattattgtgaattttaattacacaagtatacaaattattaataagtaataaaaaggataattaaagtatcagcctacaaatattgatttatcaattattaatatttaatttctaataaatatatggttaacaaaaaaattaatatttaaactttaaaagctaaaaactgttaaattagcaagcactaagttagttagaaaactcataacaccacacaaattatattggtactaataactggtgaatcttcataaggaaaatcctgtcactaatcgagagttggaaaggaaagaccaaaagggctaaaaagaacaagtgtctgaatgaacaactctcccccacacacacaccatgatggaaacatctagtggtgcaaagttggtggcagtagacccctacgccaccaaggtaagggaaataaactcttgggacaacctcccaaagtctatggacactttctctttccttccaattgaaatatcctaacctgctagggaaagatagagacaacaagttctgaaggaaccaaggatgagaaaatgcaacaaccgaatgtccattttggtaacacctagttgcataaggttggcaataaacccttgtgccaccaaggtggagaaaactccatggggtcttggtcatgtgttaagtgtcttatacaatacccttcttcatacctttatcaagtcctaatgatctcatgtgtaacgtccccgcttcaagcctccatgtggcccttacacccacggaatgaatggctctta

SEQ ID NO: 321023 - DNA, 572 bp, Cannabis indica
gtcattattccgtgagtgtagacccaatagaggcttgaagcggggttaaactatcattaccaataggtggctagtatggtctaccgagctcattaggacactgaagataatcaatgtacgataaatggcgggcaaaagtagcataaaacttagtcttttttcagtcaggcaatatgtcacttactgtggtcgacatgtcgctattttttttttttcaattttcttacgtatttcatgattccttgactaaataaaataaaaaataataaaaaatgagatcagcttgaaaataaaaattaaaaactaaaaaatgaaaaaaaaaaataatgggttgccagtgttttgttatcatctttagctatacattgttgttgcttcaagtttcctcattacggagttgttcagtcaacactccgctatcatcgatgcataccttcagtttacgcttgtgaatctttaaaatctcacatttatcacttttaatacttacaaggccacaagaaagtaattcattaacttcaaagaatttttctacctcaaaataatattgttactgttgtgttttatgccct

SEQ ID NO: 321024 - DNA, 872 bp, Cannabis indica
tttctgaacataatcacagctcggctccaatccttatcacaatcctctgcttgtagaaattcatgaaaaattttctgttccattctcctccttggaaatggatttcgtggcctgaaactcccattaccttttggtaagaagttccaatatcccaatctgttggctttccgattctgagacaattgttgtggaatactgtttctcccaccaagaggtttcaaacctttaggataagttcggtcgaagtgtctgtcatcagtctgacttctcgatgaacctgttgtctgtttcacaatatttgcccaagattgctttgttcctccccgcttctgctcctcagaaggttccatggacatgttcactttgtcaatattcaactgatagtctctctttaatgctcccttgaggcatcgtgcaaaatcctttcatccactagcatgtttctcctctgggatgatcaccattgatatcttgttattcttaaggactgataccttcatgaacacccccctgttgttatgaaaaaattccaagaagcagctgttggaactgttacgaaatgatctcttgtagtttactttctgcatctcctccctgtctaacaactcttctaaaatatccgacatccacgaagttgcatccaatgtaactgcaatttcataccctgaaaggcgagttctttcgcatattctaaccgagcctccatcattcgataaggtgatcataaacaccttatgagaagtacgaaagctccaatatttttgagacccctggtcgccaaaggatccaggatgttttctaaggccaaaaccagtggggtaatagccatttttcttcccaaaaccagtgggtttcggtgcttaccatggcca

SEQ ID NO: 321025 - DNA, 570 bp, Cannabis indica
atatatatatataaataagaaaagcaaataaatcgataatattgctgatattattaacatatgcatgcatggttcaatttgctcagtcatatatatatattatattttattttctacgttgaccaaggaataacaagtcaaaaaataagaatatatatattgatacaaattttagacttttctccttatgatataacaaagtataataaccaactaaattaatatgtatatatatacacatcaccgtcaacgttcgttgattatatatatgcatgtacatgtgcatatatatgttaataatttcaaaaactgtctctctgaattggatcattcactggccccattaattgaaattggatataataataataagctgtaaatttgtttaaaaatttgagtcatgatcattattgagagctacatattacattaattagaatccatataactgtatattatatatatatacacatatatatacatctatatatatataatcctctccggccatatatgaactttaaactttagaagcgccgcaaaatgcaaagctcatatatatatatatat

SEQ ID NO: 321026 - DNA, 1529 bp, Cannabis indica
actacgattttaaaccgcgggaatactaaatttttcttgacagttttaaatagttacttaatttttttagcgatggtctccgaaaaaaatcatttttaataccgtcatgaattctaatatttgtactagtgagatcatggattgccttccaatattctcggacagaagatcatatccttctaaataaggaaagatgataattggcaatctagtaattaacgtgtcattaattcttacaaagataggatatggttttgacaaccaatatcgtgatgtggcatccacatcagcaaacataaggcgccctatgaaccagacttcactaaataagtctaaagttaatatttcatttgtaaatccccctaaaagaaaacatggcaactaatatgacctttatgcactataaatactctacaaatcctacatgcaaaggatgaaattttttttactcacatgtttaaaagagaaagtgctcataccttcttgtaatccctaaaaacattactataatctatatcaaaatatgctatttcaagaattctcatctagctcaaaaattttcgacaaaataaaaaactctcactcaaaaggtttttaaacatagagactaaagctttcttttattattgggtgcattagttttgatatgatacattttttttttttatttgataacgatatgatatattttaagtataaaacaatttagagaaatattaaatggaggaaataatttttatacaacttcttttcaataaaaatagaatcaattctcaccaatttaaagtgcccatgcatatatcaagcaattaataattattgaaatccattattcaagcaagtcattgaagcaaaacctagccgttatctacataaaacatacaaattcaagaaagaaaaaagtagaagagataggaagcacgactgtgggagcaataattgatattcctacactatatatgtggatgttgtatatttttctatatataggaataattggtttgttattccaattatatatataaagatgtatttgaagtaattttaaattaaaataaataaatttaaaaatgagaaaatttaaaatagaataaaaagtaggaaaataacatttacaaacgatatttttatctaatttacagaattactgttactcatttcactttacaaaaataacgtgcaagaatttcaaatttataacacggtataaaagggcagtcaataccttctcttaatcttctttgtatgtgtactataagccatttgctttattttaattaattttattttttttatctttatctcttttttacaatttttttgtaaaaattctaactatattaatatttgtttgagattaaaagttaaaccgcagtgtctaacttttcaaaataataattttatatgtaaaaaacatatatttttcaaagaaaatgacaaaattaaatgcaagtatgcaacttattagttttttttttttctttttggtaacaaaaaagaaataatcaacctaagtaaaatttaatata

SEQ ID NO: 321027 - DNA, 916 bp, Cannabis indica
ttattattattattattagttggtttttaattagaatactgctaatttatggatggcacgttttatgacgataatttaggaaacatatatagactatagtagtggcagtggggtgccagagggacaacaaatctcatcgtttattggctggtcacacaccacaattatcaacactatctattttttttttaaatattttccagtgaaatctctcaaatatttataattattacatatacgatcttaaccaaaaaaaataacaataaaagtattttttttcttatgatttattaccgtcatattttttttatcattaaatataaacttagaaacatgtgacgatatattattaaattacgcattaaataagcttaaaaactattttgatatatgtttttgaactgtcacttaaccgacttgttatctcaaaatgtatctacctaacgtgatatgtccatgtaagtcaaaactgaggacacgtagaatacagccttgtcaacaacaagaaaaagtctctttacaaggcatgacaaaaccgtcaaacaacaagcaagtcgtcaagaagctgtagaaccatgtctggccggccaaaagggagtacataggccggccagggtttgagcacaagctggctgaccaaaatgtgattattagaccaagaaagggatcgttcgaccaaggaagactgacatctgcaaggaaaaatagtacaaaggttggccatcacttacaaaggctggccaactcttgccaaggctagcaggcacttgatgtgcagcctgcaggctggcaggcacttgatgtgcaacctgcagaacctactaggcacatggccagccaaaccctagcaggaacatggccaaccagctttttcctggcaggcctttagtgtagtggcggtttggaccttgacaac

SEQ ID NO: 321028 - DNA, 2823 bp, Cannabis indica
ccctcttttcctttctttgaaggagtggataatctcttggaccaaaacattattatcctgaatattccgaccagagacaaactccgcttgagtagggcagataagagacgggaggataggcttaattctattggcaatgattttataaatgaccttatacattacattgcaaagagagattggcctaaactgattcggtctcttcgagtttttcacttttggaattagcactacatttgttgaattcaccccttatgcatttttcctttgacaaagaaatcatccacacgtcacagaaatcgtctctaactgactcccagtaatgtttgaaaaataaaactaacattccatccagcccaggggctttatgattactcatggtaaacagagtacttcttatttcttcacgagaaggacactcaacaacctctacttggttctcaagagaaatcctttccctaaataaatggccacaatccaactgccgataagaattagttccagagaagatacctttaaaaaaatctaagaattcctgaccaatcaaatcccgctcactaatccagacattatgtttattcaaaatgcactcaatggcatttctcctccctctaatagcagcagagagaaagaagaacttggagcatttattaccatccttaagccacgcaattctcgccctttgtttctagtaaattgctttcctggttctagcttcattcaggctttttcaattgttttggaaaatttcactatatttatgcatatcttacggaaaaaataaaaaattaggccaaagtttatacttataggagaataagtatacattttgtggagtacccaaaatatccctccatatactactccccccctccccacatatttctttctttttctctcttcactctcttctctcttaccttatattctctcattctccctaactaattcacactaaaattttacatttagtatacatttcacctctccaagctactacaagtaagaaaaattagtgtgagaagctttttttaggcactgaaccaattttgagaacaattaatgggtaagtaatattttttgtttattttgttgttggttcttatatttagttggtgggggtatcaactcaagtttcacaagaatagacaaaagtttctttaaatataagtatttttcacgtactccattagtatgatgtcttttgagaaggtgtctaaaaacaaaatcgtgagggcttaggcctaaagcggacaatatcatactaatattggaattaagttgaggtggcggcccaacaatgtggaagaatggggcccaataagtggttccagagctaatggttcaggactgttgggatagtggggggatgcatttgcgatgtatgggagaatctctcaatgtgatgaccttgcgattgaagatgtgtatggtgtcatattgaaattctacttgatattgaggtagtcagatggcgtgcggtataagacggagatcgatatttggacccgtgtcaaaagtcttcctgacaaaggtgatggtcacacgacgagttacgttggtgataacggcaacataaggtagttttgctggaggggaggccacgagtatgtggttttttttgttggggtatcaacccaagtcctactacatcagaagaatagacaagattttccttgaatataagtattccacctactccattagtatgaggcattttgggaaggtgccaaaaaataaaactctagggcttagacccaactatcatacttatgttcgagtcaaattattaaatttatttgtttggtattttttggtctaggtattgacttttctagctaccattctttcttttttggttatattaggatgggcacaaggaatcttagttatttaagcaaaagctgtagctctagattggttgctggaattggtcttcttgtcaattcttttgagtctaattgtttagctttgatctcaatcttttttaagagattttcttcatgtaatgatttagattctcttttagatatttttttaattcattgtctaattttcttaaggcgtctcttattcatgcaaatcattcagcttatatggctaagcatgaattagatgggcatgcatttagggtggatgatgagctagtttggatggatgttttttcacctcttctttttatgatcaacgctgattctttccaatgaaaattttcattgttcaaaaaaaaaaactatgagatgaaaattgaatcattttggaacaatttatagaggttgaggacaatatccatactctttggtgatgctcttcaataattgaaactttgaaatgaaggggcttgtggaaaaaaattaaaagttataatctcattgtctcaatgactctcttctcttgcctttcttgatcatacgttacattatctttatgtggtagattttgtgctctttacttcttgaaatatttggaatgagagaaacaaatggaatcatggaaaaattgttcctagtgttgagatgctggtggagtggagtgctaagttaattctaaggatctccaagttgataagtaggctaaacaacaacctgttcactctcccagatggtgtccttctatggaaaattgtctcaaggtgaatgttgatgctgaaactagtaaggaggatgtaggaaatttagctctgatacataagaattaacctctataattctaatttcaagatcacacttaaacaaataaatgttaaattaaaacaaacaaattaaaaacaaaaaaccaaggacacattaaactagaaataacacagatgaatctagatagctt

SEQ ID NO: 321029 - DNA, 650 bp, Cannabis indica
aaaaaaaaaaaactactttaattttcttagcatgtttggaatttttttacaatttacaatgagggagcctgttctaatttgggattttttttgtttaataaaataactatgcaattaaaaaattataaaaataagaaatggagggacatgtcaaattttactttaaaaaaaaaatagttaaaaagggctcatcttgggactagtataattttgtcattaattggtgaaacttatatctattttagtgtctctgcatttatttattttttaataaattatgtaattttattaatatataacaattagctaaattaacagcttacaatctaattaaaatatatttctcattagaaacaaaacaagtttggctttgggtgtgtggcccgtgatacgaatagaattctccttgaagctatttctgcttctcggtttggggtggttaagcccgaaattgctgagacaattaggattaaggaggccttgagttggatagaaagaaaacaatggtccagtgtagtaatagaaactgatgctttggtggtgctgcaagctattaatagctcaattttaatgccttctcatttatgattacttgttggtgattgtcgggccttaatttcgtctttgaataatgtttctttaaaatttgt

SEQ ID NO: 321030 - DNA, 583 bp, Cannabis indica
tcacctgaacgagctggagtttggtctgccatggagctagagcaagagaagcactattggtgacagaaagtggctctgataccaagtttaaaacatggtaaacagagaaaaaatgacagaagaatgaaaaactcaactcacttctaatgaggctggcccctttatatttatattcaataaatgagtattatagaatcatttagaaaattgtaccaattatatacacgtttgataagacaaaagaatatgctagcaaaagtataaaaattgttagcctagggatttacacaaaatctgttatgccacctcagcaatagtagtagtgggaaaattttatttcttgacaaaataaatcttaaaaaatactccaaaatacaatattacactcaatataatatattatatatataaatatataccaggttaatattacatgtaatgtacgtatacttaattttttattttggttaagtattttttgagctgtataattaatttttttttggatgttattcaataaacaaatcattttttattaaaaaaaatttaatttaagtgctatttataaaaataaattataata

SEQ ID NO: 321031 - DNA, 3171 bp, Cannabis indica
aaaattgttttgccgtttgaaaatatttgttgttttaataataatgatatattatgtataaaaaaaataataatgctatattgagtgaattgaatgttggtgtatgttaattctacaattgatattaatggttggtggctttaattttgaacttgtttttccgagggaagggttaattggtttggcattggccgtggtttaaggcatggttgagagagaaagagagagttgggggtgactttattatgtaataatgtgtttttggaacttttttaatgatttgaattcaaagagggagcatttccactccatattgatgatgatgatgatgatgatgcgtggggttcatagaaagtagaatgaggctgacttagtagttggggtcgtggggttcaattagtaagagggagaaggggcgtcattaaattggctttggtatatgttatgtccttgaaagtagggtacctcctttttcaaaccccaatcatgactaaacacctccaccaaatatattaaaatcatgtagctatatctacctcgtcttatatgctattcaatattgtataatactttaacatcactgctactcacgtgggttgtcacgacccatctatgaactccgttcgctggaatctaagacctctcgcgccgcatgcaaaaatttgcatcacctcttaagacacattttgctattgtaaatactaaataatattttggattatttgattttgtaaaagttattaattagattttatgttttgttaaataagatcgcgtcaaaaaaaaattgaaaaataagattttgtattttttaaaaagatataaataagattctgaactaattttttgttaaaataaaacttaataataataatctgatctagagatattatgacaaaacttgttacattttctgtatctgttcgtgttaacaattgtcttcaatttagttatattaaaaaaatggttaaaaattgagctcaagttcctatttttaccattttagaaaatacaaaatttattttatcatttaagaaaacagataatccatttagtaacttttacaaaacgcagggttcaaaatagtatttaatttttttaaggacaactctcctggtaaatgttaaattttttgctaaatcaacacaaaaattataaaattttaacactaattttttttttattccaatcacttaacttatagttatactaaaattatattctttaatactatattattttattaagttataaatgaacacaaataaatatatacaaacatttaattatgaatatattatttaaatataaaaaattaataaaaaaaattaggtgtagtttatagtgacactaatattagtgtaaaatctccacatattgacattttaatgtctcattggaattggcctaagtgagcttattttaattttgtattacttatttacggagatgttctaagaccatcataatagaaaatttaaaattatactatgtttggtataaaaaataattttgtaatatatttgtattaatttttagtattgtttaaaattcaattattatttcatccaaaaaataaaaagtaataattttattatgtaatacaataaaaaaataaatgttaaaggtcaataatttaagggattatttagaatgagttaatacctagcatcagaatagtaatgtaaaatattactatatttattttcagattttaaccttggaatattattccttaattaacatattacccttcagtagagtaatgttgactcttaaaattaaaaagaagttagtgtaattattctcttcaattatattaatttgaataatatttttaaataaataaataaatttaaataacattaatatatattataatttattatatataaaaaatattctttagtttgtgagataatttttgtaagaaaaaattgagttatttttatattattacaagaatatacatatgtgatacataaagtttatgtaaatggtgtatataaatagcataacaaaagcaaataaatgacatagtaataaaatatatataaaatatttattttaaataataaaaaatataataaattttaatatttactaataaataaatatatttctttagcgaataaatatttagttgttatgaattattaacattaaatacatatagaagaattattttttatttaattttttaaaataatagataagattcttgtgcccaaccaaataatgtaattcaattaatgataatatgattataccctacacagcccaatgcagtttacacgtttctttacaatcttattctctttcataatatttcctgtaattaaattattttgaaacctcatactaagcgcccctaagagtaatgctaaatacacactcaaatggcacacacttattacacataatgatgtgaaataaatattagctatttatattttaaagtgagaccataacacttttaattgtatgcttgagattaattacacatcagtgtatgctattgaagtatgtctcaattattttttataatttaatacaataactaaatttaataataaaatattaaaaagtgatataaaagtgaatataaaagtagggcatttcttgttgttatccgtttatttttttgtaaacatgacacgtcgacttcaatcaaaaaaggttgaggagtcattagccggatcaactttctcaattgatgctctgggaaagtaaaggcaccaacttcgcgggaagaggttccatgaagaggagttccctgagtactactagccacacggaagggatccgtgaaacaaagtctccctcacccctgggaaccaacaccatgcattaccacgaagagtggggattttcccagaagggccaagacatttcgagaatgactaagtcccgagtacgccttcaactcacgcgggctttgttcacgcgtgtcaagctacgaacctagtgaccaggctttttcatgtataatgttagaggttgtcttctacgacacgctattgtacagagcatgcgtatcctgagctaaataatccaacgactagggataagggaaattaaaataagagaagcctcgaagtgacactcgtccaaggcccagcctgtccagtcagtacaatctaacaccctgaaattgttgggttttatgcc

SEQ ID NO: 321032 - DNA, 838 bp, Cannabis indica
taattctcattcaccacagtcagctgagtcaactgtttcaagtgccaaagattcttacattcatattttctaacggtccttttctttattcttcatttgatgaatacctgctccatttagtgatactaacatgagcagtacagaacaacccaagtgatactaataaggagaaaaagattaatttaattatatataaataaatttttataaaccataaatataacaaatttgagcagcactaaacaattacgactgttccaagtgggcccgtcgagatagggtccaaaacttataatatttttaaaagtaaagtacttgcttaccaattacgacggttcaattagagtccgtcaagatagagaccaatcttggcgggctcatgcgagtccgccgagattggtgtgtcgagattgtttatatttcttgtagtgttcttgtggtgcttgacacccttaagatattttttagcattttcctttagttttggatgtgcaaaaaaaaatcagtatatatacatgatcaagttgagaaatgctatatatgagacatatcaaacattacaaataacatattattattgatgcattttaataacagattctatattaattaattaatttaataaatattatgtgtcacaatattgtaaggtgctaaaatttttttttgaataaaaaagtttcattaaattaggcctcagcctgaacatatcacacagaaacaaggagcattcaactcattaaacagtcgatctgacgacaaataagaggccctagcaacataatgggcagccttatttgcagaacgattaacaaaagagacaaggacattatttaaa

SEQ ID NO: 321033 - DNA, 826 bp, Cannabis indica
gttgtaaacttgggtgttgaagttaactctaaactgctttaacctttgccgaatttatcaagatactatctttatccatctcatggcgaaatatgcatttccagtatttagcacgaagcttaggctcccaaaacattacaactccattcaaaaatacctctcaaataccttctttgagttgaaagaaatcaaaatatcattaataaaaacattcgcgaaagtcatcgagtataaaaagctgctttggaatacctttctcttgaatcttcaactggtaatgaccaaatcgaagaccaatcttagataggacagtactttcccaaaattaatcatcataacttctatctcacagcaaatatcttgccttaaacgctgaaattgatggaattcaggatccttgaaccttgcccacgaacatgaatagatcctcaaaatcctctaattttagctcaactaatataaccaagcattcctttttccccccacaaactcaggaagggatcttaaaccacctaaatggagaataattacgtcctctagtaaacaataaggtaccggaaccacttggtgacacattattaactttatacaaactttccaatcacccttctcgaaatataggaatacactacactagaatcaattaaagctatcaataaagtatgatcaacagaagttcaacttatcatggtagaaagaccagcaccagtctcagtctaggtcaagcaaacacctaaacaagaactaaaataccatcacccctttatttcgatcgctccaactgtaggcaacttctttctaaatggcctactacgccacattaaaa

SEQ ID NO: 321034 - DNA, 1639 bp, Cannabis indica
atctgattatattgaaatgtattttatttagggcataaaacccaacaaaaacttcatgccaaaaggcaagactttttatgttattttctttttcgtaacaaaaacatcttacttccaattcaacaattattatctatcaaaaaactaattagtatatagcatacatcacatcttactattgctatatgatcaactaattattatctttcaaaaaaactaattagtatcttacatgaactttttctttacttttgtatttgtacttaatagtacattttttttaccaaaatttaaatgagattatatactacaaagtatcaaacacagtcacacagactcaattatatactacaaagtaaaaaatacatacaataatattgttgataaattaaccaaataaaacttataaacaaaataggattaatatatactaaaaagaaaatataacatcaaaataaataaaaaaagaataaaaaattatatactactactaaatagtatccaaataagtacttatcaatttaactaaacaatatagaatcaaattaagcttgcattctctaataattcaacattatgctaaatagtatctaaactaataataatttacagttttttttggcaatcttattaataccatttagtatatatctataaaattttgtctttataaacttttgaaatcaatttgctatagcatataaaatcactgaaatactattaactttatttttatgtgataataatgaagccttaataataatttaataacttcataaatagtgatagatacacatttattaagatacattaatactttttaatttaagttaataataaatataaatcttaatattcggtattaaaagttgaagatttcaaaattaatcgttaaaatagaaagaataaaaaatatacaattttattgtaattaaattacaaaagtagtactagaatgaattttttcttaaagttaatttcttataaatgtcagtttataaatattttttaaaaaaacattttttggtctcagttataattttagtgtcggtctactaactgacacttaaagtcattataggtgtcagttataaacagagaccaaagagttggggtggtctttagtatcaattttttttttaaaaaaatgtccctcgaaccaacactaaaggtctattttgtagtagtgaccatttacaagttccctacttccaagcaaaacccatctctcaattctatctctttatccgaccaaaacccaagaaactcccataaaaagaaacccagaaaactaattaagaaaaagaaaaaaaaactacaaaaaaccataatcgttgcaccttgctctgactatgatttcgctccatttcaagtcatcccacacattctaacagtgattgacaactctaaccacatccaaatcgtcgctattaacctgcaaaaaagagagagacctagagaaggataaaaaagatgaacatatgccctaggtataccttcgtgtttcaaacatacagagaaagagagatctgactagtggtgtgattaaatcgaatcggggttgagaatgaagaagaagaagaagaagaagaaagaaagaaagaaagaagaaaaaaaaaaggagaaatttgcaacaacc

SEQ ID NO: 321035 - DNA, 989 bp, Cannabis indica
tttgtacttgtttatatatatttatatataaataataggattatttgttagcgtaaatttttttctattgtttttaaattttttactacttttatttttttttattgaattttttagcaaagccactttattgtgtttttttttttttttgtcaatttctttacaaatataaagtgtcacttggatatcaccgttagataccaattagattattactgtattagttttaaagttttattttcacgtatacacaaatgtacactatccaactgaatatttaactaatgctttaactaatgctttaaattttattactgtattattttttttatttattttttgctataaaaaataaataaaaaaattaaatgtgtaaaattaaaacataaccactctaaataatataaatatgaggccatgttaaatgaattgtcaatgcacatactttttttttcgaaatggggagatgtgaaaattaaaatagagagcaatgataaggactaataaatatgattcctaatattatctttaatcatatacattttagtatgacaatgtcattactttgttatctttaagcatattcctaatatagaagagtaacaatatcattcctaatatttctctttaagcttattattttttaattaagagttgagatatatttttttttgcacttcaatgtgtaaacacatgacacttgatttttttgaaaatataaataaattcatgtgttaattaataaaataaaaaatcaaaatgttagaaagttgaagtgcatttaacaaaaaaatttcttataaagtataaagaaaataattataatatatgtgtgaattttatagtgggtaaatattttactcttagggtctgtttggtacgcaggactggattggattagacaggctaatttgtccaatccagtgtttgggcatgttacaagtctggataactaatccagttaatctcatctgtctgggattatttat

SEQ ID NO: 321036 - DNA, 820 bp, Cannabis indica
aaaatttaaaacaaaagtgttaccagacaccacttaaattatacagtcatatatagtgtcacaattagtcaaaaaaatgtgctaattgagtttgaatctatctggacgagccgagaaaagactgctgagatagcttaagaaatttcggaggtccatacccgcaaaagtaagtccacaccaaatcagggccaaatacaccaaatttaagagattcttaaatacttcattgtaccactttatacccaagaacattttttttcaattgccttcacatcatttcaaatttctcacatccatattgtacatctttataattgggcagttgatctaaactatgtatattattgttgaaattcaatttcaaaactttgtgtaggcaaatacttttgtgtcatttaatggtgaatatagtataacttatatcttaatatataagaacttaaattaattaattaaggaccgaaaaatcactaaaaaaagacattaaggactaacttatgtaaagtgtagaacttgggtacacataacaaaacaaaattatttaaacaaagactttcacaccaaatatagatattaaacaaaattaattaattaataagttggagatgaacaaaattatcgacaagagaaaaacataaacaagtgtaagttgtcaaaatattaaagataggaatacattgttagacttttatttgggcttacattaaattttattggttttattaaaacttgggttgattggatagttctttgctgtgttagcccatattgttggtgatcaattgttaatgggcttagcatctgtgtgtaaagtctaggt

SEQ ID NO: 321037 - DNA, 670 bp, Cannabis indica
acatttttttttatctatattaattgataaattattttttaaaaaattgagcataattacgtatagtaaataagaagcaggcaacttaagttttcattaacattaagtcaaggtgcatagtctctttgaatattctattgattgactagtatgtctcgggacatggcatatccctaactttaataatatggtgaaatacgattatacattactagaaatcatgttgtttgcgactttgcggaacgaaatcccacaacttattttaacaataattaacaaccatgcatgctatgctagtttaagtaactcagtagatcccagcttagagtcacctggttgactcagtgctataccttacaaggaactcaacgaactcgtttgagtacttattctgcacttccacattgccaaatatcgccctcatctcatgacctgacttaactctgattgcctctccttcctcatccaccatgactcgccgaatcgactcagccaccgagtcactactgaaccagccatttttttcatctcgcggaatttctagcccgattcccatgccatgaagcagcctcgccattaaccccatatccgagcttccacctggaaatagaatcaacgacagcccgagcccgagaccttcgaccaccgaactccaaccgcaatgagtcaa

SEQ ID NO: 321038 - DNA, 1431 bp, Cannabis indica
aagttattgttttaagttatatgatacttaatatttaattacactaatattatgttagacaccagtggtaccttttaatatttttcaaaaataacaataataatgtaagtcatttaatgcaaaatgagcaagttaactaaaatttaataataaaatattaaaaatgacataatcatacgtgtaaaagtataatatttattatgatgcatattttacatcatgttatattgtgatttaaatttgaattactttctgttatgtgacaaatttgtatcacaatttggcacgccattaaaatagactttttacaaagtaagctatattttgtatttgctttttcattggagatgctcttatggagcatcaaggtgcctagcactactatgatatgtcatcctataatttttttttttttgacaaatatgtcatcctataattgattagtgatttattataatttttatcaaattactcacaagggtgttaggtactatgtgtgccttttaacatttttcatgttaattaaggcaccatggggtgcttagcattctccaatgcgtaatattattattggtgcaattatatattaaatctcatataatttaatataataatttttatgaaatattactaaccagataccacttaattaaataaactttattaaagttattagtgtcttcatataagacttttaacaaggtcatgttacaattatatatttgttgtagttattattttccagaccagaagtccatacatgatctggttgttgtaattaattatcatcactttttctaataagttattaattaataaataaaataattaaatacatataaattaattaattttcatacgttgtcggtgtctcgaaaaatgatcgaaccttattaaatcaaaatttaatatatattcttataattaattattaaaataatgttattactaattgcatgcaattcagttatataaatatatgttatttttagtaaataataataatatattaaatactatatcgtcttgttgttagtgcatgaataatttttttttttatttttacttattactttttctaagccataattaataatgtgattaaaatattgtattttttctttctataaatataagtttgattgccatgtgatctttttgttggagaatgatgaagaagataaatcaataatagtatttaataatttgattatttttactttttcattcccaatttttaagccacaattttatgattaagataatgtttattggtgaaaatggattctatagtatcaattttggagtatgttttagttttagatcaaggatttttgtgatttaattggatgttggtaaagaataaaataaaattaaaaaatgtaataagtttaaggaaaatatataaagaaaactatctattttatatta

SEQ ID NO: 321039 - DNA, 2010 bp, Cannabis indica
cagttttagagttgatttagctaacaaaaaaaaaaatgctacaactccatagtcgctttcgtagttattttggtaaatcctattgttgttgcggagaccgattagcaagtactaatagcttattttatttcttatttggtaatcaaaatttgaatatttaaaattaaaaataataaataacgaaattgaatgaagaacaaaaaaaaaaggtaaaaactcaaatatttatataaaggagaaattagggattctaattttcttaattatccactttattatttattaatgcaatcacaaaaataggacttctcactaagatgaaagacatacaaaagtgttaaatatttagattaagaaatataaaactcttgttaggattttgacaactcaatccctacaccaactcaatatacacattagatcatcaaggtccaagcttcacaatcatgacatactcaattacacacatacacgttcgaattccaatatttgaatgcgaactgaattgaacaacttttgaatattcaatttgcatacaaaccagttaggattagcaattcaaacatgaattaacaatgcaatcatagtaggaaacataaataataataaatctctataattaataaattacacttatttatccacttattacaaaattaaaatttatactgaagtagatgagtaggatcataatctcacttattacttgattatcccataatatatataaactctaattatttaccaatagtcttatcgagatattatagtactattcttcatattctaagtgataacctacatacatgtgcgagcattcaatgtgttctagctgaaaggtgctaatatttgaggtttatggtgggagggatgcgagtattcaacccttaggtaaaacaaattcagaatagttccctttcggcctattttttcctagaatgttactacccagaacctagcctatcgttttcatacgttcttaccctaaaaacccaaaagaacgattaaacctcaacttaaccaggcatttctttgaaagactaacctttgattttcgaaggagtttttgattataattctaacttcaagatctcttgaaacgcaagtttcggcgaagaacctgttagaaaagcttctgattcaatggatgttttttcaaatttttgagaggaaaatttttagaaaacttgaaaatgaaagggaactgagatttttatttcatattaggaaggcttatataagggtcaaacttatttgttaagattatgatacaaggcattcgaagaccaaaggtcatataatccaatggttatctcgagtcacacctacacgaaccccccgaagggtctagtgacaagacaaccaagagtcaccgcgatgtggcggaagcaacttgcttgtcccttaagaatagtttttctatttgacaaacaactatcattgcaaaactaagggcatgtattataatacaaattttccacctaaaaatatgagtacaatctcgtgaaaagtcgacatgtggacccatttttccaaaggaaaatagtgacgtgtcaataacatggctctcgaagagttaacctcgcatgactaaaacttgcgagaggaggcgatcgagacaagagtctagtcgcataatgtttaaagtccaaatctgacttccactagcagtggttgtagtatagatcgggcggtcgattccacagggaggtgattataggtaaaaacgtttgtaaaaaaataaacacaagcaataatgagtttgagaatttttgttttggtaataaatattataagaaagcaaataaagtgtgtaatcaatggtaaaaagagaaaggttttaagagtcatccatatgcttgtttagctattttgtacctttgattcacaaagttgagacaaatgatgtaacattaaagttcattatatgttgagtatacaagttcttgaaaataaaataaataatttaatcttatgtagaatctagaaatgacattatacatcaagcaa

SEQ ID NO: 321040 - DNA, 1295 bp, Cannabis indica
tttttttctaagcacatatgtaacactctatttaacatgcttttttatttcattcaatttttattcaagcccttgaaaaagaaattattcaagcccacactgaaccggatttttggctccgtcactggtcgggcatcaccgcgcgaagtgatactcttacccctgaagaagtgcaggcccttcttctctcgcatgaaaatcgactggagcatcataatagtgttactgatctcaacatgaagctacaggctaatgtggcattttcaggttcaagaacgaacccctacaggccaccacaagggttcaagaatggcaatcgaggtgctttttgtggaaatatgcagaacaacaggattcagtgtcaattgtgcctgaggtttggccacaccgcccctgtgtgccactaccgcttcgataaaaactgggctccatctaaacaaggcacttccactcagccatcaaactcatctaatcctcctcatgcctttgtcaccgaacatgagtttgattacgatcctcaagcatatgcaacatccttcttacctgactttggagacgattcaggatggtttgtcgacagcggagctacaaatcacattacatctggtacagaaaaccttgaaactgctgtcccttacaatggctcagagggtgtggctataggagacggtaagaaattatcaatttctcacattggttccagtactttatcatctgttcattcaataccccttaatctacattctgttcttcatgttccttcgattacgaaaaatttggttagtgtttcacaactaactcgtgacaataatgtgtttcttgaatttcataaaacatgttgctttgtcaaggacaaacaaactgggaaggtgctactcaagggaatgcttaaagaagggctgtgtgtgcttgctgactctactcaaaaaccagatatggctgcatctaagaactctatggtttatgcttgtaatccaactgccatgatatgtactagtaaagataacagtagcattcctactactacttataatcttgaaacaagcaataaaaatattgatctttcacattgttgttctactgcttatctccttagcaagcaaaccaatgtcaatacttggcaccaaaaacttggccacccttctaaccaagttttaagcaaagtcctacaacaagtctcttcatctggttccctaaatcaattagaattttgcaaagcttgtcaaatgggcaaaaaaaattaaatattaaaaaattaatatttcctactttcccacttctttgtttaatttttt

SEQ ID NO: 321041 - DNA, 955 bp, Cannabis indica
acatattatctaatcatctctgaaatagactaacatataatcagcatcaaacaataatctcaatgtcactaaggctatacaaatacaagttgttttgaattaaatattgttattattattacaagttgttttgtatttaagttaaattatgtttatttgcttggcttattagaccccaattaacgagattcaatgtagtcatcacacatggcgttcctttaattagggtgttacaccagacgccgtcccttactcattgtagatgggtctgcacttcaaagtaatgaatgtgagacaatgggtcctctttctcgatgtactgatgctaagaaggattcttaaacttaagagggatcggtagagctttgatttgatctgagagtggtgagtgtctctctctatctagcccaaactctcacaactttggaatcatgattcctttaaccaaggatgctagagtgttgaactctgccatgttgacaccatgggtggtggtttgcatttaagttagaacttctattgcatgatcagggtcaccttaagaagctcctgtcccaccaaccgtcctctagttagggtgtcacgcaggtctctctgtcttccaagtcaatcaaagataccagtcaacttgtgtctacctgttgtctcctaaccacggggttatgaaggtgacacttgaggcttttctcgcattaaggctggatcatcctgggatgatgcactgcgagagcgatcgtttggaacattgtagtgactatttccttcgaaatagtctacaacaagatcacaagtgcgaagagaattgaattgattccttaggttcaagtcttccccatgtactcaacgaaagtacttgtattgttggccatcagggccgtgagtgaagtatcgacataactgttggaaatattttaccagggtctagatttactaccatgtatgtttcattaacatc

SEQ ID NO: 321042 - DNA, 881 bp, Cannabis indica
ctgattattaacttacatttaataatactctagctgttatataacatccaattcattgtaaaaactaaaaagtttactttttagtatttttacaacgttaataactcatctattatatttataactatataatcatactgcactacaagagtatataaatcctaaaaaatggtaatcaaaacatcaatatttttcaatgcattagaacttggtgactgaataagcaaattatgtcggtaagaagattaaattttaagtatgagtttcattgggtgtttttttttttttttttttgaagcaagtttcatggtttttatgtctttcctaacaactttattagtagttatttgtaaggtataagaatgtgaagcgagatgccttaagacaaataagaaaatagagatgtcaactttattcatcttcctaaacaaaattattcaagtaaaaaatgtattgttctcctaataaacgatatgagtatgtacactcttatggtggttggagcataattatgtatcaagaggcagtgaaaggatgaaggctacgaatatttaattttatgtagcattttgtagaattttcagatttttttttctttgaaggaacagaattttcagatttatttaggttaaaaaatagtatagaaaagacttaaattccacattggtgaaagataaatgggaaagagaatttaactcatatataaaacattatgtgcatgtttggcatcataactaaaaaacagttttttgtttttaaaaacagaaaattgtttttaaaaacaatttggcttgtttggccttattttttaaaaacagttttcagaaaacaaagttacaaaaaacaagaattttgaaaacaacaaaatgttgttttctgtt

SEQ ID NO: 321043 - DNA, 823 bp, Cannabis indica
atgaagaagattcttggagaagagtgtgagagataaatactttgagagaatccacagagaatcgatcttgagtgtattgtaccatgttcttgttcaatcaataaaaaggattttggttgtgttccagaactaaagtagagtcatagatcatatcgatttattggacttaaaccagtatatatcttagtgttgattttattattttattgttttatcaattctgttcttttaatactctgttcatccatgctttaatctccgatcattgtgtatggattgttaatcttgtcattactaattgtttgttgattaagttttaattgttttgattcctcactttagttgtaattttcccacaatgtctaaaactcaagattaccagaataagattctagtgagtttcttacgcactactatgaaggagggttttccattatttttttagtaacatataagagatttgtttcgattgtcaaaactaacgtaataatcataaacacaaatagtattttttttttcattggctgtcaaatgacgcagatgaacaacaccgtcagttataaattgacgtagaacatgaaaatccccattttttagtcatcccaacggttttgcaaagacgcaaactacaaaaaaaaacaaaaaaacaaaaaaactaaatctgaagtcggttccaaatctcagattatatgccaccgccacctgcaagactcaccccaccaccgcgaacccagccaagctatgcccctaccaccccaaacccattttcttatttattttttagccaccccaaatgtaacgccctaatgctaaggcacgctac

SEQ ID NO: 321044 - DNA, 578 bp, Cannabis indica
atgttcttatatatggctcaatccatttattccatgtgggacattgtccacaataatgttattgaacttttggtaacagaaatttatttagaaaagaatctagttttagtacccattcaagaagataagtcttttcttcatccaagcttgagtctgaatttggcactcaccaaatcagatgagtaacgtgcttttgcaccttatatcactcatagggaggaacaatggttggttcaatttttactgactctttgtagtgattttgaggatatatacttcatggttctatattgcattgctcttccttcagttgattttgtggttaatgaattgttaacatataaaatttgtctcaagtctatttcaaggaatggccttctactacactatttcctcccgaagagaacaatttcacacaaaatttgagattgatgagctacaaatagaaaggtcattgaaaagctcagtgtcctcagcttgcgaatcgtgctcaaaattctaaacctcctcatatggataatcaaccactgctttacaaccaaatacaacctccacaatttagtattgctgcaaatgtt

SEQ ID NO: 321045 - DNA, 748 bp, Cannabis indica
ctctctctctctctctcatgcccaagcatcattctcacttgagatttgccaactttggttctcacattgtaatcttatgagagccacttcagatctcattgccactgtgatctaagtggtattatctctggtatcaatacaaccaaaaaagggagtaggtcattacactactacaaaattaactttttgcgccggtcaatatgtcagtcaacactaaaaaccgacacaaaaagtttggttccaaatttcgcattagttgttatttgatgctactttacgtcagttgataatagacatgtttagatattgcatcagttggaaactaacgcaaagtagcatcagatagaaactgacgcaaataaaacttaaaaaaaaagtctgtaatatactaattaatggggcggcccattacacacacctaacccaaatatgccatatatcataaaaacctaactaaaatagtttccccctttagctctctctttctctctcactacaagctctgtactctcacatggagctacccatattgcaacacgacgttgcatgaccatgacatcctccactgtccaacgcagactgagccacaattgttgcattcttctccaacgacgaaggatgagtaagcatctccttcctttatctctctccctcaatctccctgattttttatttttttttcaaatgcaccatggttatgttgggttttatgccctaaataaaactctttacaatctgattagttatc

SEQ ID NO: 321046 - DNA, 994 bp, Cannabis indica
tggtaaggctcaactaattcactttgttttatttggccttatggatgagtatctttattcttcctcatagtattactaaggaggttgaaaaactttgtcggggctttctttgggaaatgaatagtaatagaagtaagattcacattgcttcctgggagaaagtttgtttgccgaaggcttatggtggcctaggttttaaaaatggtgtcaaatggaaacaatccattctggccaagtacatttgggcaatttctactaagcaagacattctatgggttaaatggatagataatatctatctgaaatcggggagtttttgggcttatgatctcaaacctgacactagttggtattggcgcaaattatgtcatttgagggagaaatttaagaggtctgatatccttaaagcaggctctaaggatcagttcaagactaactggttatacacaacagtttagcccagaaccaggtcaactatcacatagctatttggagttcagtcattgtgccaaaacacagatttattttatggcaagtgataaactctcatctcctcacaagggacatctaacccggtttcatattgagctgagttcaactttgtgcctaatgtgtgaagctgagattgaatctcatgagcgcatatttttctcttgtgtgttgtcgagcagagttcttgatatggtgttcaactggatgggatatagaggatggctggttgattttgctggttggtctaactagttagcaatgagagggcaaggccctttgcaatggttcaatacctccagtttggtaatcgtgacttacaatatttggcttaacaggaatagatgcatttttaagggttactcaaaatccatttgtggagttgttaatgatgtaaagaacactgttaagtatagattacaaattgtaaacataagaaaactgactactaatgggaaaatctacttgctaagtgttgcgatattttgcacacgcaagtgtacgt

SEQ ID NO: 321047 - DNA, 1867 bp, Cannabis indica
ttcagcaaagtaataagcatttaacatgtctttttcaattaaataaaatcactaaaagacaaaatatcattggggcaaaaagaccattttgcccctccacactaaaatcacataaaacacactaaaggggtattttgggaaattctaaattcccggccattcccgacattcccaatgtctaacaacccgtcccaaactaataacatgctaagttgtgatttctactgagccaaacgccgagttccaaaataccgggcaccaaaaatgcaaaatatgaaaactactgaataacataaccatgcatttctgaattccatacataacagtataataaattatttaaatagctataaataattttcataattaatcataaacactgctaatttccaaattaactaagcgggctttacagttacaatgatgtacacacatggttagtagatccaacatccacaatccaaatgaatttattattctctaaaacacatgattcaaaaataaaatcatgagaaatattgccttcattttttcgagcataatatatgggacatttagatttcaaatgtcccctctttccatagtaaaaacatcttatatgtatcttcaaaatatttggaataggtaaatgaaaattaatgtagttcaattgttgtctaattattcttcttgttgattcaatctattgatcaagaactattggagaagatgaagaactttccagaacccttttaattgagcctgatggtgtagtatttttagaacttgtaagacatttcaaattagatttctctatgtttgaatcatcttctatctcaacaatttttgctttttcgttagtgtcaagagtatttctagaacctaagtccctcaccctcactattgtttgttcataagctctaacttcagctttatgtttgttaatgtcaaattaattcaaattgttcatcatgaaggatacaacaaattggtggaattcatgagataaactgtgtagaataaactgaactttttgttttttttaaagttaaaattttcagcatagtagctttctggaatttcatattaaccaagagtaaatataaagtgatactttgaccaggagtcatcttcactcattcaagttcgtttgcaaagttgttaaggtagcacggattaggttgaggattattaaacgtctttttgagaactacaaacatcaataaactgaaatcaattgctagttaaaaaaattcaaacatattttttggaaatttgcaaacatttaaacaagtaatgaaggtacaaaaaaaaatacaaaacaaaacatattttaaatattttctaaggtttttaaccaaatgatatataatatcccgtttaggagagagtcaaatataccttaagttagtagtcagctcatctaaaatggacatcaatttaacaactttttatttgatcaacataagaatcaaacgttgtcctgtttaggcaaaattcaaagttattcttattttataagcttttacccttatttcatatatgtcaactcaattttaagtagtcacatttaggatgaagcttctagaatatgaatctacataatccttatctttcgagatctaatgtgttaaattgctaatggatgaccttctaactgttgggttttatgccctaaataaaactccatttcaatgtaatccattttattcaatatcaataaagaaatagaagtatttttcattcatttgtatgtttttgttcaccttatcaattatttgtttatttgatttataaattcatccaaacccttttcacatacttgatcctgttttttgtgtggtcaacacagtggaaagtaaacatgactatgtgattaaagattctt

SEQ ID NO: 321048 - DNA, 892 bp, Cannabis indica
aatgagttttatttaaggcacaaaacccaacatcatcggcccagttgacgccatagaagctgagatttctattttatgttttcaaacactgaatcagtggatgtttattttattttacttagcattgacatttgattgttttgattttgaactatgaagggatcctttcattttatttacattagataaaactcattggggtatgttcaataagaatttggtattttactaagtttggtataaaaatagtattttaacaaagttaagtccaagtgtggtatttttacaacgtaaggcgaattggggcgttacatatctcaagatatataatgtaaaaatttaaaggattttttttttcatatttaaccaaaaatgtaaaaacaatacggttgtacggatttttaaatatttttacgaactttaagttttttttactaaaatatgtactgttctttttacgttatttgttttttttttgttttcttgttgttatttttgttacttttataagactgtaaattgtaattgaaataatagaaaaccataaatatataaatatatatttttgcaacagttcgatctaaaagttttattttaactatataaatgttaaagttggcccaaaaataatattttgtgtaaaatttccaaattaaaagaatgatataagcaacatctttagaaagctatttgccggcggttttaatttggacctatatcactaataacatatataagagattttttcatttttacacttcaaaacaatttttttttttttttggcatttttacgatattctacatagaaaccccctattgcaactaacactgaaacctaaattgcaacaaaaaatcgtacagaaacccctattgcaactagcgctgcaacc

SEQ ID NO: 321049 - DNA, 748 bp, Cannabis indica
aacatttcctttgttcatgtgcagttattttatatgcagctataaatacactttttcttttttcttaaaccgtttaatttctatttctttcaccaataccttaaattacatatatcaaaaaatattgggaaatacttttttgaatgcctaaaattttaaagaaaagaaaaaaaaataaacacaaaaataaacacaaaatacaagactttgaaacaaactaaagaaacacattgtagatattaatcctctaaattcgcctataactaacttaactcatttaactaactctaacagtttagttaagttttttttttttttgaaggacagttagttaagtttgttacaagaatagttgtaaccaattgcacttgatttagttgtatagctatgattataaatagcttcacttccactatctctgtagagttcgaaggagtgatacagagagagagttagagagaattgttgtgagagcttagtaatcaagttcattgtgtttaagaagttgagggtgtctcgggattgggtgagagagactgaagattttcctctgtgtgtgtttcgagttcaaagttggtgtatgctctttcattggtatttgtattcccaaatctcctccattaatgaaagcttgatgatgtttctcagttggagtatggtcaaggatcatatttgatctcaaggaccgaaaccaggataaaaattgctgtcttcttaggggtgttcatccgatccaatccgcactttt

SEQ ID NO: 321050 - DNA, 1104 bp, Cannabis indica
ccaaggacccccactcttggctcctaagaggctaaaaatactattcccaaaaccaaatcacaaagtttgaaattttgacatttaaccttgcaattgaaatatttacaaattttttcttggtgcatctagagttggacttgtgactgctcttaaagatcttcaattagatttagagattgttgaagtaatgcatgaatttaagctaggtcatcagtctcccttatgtgagaaggtactgtggtttctactgggatcactacttcacatccaattggccattgaataaggagtgtgttctattgaagtcctttttctatcttgtatgcctaaaaaactcttggaagttcttccggcctgtgctttgaatgcttcaagctttttctccaaagtcattttcaaaatcttatttacggcttccacttgtccatttttttgcggtcttgccaatgctgaaaaacttttgataattctgtgcttgacatgaaacttagtaaagtgatcactattgaaatttttccattatcatacatgatgttgtgtgcaagaccataacgacatacaatgttgttgacgataaagtccaaggcattcgtggaagttatcgtgttcataggctcaacttccaccaacatggtgaagtaacaacaacaatcatggtgaatttgacccctccttttctagttggaagtgatcctaccgaatagattccccaaatagaaaaagccgacgtacttctcttcagggttatctctattggcgaagctctaggaactttggaataacgttggcactactcacatttttggacatatgtgataaattccttcttcatagttggccaaaagtatccttggcaaatgatcttcttggagaaacttggtttggatgtatgatgtcaataaaatccttcgtgtatttcatgtataacagtggttatctcgatttcaactatacacctcaagtatgacattgataaccatcttctgtataattttccatccatgagcacataccttggggattgatattgaatcttttatgcaactgttggaatatttatcttaccaggatcttagatctactcacaagtatgttgtttaaaca

SEQ ID NO: 321051 - DNA, 774 bp, Cannabis indica
ctaataaattcttataatatttttgtagtctaaaactaagttttgttgggcctaggaaaaatataagttttttttttcttttgggcatctggattgggtcggccttagatacaggctagctcgccaggtcgtgcaaatgcccctaaggaaagtcgtcagaatcacaaacaagaacaccaatatcaataatcttattatcactattaatattagcatccatatttaacttggacaaaccagtaaaataagctatccaataaacaactctagacaggagtagttttgtagcccaaaagtatgactttcgagcttttaaccaactatcataatactgatctgtttatcttaaaacatctgaagcatctaattattacaaaatttaataattagaagccaaattatgaaaaataatgcaatcaagttcttcatttatacatatatataataaaatatatatgatggatggcaagcactttggcacctttaggagagaagagtagtgttttgagaattattgccaacatatagatgaccaactcggacccccacttctcacttttatggacaatatcacatcaaaccaaaccccacaaaaacacaccaatttttattaatgtacattaatttgtatatttaatatatataaacgaaccctttcacaccttcttttatacatataattatatgtttttctttttttcacacacatacataaatatatatatactaggtgattgttacgtgccaagacatgtagtgttagttttatttaat

SEQ ID NO: 321052 - DNA, 1553 bp, Cannabis indica
agtttttgcaggggaacatcagttggctaccatccttgacggttatcccacctcctgctcagaaactcaacgaattcatctaggagatggaccaaaaagagaatttcttgcgttcatatgggatgcttgagttgtatgccactggagtcggactgctcaacatttcgagattgatgtggcataggatggccaccccgaaggaatctacgtctgtgagcatggtagggttcaatgcttggagctggttcatatttcatgtggaacacatctccctcggaggactttcttcgcagatctcattgcttgcattgggatttccctgttttagctaatacctccgtcctataagctcctggttggatggtatttttttgtaaaatcaacaagtttgaggtgccctcctcgaaggaagccttgttcttttatggagtcaagactcaaccaatgaagaccaattgtaaaaaagtaggtttttataagctcgagaagtactcagacactcattgccccactagccacaccaagcgttcccacgatcttagggaatatttatttttctctactggcttcccggtgaagagggtccccacccttcaactcaacttccaatttctaggtaaaaaccattatacttactttatgatttgtttcctcttcacgctctcctttaattttgtccaagtgttgattgtgcttcattgtttctattggcaaagtcagtacctcagaataccgagactaaggagttggccaaaaaagtggcccagtacaaggctttcacagaggattagctaaaagtcgacagcttggtcattacaacaatccgagaaaggggttgatagtttggcggtgcaaaactattgtaataggtttgaaaataccttggtgaaaaatttctggttgtaagggttagtcaagcctgttaacttagctcgatagtggaactcaaatctagctctatatctttgaagaccaaggacgtaggtggcttagttctaccgaaacttgtaaaaattgagagtttgcaatttcttacccttaaactctttactttacaattttgattatttgctctttataattgtttgtcatattatttgtatttacttgatttagttgattaattgcatagttttgtgttaaaaagtttttatttatagaaattagcttaattttccaattcaccccctcttagaaacatatcttgggttaacaaggtttgccaatagcaagttggccaactcctggcctagtttctcctgcataaactcgtgggacattctcattagtatcatcagcgggttgctccacactgatttgcttttctgtaagagatcctatgggtggttcctgccttggaggaatggcaggatcaataggattcacatgattggctggattagtaggaccttttgtggtgggtggaacacatacattgggatctaccggcatgggatcctaaggaggatctaaggtagtaggtcttctggttagaaccatggtgattgatcagatgatttgaagaaactaaaaaaaggctctcaatgaaagca

SEQ ID NO: 321053 - DNA, 1526 bp, Cannabis indica
cgcacatctgttgagggagcaggtgcaaggcttcggccaaagcctgggaggaataggcgcatcggttagcgaacaactgcttggtggcagatgcaacggttcgacgggacgcattggttcgtacattcgtggtaggagcggatgcgatgcttgggcagggtgcagccttgctacacgggtgtgtttcttggtgaagcaacatgtccacagcctaagagttgcctaacggttgggggtgtcaagtgtaccctttcatgggttataaatagtggcagcaggcacttgaggcaccaactatgggttgtggtgtccagcgcaacatattgtatccttgtattattgtgataataataaaggttgtgagtgtttcctgtaaagtgtgctttgtgttgttttacttgatagtaagggacgttctattaagtgtgtgttgggcaaactcgaacaagtgagtgggcgtgtgtgcgatatgtgtgttgtgttggctgactagattgtggtaatctaggtcatcgcaggggaaatttggggagtgaaatttgtccctgtgacaacgcccactcacttggcgttgcaacccctgcccatacctgagaagccgtggcctaaatgaattagtataaagagaaaaaaatggtctcataatccaactaatgactctagacctagtttacatcttgtcagacaattagagagtttgagacttcttcttcttcttttctctcttctaatttcaaaattctatagtgttcttcacattaaaattcgagccttagtaattgagtgcatgcctacccatagcaagtttgtcctcgatcataatgtgtaagactgcaatgagttcttgtacaaatttcttctattttcatttcaatatacatgaaaatttacattaagagagaatttaaaaagaaatacacacaactgtagagtaatgttagacttggatacccctagcctattggtaataacgacggaaatggtctccattctaggcacgagggattttttagtcatccattctcttgagttggaaagttccatttcccaccttatgttgtatttcatcaggtccttaccagttaggccctaagatccccactcccagtccttacaaaactgggaagactcttctcaagacgagatctctaacgtaaaatgtacgacttttgactttataattaaagtgtccagttatctatccatggtaaatttttagttggacttgtgactgttcctggagctcttcaattaaatctaatgattcctggaccaaagagtggttttgggttgggttgtaagtgtcttgtctttgagagaggactgtgatttctactgggatgaccgcttcacacccataagtcattgaatatggtgtatgccttattgaagttatgggtgcgcacgcactcaattactaaggctcgaattttaatgtgaagaacactatagaatttttaaattagaagagagaaaagaagaagaagaagtctcaaactctctagttgtctgacaagatgtaaact

SEQ ID NO: 321054 - DNA, 790 bp, Cannabis indica
gagatgtatagatatatatatatagagagagagagagagagaatatacagtttttccagcaccgttggagccgacgatgagagtcaagggcttgaagaaggtgatgacatgcttgttttcggggtcaaagctccgaattcctttgatgagcattttatctactgtactcattttcgcttttcttctttttcttcttcttcttcttcttcttcttcgtgttgtgttctaatgcgatatggagaaatggaaggaatggattgccatggctgatggtgttaatggagctttcaaaggaagaagaagaagaagagtgatcagtgaaaagggcgggactccattgttatgatgaaaagaccttgataactaaggccccccttaaaaggaaatggaatttttttgtacaattgttttcaaaaataccaaaaacaaaatggtatttttcatgcacatcaaaaaaaaaatatggcaattttgtaagaaatatttgtggggaaaggttagtaaatttgccattgtgaaatactaaaatttgttaaataaccttacttaatttactctatatgattatgatggtcgcaaattgtaaatctatggttgtttatagttattgtgacagtcagtagtcccgtgatccgtaagggaaaataccgggtaagctgtgcaatcccacatcgcctggggaaagtcaagtgtgatgattctgagactgtgtagtatgtgactacaaagttgaagagggcttaaatggattgattggtactacctatatcaacaaggtgcatcttgtttt

SEQ ID NO: 321055 - DNA, 900 bp, Cannabis indica
ctttgaattagcagcctttttactcttattagatgtagttaacagctttaagaggctttttgttattgttccaatttttttcttgttgggttttgaaatagaggaaatgtttgtctcagcttttgtcgtaccattcatagcattactagaagtaggagctttgttaccttctttttgtgggcctccaatcaaactctcaaacgtgtaaaggttattgattaacgcgtgaaagtcaaaaattaacgtgttcatgatgtagttggaagtaaagggcagaatagctggagataaactattcaagatcaaactaacttaagtttcttgatcaatgatagctccatggatcttagcttcctggaaataatttgccatctggagtaagtgttcacgcacattctaatgagctttcattcgtgcattgatgaagttcttggtcgtatcaaaacgagcttgatccgacaccttcccaaacaattcagttaactggttcatgatctcagtagttgtgagagtgttagcaaaccttattttcaaggtatcaaccatgctagacagcataaagaaacgagctttattgttagcattctgccaacgctcaaatttatctcttacattcttggttatattctcacctagttgctcaatagcttcctcagttaacacaaacaaagaattttcatgtatgatgacaatattaatgttctctttccatttgacaaagttagcgctagggagcttgttcttaatcaacattgacacaattgggttgttcatagtcatttttgaaaccacaattatcaatagatagaaattaatcataggtttaagataaatttataaacatatatttggaaatttataaactttttgcaagtaatgaagacatgtgaaaatacaaaa

SEQ ID NO: 321056 - DNA, 658 bp, Cannabis indica
ggtgagagattgaatccatgacacattaaaaaaaaaatttatatatgtaatttttaaataatattgagggaaaattaaaaaatagaacaactttttctatttatttattttatttgggaacaacgaggaaaactgtttggagtgctctatctatatgaccttctatatatacgcgatgttaatgcgtggagaaaaagacaggagagcttccaaaatattaaacaaataataaattgaaaggaagaaaaattcaacattaaaaaaacgacttataacaaaagtttcattcttattaaaaaaactttagttgatggaaaaaacacttgtaaaaaattgaagtcaaaagagactatgggttgaagcaggtatgccaactacgtgagctaacgatagtaataatatattctagaaagaaacaaagaaaagaacaacatttttagtgcaattaattacaaaagatcacactagtcaattttgatacagcaaagaaagagactaaagtcttctttctctctctaaaataataaacaaagtaaagaatatgaaatttgaagtgtgatccaagtaattagttttataatcttcaccttaattagcttttctatgcagttgctttcacttacgttcagtgataagacacccaaaaaaaaaaaaaaca

SEQ ID NO: 321057 - DNA, 1326 bp, Cannabis indica
aaagttttttttttttaaaaaaaatagaaattttaataacatgaactaagtagagattgtcacgtaataattaacttaaatatttatttacaattgaaaattaaatttaaatatttatgccacaaattactcaaaaaaaaaataattatttttaatttacataaatgaagtctatacacattaagatatttttgtatgaaaatggaacatatattatgggcagatctatatagaggtgagaaaatagttgtccagataaaaaaattaataaaatataagattagtctaaaattttatttactatcaaagttatttgtgattaattatttaattaaaaataatatttaaaaaaatttcgacaacattaaatatagtcttcattagagatgtcctaatcccaaaatccttcataaatagtgagtttatttctactcaaatgaacaacattttctcaactcccataaaaaaaaaaaaaaaaaagacaaaacattggatggattgaagagaatccctaaaattttggttcaagcttaccaaaataaaagtaggtaaactactatagtgtcacccaaacccacctccaattcctcccaaaatcataataaatgtaattaaaatataaaaaaacacgtgtcaaaattaaaattaagtggtggtccccattaaaggtaaaagaaaacctaaactatacgtaaactctttttaactctctttgcttttgtcttgggattataaatataaatgtttgttaggtttcatatatcatcacattttcatattttattacataaataaatataaatacatgtcttggagttggactgttggacacgtgcgaggcctgtggttcccacctctgtagttttgtccttttgaccgcattttcaggggacgcaaggtttcttctcacgtgcgtttccatgtgccccaagacataatcattgcacaatttttataaactgcacaaacaaaatcaaaataacttcataaaaatacaaactcaacaaatttgacgaaaatataacatgttgaatctttatatcaaatgggttaaaaatgatattgactcgctcaattatttaaactaatctgcccaatttaattaagaaattttttttatatatatttataaatttttactatatatttatatgattatataaaaaatataatgttaaaactaatatattttttttaagtatttttgattcaaatagagtgtctgccgtttttagtgctctgtgacagttagtgtacctatatggttttttaccagttttttatccaccttccttttttgggctcctttcttcattaacttccatc

SEQ ID NO: 321058 - DNA, 3005 bp, Cannabis indica
tttgttttttaattttttaatcacaaaatcaaagtaaaatttttgtttttaaaaaatttgtttttgaaaaacaaaaatacgttctgtaaccacttttgtttttcaattttaaaaacagaaaacaaaagtgtgttctataaagtttatttttatttttattttttgattttatttaagtcgggtctaggtccggggtcggattcgggttcaagtcaaaagtcgggtttagcgccagggccgtagggaggggatttgggtccgggtctggtcctaatctaaaagattgattaagaaaaaaaattgtttaaaaaaatattgaaagtgattctttttgtttttaaaattttgatttctaattataaaattgaaaagtaaaaacagttttatagaacatgtttttgaaaaatattttcacttttctacttttaaaaacagaaaactgattaaaaaagtgttaccaaacgccaccttaataaaaagtttataaaacaaaaagttaaattgatcttaaactttattaaaatgttgtttaattttgagttttctgcttggacttttcttttaattttttttgtatttttatgtaagtatttctatttttcatatttaatttactgatcccacttccacacatcttttaggagaagactttaaatgttgaaagagaaggtgcatttttcaaaattgaagtggaaagtgagatttagggaaggcaaccatattagtaaggataataaaatattgaataatattgctagacatattctgtaattgtacgatagggtaaatcgtggcataaatatttaatgtttccgattttatacacttaaatacttaatgtttatttttgaaggcaaaaatacctaatgttacaattatcttacactgttactaccacttccgttattaactcataaatatgtacacgtggaaggtccaaatacattacatttatttattttatttgaaaatttaatattcttaatataaaaaactaaatattacttgtttttttacaaaaaaaaaaaaaagaatgcaatactaaattagcatagatgagtgaagcagtgtagtatatgtaatgagtaacaaatttttttttttaaacaagtagcatttagtttcttatattaagaatattaagttttaaaataaaataaaaataaatgtaatgcatctgaacccttcatgtgtccatatttatgagttaatggaagtggtagtaacggtgtaagagaattgtaacattaggtatttttgcctccaaaagtaaacattaagtatttaagtgtataaaatctgaaacattaggtatttatgccgcaattgaccctaaatagatataatgatatctattttagttaatttttgttatatattttaactcattgagattaatcatacatctatatacacaaaataatgaggtagttgtttaaattattaccacataagcattatgtatgtgatttaaaattaaaaaaactaaattatatattttttaaaaaagaattcattcaactaaaaattaattattgatttaaaataaaattaagtaaaacaaaatcaaaaaaatttaaattattttttttctaattaattacacaatgtgaccataatgtgacaatattttaaatagccacaccgttattttgtttgccacatgtgataaaaagtttacaacatgatcactttacaatactaaaatagtataaatagtttggatataatttttaactgactaaaagaattcaggtgtataataataaataagttataggataataattcagtataggtattaaacttcatgtagagttaattttttagtatgtgtagttgtttcattttatattcatatttaatgttatttcctcaattatttgtcaaaaatattatcattctttctgtcacttctctcttcttcttcttcttcctccctctctctctctctatttctctccctctaatgtttttaaaagttgctcctcaaagtacccaaaagtgtaactaaaactaaaggctttgatatttatttttaaaagaaaaataaaggttgagactcaaaaattctccaatgacgaagtcaaaaaacaaagtaaaagttttgtttggtggatatgatctgggaggagacaaatgtacaaaagctttttttgcattgctctttgatttcactattagagaattttggagtctcaaccttagttttttttttaaaaaaggaaatgttaaagttcttagttttggttacagttttggatcctaatttgagaagtaacttttaagaacttctgagaagaataggacataagtgacgaaaagaatgacagtgtttttgataaataattatctatataaataaaataaggagaattaccctacattctaattttttaatttacggtttgagttgctccaataatttctatgtgggttgctatacagattttggttgcgatttagtttgctccgttagttgctattttgtgtgtaattccgtaaaaatacaaaaaaaaaaaaaaaaaagttttgttaaatgaaaaaacccccaaaaaaaactaaaaaaaaataactaatatagaaaaaaaaaaaaaaaaacaatcacacatattaaaataaattacataaattattttaatataatacctctactaaatattatcctaagttataattcggacggtaaacattttatatagcccaattttaatgtgttaaaatcattaaatatatatatacaaatttatattataaatagcacaatttgatactgttaatttattttaaaaataatttttaatatatatgtggatacttttaatctgtaatttgtgttataaaaggaaagaaagaaacgaaagctagtttcttgatgtgaatggatgaatatgatctttcttttcttttcttgaacaggaatggatgaatatggttaacaccaaagataatcctacatttgtttcctgatatatttgtttttatcctacgtgaagtaatgttga

SEQ ID NO: 321059 - DNA, 1876 bp, Cannabis indica
actgttttccaaatgtctttttaggaaattcgaggctgacgaggtcctttaagcaaatatgatcgtcaaacttcatcttgaatgtttggattatactttgaaatatgaattcttaaccctggatctgtttgaagctcatcaagatcaatatccacacaaactgattttgtattgtctccattcttactcataaaatttggtgactcaagcttccttttaaaatatttttccaatattggtgttttcatacatgtaacctaaggtgaattaaaaaatatgaaaaatatattaatacacatactctgttagtgagacaagaaaaggaaatgaggattaatcgtcatcctaagctctcactttttttacatttttatatcttcacataaactatttatttctcaccaccaaaaaattaaaatataaataaatagtgaaccatcaagttgataattcttatgcaaaatgaataaaaaaaattgcccctaaattattatcctatcctaaatagattcttacaaactattaaatcagattaaaaattaataatatagaatgaacaaatttcaaattgcaatttcatagtgtgatgaccccaaatttcagttctcaaatagtttagattctagattttaaattctcacttttcaaatttttattttttcaaataaactaaatatttataactaataaaataagaatattaagaaataaaaaaaaaaattgaaacacaataacaagaaaaagaatttacccctaaattattaactttagtctaaatagattattacaaacaattaagtgagattaaaatatatatatataaacctgtttgtaattttccaaattggtgtagcttcaatcctcaattttatattgatgtaattgtggaattttaatttttttgttttggaaaagatctctccgttctgttgcctctgtttctctgcaacaagccaagttacttttttaattattcaactttccacaacatcaaaagtattttcatttatcattttatttctttttataaataaagtaaatattgtaaatttagacttttgtttgggctggcccatttactttttacaaattaaaatatgtgggggcttgatttttttattgaatgtgtatggaggcttctatttaaatttacaaataattgaatgaataattaaatttatgtagttttaaaataatttttttagtgggggcttaagcccccttaaccttggcagtctgtccgtccctgctcttctctagcttgtgagttaagaatttctaacccttcgcatgaaggatttgtattgtatttatatagtaatagaagttatacttagttaccattttccttctaatggggtcttacaaattatacaatacttcatacttattctttaaagcctgtgtgaagtcatgtttgtatcaaaaatatgagagaatatggcattggacaaaaaggtggccttctttttggcagcacacacatcctgtcagtctgaagtaggggacaagctctggcacagcagggccgtgtttggaaggttctatgttggttgatacccttaagccatctaagtaactcttcgatgacctgtttccgaattacctcttgaaggtatccttattggtcttgacaaactcttcacttctggaccgaatagctttttccaagctagggtggtccgaattggaaagttagggagttgggcttatgtccaaattgtaaccatagcttgacataatcattgggcccaagtttgggtcgaccttggctagtattaggcctcagtattgtacccaccaccattccagaaactcagataacactaaaaattatacttgttgtaatgaccgcatgttagattatggataagta

SEQ ID NO: 321060 - DNA, 581 bp, Cannabis indica
tgttgacctcaaaaagtgatctatcgatagcgaggccgtgtagatctcatgctttccacgtgtgtgcataaataataatgaaaagcaatagatagcaggatttgttataaaaatttggcccccttttgatagcaggtaaaaacctactcccctttagttgtattataccgattcaattactatccagattactataggtgggatctgatatagtacccttaggattacaatgtatgaatcaatgcttggaaaaactcaagtgttggacaacctaaggtaggcgtgttagagagaatgaagaagaaagagaaggtttatcaaacacttagaatttgagatcgggtttctagcttagaggcaacttaggttttcagtcagaagttaaggcctttatataggaggccttaaaccctatatttaccattcaaatcccttagcattcgtatagtttgttagatatttatgaaaggccaaagttcccttgatttcagatattatttagcaattctattggacgtttagggtccaatttgcagctcattactaatggccacgtgtggaagtgtccatcaaggcctata

SEQ ID NO: 321061 - DNA, 1242 bp, Cannabis indica
tctaaagactcgtaatcaactttaaaaaaattcaaaactaaaacccatgaaaaattaattggttgggcagacttcaatacagtttcatattaaaactaagtaataaggagttttattgagcttcgcagatgtattaacagtagtagaagcaaggtccaccacagtgaaaacccatcaatgagagatcatacaaaagagaaattaggactggcaatataggtcacgacacgacaacacaactcgaatacaacacgaaataaataaatttgggtggcacgtttaataattgtatcatgttcgtatttgagtttttaacatgtttaataattgtgtcgtgtttgtgattaagtttttgacacgtttaataatcgtgtcgtgttcgtgtttaccttaatcgtgtcgtgttgacacatttagtaatcatgtcgtgtcataattcacgataacacgaattacttttcatatattatataaaaaacgcaattttcgtatttataatgataatcgtgttatcgagtcgtgtgacctactaattaattgtgtcgtgttcgtgtttgaggtttcgacacgtttaataaacatgtcatgtttgtgtttgaggttttgacacatttaataaacatatcgtgttcgtgtttaccttaatcgtgtcgtatcataaatgtgtcgacataaacattacacaataacacgaagtgccagccctaagagaaatacataagagaataaagagaatgaccagagattatcctcaaactcaagtgaaaacctcaagattagaaattacaagcaattgaacacaacacatcaaagacaaatcaagatcccatatcaacaaaagaaattataaaaataaatattaatagtagaaaatctttatacctatagaaaatcttcattttttagaaccaaatctcttgttcttcgttctgagatctgaaagacaaaaataaaacttagagacagagacagtgagaggagagagattaatgaagatgacccaaaagatccaaaagatgttcctaaggacaatgatcctaatgatgatagaaaagacaaagaagaggagtattattatgaaccagatcctaaagtcattcgaatggctaaagaacttgctgaaactaaaaagaagttggtgttgggttttatgccctatataaaactctgtttcaatgtaatccagattattctatatcaataaagtaacagaagtaatttttcattcacttgtgtatgttt

SEQ ID NO: 321062 - DNA, 2982 bp, Cannabis indica
aaaattcatcagaccaacactattattagaaatagagttgcttgaagacttgttatctttaacgatattaaaaaattaggctccataagccagtgatttttcaaagaaaaatctaccaaaagaaaacctaacattattagagtcattaaaaaccattttacgagccctatggtatgaaccaaaaaatgagagatgaaataaagaagcataaggaaaaaggtcaaacaagggcttattaataatgccacaatcaagtctttccataaaatcactgtgtttccaagtacaaccacttccaataaaatgcaaaggaaacaaatcatacttgcccctagttccacttggcacttgaggtataagagtagtcctcgttctagcttcagcaactaacgtgtccctaatttgctggctagttgttcgggatcctctttcaacacttgaggagtgtattgcaatcatcttgtaagtgactttcttgagttctggctctcaatgaaagtaccaaaatattgattcagaaatttggatacggacttttaagtcacacctccttgctagatcggtgagaataagatatatattaagtataaatagagagacacaataatttatagtagttaactccttgtgtcgcgatagtaatagagctacgtctacttcgagtttttattcttacgatatggattacagaaaaatggctaagtctcggtgctctaatttctagagaaaaaaactagagagagattctgcaatcttatggctacttttctgaatatgaaaaatgagctagaggagctctccttttataggtgaaggaggtcttattaaatgtgaataaaataatccaaaaaatatagaaaaatatatttaaagtatttttgacagtagatgatgatctaatagtaaaaattaacttttgagattgatcgtcaattttcgtagttcgagtcacaacggtgggacccgctccgggtaagctgtagcttaaattcgtaactctcttaggataaaatttggagtcgatagcttcagaattgtgatttaagtatgagacatgacttgatatatcattgaaatagcttcaaaatgcaagtgacaatgcatcaatagaatctatattgagtgagttatgaccattttactaaaggttattttgggcccagcgcccaagttgacatgtgatgtcaacctaaacgctgggtgagtgggaaaacgtgtcaaaaatgtatttttatgcctacgtgatatcttgacatcagttagtccattttcgtattctggcgaagctggtcaccaatttttggagatgttgttgttttgcagaaatatgagacttgaaactacccgattttcgagtatatcaccttgtcggaaatgtgaaaatatgaagttttgaatattactcttctgacttcatggctctcagtgattgtgaaaaactagatgaatggttaaaacagaatcagaaatggataagaagaacctagcgcattaggccatttgtcaacctgggcgctagatgctcatttcaaagcttccgagatgttattttggcacttccaaggttcttgaacttgaggacgaggtctcttaccctgattttgaccattttggagaggaatcttagagcaaaaatggcatttgaatgatcaaaactagcgcactaggttgattgtcaatttaggcgctaggtgttgggcttagtttccaggcccttgggattgtagttttctccccaagtttgcttgtatcttcaatatttctgatagtagaaaaaaatgctcgaaacatttttctgggaaactagttggaaatagcccaagttgacaatatgtcaacttgggcgctgggcctagtgccaggtgtcaacttggtgctgggtccaatttcagccacttgaaagttctgtttagtcctaaaaaatagttgaattttaatatttactaaaaacagagcatatgctcggaagacttcttaatcaaactcctcagaattgacccaggttgacaaaatgtcgacttgggtgctaggcaaaccccaggtgtcaacttgggcactggcccttgttttggcacccgggatgggcaatttcttccccaaaagtacttgtttccctgttttttaatgaggataaaaaagattcacgagtcatatttttgatatgatgcttggaagtggcccaagttgatgataaattgtcaacttgggcgctagggtgcccgggcaccgcgtgtccaggtgctcaaaaatgaaagttctctgaatctgattcagatgtctcaaatatgtttgtggtatgtctagttcatgtcccaatgtaaattttgatccattttcactaagacggtgccgaaaactaaaaccctagttgacgttgtcaacttggacgctcggtgaaaccctaggttcctaggttaacttctgaggtgttggttcatgtgtttttagctctcgtggcctggacttgcttgctctgtgtcttcatggcactgaatactaggggtgtacatcaaaccgctcaaaccgcccgcaccgcaaaaaaatgcggtttgaaattcttcgcggtgcggttgcggtttgaatttttcccaaaccgcgcggtgcggtgcggtttgcggttttgaattattaaaccgcgattcaaaccgcaccgcaccgcatgttttaaaatttcaatttttatatttatttaattaagcccatacatatgagcccaacccaagcctataaatcttagggcaaaatccataactcttcacaaaccctctcttcttagcaacaaacccaagcccatacatgtgtattgaaatttggagttggaagtttgtgtttgttttatttttaatctattgctgaaagtatgttagttgtacatttatattgttgttggaatttaattagtttcaagtttgttattttgatttaggtgtgttgttgaaactttaaaaagattattgacttattgttgttgttataactttt

SEQ ID NO: 321063 - DNA, 935 bp, Cannabis indica
ccaagagtacatccttcgatctcgccaagtagagttagatcgccacaacagagaggccagcaatctaataaggtagttacaccagagaaccgatggaaaaggccaggatctcatcagagattcacttcaaggaagacttattgatagatcaggaagggtctatcaatatgctgatcaacccagttccccacaaactagggcagatcttcccttgctagagggaggacagacctttcctcaaaggtcaaacggtaaagactgccagatcacggtaacaaggaacaagaggggtcatccagggtaggaatggaaaacggggcaggtctgccccgacccgccactgacccgccccgacccgacaaggcatttccccgccccgccctgccccgccccaattgcctcacaagcttaatcaggtctgacccgacctcacccaatcgggttggatttgacctgatattttttctactactattgcaagccatgtgtacttgactttcaatttaagatctggacaatatatatgtatgtgtactttaaaattttgatgtaaatttgacagcttttgagagtctaagtaacaaaagagtctattagagtagctccaatgctatatgtattcacgttgctcatcagccttttgtcagtccaagaatcaatcaagattgcttgaccactatagaagatttgtgggctgctataattgctactgttaagcagcgtaggtgagttatttttctatttttttttttataatttttcaatccaaaaagtgtattaatgtaatattaaaagtaatttaataatatattaaacaatagagtatggattcattctcatgacttttaaaattgtttagcattggagtaaattaaagagtaaatagtgaaaaataatgtggataaaagaaaaaataaaatataatattttaagat

SEQ ID NO: 321064 - DNA, 758 bp, Cannabis indica
aacccacttatcctaactactatatctctctctagtctatatatatattaccaacctttctctctctatattctctttaacttcatcaaattcccaaataaacataataattctcttcttcttcttctattctttttctttttcacttacacaaataccataaatatataccaattattattattattattattattattattattatggggttaagagacattggagcaacactaccacctgggtttagattttatccaagtgatgaagaattagtgtgtcattatctttacaaaaagatttgtaatgaagaaattttaaagggaactttggttgaaattgatttgcatacttgtgagccatggcaacttcccggtatgtatttattaattaattctcttaattaatttttgttaattatattcatctcttcttgtttatttttagttaataataattcttttttttttaatctctatatatataacatgtttttggttgatcatcatattaattatatataaagtttaaacaattaattaatatttaagttcccatttttagagagagagaaagaagattaagctttatatattaattatactttaattatttatttttgttgagtggtgggaatgccgacttgtttattataattatagtttatcttgttcagttgatcatcatgatcattatattaattaataatgttaatattgaatatattatccaatccatttgctaatcacgcctaatga

SEQ ID NO: 321065 - DNA, 1230 bp, Cannabis indica
acattgttttcttgtcttcaatattttcttggttatgcctacaccatggataatgaaaataagaaagtggtggagcttgttgagaagcttggggtcgcaaaagactgtgctgtcgttgttgaagaccaggtgactactttgaaggagaaggttatttctcttgacagtgagatgaccaagcttcgagaaggggctaatggtgccaagacttaggaaagtacattaaagcagagtttggtggctatttgaaagaaggtttctcatcttaaagaatcttctcatcatgccctggatgagcagactgttgtggctaatgatctaagagaccaagtaaaagttttgaagaagaaggtaacttcccttaaagatcaagcccttcttgttgttactttctacaatggctttggctttaatgccatctatatggcttgggctactaatggtggagacaagtcattcaactagaaaggcttccctgacacagaagtgctagacttcattaggcggtgttagcaacgtttttatgtagaaaatattaaagaaattgacttcactatgaatggtggtgatccagttgctggagaattttcaagatttgaaggctacaactctaagcatcctaacttccctccttcttttgctgatgcgcctcctggagagagtgaaggcagggaggaagatattgttgacatgacaggcttctaggacctatgagtctattcttcttttttattttcagcatttagctttagtgtgttagttggccgttcccgagcaacctttcaatgtggataagccttaataaatttattagaatttcttttacttaaattaaaaattctttcctacttaataaaactttaattccaatacttttttattttactttatccgttaccgctttattgtttaatacttgcatagtacaccgtgtcttaagaaactcgattactagtagtaatatcactgatcttaaatttatgtttaccatgagagtacttacatagatgtgcaaaaaagaattttgaatgcttgtataacatatggccctcgtataccataacataacctatgttcccccaagtgatcaaagaagtgcctttattgatcacttgccataccaaatccccttgggccttcttgataatgacccttgagtggtgttatacgtgtgagcactctctacttatttgaggattcttgggtggcagtgtaaagaccgcttagttt

SEQ ID NO: 321066 - DNA, 623 bp, Cannabis indica
ttcaagaaactaaagaagatgaagttaagaactcacctagaactcaaaggcacttaaatcttgctgaactagcttggattacagagaaaacatcaaacccgaactggtctagggggttcaaaaaagagagagatgagctttcctttttttaaaaaaaaaaaattcttatttgtgaaaatgatagaaacttgttttattaaagataatatcaacatataattaacttaaaaatctgatttaattaacttaaataaactcacaaaatgacaaaaggctaatggggcaaaatgaccattttgcccctcccacactaaaagtcaaaaaggacacttaggggtattttgggaaattctaaaatcccgactattcctgatattcccaatgtctaactttattgtcccgctatacttaaaatactaggatgtgattctaatagccaaacaccgcgttccaatgctgtcgggcacaaaacatgcaaaatgcgttctgaattcaaataaatcatcataaattaataattcaaagttaataaacaatttcataattaaaccctaattatctgctaatttccaaattaaagctcagcggtctttacagagtaaatccacatagatctctaagta

SEQ ID NO: 321067 - DNA, 490 bp, Cannabis indica
tccaatcatctgcacaagtgtgaatatctgcactttgcaaattgtattggatcagctattttatgaacacctctacttacgatgtccgtggatgtactcagctaggcagtgtgctctgattgctgcgggagttggcctaataatgagcaagaaattctcaaagtgtattggtgaggctccatgtaaggcgtgcgcttcaacgcattggtagatagtggatagatagaagatcgtttaaggggaggcaatgtggtcctgtgagaattattgggaatgcaaccaaagtcctacaataattagaaataagaaggatcatgggtataaggatagacactatcattgatgtgaagccttttaagaaagtgcctaaaaataaaaacatgagaacttaagctcaaagtggacaatatctttatatattaaaagtgtctatctaacggcatttcttggtttaacagaatatacttaaaaataaaagaatattctgtta

SEQ ID NO: 321068 - DNA, 1232 bp, Cannabis indica
ccctcaaacgaaaaggggtggaagccatttttagtttggacttgagatatacaaagcgatcctttgacaaaggtttagtgagcatatcaaccacttgatcatggctgggaacatatctaaccgagagttgttttgccaaaatttgatcacgaacaaagtgcaaatcgatttcaatgtgctttgatcgtgcatggaaaaccggattggctgccaatgtagaagcactctgattatccacccaaataacaggacaagtgtgcaaggagacttgtaattcagtgagtagtgagacaatccacttgagttctgctacagtgtttgctaatgcacgaaactcactttcggtgcttgagcgtgcaaccacattttgtttcttagctgaccaactgattagattttctcccaagtaaatgacatagccaccagtagacttacggtcatccacacagctagcccagtcagcgtttgagtaactttcgaggatcatattggctgctggtttgagaataaaccatctgaaatggtgcctttgaggtatcgcagcaagcatttgccgacctcccaaggagatactgtaggagccttcaaaaattggcttaatttgttgatgacaaaggctacatctgggcgtgttagtgtgagatactgtagagcaccgattgtgcttctatacaaagtaggatcctcaaataactcactgtcatgcaaggacagctttgttgtgttgctgatgggattagaacaggtcttagcaccttccatatgcagcttaatcaagagatcaattatgtacttggtttgagacaagaacataccctttgaatctcgaaaaatctcaaccccgagaaagtagtgaacatcaccaagattttttagagagaattcaacattgagatcattgattaactgagaaatgagcagctgattagggcctgttaccaagatatcatctacgtaaacaagaaaaattatgagagtggaacccgatccatgaacaaagagggatgtatccgacttagaagctttgaatcccttctgaagtaaactgatacgcagtgtatcattccaagctttgggagcttgtttgaggcagtaaagagccttatgaagaaggcatacatgatcgggtttatcctggtcaatgaacccttgaggttgatgcataaacacagtctcagttagtaatccattgaggaaagcattgctaacatcgagttgtgtcacacgccagt

SEQ ID NO: 321069 - DNA, 977 bp, Cannabis indica
ttgtacacttatgtgtgattatattttaattcgctttgaggttttactaatatatgtatacaagtatacacaataacaattaaattatttgtaaaacattataaaaaaatttatagtgtatgaaccaataagcatatttaattagaaaaaaaaaataaaaaagtgaccattcatggtggtgaaacaacaatactaccactcataataattcattcatcctagtggtgcataacattagcatattctttcttttcttcaattagaaatatttttttatttcatattgcttcttttatgattacgttgatccaacatgcgtagtctcattcataaaaactgcatcattattattattatttagttacgacattgaaaaagaaaggttaaagcaatacatgaatagttgaataccatatccctattttagggcataattgaagtaaatcaaccacattaaaaaagttacaaagggacccacatgaacctaaatcaaacactaaatcctaaattttggttcaccattcatatggtcttttaagacttagctgtttaagataaaaactaaacaaaaagtgattagtttacagatcaatattgatggttcatttgtcctttttaaattaaagatttcttgtgtaaaaccttaaaagatcaatcacttcataagaaaatacaacaaatacaaatttagaagtttatataaatcatgtatatatatatggatttgtttaagtggggacatcactagtactttttgtttttgactttttgtcactcaaagaaattataactcaatcttttttatttgacatataatagacatctaattttttttaaaaaaaaaaaaaattacagtaccaaaaataaattttaaacagtgaattagttgcatatgtaactattttttttttcttttttttttggttagttttaatatcctaaattattcaaaaatttcaatcaaaatgtgaatatca

SEQ ID NO: 321070 - DNA, 1163 bp, Cannabis indica
agaaaagaaaaaagaagaaagaagagagagatagaaagaaagaaagatcaattccaacaaaacataaacacatagacattgaaatccaagaaactcaaatcttccaaaaagtcattaaaattgtttggcatcaagataatttgagggagtaggtgccgtttcatttgctatatacacaatatagctaatgggtgtgcgcgtgggcaggcttctgcgcgcacaaaccccagaaacattctctttgccatcttcttccttacatcatggacaatcatcacctcattttcatccatggcctccggttccccggacgccattgacgccttaatgcggttcaagaactccttatccaacagcaaatctttggccaattgggacccaaccaagagcacaccatgcaacggtcatagggccaattggataggcgtcctttgcttcaatggaaaagttcgcgggcttcagctcgagaacatggggcttaaaggggtggcggacgtagatttgctggtgtcgttgcctcattttaagaccctgagcttcatgaacaacacgctggccgggccaatccctgacttgaagcggctcagcactctgaggtcggtttacttgtcttacaatcatttttctggtgagataccagatgatgtgttcgttggtatgaggtttctcaagaaggttttgctgtccaacaatgagtttcaagggaagatcccttcgtcccttgccactttacctaaacttgttgtgttgaggcttgatggcaacaagtttaatggcctgattccaaattttactcagactaccttaaagacaattagtttggccaataatgaattggaaggtcttattcccgaaagccttagaaaggttgatccaaatgaatttgcaggtaataataataataatacgaatcctacatttattatatcataattgagtttccttcatacaaattttctttctaatgtgatctcagtttattattaattcattccaacaaaatgtcacacatatattgcaatagatttgatattctccgacaaagatcccctaaaaatatgtgtatatattttggtttggtgtgatattttgtgttctgttttgtatatatatagattgactgaaaaccaaccaaatacattaaaattataacttaattactt

SEQ ID NO: 321071 - DNA, 1340 bp, Cannabis indica
ttatgtatgtgcgtgtaggagctggataatgtggactattttttactacgttgacacgtgtagcacaaagattcaacctttaaaagtaggggccacgtgccgctcgaagctcatttctttacgagtagaagtttataatatctatcttgcaaaaaggtggtggtggtacgcgtactaccacactcagatgtaggagacaagatctgactttcatcaaaaaaaaagcataaccgtcacttcgatgacctagcatgtgtaaatggtcgatgtccatgacacttcatgatggtcaatattagctttaggtccttcacatgcgtattcggatataatctaagcgcgcttccctattagacccttctgggtctgggagatatatttttccttccatatttgggaagttgaggcaagtatgaataggcttctgtgtatccttccttcttggatacccctcagttttgaaaagttttcccatgacaaagcggtaacaaaggactttaattaaagaagaattaaattggtttccatcattaaatgtcacgtgtcatacttcacagaaacatgaataacaaaacagattactattatatctataactctagataagtggaagtttattttattatccttacattgagacttcgttgttttgatttttaactatgacaggtcattacatttaatttacaataaataaaacccactgaggtattttcaattaggatttagtattttaaaattttttgtatataagaatggtatttttataaagttaagtccaaatgctgtatttttgcaaagtaaggaattttagggtgttacaggtcataaaagttattaatactcgaagaaggcttagtgattttgtttctggtgtttaaggattcgatctgaagttctacagtacaagagctaaatatatatatttatattgacgtttttgttagatccgttataataaacatgatctcattgttgttatggttgcaaaaacattattgaattcatgaacatatatataacattgttcgtataaaatcattgtggttatattatccttactactcttctgctccactcacctcatctatattaaaaaccaacagccaggaactggatattttgcacggatttcatcataaacagcttcgtagtcaagcaagaaatttgggttcagtaaaagagcaagccttctcagttgttgacttgaatttacccctggtattttttcaagccataatcgtggaatagcatgaacgaaagaaggaagtaaatgtaaaagagagagagagagagagagagagagagagagagagagagagagagagagagagagagag

SEQ ID NO: 321072 - DNA, 1846 bp, Cannabis indica
taaaataaatttccaacaatgctctcatctcatccaactattaccttcaaccaaatcaaacctagttttaattctctgacaactagtaaatgagagagttccttctatagtaattttgcctccttttttgttcttcacctattcggcctataatgatagagtgccttgctcacacatagcaagtcaagtactcaatcatagtgggtaagacggtggtaaccaactcgaaggagagaaggagatccagactcagatcatgattataccctgctatagaaaggaacaagggttagagatctgagcgaaaggagtcatattattccgctgcaatcaatgtaaggttttttaaattcttatgtatttaatttcattattttagagatattcaaggaggatggggatctaagaccatagttggccacattgtgagcggggtatgatattttcaacatagtaatttgtctaaaaatttatattttttaataatatttttctaattttttatattttataaaaataggtttatccccagacgggggaacttcctattgctgtggatacttttgtaaagttccactgtaaagacaacaaatggtgcgatgagcacacacaacaactgcatataagtaattttatatttttaatgaactagttgtatattctaatttctatttaactctaacagtttgatgaaattttttgtacgccaaaatggttgagattcgtgaaactcaaccaacgccaactaatgtcgtgtgccagtacaatgtcaaccccacccaatttcccccaaatatgcctgttatgacacaagtgctaggtgagcagtcgcgtcacttgagaggactgggccagttgctgagacttaagacagggacaaaagagcaactcccagggcaggtccctccaagcagcccactgtcactcaagaggaatatgaggcactgaagtgaagggtggaagagtaggaagcacagaacgagtggcaacaacaaatgatgtagactcataatcaaatcatgagtgtgtttcagcaacaaatgatccaattggctagcaccgttctaggctttaacatgcttgccatgccttcaattctaccgattccaccatttcaacctcctggccatgctgctgggtcctcctcacacactgcccatctcagtgacaacgatgacgatgatactgctatggatctgtattttttttttacataatattattgtttacgaactaaaactacttttatttaggttactacgttttatgtagttttacaattacaatataaattttagttttataatatatttgatattatatttatttattattatttctattttaattttaattttaattgtagattataaatatttatatattttaaaaaaatatatttgctggcgcacattaacttgccggcaaaaataaataattttttaatattaaatgtttttttgccagcgctttaactcgctagcaaaacatcgacaggacatcttagctgacaccaaattagcggcgatgaacttatactgacaaattcattcgccggtgtaaacacttttgccgtcgcatctactgaagtcgccagcaaaacactactacaaaatccactattcacgtcggtcaacgcgactgttcatcgcgttgaccgacgtgaatagtacaatattcaatatattcgtcatttttaaaatggcacaaaaaataaacaaattgcgtaggttctatgtttgtcactaattacccaaccgttggtaaaaggcaagaaattaaaaaaaattcgttcattattagcgtcgttttaaaagcctcactcaagctttgtgtggcgttttaa

SEQ ID NO: 321073 - DNA, 1367 bp, Cannabis indica
tttataattttttaaaaattaaaaggtagttgcggtgtgaattattcataattttttaaaaattaaaaaataattcttaataactacaaagaatacaactataaaaaaaaattgactaagaaactattttttatgctgaaacagataaaaggtgtaccgaaataatttttttaaaggatatatatagacttgtttttatctaaatgaaggaagatatttgatataatttgataaaccactataaatacttggaaaataaaattgactagatgtacattttaacataaaaatattatttaaaaaaaatatattgtaaattaattcatttaaagatcatttttatgacatgtactatttaaaatataactttgcccccttgaattaactaactactaaactaggcctgagaaaaaaatttaaaaaaattgaccaaattgagtacaccgatcgtctgaacaccgaaaaaattaaaaattgaaaaaactgccttcggttaaaactgcctttgcatggttggttttgtgtcaatggcaaaccgaccgattaaaccaagaaccgaccaaacatatatattgtacactatacatatatgatataattatttttgttcatatttaatatacaattttattaaactaaatttacttcttatttttttcatttaaagtctcaattctccattgttttattttattataatttaatgtatttatgtattatatatacacatttataaaataatacgagttttttaatataatttattactatactaatagtacaaataatttgaacaaatttaaaaaaaaaattattttacatcatttatttataagaaagtttttgctcttaaattatatgatatttgacacaatactctagtttttttagtttctcaatatagcaaatttaaagacttattttttttaagaaaaaaaaaagataaagctcggtttagtcggtttaaaccgaccaaaccatgtattaaaatggtcaattttctttacatttatataatagtcgatcaatttttgaattataactatgaaaactgaaaattgaattctagatatttttttatgtaaaaaactgaccgttgctcaccctatactgcaccgcccctggcggctgccgtggtggggttggtgccttgtagtattagtggtggtagttgtagaatggtaagtatttgaaaagaattaaaataaaaaataaaaagaaaataataataataaataaataaataaataaaagatgaaccaatctaattacttcaaattaagacggggtaagttgaaaaatgcctcttttattcatcaattaattaaatttacctctaattttatatttatttgaaacatacctct

SEQ ID NO: 321074 - DNA, 1039 bp, Cannabis indica
gagaaccttaaccgagtgacttctcaagaaccttggtcaagtgacttctcgagaaccttgactgtgtgacttctcgagaacctgggctgagtgacttctcgagaatgttggctgagtgacttcttgagagcattagtgcaacaatggacacatagtaatagtataaaagcacaaaatacatttactgcattggcaccacctaaagaacaaatgctactgaaaagctacacatactcattgaacctcgaggtgagatctaaattttgcagtttaaattgtttaacaaaatcattttggggcttttatggtttttctagaatttttgtagggtggtcccactgttgttatctatgtttaataaatgttggtttcaaattacacaggttaaaccaaccacttattatttgtttgaggtagccagaatgaaagaatcatggatagtagacctcaaaaagagaacatgcatgtacaacaggttccaaatatatgaaatgtcctatggacatgttgtggctatgtagaacgagatgaacataaacccatacaagtactactcaaattactatacagaaaattggctagaaacttatgaaggaacagtgtatctaataggacaccaaagtgagtgggatgtaccacaaaatgtgaaagacataatagtcttgcctttcattaaaagagtgaaatcttgaagaccaaaaaaaaaggaggatggaagctagatgggaaaataaagaccataactagtgcagcgaatttggggaggtggagcacaacaagagaacatgcaatagaaggcatcacaaataaagagaacaagcacaactaaagatcagcagtagaacaacaacaaaaaattcaacatacatttgagcataggatactgaagaaaagaatttgcatataaattttattgtttttctattactattaaaaattgatggcaatgatctgtttatatttttttataggatttctaaactacttggatactacatgaaattgagatttgaatgatctgttgggaatattttaccag

SEQ ID NO: 321075 - DNA, 649 bp, Cannabis indica
gggtcgcacttaaattttagcaacccgaactttagattagaattatattttttatacttttactaaaaatattaaattttgcatgaaattttataattatgcattggagcacaatgctaaaaattgatgtaaatatatcacaaagtgttcttttgtgccaaatattgcctaagttttgcatctcatattggagatggtataaggataccttgccaaatcaattgatatttaatagattaatgtgatgtttggtaatttttgttttttgtttttttttttaattttttaatcacaaacatgaaagtgaatttttttaaaaaaattttgttttggaaaaataaaaatgtattttgtaacaacttttattattcaattttaaaaataaaaagtaaaagtgtattcagttaattttatttttcatttttattttttctttttattcaagttgggtatagttcggggtacagagtctaggtttgaggtttgggattcagggtacgggtccaaggccgaagtcagagtccagatctaggtcttggtttggtcaaggttctggggccagggtcgagtcaagggtgggggtcggggtccaaaatattaataaaataaaatacaaatatattattattattattaaaaaataaaaaaa

SEQ ID NO: 321076 - DNA, 735 bp, Cannabis indica
aaaaaaataacaaaaattaatatactaagtaaatttatcatatatataattaaactaaaataataatgtcaaaaatatttaacacaaaaatctgtgccaaaaatatcacatattttatatataaaattggtaattataaagctgtctttttcatgttctctttgtactattttttaatgactaattttaggttttgtttttttttcttacaaaaataccctttacatgactaaggtaggtaaatgtaagcttaaaaaaaatgtaaaaaaataatattttatttcataaagatttaactaagttttgaattgatgccatgcgacaacgtgtgataattaatgttaaaagtacttaaaaatgtcaaaaattgtaacgaaaattattttagccaaaaaaatagtaattttttcttgaagtgtaataaactaaaaattttaattttttttgtcactaatattactatatttttaatcttttcaaaaaaaaattattatatttttaataactgaattatatttattttgttgattttatttatatatgttctaactagaggtaaagtagctaacacaagccttctaaattaaattaaagtcgatataatttttttacaagagagtgaaacaaacaaaccaatcaatattattgaaaaacttttaatatttaatgagagataatatataaatttattactaattaattaataaccaattctattagggctcgtttggaacg

SEQ ID NO: 321077 - DNA, 831 bp, Cannabis indica
gtacgatcctcgggacatcagggcttttgttgttagtcgctaggcgacaaatattttgtattgaatagcaatcttttgtaaagtattttgtaaacgggatcccaaaatattttgtatgaattattataagttttaattaaatagcaacattttaattaatcacgattttcattaacctcgttgattagcaacgagctgcacagtacgtttaaaatcacgtcaacacgcctatgctagttaggttgttacagcataccaggcaaaaaaccaacacttggttagacaaggctgctcgacagacaagacaatggctagaaagtccctatccaatcagatattcaaacagggacatgggggcaaattttatcccaaattttgtccacctgacctggcatgtccacgtaacatccctggtcggccaagagaagcctataggctggctagagtgatcttataggccggccagaatctatgcacaaactggtcgtccaagagaacctgaactctacaagaaaacggtatacaaagctgtcctcaacttgcaaaaggctggcctacacactcaaagactggcctccacactcaaaggctggtcctcctcttggtggagctatagtgtcttaccagatcctgcaggccttgtcttatcagatcctgtaggccttgagcggccagacatcccctgtaagtctatgggcgactaggattaacctagcaagactctatgtacagcccaaaacctggacacaagcatgggctatgaattgggccctaaaagtccaacagaatggatgaataatatctagactcaagagcactttagtcttttgt

SEQ ID NO: 321078 - DNA, 1094 bp, Cannabis indica
ggtaatttgcctccctgtgaatacaacatagtctatttactaacgcgatcgtagtgtaactaattggacgacatcaagatctacaaagatccataatcattgagccatacaaccatcctataagcaactggtcacaaacgatccattgctcatacttaggatttactttgacaccaaaaacaggcaatccatcacctgtagctacacttgcaggaacaaactctactggagcttgcttcaacccattgatgaaaacatcaaatctatgacctcttatgattgttgaaactatagtttttcataacacataattattttgatccagctttaaggaaagagattgtgagagtgtgttactaaatggtgagctagtgaatcctccagatccattatgaaatccaattagtggggagctggtttgagcttgaccctgctcttttggtagggcagtagaatggtagctagaccccgtagacattgttgcatgagcactgtggttctgataccaagtaaagaaagttatagggaagcaaaatgaataaaactcagctcaagggtagagactgaggagaccatttcatttatagcaaaagatggtacaagcaaagagaggagatgacacttgtcactctcttacatgtgaggaccataaggctaataaaaagaaataacataagggaaatttgaaattccatccttacaagaccttaaaatttttcccctaaatgcatacttaataatattggtcatatatgaccacatttctaatatctcacaaatacccctcccatttaaaaaaataaaaaactcaaaacttctctctccctcttgctaaacacgacgcgcgcacaacctacacccatatcccaccaccacccgttcacctccgacgaccactgacgaccacccgccaccacctttagcaccgaacgaccacgcacgaccaccatcagcaccggtattgaccaccgacagtgggaaatatgtccaaggtttgttttttctcactacccacataccccatcggacccccacccatcggatcatcggaccccccacataacccatcgaaccctacccacataccccatcgg

SEQ ID NO: 321079 - DNA, 1731 bp, Cannabis indica
ggttagattagataattgaagaaaaaataagaacaaatgttagaagagaataactacataagttgatctagactaactcactatagtttatatattaattggtttaagtctatgtaaggattggagttcaagatgtaatagaatttgtaatagtgtaaatgagagaaagctttataaattaggccagctaccaaagaaatgcaagccttcctttctgaatttttgttaaatattttttctgtataacgacaatctattgagcataacttaacattgaacgttcaaacacatataataaagtttactttgacaaaagtatatatatagccctcaaacttaatgcaactgttaatggctgatggtgttccttatttgtattgttaaagattgaaatagaaagctttgggtatatttgaaagggtattgcagtgtcagtatgtttttgttatgccttttagctttgttgcattgtaaaatatatttgtttttctcactctttgtagtttcgtgttcggttggaataaaagttctataacaaaaaaaaaaaaaaagaacaatactactttgttgcattgcaaaatactactcttattcaatagtacgcataatatattcagcttctatgaaaaaactgcttctatataacaatgcagaaattaaataatcataatgccataaaattatatgtaaaattttggatttttataagtcatatcacagtacacataatagtctcaattttttttttctatcttttaatatataaataaacattaatatttagtaagtgaaattgtttaactttatttatttcactgttaagtatttcagtttttgcatttgaaggtatcttgttcgtggttttcactggttaggattgttaaactgtgtggaaattgttcgaggatagaagatggagagaagattttcgacgaaatgtctcacatgatataggtaaaaatattacatctttataattaggtagcagttactgagacagaaacaacgcaacacattgtttgttttttcagaaatcaaaagacatatggggtcaaacaaaactttttggtttctaattttgcattgtattgagtgagtgtttgactattatgatttctaattataaatcaaacatgtatgattactttactgctattctatttcatgttttattctaagatttgttgatataatcttatggtcatataatgaataaccaatttatattagattaatttggtagtcttgtttggaggtctttgtatagtcagcagtttatctttgctataggtagctccatatgaacttcatatcttttaacttatttttttttttaattatcctcaccacctgccaggctagacagccccatgagttcaattttttattataatgcttgttagggataaagggtgtgtaatgcttgttataacttataattgtgcttgacatttgtcattcatagagttatgctatcatcttgccatattaatttagatttgatcgataagtttttttttcagctcaaccttcctttgttcattagagaaccactcccataattaattgctctagaccaccctttattgtaaataatatatggtttggtagcaatttgataatgcaggtgggaaaaattgtatgaaaatctacatttttcccttacttgcacttatgcttcattttataaccgacgcaataggtgaaaaaaaaaatatttgcagcaagtta

SEQ ID NO: 321080 - DNA, 1537 bp, Cannabis indica
gtttaatagatataaaagatcgtcgaattgcatatactaataatttcttctacccctatcagttcaaaagatctttttatgaaacaaaatcttaataattgcttaagaaatgacaattattcataaacattaaatttaaattctaattgtttatgtggtattatctattttcaaagattattataccatagattttgtaccaataataaaatacaaaataaataaaatatgataaacatataaatataatttagtattggcatacacgttaaagaatatgaagctcaatttcataataatgaaaacctcttaaagagaaaattttattaatactctaaaaaaatgtcataatgaattgtctgcaataaaatgaaataggaaataatagttgtatactaataatttaaactaaattgtttaataactaaaacaattaatgcaaaaattaaagaagataacgagctttatcttcaacttgtataatctccaccctactgtcaaaccatccttctcaattcgctaggatatcaatccaagtttaagcagctggagatgaaataatatcttcaacttttaattgagaactttcccttacggctgcccctccaaaaatagaatgtcattacttctttccaaaggctgaattcggataatatcatcaactatttctgtggaaaagcagcaaatgatcaagctttcattccacctttgagtgcctgggataaagattcaaaactaaagtaaaagcatgagtaacattataggagaaaccattacgaacctccaaagggctgaaccccggcacccaaggcttggaccaaatatcaatctttccattgcccacgagataccctgcacctgagatgcacagctcacgagtggccagaatgccacgccacacccttaagtcatctcacttttcttgaacataccaaaaatcatccacaaagcagtattttgccttgagaatttgaacccagggcctgctgcagttctctccatctaacataaaccaagccaactttgccaacagggccaaattgatgtttttgaatcgttttgaaccccagtccaccattacgtttaggttggcaaaaatcagtccaacatttcagcgcgtagtaccgattagagtcaccccaaggcatggatcccttccaccaaaaccgagccacaataatatccatctcaacacatatgaacactgggattttcatggttgacatggcataacagggaatgctttgaaggatcgagttaatcaaagtttttctccctacaactgacaagttcttggctttccatccttccagccggtttaagagtttttctttgagatacttgaaatcgttgcgctttctagcagagcagaagaaaggattcccgaggtatttctccttcttatctagcaacttgatatctagtatgtaacgccccgatttcccgagacgtcacactagctagtccgtttaaaaccatttaagataaagacaataaaagacttctttaatgaaaaataactaagcatgagatctca

SEQ ID NO: 321081 - DNA, 838 bp, Cannabis indica
gacaagtttacagggacaaacgaattcagtctatggagaatcaagatgaaagctttacttgttcatcagggcatttcaaaagccattgatcctactcgacttgcagaaatcacaattgaaaagatcaaaaaggacactaaatcaaaggctcacagtgccattttgttgagtgagatgaagtcttgagagaagtctcagatgaaactactgcttcaggtttatggatcaaacttgcttccacctacttgaaaaaatctttggccaataaattgtatctaaagaaaaaactctatgccatgaaaatggatgaaagaaaagaatatcatttggatgaatttaacagaattgttcttgacttgaacaacataggtgtcaagattgaggaagaggaccaagccatcatcttgctcagttctttgcctaaaacctatgaacactttgtagacacgattctctatggaaaggatacattgactatgtcagaggtaaaggttgctcttaattcaaaagaaaatagaggattgaggggattcaaatgatgatggcatgtacattgtaagaggtagaactgacaaaagagaatttaagaataagttcagaagccatagccaatccaatgcaaagtccaagttcaagagtggaaagttttgttactactgcaagaaggaaggacattttcgagatgaacgtagagcattaaaggccaagaatgacagaggtaagagcaaagaaaggggtgaaactaatgttgcagaagatggatatgaatcagtagatgtgttagttgtgtctagcaaagaatctggtgaagaacggatactagattctgggtgctcat

SEQ ID NO: 321082 - DNA, 1280 bp, Cannabis indica
aattttttcgggtttatttcggtttgtaattttcattcgattttttcgatttgatttgggcgggttactaaaattttttgtacaaccctagtttgaacatacttgttaatccaattaacaattggatctcataatttaatttagtatatagaatgaaagagtgataccgtgaacctcttattataatttcttaattaatatttgtacttggaaaatatatacttaattttttttatgaaggtgttcgttatgcttataatattattcgtgtaaattttttgaatttttttgaattagtttatagtgctaaaaatacatttgaagatttttgaacatgcgtggtaaattggaatatcaaaaatttatttttggcattgtaaattatttagaattttttaaaaaaattatagagataatactgtaactataatgaatattgtaataaaaaaatttttaaaaaataatattttggtatatttttttttgaaggcaaagaaacttttattagccagcaaattcaactaccaaataaggtagcagatcagttgggacatcccctaaactgaaactacgatcaagatataatatggaagctcttggaagagtatgagctaccatattagcagaccgcttaacaaaacaaattgagacatttttcaactcctgaattaacaccttacattctgaaataactataccaaataacgaaattatcttcacttgactccgaattgcttgcaccactgtaaggcaatcagtttcaacaaaagcttgctgccgtggacttctcttcaaccaacttagtgcttctcgaactcccattgtttccacaagagttggatctaaggcttcataaaacattcttacgaaaccatcaatgaacaatccatttgcatccctgattactactcccactcctgcccgattcctattgtcgaacaacgctgcatctacattaatcttgacactattctcaggtggacatacccattgctcagctccatcacctgcctgaaaaccaggccatgatatctcaatttgagatttctgagcatttctccattggtcaagatagtttctcgccgatgcaacaatatccgaggctcccactcgtttctgcttccacactagttcatttctggcattccattaatattttggtatataattttaagcttgactaaaaaaattataataagaggtgtaattatagaatatgactaatatagtaaaacctctatttacgaatactctattcaagaataacctctaatttgtta

SEQ ID NO: 321083 - DNA, 642 bp, Cannabis indica
gatttgggggagattgccttacttaatttttgagcaattgatgcagcctcagcaacacggctatcatcagaaaatagcggagaaagttccatcaggtcacccgggctgccattgaactccatcaagtactgaagcattgaattacaagaaaatgttaaatcattctaaatgaaaagtagcatgcaccatgatcattttacaacagaaaatacctttattagttctattgtctgactagcagtttccctctgagaatctgcactctgacaccagatacacacccaaaaagaaaacatgaataacaacaactttaacagaaacgaacactgctaagaaaaatcgggacatatctcacctgcaaatgatctccaattttagcagccgtctgtccaacacttgaaatacgtgaatctaatcttgcaaagctatcaaacaagccatctacacctttttctagctgataaataatgcataagattagcttactgaattttgattaattattcaaatccaccgaattccctttcaaactattattagttattggtaaatgttttttttgagtcccataactaactcagtgagtgtttccggtgcttagaatctgtgagaacctctcttaagctatagtcgtcatcaatc

SEQ ID NO: 321084 - DNA, 1006 bp, Cannabis indica
gaattcatattagggtgttaataaaacatacatggtagtaaatctagatcttggtaaaatatttccaacacatagaaaacagtgtgtggatacattttaggtacagtaggtgaagaagtaaaataggtttagactcaataggattcactatggatattcattttatggtaggcttgaaaggctcaaactatacaaaaactgcctaaatcatattcctagtaaacgttgtaaacgattataagatatgcaagttctaagcaattcagtcaattttaccacaaactaaagtaaaataattataatatactttacacattgctaattttcatcaatacataatttttcacaagcatccaaattaatccaaagagttaataaaatcaagcacacagtttaaaatttcactccattttagaattaacagcagcaacaaaattctcttcaacttacttgatctactaacagatacgacacaaaactaaagcaaacaaatgagactaaactaaagcgaaaataattaagccccctgatgagtccatatttgtcttataaatatgattaatttgcctattaatattcttaaattgattctttaaagtattgattagtgtgattttaatttgttaggttattttaaagactattcatgcatttagagtcttttggagagattttagcatattttggtggaaagtagtggaagtcggcgaccttgattgtacaaggcggaacttaatcgcaaattcagacgaacttaaaggcagaattggacttggagctcaatataagagttttagatctcattcttatattttcataacatcttgaatcgtctaattccgaaaaatatcgagagagttatggccaaaatactatcagccgttgcagcagaaaatttctgaaaaaagatagcgaaaaaaaagataaatttttaagaagagttgcgatttttttaactttgtttaaaagatgagttatcttttgtgagatattttctaatactatt

SEQ ID NO: 321085 - DNA, 729 bp, Cannabis indica
tgtataaatgtttaatgggccggcccaaagtatttttgtaattttttttccttttttgtatttttttgtttttttcccaaaatattattctgagttttatttttaatataattagatatttttaactacttgggaaagaaagtgcatgagtgttggaagatttaggatccaatctcagattgtgcaatgcattgtatatttaaacgcttcaataagaaagaaaaaattaaagataatttttagcacaaataaatacaaaaaatatattattgtaacaactctagatttgattattattaacttttattttaacaaaaaataagtttatggtaatattttgtactattttagaaaatacaagatttaattttttatttaacaaaaaaaaagttcaatctataatttttgtaaaatacaatgacaaaagataattctaaattaagttataaataaataaatatagtgagactttatttaaggatgacaaacttagaaccgactcttaattaaacatgtcaaaaactaaaactcaaacctaacttgtttataaacagattgatatgatctgacgtgcttatatagtagatcatctatctaagaatacagtgtgtttggaagtaattgtgtaattactaggtagggtaatcactagggtggtaattacacatatagtaattgcactatattttaaaatgcaatgtgtatgtggatatgagatggtaattacat

SEQ ID NO: 321086 - DNA, 2495 bp, Cannabis indica
tgacaagttttgtatcaaatacttgaaacagatgtaaatattttatacacgggatcccagttatatatattatttatttttgtatttataagtatttaaacaaagttttaattattcatgattttcaataaactcgttgattagcagcaagctgcataattaatataaaatcacgataacactcctaaactagtagggtgttacatgggtgttacttgctttgaaccatgtgtgagaaacatttaaagattctcacgtttatgcttgggcaaatacatttgactaatgaagcttttatcttgtgtgtttctcatgattgatggcatggtggagtaggtactatgacctgatgcattgggtgtatgtactatgataaaaaatatagaagtatgtactacattgaaatgcatgggagtatatatatatgggagaaatgtcgaaatcaacgatctagataacctattgtcataaaaaataagaagtgacttgatttgttaacttgataactattcagtattatcaaatgatatatataaaggttatatatataaagatattctacagagccaaagtgagacaaaatgatgaaatgaaaaactcttgttcgctcatatttccaaaacacaacatgttcataattaacaattatggttgttgttatatcacacaaacatgagttgtccaaaaaactgctcagaaagttctctgcatcaaattttcatgagagcctaatgaatatatatatatatactggcacactaattatgtctatatatcttatgagtaccgagcagaagaggccaacaattggaatatatgaaaaatttttgtcattcctacactctgacaaaaactgaggtattgagcagctaaatttgctcgaagatgactcatttgctcgcaaattactaaatttcctcgcaaactgaggtgagatatatcgacattatcggtatgttatttagttaaacattaaacatatcataatacaaaaatcttgtagctagtcgtaatacaaggctcttgtagtcagtcgtaatacaaggatcttgtatctggttgtaatacaaagatattacatctcctcgtattacacactcagaaacgcttctgctcacaaacaaaacatggtctgaccaagtcaaagattacattttgcgttttaaatataaacagttatttacacttatctaaatgtataattgtacgtgacacgtggaaattaaccacccatcacttgtaacttcttacaaagctaagattgagtgatcaccatcctatttctataaataggggttcactcaaagggtgaggaaaacaattttgattgatagaaattctgccaaatcgtaaacacaaccaaaactcataaataatattgactcgtggagtatgtagatttgaactgcaaaatcatgtaaaaatatttggtgttcattaattatatttatctcttcatttcttgaatttattctctaattaattatttttttagattaagttgatgaaaaatcacgtcaacaatagaactacattaaattatttaaatttataaattataaattatatagtaaaaagtaatataatttttttagggtaaaataaaaaaaaagattacttgatttgtaataaatattaagctcatttttatttgtgataattacaaaatatataaattcattactaagactatattttaaaaattataattaattaagtataaatataatttttctattttacaagtggtaaatatcattttaaaactcgtaacacaaaatttattaatttgttatttcgttttcttaaatgataatttttttataaattagagggacgatttgaattgtttctttttattaaaaaaatagagtccaaatagtcttttaaaaataactacatcatcagtcgcatgcacagtttattgaattcagaagctgatattttttcatttattttcttataaaaacacatgcattttttttttgtcatttccattattttttgtatttgtcacaaaatcgtcatttttctctatattttaaaaatagcaaattgtacttctaattttaataatattattttctttataatatacatattaaaatattatattttagattatatcacttaattataagtacaaaatatatatgtataaaaagattataaaatttggacaacacctcacaaagtgtgggttagttacctagttaattatatattgatgaattttagttttttacaaagtttttttactaatttctcactgcatgggattgcatttgtttaagttgaatgattgacttttaactttaatttttataattaaataactaaattaagtaaaaaaaaaattataactaagagcactcgcaacaagtgaggtatattagaaatttttcctcccgaactttgacatgtactaaatcatgcccctgaaccattttggccgttaaaaattctctctgaactattaagattattagatttaa

SEQ ID NO: 321087 - DNA, 943 bp, Cannabis indica
gtactgggtcgacgattaaaatcggttctaattcctggtactgtgaacacataaaaccatttagatttccaatctcccatattggaaaccatgccttctaccccggtaatctcgaaggtggcccatttgctgaagcagtagaaaccgttatgaaggcccacgctctttatatcgtagaaataactgaagtcctccatcgaaggctccctatgcgcgtactccatgtacatcgcataaaatccaagagctatgcgatagctatttggggttagttggaagggagatacatcataccgcttaagaatagcagtaatgaatggatggaaaggaatcgctaccccacatcgaagtatgggtattgagacaaccacatcctctgtgggtataatctcaggattcgtaaaagaaagcgctctttgggaagagcgaagacgcaaagaggcgagactaagcaaattcaatctcgtaaaggtggtgaggttagatttggtaactcgcaaaactaagtcctcgcacgagaagggctcttttagttgtgtattatccactgagtcagtctcacttccctcaacatcctcttcctcgtctgactcgcaattaggtgcctcccagtccatgcccatttcttcaacttcggcatcaggggcatgtctagaatgaacaagatgttcgcgggcggataccgttgactcgctgtcacgattctcgatggtccccggttcagtgagctcctagaccatcctttctatgtccgcggaagacagcaggcctaactccgcagttctggcaattgggatctccgtcttggagatcgaagtcgggatgaagctatcctcctggtcctgatcaccgtcaaagacatcgcctctagagccgagcatctagctgtctggcaggtcactcatctgaaagatagaagatcttttcagtgtggtgaatgtgc

SEQ ID NO: 321088 - DNA, 613 bp, Cannabis indica
aattaaaaaaaaaataatgtccaatttcaaacaaaaacttaatgtggacttgcaagttgcaaataatacgattgatcgtttgaatataattaaaaataattattgttattcaattcaattttttatggtgttatttaattagattaatagctattaatgaataaaaaattaatacttataaattttatttgtaccttgtactttaatattaataaaaaataattcttaatattttcttaactatttttacattatattgtgttatttttaatatttattttgatttattttttcgagtgcatgtataatttttttttctaataaaaatttatgtaccatttttattaaaaaaatatatacaaaagaaaaaaaaattaaaaaattagtgtaaataaagaagatatattttgtaagaaaaaataaaatttctcaagaactaattacaataatattgcacaaagaaattataaccacatactcagggccggcctaagcattgggcagcttgggccattgcacaaggcccccatttttttaaggccctaattttttttttttttttttaagtaaaaggcctatttttttttccttattatatacacataaataaaaa

SEQ ID NO: 321089 - DNA, 914 bp, Cannabis indica
ctctctctctctctcttttaattaattacaataacaacaacaacaatttttatatattaatcttttgagagggaaaattcaaatcccctcactctacaaatatatatattatatgatttagacatttgatcagttcattaaacgtttttcgttggcacgttactttcatcaactcactatatttttgatatactaaccataaaatccttatgaattattattacttatggatgacgtaataaattattaataattattattacaggttgaccgaagatacaaccactactgtgaacaaatgcaaatggtggttaactcattcgacttggttatgggttttggtgcggcggtgccgtacactgccctagctcaaaaggcaatgtctaggcattttcgatgtcttaaagatgctatattagctcagttgaaacacagctgtgagttattgggtgagaaagatggtggtggaagctctggtatcactaaaggagaaactcctaggcttaagattctagaacaaagcttaagacagcaaagagcttttcaatcaattgggatgatggaacaagaagcttggagacctcaacgaggtttgcctgaacgctctgtcaatatcttaagagcttggctctttgagcattttcttcatccgtacgttctctctcttctctaccattttttataatcaataatattcttctccttgattacatattacaccatatatatatacattaaaaagctaggttaataattactagataatatatatgtgaactcatatgataaatggtaaaaggcactagctagtgatgtttagcatcttttttggtgttgggtatatataattgtattagattttatataagttaaggtaataatttttttgttatcaattagagtgttagatacct

SEQ ID NO: 321090 - DNA, 1766 bp, Cannabis indica
gttatttatactgtcttgctggggttagctcacgggtgctctgctgttctggaaatggtatatcagtttgtgatcagccatgagttcgagggcttggcagtggattgtacatgttcgggccacactagaccatgcgggttgggtctaccagttgatgtattttttgttcttattttttttgccacttaggtcgacatgtaaaaatgacttgtaatgttttttgaaaatttttatgggatccgaaacatgtgtaagcttttggaatggtttgtgaattaaatagttacaatttatattttcactctgtacttgatttaaaatttaaattcacactcttatttctagtaatccctatttagcgggattaggttatgtttaatggttgatggtagtgtgcctttcattaaggcgttacaatttggtattagagctccaaggcttttaaacttcctgtagaccggctgaacatgtacaatcattgccagagacaagactcatgggcagtaagtattaagagtaaatgcttcactgcctttgtgttatttattgctttctattttaggtagtatatgagcatctagaaatgaatgttatatggaaagtatgattactgtttaaattgataaatgtttatttaataagagaaacagtaggtataagttagggttaaggcaataagtgcatagtgtgagtttggtgcctgactcgctggggtttttgatttcaaggctatttgaaaaagaatggaccctccacaatcatctagaccacatggtaagcacgtagagtctggtaataaccaagccaatccatcggcactgcctgcgccctcacaaaattcaagggataatgtggggttaataatgttaatccacctcccaactgacagcaaatgttccttgaaatgcgaagcattatacttcgtcaagaagatgaattacttcggtttaggcaactggcacgggcaactctagcagaacaagtgttaccaccagctcctgttccagtagtgggtaacccgagatttattctaccacattgagattcagtgttcgaacattttgttaagttgcaacctctgatgtttttgagagatactaatatcatgaaggttgagtagtggatgagcatcattacctgcatcctagataacataggggtgacatgaatggaacaagttaattatgctacattcatgttagaagatcatgcccgcgtctggtgggatattgtgggatagactagagatgtcagtattatgtcttgggaagagttcaagaccctgtttggagaaattttttataacattgctataagaactttgcatatggaagattttgtgaagttgacccagggtaagaagacagtggtcgagtataccctggaattcgatcgcttatccaagttcgtaggtgacctagtaccaacggacttcacccagaaacaaaaatatgtaaggggagtgaatgcccctatcagtcgggacttgaagattaccaccgatcacgacaccttgtacaagaaagtggttgagttagccttaattgctgaagaggcagaacaacatgtgattaaagagaaagctgctaaggatgtcgtcacaacatcgaaccctaatgtgggtggtagtgtcagtaaggagaccgacagtggcaacccagatcataaacggaaggttgaagcttctggaatacagagaagtaatagaaagtttttgggaaacagaggtagccgttaaggtcgcgggtctacattcagatcttacc

SEQ ID NO: 321091 - DNA, 993 bp, Cannabis indica
gtcaatactcctcagatacagttcaatcgtcttactccattccaaataattcgaaccaatcaatttatggtccataattttagacatcacgggaaccacatcagaaacaacaactgattttgaatttgattttatctctgccataatctcaaaagcaaaaataattgaaagagaaaaggaagagagcaaacacaaaagaatagacactcaaacacgatgaaggcaagagtatcaaaccacaaaatgccaagaaccgctggagaccaatgcaaggaggacaaggaagtaccaagattgtgacgggcatcgactgtcatcggagaagatgctggatctgccctcacgcaccggcacgtggggcccgcgcggggtgaatctagacgtcgaaatttggggttttgtagatcaacggtttgcaatatttttgagtaggcagtgagaacaaattatcactctaaagattgtttttgaaaaagaaccctaattgaaaaacccaaatttgtgaggaaccctaattttaaattttgaattctcaatcctaaaatcagctctgaaaccatatagaaaatagtgaatcgaattatgtgttgtattccataaaatactatatatatatacaaaactaggaaactaaatgggaaactactaaatacaagttactctaattttcaacaactaatattctaacagatctcaagagtgttatttgtgttctttgtgttgttagtcaaagcctaccatttggtttgggtcacacgtatagcatgggaacatgatagtacaattcagtgggagcactaatcatagatatgtaatcaatatcttctatctggacatagaagtgaaataatgatttccttcgagcttggtttaataaagataaatggaagagctcttattttagttattatattagtttacaaaaatatcatttataggaagctaagtgttttacaggtaaaatacattgaggggtgaaacggtaaatttgtc

SEQ ID NO: 321092 - DNA, 1229 bp, Cannabis indica
tatgtgatgcagtgagatcgttccttcactcaggacacatcctcaaagagacaaactgcactactcttactatcatccccaaagtcaagtgccccaactctccaagcgactttagacccattgcatgttgcaatgttatatacaaggcagccacaaagatactttgttcgagacttaaacacatattgccagaacttatagcacaaaaccaaggtggattcgttcaaggaagattcattggccacaacataatgacatgtcaagacttggttcgacactatggaaggaaatccaaaaaggccaattgcatgatcaaactcgatctccaaaaggcctatgacacaatagaatgggactttatagaggatgttctcaagggatttcttttccctgataaattcatctccttggtgatgtgtgtcaaaactccaaagttctctctttttttcaatggaaccttacatggtttctttgaatctaagagaggattacgacaaggagaccccctctcccctttattgtttgtcattggaatggaatacttgtctcgaataatgaaggagataggatgcaagcaagatttctcattccacgaaaggtgtgcatcgttgaaacttaatcatctcagcttcgctaatgatgtccttttattctataatggagactataaaagcattatcctactgcttcaagggcttcaacttttcactaacacatctggcttgactccaaacaagtcaaaatctgccatatattgcagcaatatggcagatatagaagttaaaagagtgattgatgcctctggttcttcccaacagaacctcccttttaaatacttgggcatgcccatttgcttcaagaggatctcaaagcaggagtgcagtattctcgctgaaagaatgacaacccgcatccgaacatggagcataagaaacctatcgtttgcaggtagggtcgtcctcattaattcagtcctctttgcaattcactcatattggtgcgaaattctcaaattgccaaagagagtcattcaagagttagaagccatatgtagagccttcctatggaaagaccaacacatcatgcaaggggctgggaatgttgcttggagctaggaatggcaaattggggatttttcgcggttcgagtcggggccccgatccgatggggcagccccgcccctgtacaatcgaatatctaatcgggttttcgccccgccccgccccgcc

SEQ ID NO: 321093 - DNA, 789 bp, Cannabis indica
atttaaaagattgtttaatttttggtttaatttttggtttaattattgggtttatttgttaacgggagatcaaacttaatcgttaaatttaacagaatattcttttatttttaagtatattctgttaaaccaagaaatgccgttagatagacacttttaatatataaagctatatctgatttataattatatattaatacatcatttaaatattatttttattttagtataatattaagatatcttgtaccatttttcttgcatttggttttaattttgacaaaattcgcaaccaatttgatttcttggtgaagcaaaaggggctggaaataatcaaaggcaaagggttccctacgacttcgattattagccaaataattgaagcaatgtgtaaattttttttatttattatatattttttatttatttttagtccaatagaaaatgattaatatagaaaaagataatctgacttatcacaaacagactagaataagtttttttgaatgatattaacagtccttaataattttaatacaaactatttttttcttatgaattaaaagaaccacttgcaaacaaaaaaagaaaatgccgagatcacagaaaaatcaagagagaaacagagacaccgagaaagagagagatagagaaaaaacaaataagaaaaaaaaatttagggccggcggtggatgcggcggccctaaaaaatcttttagggttctttggggtggcacttgctagggctagcggtggctgggctaagagacaccgagagagagagagaga

SEQ ID NO: 321094 - DNA, 1021 bp, Cannabis indica
gtttaaaagctttattcaatatttaaccaaatagtcttcaatttgtgtccgttttaggttgtgttgtgttgtggtgtgtgttcaagttcaacactcacagtcccaggttgattgactcagttgcacaaaacacaggtattatattttgctaaaaataaataataataatggttgtgagatgtttgacacaatcaatttatgtttttattgacaaattttgaaaacacaagaaaatgagagtagacttggtaaaatctgttaggtttgtgactgtggtctcttgttttaaatcaatttataacattctttctaccctatttgacaccatcaatttttctgtttttattgaaatatttaaaatacaattgctcattctgtttcttttcaatctattaattagtctgtttctgcaggtataaatgcttctgagtgatttgtatgtttgttgctgaagaatggaagaagtcagttaccaccaaataaacacatatgaatatgatttgcttacttttagtttgagtgactattagagtactgttattgtaatatatatatatatatatatatatatatctgtatgtactcctttggtaagaatctgatgtttatggaaggaatgatttgacacaagtgatggtgacaaattgtctgtcactccatagtggggatggacggtattggaaagcctactcttgctcaaatcgtatacaaggatgatagagttgaaattttttttgataccaaagtatggattacggtgcgagatgacaaagttgactgcatgaaagtaattgttacgaaaattattgaataatacgcaagtggacgcaatcaattaataaactcacgcaagtgaggtcgaaccacaggaaattggattaattactactaaattatacttatgattctatttgacaaatcaatactttttatgattcgaaaagaaattgaaagtaattcaagaaacttaaacaacacaagtgaatattgagcaagatgagataatagggaggagaatcct

SEQ ID NO: 321095 - DNA, 919 bp, Cannabis indica
ctctctctctctctctcttcgagaagcccaataggctaaaatcaccccaccaccatactttgtttgaaacccagtcgaaacccaccaccacgaaacccagttgacacatctgcgcgccaccaccgctcctcaattcgttcttagtcaaactgccaacacaactaccaccgaactaagtgaaaaggtaccatttaaaaaatagatttttcattgttcttgtgatttttctaaaatttgtgaactttttggtgataatttgaactttaagatctgtttatgtggtatgtgtattttttacagtgttatcgatgaattatcgattaaaaatcacttaggtagttaatagttttagcttaactaatttttaaattttttattgtttatcgataggaaattgacatattatttatggtttgtcgatggatttgtttgggattgtgtctgttaattaattttttaaatgtcttgagtttgtcgataggatatcaacattttttctatggtttatcgataattttacttagttttttttttaaaaaaaaagttttgagtttgtcgacaggatatcgatattatatctatggtttatcgataatttacttaggttttaattttttaagtgttgagtttgccgatagtatattgatattttatctatggtttattttttccaaaattttgagtttatcgatggtttatctatggtttgtcgattatttttcgatggtgcgcttatcgtggtattttttttttatcttttttttagatggctccacgacttatagttgcaacatcaaaccattgtacatgccatgtgacttatagaggttgttaggttttgtgccctaaataaaatccattttaatataatcagatttaattaataaagattagaaataacattttatgttgcatggtt

SEQ ID NO: 321096 - DNA, 1107 bp, Cannabis indica
tttggcacaatttttagcatgtgtcaaatttagtacacgtttttaaaacaccattggagtattatttttcttaaatgtgctaaaatataacaatacaccacctttttgacactattggaaataatcttataaaaacactactgtgtgattagcacatcaatcatggttaaataaaatgtcaaacaactttaaggcaacctctgggtcaactttttaatattccacctatctattaagttcccaatagtagaaggcattggttgcatcctcgatcaactaatgaatgacctgctcctcagcaagttttaaattttcaacatgatggtggcaaaggtgaagattaacgatggaacgtcatcaaatatcttgattgaacaaaccttggaaagaatgggtttgtctttcaaggatctggagccatgcaagcagctgatgtatagttttagtgaagttgacgtcactatctgtgataaaatcatattaccaataatagtcaaaactgccctgaagctgagcatcactacaactaccttcatagtggtcaacatcaagtctccatacaatgtaatgatcagaaggtcaacactttatgacttccaatccatctaatctatctaccacatgtttatcatgttcctgacagcaactggtatcgactgtctccttggaaactaaagggtagaacgcgaatgttacaacatatcgctgacatttgccaagaagacctcatccactattgagacaactgaggagaagaagaaggcctctttcattgtgaatatagtcaaagggatgatgaagacctctatggttatgattaaaaaaaatagacatcgcacctacaatcgcttcaaggtgtgcccaaggcggggatgacaccaccccatctcagatatattaatttgggagttggtcacatccttaatcgaccaaagagcagccagcgactgctacaacacttttttgacagtcaccaagaatacctcctccactgtaaagccaaggagatgatgaaggcctccttgttgggttttgtgccctaaataaaagccatttcaatataatcagatttactaattaataaagatcagaaatcgcattttatgt

SEQ ID NO: 321097 - DNA, 2668 bp, Cannabis indica
ggtttagggttaaaatttgttgaaatcggcaccctaattagaaaatattcttcgtttcaggggaaattttaactaagttttttccttactcttacactcgttaattatctcttaaaatctcgacctacttccagtttggttcctaagtctcggtctagcagttgggattgagacgtggggtcaggtccctatagttggctctagtcctgggtcccgagtctgattccaactctgggtctgggtccccaatccatgtccaagtcctgggtcggggtttgtgtcccgagtccttgtttgagttttgatctgaatttggatctgggtacaggtccaagtccgggtcctagttcagtttcagttttggttccttgttgggtcatagtcccggttctattcctaagtcctagtctgcttccagttctagtttttagatgatatgttagataagttacatggttcttgtgtgtttttatgattgaagagtgggtatcatcagatacgtatgaaagaaggagatgagtggaaatctgcatttaaaactaaacatggattgtatcaatggttagtcatgccttttggatgaatcatgcgattaatgaatcgtgtttcgtgagctttcattggaaaatttgttggtgtttattttgatgatattctaatttatagtaagagtttgcatgatcaagctacacatttgcaatcagttttggatgtacttcgaaaacagaaactatatactaaccttagtaaatgctttttttacaccgataagattgtttttctaggatttgttgtgagtgctacaagtattgaggttgatgaagaaaagatcaaagccatccaagagtggccaactccctcaattatagctcatgtttgaagttttcatggacttgctagtttttacaggaagtttttgaaggatttcagaaccatcgcaacactgcttacaaaagcttattcacgctcaagtactcacgattagctaattttttcaaacgcatttgatattgaatgcgatgcttctggtataggtattggggttgttcttatgcaggaagggagaccccatgcatacattatcgaaaagctaggtggggctgcacataattaccccactaatgataaagagttgtatgcattggtgcgagctttagaaacatggaaacactatttgtggcccaaagtatttgtgattcacatacatcacgaatcccttaaacatttgaaggggaaacacaagattcgcaggagacatgcacaatggtttgagtacatggagacatttccatatgtaatccggtataaacaaggtaaggaaaatgtggttactaatgccctttctcacaggaatgcctaatctctactcttgatgctaaattactgggttttgaacatattaaggaactttatcttcttgaccatgattttggggagatttatggtgcctgtgaaaaatctggtgagggtaagttttataggcatgggggtttcttgtttggggagcatagattgtgtgtgcctaatttttcgttacgacatttgttactttgagaatcccatccaggagggcttttgggacattttcgagttgctaagaccttagttatattacgagaacacttcttttggccccacatgaaaagagatgttgagcgtatttgtggtagatgtgtcacttgtaagcatgctaaatcgtgggtttagcccaatgggctttacacaccctacctatccctagttcaccagggcttgatatctcaatggattttgtgtttggtttccctaggagtaaacatgggagggactcaatttttgtattggaatacaaattttctaagatggctcattttatcccttgtcataaaattgatgatgcttttaatggtgcagatttagttcttagggagattgtgagattacatggtatgcttagaacaattgtatcagatagtgatgctaagttcttaagttacttttggaaaacattgtgggggaagacttgggggaaaactttaattttttactacatgtcatcctcaaaccgatggtcaaacagaagtatttaataggacttgatccactttattgagggctatcataagtaaatatattaagacttgggagggttgtttaccacatgttgaattcgcttataatcgttctatgcattttgctactaatttttcaccatttgatttaggttttaatcctttgactcctttggatctatcacctttacctgtttctgagcatttgaatttagatggtaaaaagaaagcaaaatatgagaagcaaatccatgagagggcacgactaaacatagagagaagaaccgagcaatacatagagcaagctaacaagggtcgtcaaaaggaagtttttgagcccagtgattgggtatggttacacttgaggaaagaacgattcccaacccaaagacgttccagattgctacctcgaggagatggtctgtttcaagttctttaaaggatcaatgacaatgcctaccgactcgatttacctagagaatatactgttactgctacttttagtgttcctgatttgagcccttacgatgcaagtgaagatttgaggacaaatccttttgaagaggggggaatgacgaggacaccaaggctaaagaaacaagtcatgttccagttgg

SEQ ID NO: 321098 - DNA, 1139 bp, Cannabis indica
acttaaaaatcacttacaaaattaatgaagaaaactatatcttagtgcaaaaaacgtctcattacagaagtaattttcttaagagataaagtaaaatatctctgtatattttttatttataaagcatcgctatgtaattttgattgtttggacaaaagaaaaaaatctatagttaataaaaaataaaaatgaaacaagagataaattcaattacaatagaatctatattcaagaatataaatgagaataagtaaattatattttaatcgagagattataactaaatataattatactagaaaaaaaatcaaaacactaaaaaatatcaatgaaacaataataacaataaacattaatactacactataatataattattttttagtaaatataatatttatacatctattacaatttgaaataaaattatcaattctacataaataaatttataaaatatgtgtatatattttattgagatgtaattattcttatatagatgtatacttttttaatacagaacttataaaatgtataactaattacaatttaaaggttattcttatttataactaacccgaagtagcacttaattttttttttttttattaataaatgagagattattcttaaatagagtatttttagataaaaattctactatatatataataaataaaatggttgacgctagtgttaatgttaagatttagagaaatgttaaaggttgttagcactagtactttgtgaagtgtaatactattaatgttaattgtttttagagtaaagtaccgatccaatttgggtctttgaaaaaaaaaattattgagtttttgttttaagaatatttgtttttgaacatttcaaaagttaaaattgtatgttaaaggaatatttttttttggtcctgggttgggtagggcctatgtcgaaaaaaaaaatatctttatactgcatactgaaatttttaatttttttattttttattgtgtagaatttttttaaaaaatactgtataaattttatattgtatactgtgttaagtttttacggctgttgaacggttattatttagttgttctaatgttgttttaattgttctgttttgtaattttacggttgttttataaaaaaaaaaa

SEQ ID NO: 321099 - DNA, 1081 bp, Cannabis indica
gtaaaatatttccaacacaactttcatggatatgatgaataagttttttaaggacttttcaaataaatttatggtggtgtccatagaaaatattctattgtactcaaaatctaaaaaaaaagcatgaagagcatcatagaatcatgcttaggagattgagggagcatcagttgtttgataaattcaagaagtgtgaacttaattaaagaaagtatcattcctagtgcacatagtgtcaaaagaagagatcgaagtagacccatctaagaatgaagctatcaaggattggactccacccaagaatgcttcaaaggtcagaagtttcttatggctagttaattactactgaattttttttaaaggattttccaagactgcaacacccttaataaacctcatggggaaacaacaaaagttggttcggactaaaatatgtgaggaaagtttccaaccatgggaaaactgatctcaaccccaatgttatgcactttgatgggagaatggaagtttatggtctagtgtgacacatcaaaatgtggactagggtgtgtactaatgcaagaaggcaaagtggtgatttacgcatctaggtaactcaaataatatgagcagggtatccgactcatgacttggaactagtagtcgtggtattttctctaatttttttgagaagttatctatatggagacaagtgtgagagatgattattatgaatactattgtgcgttgttaagatatgaatattgtctattatatcattgattaacattggacactattgtttagtgttgagacatggctattgtaatatcatcattgattaaaactgataattgttatgtaatgcattgttgtgtatagtttgttacttttttattggactttagcctcccccccccccccccgccttcccgcacttttcttcccttttcagttaacaactaaggcataggtaaggtatggatggtgagcaaagtaggttccaagtacatgtgtatgtcacaagggatttatgaatgagtcatctgttggaaatattttaccaggatctagatttactaacaagtatgttttattaaca

SEQ ID NO: 321100 - DNA, 564 bp, Cannabis indica
aaaagtctaccacaacaaatctctaattaaagaacatcaaaaaaaggaccctatttactattatagccccccgcggccagggagaattttaattgtgtcaatggtgaaagaagtatggttaaagggacgatatacctaaaaaaagaagaagaagaaaaataaaaaacaacattaatttgggaggcctgctagaggtttaaggttagataccgcccgatctggaaggaagagcccgcaccagagatccgccccacggtctttgtgtatagatcgtgaacaaccttcatgctccgtatgaagcgagaatggtgggaattctcctcctcaactgctagtttgcctgctgcaaacccccaattaagaacttggcatctgtaagttccgcctagaaggtcttattacaaaccaaaacaaaaagaaaagtttaggcaatgtctcgaggccttaccccaaccgcttgcaacttggtaggatgggcacagaaacatccacactactgtaggacgcccaggtctccataggtagttcagaggcgctcccaactattgttggaaattattttac

SEQ ID NO: 321101 - DNA, 1530 bp, Cannabis indica
aaatatatatccctttcgttgtactatatatatatatcccacgcgcttaagagacaaacatgtaacactaatctttctttttttttttttaattaattacaaaaaggtttctttttctttactatatgtcatattgtttaccatatattaaataaattattacttataaaaaaattataatgcaatgaatacatgccaatttttccttttcaaatacttttagaatgtgggtgtaggtcaccatcgatctagtaaagagatgagatcagtgtggtagctggcatttctcattagcacttaattttaaataattataccttaacaaatatatatattataccatatttattaggactcgtattataataaggaaatatttatttatgtgaatgttcattacaaaaaagttatttttagtaataactgtttaatcacaacataaattttacgtcacaataaaaaattacacgaaaatataatatttaaatacaagttgttattaatttagttttagtcacaacaagtattgtgactaaaaacaaatttagtgataataaattttattttttataactaatatttttagtcatgtacggaccttttaattagtcacaacattagaatattgatttatagttatttataatttttttacttttagccgcaaattttattatgactacaagtaaaaaaatttgtaatggttaccaaaccaacctaataattaatttccttaaacacccagcatataaattatcattatttcttttacatagaacacattatgaaatttagacccaaaattttccgatttgaatttaattatatgtggtttctaagtaatctttttatttgtggatagtagatagaaagaaagaaagaaaatcatcttctgaccccaattgatcaagctaattatgagacattaatatatagcccctatcaatctttttcaaaatatttgtcacaactaataaaaagaaattggtcaacgtatccaatgatatatttttaataattactaactcgttttagtttgtatgtaaagcacttattagaccatttctaatacaaaatctaaaatttgttaaatttgcaaaaaaaaaaaagtttgtactatatttagttcatgtcattatttataactgtgagctttaatacataaattgataaataattaaaaaaaaattattattttttcaagaaaaaaattaattattatttaatagttatttcatattatattgagaatatacaaaattattattatttattattgtttaaataatagtaatatgataaataaagaaggtaaattttataaaaattaatgaatcataataattagttgcattacaataaataaaaaatgacatttattatgagttaaatttatcacaaaattatatagaataattacataaggtataattttttgtaaaaaataaaataaaatttttacgtttaattttttttttttacaatttttacggtttttcatagaaacaacatgaaaatagcatctaaata

SEQ ID NO: 321102 - DNA, 876 bp, Cannabis indica
ccccttatggatcacgggactactgactgtcacactttttctgctgtttctgatttgaaagtaacacttgacacagtctggccttacaggcttcgatattcctcttctatcaaaaatcattcattgaataaagctttacattttcattcaagttcttctagtgatttttattgctcagtgtgtcattatgctaagcagaaaaagctaccattcatttccaatcataatatatctgctgcaccatttgatcttattcatataaatatatgggtccttttaataccttaaccatagatggctacaaatactttataaccattattgatgatcatagtagatacacttggacacattttattaagaataaatttgaagtacaaatagttctacctaatttttttaacatgatcaatactcaatttggtgccaaaatcaaaggggtaagatctgataatgctaaagaattagattttaaagaacttttttcttctttaggtgtggttcactatcattcatgtgtccaaaggccccaacaaaattctgttgttgaaagaaaatattaacttctcttaaatgttgctagagccttattatttcaatcttacatacctttagtttattgggatgagtgtattgctactgccacttatctcattaatcgaacaccaacccccaacaatttgaagttcaaaacaccttttgaaaaaatttattcaaaaccaccagcttatgaacaccttagagcctttgtatgtcttgcttatgcttgcacattatgacaaggcaaatccaagttctcacctagggctgccttgtgacagtcagtagtcccgtgatctgtaaggggaaataccgggtaggctgtgcaatcccaca

SEQ ID NO: 321103 - DNA, 508 bp, Cannabis indica
taatctggattacattgaaacagagttttatttagggcataaaacccaacagttacctgtggaaatccagttggggtaattcaatctgttcgtggatgctggtgttagaacataagcgagagcagtgggacttgggttgtggtgtttgattctgttggatctattttgttcttggcggctgctcctttggtttgccatttggaaccccttgttgctgaagcagctgctttactccatggtctccaactttgtcttcaaatgggttatcgttatgtgaagatattctcagattgtcttcgtctactgcaaagtgtgggttgtaaagaacaagtttttttttgagtttggtattatacttcttgatattttttgtatgtgagattctttttcttctattacattatcttattgtaagcgggctaaaaatgctaatattcattcgcttgcataactaactttctctcttgagtcaccgcgtgtgtaacgccctaatgctaaggcacgctac

SEQ ID NO: 321104 - DNA, 2129 bp, Cannabis indica
agggcacaaaacccaacatcttgctcttgtttggagcctatgttgtatgttgtttaaatcagaattttatgattcatctatgttgtgatttagagcttaaaatgtgtgtgatagctatggattattattgtggagtcgttgcttgtgtttgagcatgtttttgttgagtttgggtgtgttttggcttgagtttcaaagttggaaaaatgggttttctgggtttggaacccaggggccgcgacgcagctacttgagcgtcgcggcccgcctttggttgttgtcttggcattcgaaccaaggtgtcgcggccccatctggggagtgtcgcgacccgccttcgtttttgggcagattcaaacgtgttattcgaatccttataacttttgtgattcaaactccattttcggagttctttatatcgttggaaatctcgttccgagatatatgtgaatgtctatgagttgaatgccaagtttattttatgtgaaagtggaattagggattaaccatatacttgtaaatcccagaatttgtgactaggattattgacacttggtcaggaacgcgcgagggatttggaatctccccatttgcgggacatcaggtaagataatagttccacgtagagttatgcgcggtggtgcttatgttgaaaatgatatatgtgattaatgggaaaccgagattagggttattaccctaacatgagcggtttaatgtcctaagattattaccctagtggattgttagtatgtaattgttatgccatgagattacaatctatgtaaagattcagggttatgcgttcaaggcataatcaagttagactcggtaaccataatcgagatgaaccagtctaaggccttattgtatatagacatgtgagcgtaacacgtaggtctatgccgcgtagacataaataggcatgtgagtttaaccgagatgaaccagtctaaggccttattgtatatagacattgtatgatatgttacttatgattatgaataattttattgtcttgctgggcttggctcatgggtactctacaatgtaggaagggtaaatctgtctctgatcagcaatgagtgtgagagttgggcgatgtatgtacatgttagggcaacactagaccaagcgggttggggtctaccagtgttgaactattgtatctctggtttttccgcttaggtcgactaatggaaggacttgtaatactttttaaaatatttttaggatctcgaaatatgtattttcgattgtaaagttaaagttattacaagttttattttcattctatttcattaaaagtttaaatttcccgcgcttatctttttagtaatcctgattttaggggattagggtttcttaataacaatgggtagtgtgcctaattattagggcattacaacacagttcatccatttgtgcaagcacaattggatcaactgaaaaaatagggtacaagcccgtcaacatggttaaccagttcatccattagttttgtttttgccatttttctcaactattttatctattattaacaaataccactttttgcaacttcaaccgtataaatgccaaaactatttatttaataattaaaataattataaaataaaattttcatttataataattattaattagactcaacaaagtttctttattaataaaataaccctaaaataccatttcttcacaatcaagccataacatagtgaaaatttataaattagacatagtgtaattttagaattgaaattaattaactaaaatcaattaactgagtcttacaagtagtatgtctcaactagtatggggaccatgggcctatataaccgagcttccaataagcagatctaaaatttaccaagtaaattctctaacttattaattcctcgttgaaccgctatagaacttggtattgcacacttagttatatagaacactctatatgttccacgatatagaaatgctattaattgtccattgttataattcgaataatcaatgatcctttatagatgatttacattgcataaggacaaaattactgttacaccctttcaatgtattttatccttaaaatacttagccacctataaatgatattttcgtgaactaatata

SEQ ID NO: 321105 - DNA, 1626 bp, Cannabis indica
ggcacaaaacccaacaaaatctgcctccaacagtgaaggaaaacattataagtattgccaagatgaatagatgtattgacttggaatccattatgttatgacaaggattaaccgcaacactatttgccatgccttgaacatcaacgaagacgtgacatcgatctgccaaaaagtagagaccattagatctggtaagggccgaagcagtgaaaacggaagtagataagttgactacgaatggcttcctctgggaagcagtctatcttatttggttggctaatctggttttggtcctaaagcccaatggcacgtgaagaatgtgcatcgacttcacagaccttaacaaagccttttttgaaggatttacttccctctctcatagattacgattcagatggtggatgccacctccgagtacccgttacttagctttatggatgcttaatctgggcaattatatcaagatgcacatagccgatgaagaacatactagcgtccaaatggataaaggtgtgtattgctacaaagtaatgttgtttggtctaaataatgtcagagcaacgtattaacgactagtcaacaaaatgtttaagaattaattagggagaaacatagaggtctactttgacgacatgttggtaaatctaagacatccagagagcacagtacagaccttgaggaagccttttcggttctctaacagtatgggatgaagctcaattccaaaaaaaggaaaattgggaacctccttagaaaagttcctaggtttcatcgtcagctctcagggaattgaagcgaacccgaagaggatcaaggccttcatcgacatgccatctccctaaaagcataaggatgtctagagtgttaccgaaaggatcgcaaccctcagtaggttcatcttcaaatccacgaacaagtgcatcactttttttaacgtgttgcaaggaaataagaagtttgaatagactgaaaagtgtgaagatgccttccacaaattaaaggaacatttgaccaaagctcctattttatcaaagccaatgaaggggaagattcacacctttaattgaaagtgtctgatcatgccataagtgtcgcctcaatgcgagaagaaggacaagtccaactattgatgtactacgtcagcaaaatattactgggtgcggaatccaagtatcccttgattgaaaaattaaccttttgcttactatttgcctcccaaaagttcataccttactttcaagcccatgccattaaagtattgacaaatcaccctttccgccaagtgcttcggaagctagagacatctgacagactgttaaaatgggcaatggagcttagccaattcaatattcaatatcagccttgagattcgatcaaagatcaagccttagttcacttcgtgatggaatgtttcgggttaagtgacctcctaaaagagctagtcctggagtcacccacctggaaagtttatgttgacagagcattaaaatgaaaagggagctggagaaggagttgtattaatttctctgcaaggacatcaactccaaagtgctagccatttcaaatttcctactccaataaaaaagctaaaacacaaaagccatactggcaggactacgattggct

SEQ ID NO: 321106 - DNA, 892 bp, Cannabis indica
aaaaagtaaaaaataccgcttgacagtatgtttgtaaaaaaatagcaaaagttagtataccatgtaaattttcatttgtttttccttgatgaagtagataaggcattgtatcatatattttgtatatatataatgacctaaactacatgcgggccattattcttgcagcgtaaggtttgtcatgcgctaaatatacaagccataatatgtagtatgacaaaagtagggcagctagtatatttatttgagaaatctttaaggtgacaagtattacacgaggtgaaaaattattattggtgcattttaatattatgttctacatattttaacttaataaatgatatttattaaaaaaaaaaaacttaataaatgatataggacgccacatcttagggtggagctaatggcgacatgtggggtcatttgtgctgcctcaattttttattaattatatttatatatatttatgaatatttcacattttgtctccaaaaaattcatattttttatttatatcttcatagatttttttaatctccctaaaatttatgttttcttatttctatcctcataaaatttatatattttatttttactcatacataattttatttttatccccaaaaaaattatatttttcaatattattagtacttaaaattttatttttgtggctggttctatcaacggtcatatcgatatattttaaggtattaaataataatattctttttatatatatatgtaaatatttattattgattgtatttaatatatgaatattaactgcctacataaatatgagggatcgattacaaacgatagaaaaagaggaagatcttatatatttgccaattgccagccttgaattaagcgggaaacagcacgtcat

SEQ ID NO: 321107 - DNA, 2733 bp, Cannabis indica
acttactctgagaaacaaatgtggcctcatttattgtttaacttagagacccaaaaataggtgagttcacctaccatgctcatttcaaactcttgttgtatttgttggacaaaaactcgcacttagagttagaagtagatccaaatacaataccatcaacatatatttgtgcaataataacagcaaatcaaatgtttttgataaatagtgctttatcaacatttcctcttatataatcatgacaaagcaaaaactcagctagacacacataccaagcacggggtgcttgtttcaagccaatcaaagtctcatctaacttataaacatgatcaagaaggtggggatcctcaaccactccattttgttgaggagttttaggcacaaaaaattcatgagaaataccataagatttttaaaattcaacatacacagtattttcaaaatattttccatgatcactcttaaatcgaactatcttaccaacgttgtaatatttttgaacttttaatttcaattaaagagacttaaaagtatcaaaagtataaaatttttatctcaaaaatactacccatgaaaaccgagagaaatcatctacacacacaaaaatatctcttaccattcaaactttcaacctgaattggacccatcagatccatgtgaagaagttcaagaacactaaaagtgttcacatcaaggacacttctgtgagatatttttggttgatttccaaattaacatagtccacattttcctacaggttctttacccaatttaggtaatcctcgaacaatccttgcatcggataatttttttttcagatttttgtaatgtatatgtcaaagtttttcatgccataaatcagtggtgttatcaatagcatattgacaagtggcaaaggtggtgatggtgtaataattatcattagatctaaatccttgcaaaataatttcatcacgattattaagaacataataatgactactatcaaaattaacagtgtaaccctgatcacaaatttgactaaccctaaggagattagctcttagtctttcaaccaacattatgttcttaagtttgggtagacattagaaattaagaatttcattccctatgatttttctagctataccattaccaaaagtaacttctccaccttgcattggtctaatgttgtcaaaataatctttttcacatgtcatatgcctagaacaactactgtcaaaatatcacatttgagaagcaatagatttaaaaccagaagaactaaccaaatattttttttgacaacccattattgtttttagaagcatatttttttctagaatatttagaattatacatgtttttcatggtaatacatccaggtcgaatgtgaccttttactctacaaaaatgacatatatgaatgaaatgattcattttacctttgagagtgccaaacttgccaacctttttcttttctgaatcagaaccctgtaaagtaatgtcagaacatccagaaactaaattttcatatttgacaaatttagtatttgatttagactgaggtttaacaaaatccaaaccagcatgactcgtttatcctgaatgttgaacctctttaaaaatgttagaacctaaatttagaattttaacatttcttctcaattttttaagttccttggttaaagatacaattatagaatttcttcaaatcaattcaaattcacaacattatttttctttatctttgatgttgtgagataactctttataaacttttactaagtagcaattttcatcacaaatgtacaactacttaccaaacattaccttataagattctgccaattattcctcatcaagttctgactcatcttattctgaaaaaacttctttatcattgtcattagtcaaagtattgtttaaacacaaaacttttctttttttttttctataaatcacttgacaaaacacttgttaaagcaacattgtcatcttcactatttcaacatcatcatcactcaaagtaacattaaaatctttttttattctttttcaaggtattagcactttcagattgaatatgaccatacttttcacattccctacattgaataccctttttattattggagacaaaaaaaattagatgtattgttacctttatgagtttttgagaaattctttttatttccaaccttcattatgtacctttgaaaatttcttaataaagtcatttcatcatcatcatcattattagaaatatttttttcataaactttataggcaatacctttgcttttctcatttaaagaatctgacttaccctttttcttgatttgttgatttaactcaaatattcttaacccatgagttcttcaaactttatttttccgaaatttattgcctcttccattgctagtattacatatcaaatctatcaggaagtacacgaacaatttttgaaccagtacaaattttttttatttttttccaaagcaaaaaactcattagtaatatcagataatctttcataaaaatcagataaaatttcagtttttgacattctcaatcatcaaatctagtttgcaacctagtaaaacgtgatctttttatatcattggtaccttcaaactgagtttgaaggatttcccatgctttctttccagattcacaagatgagatcaatttaataagggattatttcacaaatacccaaaaacaacaaaaattacaaaaatatagtttcac

SEQ ID NO: 321108 - DNA, 935 bp, Cannabis indica
aaaaaattcaaagaacacaataaatttgcagagtaaaaatcctaaatgacctttaatacattaatgtattagtaggtactggtgctttaatgtatacaagcttcaactacaaatatatcacacaaaatatataaatagttaaagtaatgagagaattttaaaagttatatattacactacatatatattgtggttattagtaataaaataatgaaatgagagcaatgacaaacatggttgttgaatatatatataaaaatatatttttttttcttttactaggttgttaaataagttgatatatacttggatccaatgctaggaattaatgtgtggttctcttctcttgactcgatcttcctaagaagaatcaaaaaagatagggccaagctctgtctggccactttaaacagtgacattatgtataataaaaggctaaaaaccggaggaaatatcttagtcctttctaggctgctactatcaaaatatctcagccattcatatatattgtctgcaaattttttgctttcttgtttacttttctctcctaacttttgtcttcaccatttatttaagaaagtagcatataaagctagtattaaaaagcgcatgtaaagtagaatttttctatatcttattcttttcttatttttttgtcctagataaaacatgttgtaatatataaacgcttaaataaaaaaaataaaaaatctattcttttcttaatatatttctatttcaatagagataattaaagaattttattagttataactaaaaaaaatattacagaaatatgggttggccaaataaaaatttatataaccaataaaaaaatcataaaactaccttttacaaacacctaatatctcataaatccgattataatttatttattttttttaaaaaaaatagagatcaattttaaaaattat

SEQ ID NO: 321109 - DNA, 1289 bp, Cannabis indica
attaattgtttattcaaaacttttttttttgataaatcaatgagttgtattgcacaaacaaaatttttacatcctatccgcaccccaaaagggacgagttctatatacatcatgatcaatctatacaaacaattacatgttatttgaattataaagcaagaaaccattctcgatcattgcttttgatcttccggggcattaagttctcaattccaaccttaatagcccattttgtctttttaaccaattgtaaccgggttgaccataacctcttgccaaatagcagtgttcctagctttccaaaggttgtacaccagaccagttagagcagcagctaggacggctttcctgaattttgaggctttagctctcccaatccaacggatcaattgagggagcctactggtttgagcatgccagttcaaccagttcttcacttcaagtaaacaaatatctgcaattgaacattcaaaaaacagatgttgactactttcaggttgtgcattgcagagatagcagcagccaggaacctgtacaccaaatcggatgagtctatcctgggttttcaacctgttaagcatggccaactaagtgatgacactatgcttcggagtgttaagtctagaccaaacttctctgctccaatttagtcgatccagtgcaggtaaaaacaacttgtagcttgcagctatagtatattgttgtccctgaaacacagcaggaaaaattagtattttgagtcgatctttgagggctaccatcttcttccaataccaactcgaatgtattgaaggagagtagtcccaccactcttgattcttgatatacacactatgaacccaccgaagccataaactttcttgtttgtttgaacttgcccgtatgtacttacaaatggcagcttgattccaatgttcaatgttcttgattcccaaaccacccgaagcttttgattgacacacattgttccaagctacagaacctcctccttgaaaaagagcttgtcctttctagaggaaagccctacaaatggcttaaattgacctcagtactttcttaggcaatatcatcatttgactccaataagcctgtatagcagttaaaacagagttatcaaggtgattcttgcagaaaaagagagattcctagagctccaacttttaattctagcagtcatttgctcagctaacagatcacactctttccgagatatctttttcccacaaattggaattcccaagtaggtaaaaggcatgtcctgctttatgaaacctgaaagctgaataata

SEQ ID NO: 321110 - DNA, 749 bp, Cannabis indica
tggggttggacactcccacttcagcatatggtagactttaaacatgccaatatcatgtatgagtttcgtgtcagttggaatggggctataccaaggtaattatagaaatctttaaaatagtccttgagagggagaactgccccaactcttatatgctcgaggctctaagcgtctattctggaaggctcgctaatgttgtaaccttcgtctcaaactagacattcagggggataacaactcaactcccccttagcaacagacctaatgcgacatccctattcattcctgatgccacatgatctcaaaacatatttaacataaggttcaatagagctaactttagattcaattaattcagcttcaaaggtaattgtggggtcttgaggggtctttaatttacgagcattatgtgccattatctcaaagtctaagtcacctggtgaaaaagcaatagtgattggaggtaaaaacataggcctcactaagggtatatgaactaagtttaagggtttaggccaagctgcttctcgcaaatactgacgcctactctcaataacctcttgcaaaaattgccaaaaatggctagaggtttcttcttgacaagatttaccaagatgatctctaattttcttatcatttattttaagaatggtttgaggtcttcgagttttgggcttaaattctatgacagaaaattgactgtaaagcccgcttagttaatttggaaattagcagttatttatgttaat

SEQ ID NO: 321111 - DNA, 1603 bp, Cannabis indica
atttaaataaaaaaatgatgaaaaaaaaaaaaatctcacctgcatggaattatttatcccatcctgctggatgggataaataatcccagacagatgaggttaactggattagttatccagacttgtaacatgcccaaacactggattggacaaattagcctgtctagtccaatcaagtcctgcgtaccaaacgggcccataaaacttatgtgacaatgagtcaatgacatacatttagaatatacagtttaatagttataataataattctaagtaaattttttaaataatttattcattattgtcctaattttatttgtaagttttggaaaaagagtactattgctataagacactagtagtgtctaataccatttagaggtggcgttttgtgattggttaacgatattacataaaatttattatattaaaatatatgagactcgatacttaattatattaataacaatatgttgtaggatactagataccaccactagtgccttttagttaggaatgacagtaaaaactaaaaaatcaaaatcaaccattaaactgactaggttgtaattgaatttttgattttatgttgtttacccataaactgactctagtgacatggacatcaatgtttgactcgtagcaatcgtagcaagaaagaaaacatcccagagttcgagtagtcccgagtcatagcagtcgacttagtacgggctcctagccctacacccaacgttgacttcaggaactctaaaatgggtattttggatctcgctaaattgttttcaacttggccatcttttagtattgtgtaccaggaagacaaaaagaatccaaattcaaagtttggaagttaaaaatacacgaaacaacacctcgaaagtcaacttaggtgcccaatgcccagttttgactttccaactagggtttggttttccaagtccgtcttagtgcaaatggctcaaactttgtagtgagacatgaattagacctgtcacgtaacatagtttgagacaacaaaatcgaaatttgagcactttcagttttgagcatccaaggcaccaagtgcctgacgcttccaaccacaatattgaagaagtatcccgagcattttctttgtcttcatctaaaacagggaaataaatgcttttgggaaagaaacagatcgacttggaggctgaaacagggatccagtgctcaggttgacacttacaacctaagccacttccatcaacagtttagatgaattcttatgggcatattatttgttttatcaacaattaagatttgagtacttttgggaaacaaacagagccatatggaggtcaaaattaggacccagtgcccaaattgaccttttgtcaacttgggtcacttctaaggagttgttctgagaagtcttctaggaatattctcctttttcgctaaagattgagatacaagtgtttcgagaatcaaatagagtcatctggtggaaaaaaaaattggacccaacacccacgttgactcctggcattaggctcggtgcttaggttgacattttgtcaacctgggatattgttaggctatttttagtctacattttgggtcactttttatagtt

SEQ ID NO: 321112 - DNA, 1479 bp, Cannabis indica
tagaggttatggtaactttaatgccttacatgtacataatgagtcactcctctaatacttctcttgttatcaactgcaatacgtgccagatggtttttaaagataagaaggtggagtcactcctctaatacttctcttgttatcaactgcaataggtgccagatggtttttaaagataagaaagtttagcaatacacaaatccacccaattatatcttgtcaagaggtggtaaagaatgaacattaaacaaattaaattaatattctttaaataattaaattagttaatttctttttgtgaggaaattataagtgactaacgaatttatagatgagaataaagtaaaatatgttatttttaaacaatgtggaacttttcttttttaatactcacgtcttaattgtgggatgtactgagaaataccattctgccttgcctgacctccttgcccatgaattcctcagagagggctgggaggatgaggaaggtcgaagaagtgttctcgtagcctccattcctatggtggtagtgctgaaaattgaaatactctttgttattatcaaagagtataaaactaaaaattaaaattactttgattaaaaaaaaaaaactaaaaactcattacatacgttattatcaaaattagtacaattgattagttttctaaattagtataatggctctacacttataagatgcaataaaaatttcattcacgacaacataacaaagtaagaaaacaaagaagaggttacaagttctcttaacataaaaaaatttgataaaatcaaaaacattaaataaattaataatttcaagaaaaataggaaaagtaaaacatttctaatctacggaacttcatgcttagtgcattcgaaccaagcaaattttgttaaaaagagttttgttcatgtcttcaaaccgacggagatccaaaccccgcatcttttgagatggcaaatagaaaaccagcttttaagtgtaagaactgtagtaatattatcgctacaaccaagaatgctaattacaacctcttaatagttgagataattagtttcacccaaagtttagtattttttcccaaatttagtcttatcaatacgagtggaactcaccaaatagaattttacgtggaaaatttcactttaccatgctaaaatcaccaactcctatcaaaacaatccttctcataatacataatagaaatttattttcttttttactaaaaatatccctctcattatcttctctttctctttttcttccttctcctctcgccgtactctgaattttgaccccgactctggacctagacttaggacttcaaacttaggtatgtttttgtcttaaataggaataattacataaggcaccattttttgtaaaatatttatatttttacgttcaaagaatgttttttttttacatttttacggttttccaaaaaataacacgaaaacaacataaaatcaacaaga

SEQ ID NO: 321113 - DNA, 1735 bp, Cannabis indica
ctgagtctgaggtgatccaattgatcaactttcagtgaatggaagtacagttttccactggagcacttgatcactaaacacttagttgacactacaacataaatcggcccataatgatgtttttcatgaacacttaattacattaatcattattttttatatttttaagttcttttaaaaccatacaaataataaaaaatagacataaaaaataatatataaataataaacaatcaacaacaaatttataagagtataaatataaaaatataattaaaaaaaatagtattttctataaataaaatcataaaaatcgtaaaaattttattattagagatatgtcctaataggaataatattcaagagacaacttttgactttagcaaggtatgccaaagtaagtaaagaacaagaatttatccttttctgaacgaaaagaaagtaagttttatataaaattttgtacaaccgtatttttataattttttttattattatttttatgtatttgtaaaataatccatatacaaaattaagatcaaacctttatcacaagtattatatcttcaatcaattctcaagaataaaaagtctattttagatttttagaattaaatttctttctaaatttgtttggataaaaaataaaaaaatcaattttttttaaatcaagtgtattttttttttttttttggagtcgtaatttttataaagctactttcaaattataatatgtataatttttttctcaatgagattcaaatatttttaaatacttttcattcaaaaaaattaaataacaaaaataaaccaggaacttagccaaatgggagaatttgagtttctaacataacaatataccaaattaaaagatgaatctaaagagaaaataatgctttgaaaagtttaagaagttcaataccaatatccaatatagctacaagtacaagattcacacataagttgttgcttaacaaactcaacaacataagagtaatgaatcaaagctccattaagaacctctttctctacttcgagcttgagcttgatccttcccgaatgtggctcggtccagatgaactcgccgctaagcaatttgactctgtcatgatctaagttgtccaacctattaacacaaaaggtgaagagctcattggattgaggttgggcttgactccatgtcgtttgttggtggctgcaaataggtatcacactcaggacaatgtattaatattgtaacatgtctttgcaaataaataaatagataaataaataaataaataaaattgagaaaatttagtttggagacttagtatatttcacattttttttttatgctaatggcttattggatccttagtggagtttgttgttagaattttctgtttcattattgtaaacgaattaatgttgattttgctcaatgaactatatttttatataatggatttttttttatttatctattaatgagaattttcattttctctaaaaataataataataatatattcaataatcctatttaatctataatataaatattttgataataaattaaaattaatttgatctaaattattttcaaactatattttcttttgagttaataccattttggaccctgtattttacaaatattattaattggaccttctgttttgttaaatgacaaaatagacccaatattttctaaaatggtaaaaatagagccctgagttcaattttcaacaat

SEQ ID NO: 321114 - DNA, 793 bp, Cannabis indica
tgcatttcccgcccaccatttcaaaacatcgaaagtttgacccttaattatacattcaacatcctcagaaaaatatctatcgacctcattcttaaaccaaccgctttctctcgcttttctttgttccacgaactcatcatgcaaactacgcgacataggtcgcccaaacatgaatttaggaggtctaacaacaatagcttgactttgaaattgatcaaaacttgttgttactccaccataatgatcatacatagcttgtacaatttgttccactcttttcaccatttcattggttgtattcgaatcatgaaagtaactaaaacaatgcttaagataccgaagcttgtatcttggatgaagaactaatgcaatcagaagtgcctcgttacatttatcaatacttccccaatacttatcgtacttcattttcatgttctttaactgatcttcatcttcatcaagtgataacccatataaccaatgttgtaaaccagatatttgaatgaagtacttattagaagtaatatcatttgactcactaagctttactattactctataaaaggcatctaaaaatttcacaaacaccaaaccattctcccaatcaatttcactaggaggtcccttcataggcttcccatctttgtcaacctcattaaaatatcccaagtagttttcatcagatttcattctttcaaatacttttcgaaatttcaatgcacaagtaagcatttgaagtgttgagtccaaatttgtttcgacatctaaacaaagaagacaattgcattcaatc

SEQ ID NO: 321115 - DNA, 1557 bp, Cannabis indica
gtcttttgataataatcgacgccataagtgacaagcgtcagccatcgcgtgcacatatgaaatcagttatttcctaataattaatagtataaggatttatataaccctaagccagtttctatgacgtcggttattatgaaataaccgacactaaatgttaattttcaactaaaatagataaataactctttagcgtcttttttttattttattttcagcaaaaataaccgcttctaaaatcttttttatagtattatttgtgattgtggaaagtgattctgacatagttattaaggcaaccaagaatttaaactcaaggtgggaaattaataactatgttactcagtgtaaaagtcttatggactcctttttgagttgtaattttgtaaagatttgtagatcttttaatttagtagcctataatttgactaagtgggcgcttaaagaaattataactgttctcaataacaaagtaacattatttgtaatgcctattacacgtattttactttcatctgtataatcaccttactttttttaaaataaaaaaaaaaaaagcctacaagtcgagattaaaaactctcaattacatcaggtgattaacaccaaattacggatttactttagagacttgagaatatttttagtagttaaagtaagaaactatatttagtcaatggaagttagttgaggcaagttgtttacaagctaactaagtatcttgtatttctaagaatagtaagtgctaacttgtcacctaattagtgagttaaatctccaacatagtggttagtgcattaaagttcatttttcttaacttttataattgtgaacttatagattgtgtccttaattgtagatgtgggatgatgagctagtactatatacaagcttgttgttttctcttgaaacatctctctttttttattaataactactaatataaatcaagtctttacaaaaaaataaaaaataaaaaaaataaatcatgttttataattttatataagattttacaattcaaaataagaaaatcaatcaatactaattaggaaacttattttctatttttagtttttaaaattgtatttttttgcaaaactatttggttaacattcagcaaaaaataaataaataaatttggttaattttttcaaaaattattttttagattttctttttatctatacagagataaatattgtaaaaattataataatactaagataaataaattcaaacgaaaaagtgatgagattttatttttttttttaaaaaaatgttaaataatttaacattttgttcattgtaaaggttggattttgatattttgtgatctttgactctcttaaggaaataaaaattttgaaaaataattcatgaacgaagatatgtacacttaaattatgcaccaaaacatgatataattatttttctaatcaattatatttatttaaataagaatatctattctatataaagtgtgcctatataactgaaattcttggtttatgagaaattcatgagtgactttttattttatttaataaaataata

SEQ ID NO: 321116 - DNA, 908 bp, Cannabis indica
ttaaaaactgttttcagttttaaataaaaaacaattttttaaattatgaagccaaacaacctcttattatttactggttatgtgggcatatctaaaaaaaattaatggaattatgatgtgaataagctgaaaaataagatttgattaacagttgggattatctaataattgtgctacctagcttgttggaaatgttgaggctcaaattttgctttatctgattaacttgacttttatgtctggtgtcattgttttagtgttgtgacagggttagtgtttggtaaaattacccgaaggcaagtaaatctcaagtttgggagaatttgataaacgagatttatactcgtttattaagatagtttagaacatattttagagtattttatgttaatttggttcagttttatgtttgttttcttttgtttcaagaaaatattataaaaatataaaaaatgaagattcaagttaaatttgtggaaaagcaaacttaaatggaattacttttggtttggtggtatttgggagcaagaatggagcaaggtgcgaaaatttgggaaactagccagttagagccatggctctaaaagagacaaatgagcaggataagcccatgggatgcggctccaccatagggggttgcagaagcaaaaatttgaaaaaaaaaaaaaaatagataaaaagattggaaaaaatataactttctcaagtagagttgtgatttcggtaccctgagttgcagttcctgagcacatttttatcttttcaagtttaaattctaaatctttttagtatcttctagagaattttgttagcctgtataaattctaagagtgtgtttggaagtaactgtataattactaggtaaggtaattactagggtggtaattacacagtttagtaattacact

SEQ ID NO: 321117 - DNA, 1631 bp, Cannabis indica
atttttttaataatttttaaaaaatactatttatccttatagtaagggcccaaaatttcttttttgcctatagcccatttcaactcagggtcggccctgctcacatgagcccattaacaaaaattggtaaaactcctggaccactgcaaagatgctcatttgtgtttatgacgtgtttgtcttatggcaataatgaagtggacatgtgactcctaaagaagtcagtccattgtttcatgtgccttgaccgatgactactcacaagaccaatagagattctttctcgtaacaaaatgacaactaacgactaggatccattcagacaacagaaattcctctagccatctgaaaattttgtttgtttgtagttataaaaagaagagtttggtatgtcagagataattccttatctacgaaaagatgtaatttaagtctttaacgttttctgtctgtaataattaaggtttgtagtattttctgtttgttgagggcctatatatatatatggcctctcactttctgttaagggcacaagttttcgaataataaaaatcttatctatcttttcaaatatgtttttttaaatctcttcttcgggctatttctctactagggtagatcatataaatattatcattagctcaaagattaccacccaaaagcacaacctacaaaggctaaaaggaaaagtcaatgttaggaaaagcttgagtttgattaactatatggattagcgttatatctctttctatctgatataacaagttaaaaaataataattagcatagggttagtggaaaaaaatttgttgtctccgaattggtgtgtcctccctatcttcattaattgtttcaggacgcatcatctatacttttattttacatgtattaatttagtttagagtttgttaacgaatttattatatattaaataagtataaataatgtgtactaaaataattggtagaatagaaagcgcacactaacttggagacaccagattttctttcgtgtttagtgggggcatataacttgatagctagctcgaagtaagaaccggtcgttgaatcaattcttccaaaaggtgttattgcttccaaaaaattatatcacaaataattatagttatatatatattcttcttttttttctttgtttccaatcacaataggaaaccctaaatatctttcatgcatgatagcggcagtccaccaacctcaagatccgtttcaaactttcactatcttcctcatcacttacattaattattattaaaggactagagcccttgactttttcaaaccaattaatcttttgatcagaatcttctttatatttattgaaaatacgtttcaattccctatatcatatgatcctatcatatgatcctgaactgtactagttctagtaaaagccttaaaaatatgtttccacatatttatgatactgtaatatagcccaatcaattaggaacacctagctcatatatcaagctgctcatatatatataaatatatataaaatgaaaaatatatcatgtcactaattaattcatggtaaacatgatcgacttctatttattagaatatttctaattaaggaaataaaataatattattgattctgataaat

SEQ ID NO: 321118 - DNA, 873 bp, Cannabis indica
ctcattaataaattgtaaatagaaaatataaaaaaaaaatggacgtacaacattgaaggtataagaaaataggttaatctattattattttaacaaaaaaaaaaaaattaaactcaagtaaagaacaatatgaatccaagtatgacacaaaaagacttgacctatcagttgttggtacaatacagtccaacccatatttttttatggtctagcatagcacgatttgaatttttgcgaacttttaaaatacgagccgaatcggcacaacacgtatttatagctgacaatgtcacctacgacttaaaaacaaaacttcaatagttattccctttcattacccaaatcttaaatgcgtttccacccttagtatgttttaaaattcacactacacgaaatatcttttttgttggcgcttttagtcactactacgttaattccctttccctcaatcattaaacttagacatgataagtctttcatgtctattttgttgctacacgtgatatccaggtgcataaaataggtatttttaaaaaatatatcatgtcaccattgttggacactgtaaatatatatgtgtcgtgccataaatatgaagaaggaagagaagtggctggttcgaaaatagaaggatggctcaggaaattttttactgaaggcaagaaatttcatcatctttaagtgtgagtcatcactatctatttataggcaaccacctaggtttaagttaggatttatttggaattaaaataatagaaaaattaagtggaaaataccacttaagtggccggccatagtgatggccccacttgggaatttttttcacttttgacaaattttccttattttctcaaaaatactatttttccaatt

SEQ ID NO: 321119 - DNA, 1443 bp, Cannabis indica
ttatgtaaatttgtacaaagtctgctactataaataaagtgcttatcctcattttctgagttaagagttcaaagcattccttgtgtttctcttgtttccttgtctctgcttctcagttttcagtgtggaatggtttgtaagtgttggtgagacttgattaactctcaacatttcaagcgcatagtaactcgtcatcatatgcagtaacgacaagtcttgtattcacttttgataaaattacataaggatgattcttacctcatagaaacaataaaaaaaaattacatctaacattctctacgacaatcaacaaagttgagtccactcctaatgaattattgctaataaacggaaaaagagatagtttctacatatttaattcgcttagacaccaatcattcaagattcccaaaccccctcgttgcttttcaattaggtgtatcactacgtgtggattagttttatactctccttatcgagtggtactgttgacgagagcattagtcactttatattgttctaagagtagagaatggatgaggaaggaataaatatcgataaaaattaccagagttaaatatgatagaaacgtttctaaatcctgtaacctctagcattattacgtccaggagggtattggatgaaccacctgtagctgcaaatggaagattgtaatagacaatgattggaattgtgagaggcgttagaggagttgtggcttttgatcctttaaagataaattttgtttattaaattaccttatgtggttggaagcaatcaatacgagcttgcgcaattcttggaattgggggtttcaactgcttgcaatagagtggttaatgggcgcctgcgttggcaaaatcatatccacttagcaagaagtccatctacaccgttttgaaagtttgggaaccatttgatattattgaggaggagaattgggttttggtgtatgatgttgtagtgcaaggcgattctaataacttaattatagacaagtatagattcattgggtatttgtcccaatccagaaggtgatgagtttatttttctaggcaatagcactgccacaccttcacaccaagttgctttttaccattataagattggaagactaacattttaacaacattaccacaagatatatccttttcatttttgacttgaggtttttattcaatttaccctttattttctctccaattcatcctcccgtccctaccaaaattcccatgcaaaaacattataataattcagcctgaccacctgtataacttgcatgaaaaaaaaaaaaacttaaacggaacaattaaaaaactaattaaccgtaaaaatgtaacacaatatagagtatttttaaaaaaaaataatagtatttttgaaaaaaaaaatttctaccctacagtaaaaaaataagttaaaaattttaatatatagtgtaaa

SEQ ID NO: 321120 - DNA, 1112 bp, Cannabis indica
ttccattgtaataatatctctaagtattggacgttcttccccatgccgcattaaatgtgtatacattgatataaccttgagtagtgtggtgcactccgcctctcctcccatatcctctccgagttgaattcacttacggaaagtaagggacaaggactacccatcatccaggtagaccctcccaaaaatgaccaatctgctataattcctttgaaataataaactctaaaagtgattaaagatggaatgtcccgcagtgtgggtcccatttccacctggattggtcctaaccaaccatttattttgggaaaaattctgggcaataggtatttatataagatactgcagggactatgggcccataaaatttaggctcccaataagtagatctaaaattcacactataaatttctatcttgttaatttttcatgactccactatagactcagaatcacactcttgatttcttgaaacactctatatacataatatagatacgttataatttatccagtatttccattaaaataatcaatgatcctttatagatggttatactgagcaggaataaaattactgttttgcctcaatttaatttattcttgaccacttattagttccttgtaaataaatttcaataaactagtataattactaaaataaagtgtatataagtagctccctaaagccttctatttatagccaaaaggtagagagaataataggaaagtaacttattttccatccaattaattaattaaataaatagaaaataaaaagaaacaagttcttggctactaaagaattccataattgaattctcctagtggactttggttatagactttacactttatttaaataaggttcattggacctaaaatgttttctctttttatttttatcacgattaattattttttgtatttttacttttattactagtaattattaaataaaatataattcaaatatttaattaacttaacaaaaaaatgtcaagataaataaaatgtcaagattaaattaagtgataatatctcataattattagaaattattgtgctccaatagaaatatcaaaccaacaagattacaactcaatgacaaa

SEQ ID NO: 321121 - DNA, 697 bp, Cannabis indica
aattcaaaaacccatttaaacaaaagaaaacgtttagaaaaatactttttttggcaattacgttgagagttccaagattacgatggggtttcgtgattagatgtggatttcgcgattgggtcgtgggttttgcgatggggttgtgtgacttgggattgggtcggggttttgtggtagagatgaggccagcgatcgtgggtctcgtgcaaaggtggtgggtttcgtgtggtcggaggtcatggatttgtgggtctttcaggtggttggtgagagttagagattgagggagagggagagtaaacgagagagagggagagttgagttttgaatagaaaggatattatgtgggattaagatttttagagtattaaatttctatttatttagaatagaatattaaaacactttatacttaatttaagcatgatttaccaaatttctcatatgttaaagtacgttttcgtaaagtaaattttgcacaaatagcttagggtttaattagctgaaacacaaaagttgctattgaaagtgacaaaccccttttctctaatatattgtactttatttctgtttgtcttgattaatatcatgtgaccaatagaactaagttaagtaatatactcataattagattcgtacaagaatatacaacatacaaaataatatatacaattaaaaatgacaaatattaatttct

SEQ ID NO: 321122 - DNA, 1239 bp, Cannabis indica
aaagaaacaacaacaataagagcattattgaagataaagatacaatttcaatataaaaacacaatattagattttgtatgttccaataatgatttcaatattttttaatatgaactatatattaaaacaatattgattttgaataaataaaattttttaaaacaaatatttgtcttacaaaaaaaattacaaaaataatgaaatcgactatattaaacatgtaccaataaaatgaaaccagctatattaaacatgtactaataaaaataatcaataaaaatgaaactggttctatataatacatagaaagaaaaacaagttaataaacttaaataatatacataaaaataaaactttcacaccaaaacaaaagcattgataataattttaaattttttgatttaaaaaaataaccagttcatagaaactaacacatataaaagaccactaaaatattaaccagttcagaataaaaaacagcattacaaaaagaaaatattaactaaaataaaaccgattatataaaatatcaactaaaatgaaaccgttgatataagatagaaataaaaaattaaacttgggcaaaattctaaaccaatacaatgaaatatatatataaaaaaaatatttatctcttacaaaatataaataattaaatcatactaacttccacaagtatgcaaatcaataaaagattcaaacaagccactaagtaaatataaaacgacactcggtcaaatattcaagaaactttggccagtcaagaaaacaaaaaaaaaactggttataattaaagtaaccaatatatataaaaaaatataatataaaagatatttttcatggatattgtaaaaccataaaaatatgtattactaaagtaaaacacaaaacattatatatatataaacatatgtaagaaattattgttccaaaaaaaaaaacacaaaataaaactacaaaaattatatatctgcgctaataacaagtcacttagttcttcctcttcgacttatttccctttgacatatcttcggtagaatatcattcattgatctttttctgaccatagttatacaatgtaactgccatgtcatccctataatttactatcatgtcatccatgtttggaagaatctcatgaatcttcctcgaatgaataaattagcatacttaatcataaacacgctacaatcacagaaaacaaaaaaaaaaaattaaaaaatgtaaccaactatttat

SEQ ID NO: 321123 - DNA, 641 bp, Cannabis indica
ttttaaatgatagcatccttaaataatgctatcattccatatgctactaaataacattcagcattttagtactgaaaatgataatcacgttttcttatacacatgcattcataacattttctttctccatctatataattaatttataggggcggctatattatatagggattggtgacaatactaagcaaaattgtacttggacatattgcacacatcatccatttctcgtattaataaaaattatcatccatcaagacatcaagtcacctatgtaatattattttatatatcataatgtttgataaaatgaaaataaaataaataatcaaagtgtgacaattaattatttgagtttggataagaattcaaatatttatttgatgtgtaaatctatttacaaatttgtaatttataaaattcacacgctatatatatatgttatcaaaagaatttagacaacaccaaaattcatatatatatttagggatatgattttgtcccgtgatgtactttcacggaatgtattccgtggtacattagatgggtctcagggtacattaaatgagtgtcagagtacgtttctattttttaaccctaattacccctagatcaatctcagccgtgagatcaaataacac

SEQ ID NO: 321124 - DNA, 1333 bp, Cannabis indica
taccctaaaaaaaattaaaaaaaaaataaattaaagtgattccattatcccttaaataagaaaattagtgcataaaaatcatagtcataaccattgcgttcataaaaaaaataagtatataaacaaaattaaagaaagagaagaagaagaagatgatgatgatgagaaatactaagtagttgctaattaagagtttttgagttttgagctctgaaaaatgtactaaaaacactaataataatgtgtttatatagactaacaaagctctctaaaagatactaaaaatatttgaaatttaaattttaaaagataaaaaatgcgcttagaagccatagctcaaggcaccgaagtcacaactccaccgcccatcaatcttttttttggctcacgattatatttattttttcaaattttcttccagtagtcacaaccccctatgatggagctgttgttagggtttatgccctaaaaagcctgtaaaaatatttttgtttataaatataagatgaacatttttatacatgcttgaatgttaaattattaatattttatattaaataatttatatataaatatccaaaaatttcttattcatgaggttgtgacttgtattgtacgaagaattaagatcacttagtcatgaataaaacagtcaacaacatattaaagttttagaatatttaatcaatggttgctagtgtagttcactaatacccgttattgggtgcaagcaatcttggtttggattgctgatgtagtatgacatctaagtgaagatggtgtatgtaatagaaattatattaaatatggttaatagtcagggccggccctgagggtaggcaggctaggcctgtgcctcgggcccccgaacgctcaaggccccgaaattgtgaaaaaaaaaatattaatatatagataaaattttaaataagaagaaaatataataaaaattatttagtgtagtggtaaaaggtttaatttttctctaagaggtcatgggatcaattcccaacctttacattttaattttttaaaaaatatttaatgtgtagttatgagggattgaaccttggagctcttaagagtttttaaaagctttaccattaaactaagcactagaactataatttttataatagttaaactatatatataggggctccaaaatttgatttcgcctaggctccatataccttaggaccggccctgttaatagtagattggtctgaatcctaagtaattatgaactattgttcatattattagtttctttgattcactcgttaaagtttctcaaagaagataattcctactacttatgttttggaacttt

SEQ ID NO: 321125 - DNA, 1128 bp, Cannabis indica
ttctatctcttagggtaaattctcctggttcttttttggtggttgagattattgttttctaatatcggtttgtttgtttgattgattatttccagatgttcagagagagcagaagggtgtagagaaagccattagagaagctgctaagagaaatgacttgggctcagccaaggtattgcttatgaaaatttctaatttatatgttcttgtattatataaacacacatgtgtatatatacaatatatttttgtatatttatggtgttgcagtagtgccacttgtggacttttttttagggaagacatgggagattttataactagctaaaagctaatacgtggttgatctttaggattaaggtgtggattatcatagttatagttgttatgattgggactttcagtatcacttttgtttattttagggttttggttcttttgcttgttaaactattactagatatttgtctacacatacattgttgagtactggaagagttatagcattgttgggcaagtgaattatatcagctaatatagttttgatgaatactttttgtagcatttagtttaagttatgattctgacttgagtttaatgttgaatgttattgtattcaggcccttgcaaaggaaattgtaatttcgaggaaaactgttaattgactttacgaaaataaggcccagctaaattcaatatcaatgcatcttggagaaagtgttggtatgttgcttcaaattctctcttcattctccttgttctaattatagcatgtaaacaatccacaaaacgatatgaccttaactccatttttttttcaagtatttgatgtcaaccttattatcatggaggttcctttattcatattttttaaattaaacagttagtcttttattaatcccagaaagggttggagtcccagacacttaatcacacacaaccatgttatttcatgtctagcttctgaaatggttagtgaagacttgtgtgatggaaggaaggcttctctcagaggaggattcatagacttgaaatctcttacagatgacttcattctatttagtgaagacttgtctaaatgcaataatattagtgtttacaactattctatttgttgggttttatgcc

SEQ ID NO: 321126 - DNA, 612 bp, Cannabis indica
ttattcttacagagccttgaggatagggaatttttatatggtgcgtaatgcttattggcggtgtagcttcaatacccggctggtcatcagtaacctgctcttcagcttgcttcttatccacttcagcctgtgcctgttgatcatgcttctctttaaccacttgttgcttagccgttggcccctcatattcttttccacttctcaaggaaattacttgatactgctcttttggattaacctctgtagtactgggaaaattaccttaagtacggttggccatttgagcagttaattcccccacttgattctccaagattttaatgaaagctctagtctccatcatgaattggagcaatagatctgcttgaatgttaaaccctccactattattctattgttgggcaggttgttgagtactccattagaatggtggcctatatctctggttgatgaagccttgatgattctgacctgatagctatggatcatgatactgacgacgtccatcaaggtagggctagggatcatcttttaaatatccaatggtttgagcttgctccattggcagattgttcacattaacttgacatctatcataagagtgaggccctc

SEQ ID NO: 321127 - DNA, 1782 bp, Cannabis indica
taataataataataaattttcgtaaatttttgagtaatttgctgtcaaacttcctatatttttatgttcgttacagattaacctccttactcgaaaaattagggctatactccctgaactcaacaatcgttttggtgagcagtctttctattggtgtggctctgttacgtgccagatggctcctacacggtgtcatatcaactttgtcatatcacatgaaattccccacgtaggtagatgattaacaaactaaaaacaattaatgaaaaccaattgatatgaaattcaaaaaataaatgaaaataaaaaacaaaaaaacaaaaaaagaagagggtcaaagagaaagaaagaaaccaagcaccattgttgtgcaaagaagaagaacatggtgatggttcgaaggaggagttgcgattgcgaggagcctaaaatcctgaaaatttacacctcgtggacgagtttgaatccaggaagaagatttgcaaagtgcccttttggtcccatgaattctcttcttctttttaattgttttctttttttcttttctgggtttttcttcactgtactgtgggaatgtttgtggctggcagcgtcgtggtgggtgtgagttttgggaatggatcgatcctcgtatgtgtgatcgtgccactattgtgattcttggcctgtacaggaagaatcgtcaactggaataagaaatatcaataatttctaggttaagtgggtgaagtaaatgagcaacattaccttacgaacctgtacaaaagtgagagcttccatgatagcagtaccagtgttcgagttcctcattgttcgagctgccaagaaaatagtaaaagtgccctttgtagaaatattgtcattggtgttgttgttacttttgtattactttggttcaagatcctaatttaactttgtttattagtaggatcttgaacaagtattcctgttgagttttcatgtaatgcttgatgttttgaaatgaaaaaaaaaaaaaaaaaaaagatactttcacaaggttagatctttcatactgacataaaagctaaagcatttcaataagaaaaatacaataaaatgttaaagcatccatattccaacaaaatctgtcccataagttaaaaattcaattcactaattgttctaaaaggatctgttctaaaaaaaacttcacaaaagttaaagatccaatttcctagttgttccaaaaggatctattccaaaaggatatattccaaaaaaaacctatcataaaagttatttgttccaaaataaaagctaccccattaatggaggcaatagtagtaatgttataacatttaatacctaaaagttacataacatttaactatgacaaactaatgctacaatagttgatttcactgttgagtagagcgcgaagttgatcctgttggaattattttaccaggatctagatttactaacaagtatatttttaatatcctaaacatgaacttctaaaatgacatgaaataaacacatataaagtttctgaaactttacagtggttgcagcggaatataatgtctccttccactcagatctctaacccttgtatcctttctgtagcagagtatcctttcccaactcctggttgtttctgtaaagttcttttttggcaagttagttgacaaaatattttttcttttatggtaagattcttgtgcattcataaccaatttcttaccttgtttattcggtttgtagttgctcttttccttgctaggaaagttgcacttttcagctgaactttcctttgtt

SEQ ID NO: 321128 - DNA, 732 bp, Cannabis indica
gaaattcaaattgaaccacttcctccgcacttcaaggaatcgtggatgataccatatgctggtacaactgattagaagttccaccttgatgcttttaatgagctaatgaagatgaaaaaagtgtcatgtaaggcaagatatcaatgcttcgcattcacactcaaaggagctgcatataagtagtttaaaaggctaggactgaggatagtcacatcttagaagcaactttcagaggagttcctccaacaacattaggctgcatgtgattaggtcatgtctgtcacaagtattaccaatgtaaagcaagacaaacaagagagtttgtgaatctacatgcaatgcttcgacgttgaagttactaaggtaaggaaagtctccaaagatactcaatatggctatagccataagagtacgtcctagaagtgggctataggacaacatgctaaaaagagagttgggtggcctagatgacttccatgaaagagcagagaagtacatccgtgtggaggagggtaatggaagcttaaaaaaagatacaagtgagtgctcaccgggaagctcgtcagacccttacatggtctactagatgatgctcactaacacttataagttgatatacttgagcaaagtcttttcccccaccctatatgttgggttctatgccctaaataaaactcatttcatataatcatatttacttattaataaagatcagaaataacattttatgtt

SEQ ID NO: 321129 - DNA, 491 bp, Cannabis indica
gcccttcagtctgactatgggggtgaatttcaaagccttgaatcttatctagatgagcatggcattagccacaaactctcatgccccaccacacaccagcaaaatggtgtggccgagagaaagcacagacatttagttgagtctgccctcactcttcttgcccaagcttcaatgcccttatcctattgggatgaagctgtgagggcctctgccttgtcatcaataggcttcctacccccattctgcagaatcagactcctcttgaagtcttattctctagaaaacctgactactctttccttagagttttcgggtgtgcttgttatcccaacacaagaccatacaatagaaacaaagttgagtttaggtctgtcaaatgtacatttcttggttacagtcttaaacacaaggggtacaagtgtttagccagttcgggtaggatttatatctccagggatgtcatattcgatgaatattctttcccatttgct

SEQ ID NO: 321130 - DNA, 815 bp, Cannabis indica
ttcaataaaaatatttattttctagcaatatacatataaatatttatttatgtattggttaggattttaatttttgtttaattaatgaatttatcaaaataagactgttttattatatttgaaattcttttgatcattaagtcagagttttttttaaaaaattttgatttagctttagattttaattgatttattttaattataatttgacaaaataaaaagtctagttatgacatatagtttttttttaaaaaaaatgtaaagaacaagaccaaaataaaaaatagaaaatattagaatttaatgatccaaaatagaaaatatactcattaattttttagaatattatttaatctatttttgtcagagattactattcaatctttgaatttgcacataataatttgccaatattttttcattgcgtgttttagattaattgtaataaattaaattacttccatgatttttttgtttgataaatttacttccatgattgtaattgtatggaagttttatcatattttaccaataaaataattaaataacgtgtaagctccgtagaaaaagcaaagaaaataaaatgaagaaaagaattgtgtgaaaacagttaagcgggccgtagtttgaccgtttaccttattaagttattactaataattttacaaaacaatgtgaactgtcgaagatctcaagcccacgtcagcaacatagtttggtcaaacaaactaattccattcgggaaatttgattttctatgcttagaaaatcaaaaaatttgattttttaaaccaataattaaaaccttaaaaaaa

SEQ ID NO: 321131 - DNA, 737 bp, Cannabis indica
cgggctccttcaactattatttggcgaccccaagttatccttgccatatgctcgatgcccccgggttacacttggcctgaagaaaagaagagttaggatagtagctatgcttcatcacttttgccaagagagagtggggatggtgaattaaccgccacccttgcttggccaaaagagcttgattaaactccattaggcttcgaaaacctaagccaccttcctctttcggcttacacaacttagcccaagtactccaatggatctttttattgtcttttgtatctccccaccagaaattagcagctaaggaatgaaaactatgaattagtttgtttgggaggcagaaacaactcatcgagtaacttgggatggcttggatcactgcttttattaggatttctttgccggcttgggagaacatcgttgatttccaactcttgagcttgttccaaaccttgtctttaattatctcaaacacctctttctttcttctccctatgaaactaggcacccccaaatacttcgtgtgttggccaacaagagtgacctcccaatctattagcaagggttcgacccaattggttagagatccggctgcccatactaacttctgacttctcaaggttgatttgttggcccgagagtctagagtaacgatgcagaattcgcgacattgtatcacactcctcttcatttccttctaggaacacaaagctatcatccgcgaagaagagatg

SEQ ID NO: 321132 - DNA, 1274 bp, Cannabis indica
aaccctaaactctttacacttactcgtaaaaaccataaacccataaactaaataaatccccaaaatactaaacccaaaaccctaaaccttaaaccctaaccatgacacgggcccagaatcatatccataccgagatcggaacctaagaccaagacctggacccgaatctagacccgaacctagacccagacccaggacctgaacccgaacccaaacctagaccagaacctcgtctgggacctagaccttgactgggacccggatcttgaccccgacccagacccgaacaggggcctgactcaaactggaactcggagccagactcaaacttgaacccgtattggtacctagactaggacccaaactcgggatccaaacctgaacctaaactttaacctaaccgggacctaggattcagacctagatgggggacctgggccccaaactaaaacctagacccagacatgaacaaaggatgcagacctagatgggggacttggacccgaaactaggacccagaaccaggatcgagacccaaaactcgactctagacacgagacacaggacccgaccctggacccagaacccaggacctggctaccggtacacaaccccgaacccatacccaaacccaaacataggacctgacccaagacccaagagccaaactggaacaagaccgaaatctgaatctgtacctgaggcttcgacctgactcgtagtcggtgtttgaattcaggaccaggacctgtatccgtacacagacttagacctggacctagactacgatctagaccaaatcctggacacaaaatcagaatcgaaccaggtttgggactagaactcaaacatgagatagtaataggacccaaacctaaacctaaactcatacaaaaacacataccggggcttggacccagactaggactggtgacttgggacctaaaccaagaccaggaccgggtcccagaccgggacccggacccagacccaaacccaaacccacacctaaaaatcggggtcagacctaggatctaagaaccagactcggacccacactaggaattgtacccgaacttggaccaaatccaaactaggacttggactcaaactggtactcgagactcgaactcgaaccgaaacacgaacttggaattaggcccccaaaccgggaccagaacttgggccttggaacttggatcgggatctgagacccgaccccaaacccaaatttagacctaggacccaccacgggacctgggatccgggactcg

SEQ ID NO: 321133 - DNA, 978 bp, Cannabis indica
tggtttttattttttatttttccattaaaagtcctgtaaaaatgactatctgtcggggtcattgactctgtagttttattttagatctaatgaattttgaataccaacaatatgtaaatctggtttctttagccctcttggaaatatggttaacaattcccaaattatgaaatttttgatattggaactcaataaatatctccaattcttatttgaaaatgcattttttcatgttgtaaaatttttattggtatatttgataaaattgacaaataattatagaaatatttttaaaattaattatgtgttttttcaaaatcagattgttgcttttttggtcaaataaatatgtagtttttttacatagaatatttcattttatatttttaaggaaataattgatatttattttatttatcttgatatgatttttctctcaagaaaacgtgcaatctaagagaacttgactatgagtttaaattacaaccattgcaacaaattaaaagggaaagtttttacttgtataaattttataaattttatctcctgatgtgatcccgtagactagtcacaatctaaaaaaattattgataccacgtataattcgtgtgttttttactttacgttcgttttttactatctgttaattatatgtttaaacatatctatgttctgatctaatagtttttgtgtatatttaaacatctcagtaagagtgcagtaattaattatttaatttgaataattaatcagtaatcataaaaatagaatttcaattggtatcatagcaattcactatactcttagtaagattttgtagttatttttcgtttaattaagtttgtgtgaaatatctttctttgcagaaggtagttcaatatctcgtcctccacttcttaatggctgaaactatccctactggaaagtcaggatgaaagctttcacaaagcacaagatgagaaggcatggagagcaatt

SEQ ID NO: 321134 - DNA, 773 bp, Cannabis indica
aaagaaataaaaattcccctaaatataatgatatatacaagtataaaactcaattatttatactaaaattaatcctaggacttttctaagacactaataaatttttgtagggacattaggttttcaaatttcaattatcaataatgttcacataagaacagaaatgtttgcgtatttatcaaaagttagtgaacaaaactacaaaatgtacaaattaattacgtaacgatactaacaagtgttacaattacaattaaaagtcttcaaagtcaattatgttagctcaaaaaattaaaccaaaagtcctctctttaatttaaaaccacacacttattttcttgctattacctattaattttcacttcttcacataatttttccattggatccaatatggaagctctaagagcaaccccttcatttaattctcctaccaattacttaattccatcaacacttgacaccaaactctttcactattccaaattcaacacaaaacccaattcatcatctttttcttttggtaagaggaagagtagtactctctcaaaatccaaacttttcaaggcaatttcttcatcttcatcatcgatagagctcgatgacccttttcggcctgagcttgaaagtactcaaaccccggacgggaaattcgactggtacaacaactggtaccccgttgtaccggtttgtgatttggacaagaggaggccacatgggaagaaggtgatggggattgatgtagtggtttggtgggacaagaatgagagtga

SEQ ID NO: 321135 - DNA, 273 bp, Cannabis indica
agatacctaggtaaaataaattccaacaatttcatctaccacgtccttcatcattcggtttccttcccatctcatttcgctcactcttcagtgtctttcttcagtttcttttcgtctccgtatcaataatagtctatctccccaaaattttcccttcttgtggaattagacagggtgaccctctctccccgtgtctttttcttctggttgttgaaggcctttctaggatcattaattaaaagacttcttccaaccttttgttgggttttatgc

SEQ ID NO: 321136 - DNA, 898 bp, Cannabis indica
ttttggcaagggacatgtggactaggacaaataattaaagcccatcagtgggctgaaaacaacaaggattgggccaagctcaatatcagttaaccttccgggaaggcaatcatgttacgcatccaggtgagtctctgtcaagtataacttgcatccggaggacttctagctctacatagccagaggaatttgccagtgtgttcttggaagtaaattatagtttctcttttccaatccaagtagaatcaggaaattactttccatagatctaggatagagaacaatattaagcttaaaagggaaataacataatttaagatcaaataattaattacccacaatcaaagaacacggtatgaacaactatcgtcgtgatcaacttgccaagtcagcatacagtcattgccgcatgggctggggttttcacgataaatccaatgtattgtattatgaaagggtaactaagtataatctttattactctatacctacacaacaaatccttcaagcaaatatattcattgtaatccctttggcttttctagcctagcagataataaaactgactcgtgaactaaggctctttaacgccccaaccacataaaaacagtgttctcttttgattattattccttagttcttacattaaataatttgttttgtaaaaattttgataaatattttggtgctatcattcagagctaaagaaagaagtgataccatctcaaattacgttcagcaattatggtactcacccgaaaaaaatttggtcgtcactatactaatcctaatgctaacgcaggagatacaatagatccaactaaggtaaccagtcgccacgaggatcaacatagtaaagaccaaaatcctaatgatcctatagtcgaagacaatgaat

SEQ ID NO: 321137 - DNA, 988 bp, Cannabis indica
agttaaggccctcacccgcgttataaaaaatttagaactagccgtgtatctctaaaaatggctgggtgtttctcagtgtcataagggtcatatcgctacatgaacattaagtcacggagaaacacccaccatttcgagaatctagtcagttccaacaaatgaataaaatgcgagaaaaatgaaaactagctgtatgtctcaagaaatggttgggcgtgtcgtagtatcccaaggggcatgcgatgatcgtatgaacattaagttaatgtgacacacccaccattttgagagcttatatagttttcatagcaaaaaatacatataactaagaaaatgcctaagagttaaaaagtctaaaaacggggtcaaaaagtttaactattcaaatatttgaaggaaaacttgcgagaattcaagatattctttgtaaaactcacaaacatttgaagtgttattcccgaaactcgcgagtattcaagtttcaggcatgtattttccaaaaaaatacagtattttgcctaaactacgaaaggaaagtagtaaatcctattgtttcatgcgttttctacccctaaaaacacagaacgcgtacaaattctcaagaaaaagaaaatggttataaaaaagataaatcactaaccttgaaatacagttcttcctggatgattctgtaagtagtgaagccttcaaaatcgttctcaaaaagaaattcaaaaaatttcaaaagaattttgagaatttgaaaatccgagtaagggaaagggagagacggaaatgagtaaggattattttgtatcatggggtttaaatactggtatccctaatttattgggatggagacacatggcaaaggaatgcctaaggtctctcaatccaacagttactaatgaacacgcctgcacgtaccctgaagggttctaatgatgtggcacctcaaaggaaaaaaataataattatagctgtctttttgaaaccctcgacaagacaa

SEQ ID NO: 321138 - DNA, 919 bp, Cannabis indica
aaatgtataattttaaaaggggataaatttttttaggcccctgagctaggtgggccctaagcacaggcctaacccgcctatactcaaggccggccttggccacgatgaagcccctcactcaggcccaaaaaaatcatttaacaaaaagactctaaatttatttttttaaaatactatattttgtaattttactattatttatttaaaaaaaattataatgattttctaaaacaaatacttaacttatttaatattttattaaaaaaaaaagttcaattatatttttaaaatactatattttagatttttctcactatatagtatatatacaaaaaaaaaaaattagaaatattttcatataaaaaaacctgaattagatttttttggcttaagactctcaattggcttaagacggacatgtctcaataaatagtgtttagctaaatataaaaacaactattcattgaggtaaaattatttttttattatttgtttaaatgatgtagagaaaaaatagaaaaattaatatgtgttgtgatgtaaaaatttaagataaaataaataaagtagaattttgataatttatttaaaaaataaagtaaaaaaattattgggagggctcttaaatattgttgaagctaatttgcatcatcctaagaatacttgccatcatccttaatgtttttttttttattattataattgtaaaagagtggttacaaagttattctttacaaaatataaaatttctctaagttattctctagaaaatataaaatttctctaagttattctttagaaaatataaaatttgcaaataaggatatagagaaagagaagtattagggctcgtttggaacgctgtattaggtcgtattgtattgtattgtattatattgaattggattatatatcatat

SEQ ID NO: 321139 - DNA, 963 bp, Cannabis indica
cagttttctaaatcatttagtaaattaaagtttgtgagagatgatattaatatgcatcaataatggtatgctatcttttgtaatgcttgacacattaatgtgtctcttaatatttagtttaatatgtatacatttttattaacttccactgggatttttttattattattatatataagtttgcaagaacatttctaatgggatgaaaaattttatactatatttgacaaaataaaatttataatatatttgcatcaatttttagcattatgctccaatgcataattacaaaacttgatgtaaatttttttttttcatttttattatgaattatttttgtgcctttttttttttgtaaataattttttttttgtactattattgttatgtgacaccttaaggtgttgtataccatacgaatgtggtacccaataattaattagcaattttctaaattatttattaaattaaaatttttgaggtgatattaaaatgcacagataccagtatggtaccttttgtggtgtttggcatcttaatgtgcctataaatattttcgttattaatatgcacatatctttatgaacttcgattagaattttaatatttttttaattatacataagtttacaagaacatcttcaatgaaagaggtaaaacatgtattatatttagcaaattctttttttttaatctgaattctttttgtctaaaaaaatatcagttatatatgtatatatatataaatatctattttatataaaatgtggctatgtaacgaaattcttagtttaacgatactttttgcgtttctacgcagaaattttctttattaattttataattgttgaccgaggttttcggcaactattaatatataattataataaggagctgtaagaaagtgagatgaagacttttacgtggttggggcgttaatgagccttagtccacgagccactg

SEQ ID NO: 321140 - DNA, 1093 bp, Cannabis indica
catatcatcactttgatgagtatcaatggggggacttagtggcttttgaagcatatcatcatcattcgattgcacctccattgatactgataataccctctaattaagattacaaagaatgaacagtgagcatttaaaaaaaatgggtattgttcagtaacaataaacataacagaaaataacctcaaaagactgaaacttgataaaatcttgtactaaataactcgaaaatagtcagacccaaaagcttggtttgtacttatttcaccctaataacgtgtctacttgctcatcaaaaccctaaaaggaaatagaaagctcaaaacttcgatagaatttcagaaagatacaaacatatatgtatatatgtacatatagagagattgaaaagagaagaaagagagagagagataccttggatttgagcggagtgaaagaggtgaagaaggagagtgagatctttcgtagtagtgttagttgcagatatgctcacccaaaaactcaaataaaattgggagggcattcattaaaattctatttttattttttattttttatttattttttcaagtaaattaaaatactattttttattattattattaaaaacatcaatcaaacaaaaaaaaaaattaattatcatctagaataataaaatagaattttttaatttttacactttaaaataatttttttatatttttaccaaaatccatgtactaatccacatatcaaataacgaaaaggaaattttgattttatatacttaaaaaattaaaaaaatttattattaaagcaaaaccttttaaattaaaaaaactatgacatttttttcaaaacccaaaaatactcccctcacaattcaaattcattctctctctttccctcaaactctctctgcatcatctctctctctctctctctcgcatcccacaaccgcccaccctcaccaccacctccgacctccgaccctcaccaccacctccgaccacccgcaccaacaccctcgacccagcccccctctctcggaccacccaaacgtcgcaccccctcagccccactctctcttcctctctctaaaatcgcaaaaaaa

SEQ ID NO: 321141 - DNA, 1001 bp, Cannabis indica
ttttttttttttaatttttcatgcatatgagaaattgacatcttcattttggcagcataataaatctttagagtctggtgttactgttatatcttcatggtcatcatgtgtcaccttacttaaaattgttgctttgaacattctggtggcatctgacaattgaaccttttagtatctttacagtaattatatatcatgtgctgacccttctgagcattgctcaactgcttgtaaacaggggaagtccaccagtttcctgggggtattagaggcacattggccaatgctcacaggtccattccacttgcaggcctttcctctgaaccggcgaaacttagttgtgaatggcgagttattccagtctatcttcaccaagccacctctggttgaccagttatctgcattccataagcttgtgtgaaccttcatcccttgcttgttggggtatgcaatgccctggttttcatagttttggaaaactcgaatcagcaaactatcaatttaccacctgatatttcaaccaaagagtttagtgttttgttttgtttagtattttgtgttttatttcttttaaacttacacaatcttagtggggttccaatgaatgatgtagttgtggaaattagctgttggatcaaattaggggtagaattgatgctccttgcttcctttgccttgtgtgtagaggtttgtgtggataatgtaaggttgtcccaagacgattcttaagaactcgaaattgatctcgtaatttatagttttcatttctaggttaaattttttctatttttaattatagtcgtttccatttcaaattataattttcatttttaggttaaatttttttcatttttaattatagatgtttccatttcacacacacatatacatatgaggttaaatactagttgttttcttttttttagattaaattatttttattttcaatgtcagttgttttctttttttgaggttaaatgctagttgttttcatttcacaa

SEQ ID NO: 321142 - DNA, 921 bp, Cannabis indica
gagtaattttgtcatgatttaattattcagtaggtccatagctagctactaattattataattaaattgtatgttaatatgtgatatttgaagatatggaagattctatatataccaacttgtaaataaattaatattaatgttattaattaggctccaagttgacaaaattatacgtactgatcataataatattatgtacaaatgtatataacatactcttttttcctaacatgcccccatctatgtagagctgtaatgtaagtactactagaattgtctaaaagattcatttagttggattaagttgaagttctaatccgacagtttatttctaatttaaaacataacacattaaaaaaaaattaaattcaacacctgaacccagacctggacccggaccttgaccttgatcctgacccggacccgaactcgaacacaaacacagcactcgagacccagactcggactcagacttaggatccagactcagacccgacccagacttgggacacggacccgagacttggacccagacacgagacctgaacccagactcagacctggacacggagccagactcgagacccaaacctacgtttcgaacccgagacccgagacccggacccaggacatgaactcaaacttggacttgggatccgaacccgggacctagacctagagttggaccccctatgacccgagacccaaactcggacgtggatcccctaggttgggacccagacccgaacccgggacccggactcgacccgtagtcgatgttggggtatttattagaaatatattataactttacacaatttattgatacaagtcaataccaaatatagtattgtattaaataatactgatacaaaattaaaatagatataaaattataagtttagatataaaattaaa

SEQ ID NO: 321143 - DNA, 1105 bp, Cannabis indica
taaaataatttccaacacataagaccttataacaaacataagctccaatttaggtcttctccatgcactttcttagggtatagtctaaatcacaaagggtataagtgcttagactcctctggtcaattgtacatctcaagagatgtcatatttgatgaaacatctttcccttttacttccattcctagattggccactgattcatacatgtactttgaatttgccgcacctgcacaaattccactctctaacacactcaacacttcttatcctaatcttacaattgatattactactaatattgtgccatttgtggcaagtttttctctgcctatacaggaaaacatacctactgccatccctcagcaggtttcagatatcatacagtctgctccttcacacagtgacaataacaatactactactgtctcaccaactctcactgctaaactgaagttgctgcacctgcagtgtcacctgttgctgttacaccagcaccctctgctgttgacaccacaccaacaccagaacctgttgcacaaaaataaatcaccataaattctcatgccatgcaaacaaggggaaaattaagaattcataaacctaaagtctatctcaccactaagattccaagaactgtcaaagaggccttgcatcaagaacaatggaatcaagtcatgacatatgagatgttggccttaaccataaatggaacttattctctggttccattaccagaaggaaggactcccataggctgcaaatgggttttcagggaaaaagagaattcggatggaacacatcatagctacaaagctcgtcttgttgctaagggctttcatcaacaactggggtttgattttactaaaacttttagcccgattgtcaaacccgtgaccattagaattgtcctcaccattgctatatgaaatgattggtcaattaagcaacttgacatcaataatgcctttctaaatggcacattgaatgaagaagtttacatgttacaaccctcaggttttgaaataacttcagctccctatcttgtatgcaagttgcataaagccctatatggattaaaacaagcaccccgtgcttggtttga

SEQ ID NO: 321144 - DNA, 1550 bp, Cannabis indica
aagagcatcttcatcaatgatacccgagctgaaaatggaggcaaaataatcatgtattgtggctgcaatggtagttttttagtgaacccgatcccctgcctcagtaagaagggatttgatcttgttatttgactttcttgtagaggctttagcatgaaaaaatttagtgttgcgatcacccgaattaagccaatctactctataaggttcttaatttaaaaaaaaatatatatatatgttttttttttaataaaagcaaacatcatttgaagactgaaaatgcaaacataaaaactattactactctagaccattactttttccattactttttgattagtaatactagtgtctagtgtctatcataatattttttaaatatcaagagattaacaaattgtttagaccatcactttctttaagtagttacttttaagacaaacacttaattataagctttttatccattcacatgaaaaccttgtaagaatacaattaaaacatatacatttgaaaattaagaaagaataattatgcttcttaatcagtcaaaaacccaaaactttagtaaccaacaaattaatttgggtacgtcaaaaaaaaaattgggtaaatactattttggaccctgtattttataaaagttatcaattgaaccctctgttttgttaaatgacaaaatagacactgtattttctaaaattgtacaaataggatcctgaactcattttttatcaaaataaaacttaataataatctgatatagagatattatgataaaaacggttacattttctgaatatctgttcgtgttagaaattatcttaaagttagttatattaaaaaaaaattgttgaaaattgagctcatggttctatttttaccattttagaaaatataaggtctattttgtcatttaacaaagcagtatatccaattgataacttttgcaaacacaactctaaaataatatttaccctaagtcaataagatttaacaaagtatacttaagattaaaaaaggaatgaataataatctaatgcacacgagtctttaattagtattaatatataaactcgtcgttttagcaccatttgatctattatcaattactaaaaaaaagtaatcgtgagagaagatgaagagaactctaactggatctgtcaaggacaaatcaggaaaaacaaatcaattacagacacacgctggagagctttcctcgtctaaacctaaacttagaaacttgtttatacaaattataaaattaaatgtaaattagtaaattattgtgtaaaactaacatatgaacagtatataaatgcccatgattttggaacatactatatcaaacaaatcaattgaggtattcaaacaatcctaaatttatattatggttcacatataaaaaaaaattgattctttatcaccaaaacatacataccattttcattgctaaacattatctcaaattaattaaaagttaaaaaaataatttttctattaaaaaaataaattttatgtgttcataaatataagttagtaattttaca

SEQ ID NO: 321145 - DNA, 1224 bp, Cannabis indica
ttgttaaacatacaaaacaacagtagaacaacccaaaaacaatattagaaaaactatgacagccccaataacagtattagaaaaacaatattcagtggttggttttaatatttctacttcatctcaccatatttaatggttgtttttgggatgttttagttgttgctgttgtggttctgtatgttggtgtgaaagatggagacctcattttttatttttggtatttacagtataaaagaaaaaaaaaaagtctcaaggcagtataaaagttatttttgccgtatgacagtatttttgtaaaaattgggtcaaaattcaatatttttgtaagtttccctaaattaataagtaaactctaatatttaaaaaaaaaaaaataaacttaaaataatttttaatattttttttctaaaattttttctcatatcattaatttccatactatttctactttattttataattttttatttaactttttattgtaacatttaaaaaaaaaatataagaaagataaagtaatttgcgcataaatacctaaattttactcatggttgtaaataaatacataaatttaacttttggcagtaataatatctaccaattgaccaccttctttgcattcttcgatgtcgactgggctggctgtcccgatagcaaaccattcttttaaagtaacaaaaatgtatctaaaataattgatatataaaaataatagattgttatattacatgacaactcatttgtttcgaatataattttttgttacccaatttatattataaactatcataatacaacttaaaaataatagattaaaaccccaattctttatgtatacgtataagttttaaaggtaaccgaaatgtatttttatgatataaaaatgaaatttatgtatgtaaaaaagacttcccagcaaaacttcaaaattcaaaatataaaatcatgtacataattaaaattggtaccattatttgtgtaaataaaatttgaaaatagtgtagtttttttttttttttctttgtaaccaaaactttacaaaataagttgtgtgatgtaataattccttcaagatagatcaacagtcttgtgttatttttctaagcgtttgtcaaaatacacatcaatattattatttcaagtttgggctatagtgatgatgttagtgaaattattgggcctggtctgttttgcttgggccttatgtgggtcgtgtttggg

SEQ ID NO: 321146 - DNA, 616 bp, Cannabis indica
tagggttcgtatctcctgggtgacttatagggtttacccatagttcaggtttatcatattcctcaagcccctggttttaggaatatgataaacgatgttccaatctggttcagaaatttattctccagaatctgcaatactggaatgtcccaaacatatagcttgcccatataaacccagaaatatagaaccttagtctaaattggaaataaacgatgtcaggattagagatcatttgattaagtcaaacaaagaagagactgccagtcattataggcaattcttgcaagagatttctgagggcaagcgtcgcttttggcgagacgcggcctggcccgaacccttaagtttatcttctattccactcataagaccaatgtttacacccaccatcactgttgcttttgaacgaggtgaccttgagtttgaaatcatgtctcctaagccccgcaaatcaaagactcctcaggacctcaatgttacctttcaggcagaacttatcaagtccaaggttaagtctattgggggccgatcccttcgagctatagtcttagtaagcttttgttgggaatattttaccaggatctaaatgttggaatttattttaccaggatct

SEQ ID NO: 321147 - DNA, 837 bp, Cannabis indica
taaaatgaagtccgtctctaaaaaataatattgtaaacatttttatttatttttttggttgaatcagtagtcataaatatgtattgcaccaatactcatttacaccttaacaacaccaaaagattggcttgaaaactgatgtatctataccaaagaccattataacggttcaatccacaatctaccttgtagtttcatatttttttgcctaatcattatcaatctaagcttaataacctgttgaatactatgtataagaacatgaaaaatatagtgacttgttggttccataacacattgtttcgatttctccaaagacaataaactacacctaccaaagactaaggcaaaaccttatttaccaaagtacctgaagaacgctaacctacataaccacaccttgactgcatcaagacatcgcctactataacaacattcaaaaaatagatgtttaatatattcaatatacaacccacaaacaagcatgtcaatttttggcaaattttgtatctaaaaagtctttctctggtatgttatcaatctaggacagtcaaccacaaaatatatttggttttggaatattgaatcgaccccaaacctgaccataccacttcactttctctgctaaagaggagaaaacaaagtagccaaaactgattgaatatttgcaatgaatcagttgttgttcagtcaagttgttgcttcatttttttcttcttcactttcactacttgtctccaacacaaactgtcttgaatggatgattcatattcttaccatttctgtcctttcaaataaattgtaaagtccttttttggcaagttaggtgacaaaata

SEQ ID NO: 321148 - DNA, 1186 bp, Cannabis indica
aagacaatattatctcaagtagtgtgggaccatgtgcctatataatcaagctcccaaaaagtagttttagaatttgccgagttaattctctatcttattgattcctcctaactccactatagatttagaattgtactcttgattacatagaacgctctattcaccaagaatagatacgtcataaattatatattgtttcattctaaacaatcaaagatcctttatagaagatctacatctattagggacaaatttactattttatccttcaatatattctatccttaaaacacttagcttctcataaaaggtattttagtaaactaatataattattgaaataagtgctcttccatttatgtcgttaagctaagctataaggaaaccatcatttcacttctaatagaagctatagattccatatcttcaattaacgctctcactcaattgcactaccatgttctcaagatgtaagtattaggctggtccaaatagttagatgtaacgaacaagtcaaagaacacatataatacatttaagccataactcaattattttaggattaagatcttttgatctaatatcaactaagtggcattgacgtagaaaagatattatggtaagtttatgatattttccactatcaatatcggtctagtctgatgtataactaatacatctgatactagtatactttgtcaatgccctagaaaagacattagacatattagtgtgtaagtaaactttatcgttgattatcacgttagtgtaaatctagtgtactaataaatcatgagactaaataatttgaagcacataatcacaattacttttcacagtgatgacatcattgtaattgtgaataactacatgttcggaatttaatataatttgtatattaaaattataatcataaaaatttcacgtaaacctaaatgatttcaaatcttctattgatgctaaataggatgacattgaaatagattttatttaaggcataaaatctcaacatgaacttgctctgaaatcagaagatatttttgtctattatgataatcaaagtgctttgcacttaattaagaacccaatgatgcatgagagattgaaacacatggacataaagtttcattttatcaatggaaattatgtctaaagatgaagttcaggccaagaagattgaaactaa

SEQ ID NO: 321149 - DNA, 1822 bp, Cannabis indica
gtgacatgtgattacactcttagatcgagaaataatatacaaaaacataaaatctgcacattttccttgttggagctcattggaacttctattatttttaagcctaattcttctatgaaaatacatggtttgttaaaaattctccctaacataacagttacataattatgctccttctgttatgttttgtttcttttaccattaaaaattagtatttttaccaattaaactttgcctaatacaaaatttttccctctttcattaaaaaaattaactttaaaaattataatgttctattaatactgaaaaaaatgataaaaattattaaaacacctgataaaaatattaaattaattaaaaaatatatagtttacttgcttatttatatttataaactcatattttaaaattaaagaaaataattaaaattcaataaaatataaaattattttaaaaaaaattagaaactaaactaaaaaatactatgttttacttaaacaaatctaaatttttggagaacaaaaatagactcaaacttgttctcctaaatttagtttttacaaaaattaaaattttaatatatatatatttttttatagctaaatggatttatttaataaaaaagaaataattttttaaatcgcttaattagtttcaaatatttaatctcctttttaatttttttcattgttcaaaataattttcttttaagatttaactaaaaaaatattgaattattctcatttttattttaaaggggtacgattaatagttttcaaaatttagggtgcacagttgctaattttcaaagacacgtcaacatttaaataaaataataggacgaaatttaacagaatgactaaatttctgtaaatgtaaaaattcaggagagatttttaacaagtcgtatattttaaaagacaaaattagtattgacgaaaattcagagtgcaaatcgttaattattctagctcaaaaacaaatgggaaattttcaatattatacctaatattaaaattaattatgaaaataacaatgacaatttaatatgcactaatactattcttctattgaaaataatgataataattatctctctatccctatttttgctagctattcattctatttttatcttttttttttcttttgtcgctatcgactaaactttgagcaaaataatattttattaattttccttccctatctctttctcactcaattttattattttaaaaaactttttaaatcatattaatcatttttacttaagaattgtatcattatgacttatgtttaaggtggatatttggaaaatattttttttctctttacaccaaaaaaataactaaaaacaaaaaaaaaactttttaatctcttttatactttattaaaagataaataactatattttaaattaaacaaaatttatataccagctaatttttctataacttatttcaattataaaatgaattatcataaatataagagattaaaaaataattttttaataaaattagtattgttattttttttccaaatgtaactcatgttctaatgtttgagataagatttattttatttatttattttatttagaaatctatcaaaattactctataaaaagcgtaactaatttaaaatactatgtggtaacatttaaaaataaaataaaaaaaaatactttttagtaacttatgatcaacaaccacttatttgagatatatttatgttacttttttagtaacttttcatattaattctaactatatttaataaattataattaaatataagggaattactccatatactattt

SEQ ID NO: 321150 - DNA, 540 bp, Cannabis indica
tgaagttatcatcccaaaagaaataacggcaccttctcactgacgagaaacttacagtcctacctgaaactatgccttacttcaagaatcattagatctatattgaagagctttgggagaattcacaaatccagctcaagatgtatcaaggaaaaatcatccggcacttcaattcgaaagtcaaaacctgaagatttgaagtaagagatctcgtcttgagaatggtcttttcggcatatcaaaagtcgggagtggggttcctaggacctaactggaaaggacaatatgaaatacagcacaatgtgtgtgatgggacataccagttgaaaagacttgacagatcagagattccacgagcttagaatgtagaccacctgcgtcaatattataagtaaataggggtggctagatccgattttacctaatgcgttttattttccttttgtgtacgtaagcctcacgcacataggcagaagcaatcaaatgtaatttgcaatgtaaataaaggaatttttaagaaaaatgtgaagtctttttaaa

SEQ ID NO: 321151 - DNA, 1641 bp, Cannabis indica
tcaagtacaaactctatccggctaaatttgtactaaaggttgaggaggcagcaggagaggctatgcctggactggaggatctgagctacacattcatatgtggtggttagagtaattgataagctggataggccttgtgataattttgaactagggtttggaaccctattgcctagcagggacttggttatctccaaaaggcgtattaggtctatgccagtttagtagataatagggagttgagtgttgatatcgtagagctagaactagtagactctgacattattctggggatgtatttcctatctaagtatatggctagtattaattacaaaaggaaaatggtgacttttcagcctgagggcaagtagccatttatttttgtaggatccattcaaggttctcggatccaagttcttttagtattaaaagcttgagatttactgcaagatggatgtgtagaatttcctgctgttgcgattgactccaacacagccgaaacacttgggcctaaggatgtcgaggtagtaaaggaattcttggatgtattttccaaggagttactgggattaccaccgtagtgggaaattgactttgttattgatttggcacctagagcagagccaatttctaaggcaccttatcagatggatctgacagaacttaaataattgaaattacaactttaggggatgcttgatctagggtttgcctgacctcgtttatcaccatggggagctctgaataaagtgttcaaggatttcctcgataaccatgtcatagtgtttatcgatgacatccttgtatactgtcagtcaaaactgaaaatgagcaacatctatggatggttttacagcgactatgggtacacaaactttatgctatgttcaagaaatatgagttttggttgtcacaagtgttctttctaggccacattgtcagtatagatgggattatggttgatcaatggaagatcaagtcagttagaaactggctgagactgaagacagttacaaaagttagaattttttttgggactagctgggtattatcgacgctttatggaaggattttctaacatttccatgcctttcacaaaattaataaagaagaatcaatggttgttatggatatacaagtgtgaaactagttttcaagagctgatacagctgttgattacagctctagtcttggctttgccatcaaatcaagaaaaaattgtagtttattgtgatgcctccaaacaaagtttggggtgcattctgatacaagctgatagggtcattgcttatgcttctagttagttaaaggagtatgagcaactttacccaactcatgacctagaccttgttcctgttgtgtttgccctgaccatttagtgacattatctctacgaagagaatgtgacatttacacaaaccacaagagtctcaagaatttcttacccacaaagatttgaatatgagacaaagatggtggttaaaattagttaaagactgactatgagattctgtatgatcccaggaaggccaatgccctgagtaggactggccctagaaaggttttcaatgatacgatgatctgtcttttgttagtaatggacatggtcaagacatgtattgagtttatggttggaaaact

SEQ ID NO: 321152 - DNA, 2114 bp, Cannabis indica
aaaaaaaaaaaaaagaaagctcgctttttaaaccgaccgttgctcacgcataccatcaccaccgaaccttctttcctccaccacgaacctcctcatctacccaaaactcaaccacacatcccccaaacctcacctacccaaatatttctctcttcctcctcctcagcttctctcaaccaccatcgccaccgtcgccacctaaccctcgcacaaccagaagctcattaaatgacgccaccacaccacgaaccgagatcgagacaaaccaccacgaactgcctctaccatactcattgggaggatctgctgaagactggtttaaaaaaatgaaactagactccgtgagttgttggaacaagttagagacgaacttctggaaatagtttgttgaatctaggaaaattaacctccaagtcagtgccctaactaatatcatataattgcacacggaaaccttgaaaatgttcactaagaaattcaaaggtaaggcttcaaaaatgaaaaaggtagacaatgggcaacaatttgccctactacaaactgacattcagacaggcaccctgttttggaacgagcttcaacatgagggtgcgagtagtttaaaagatttcaaaaaacaaacccaaaagtacattaactttgaagaagttcaaatcactgtttttttaggataaccaggtaggaggcccaaactatgctcatgggacacagtattcgggaggaagtcaccaggcagtaacccagccatcgggaggggtaccccctcctagcgtgcaatttcaagctccaatggcatattcgctaagtcccactatggcgacaacctacttgagtatgatattcccacaactagtagtgctgctcctgacacatttgttcaataatcagctccagtagcatctccagccgctagtgcagcttccacgcagttagtggtggctattcgtattcgtgtcgtgtaaagaccatctataacaagtacatgctcgacccgaacatgacccatttaataatcgtgtcaaaaaataaaacccaaacacaacccgtttgtaagcatattttgtttaacatgtcaactaataacatgttagaagtattcgacacgtttataactcatttatgacatgttaaagtactaaaataactttaaataggtcattaacgggtcaattttgtgttagccgtatcaacccgaacacgatcattttattaaacgggttaaacaagtctcatatagtttaatataataacttttagaaagtatcgttagccaatcgtaaggtgacatgcctaaaaggtgttagacaccactggtgcccaataacaataatcgttgtagaattatcccaaaaccaaacacaaaaacgacaccgtttaactcccaacaattgtataaaactaacaattcgtaaatttaaaagaaataaacaaataaataaataaaaatgttaaatctaacgttaaatattgaatcatttgccttttctttaactaaaataaagggtaaataccacttgaatcttgtattttgaaaaagttattaattagcctttctgttttattaaataatattataaatctttattttctaagatggtaaaaataagaccctcaatttcgataattttattttttaatataaccaacttaaagacaatttctaacacgaaaaaatactaaaaatataactagttttgccacaacatctttagatcggattattattaagttttattttgacaaaaaataaatttagggtcctatttgtacccttttagaaaatacaaaatctattttattattcaataaaatagaaagtccaattaataatttttgtaaaacaatacaagttccaaaaaagtattatttatcctaaaaaaataatcatattgtattgagaattactaaaaggcactattagcaccttcctcgatgtcatactagtctaatgaaattttgggtcctatatacagtagaacctctatccaagaatacacttgggaccaagtaaattatattctaattgagaggttataactaaatagagttacactagaaaaaaaaaataaaaaactaaaaaatatcaaatgttaataacaataaataatcattaa

SEQ ID NO: 321153 - DNA, 505 bp, Cannabis indica
ctaacttagttgacgagttctcattgttaataatttggcgccgtttgtgataacgacaaactttggaaaagtggtttctctacacataacaatttcaaaatccctagacactcacactgcctctgctcacactgcctctgagatgttgagatttgccttgacggtaatcagttggatgccgtaggaaaagatccacctccccccgtcactagagaggaaggtgttgataatcacatgcttcagtcactagaagaggatgtgaacatccatgagcctccggcagaacaagaaagtcgccgccctgtggaagctctaactggcgatcaacgtgacggagcaacaactttgataaccattgtaggagaagacatgttatagaggcaaagaatcccttcaccgatcagacatccaccaccgctgacaccgaaagtgttggaaatttattttaccaggatcttacatctactcacaagtatgtttattaacatcctaaataagaactttc

SEQ ID NO: 321154 - DNA, 490 bp, Cannabis indica
ggaaattgggtgagaaacttgagttctgtgatgactgtgtctatggaaaatgctgccaattaaagttcacacttggaaaacacacaacatagggaaagcttgattacatacactctgatctatggggggcttccaggactaaaacactaggaggtccaagttacttcatgagtatagttgataactatactagaaaagtttgggttttcttactcaaaacaaagaatgaggctttcaacacctttgtcacttggaaaagacttattgaaaactagacagtgaggaaaataaagaagcttagaactgataatggattagaattctattcagacgagttcactagattctgctaacatgaaggaattgaaaaacactaaatagttgtaaaaaatccacaacaaaatggacttgctgaaagaatgaataggactttattagaaagggtgagatgcatgctcaagggagctggccttgaaaagaaattctgggg

SEQ ID NO: 321155 - DNA, 969 bp, Cannabis indica
tattttttattcttcgtttttttttttttgggttgtagatgattattattggtaaatttatcttatggttggaattttagttgcactatattttagattagctatgagtaagagtggcaataatatgagtcacactatgttaaaccttaggcacgcttacatttcaagtaaaaattaggttgatccgcagtccctgaatctatagtttttacataaacacaattaagtctacattaataaataagccatgaatatattagcataaaattaactaagttcaaaattaaaattgaaaataatatataattttcaaatcatatattttgatatttggtaatgtttaccgagatttttgaaaaccgattaataaatagattaagcttagagatgaaaattaaaaattaaaaaaacaaagatttttacgtggttggacattaatacaagttaatattgtttacctagaaaagctttgaagtatttttacacgagttatcttgccaaagtttttcaaaaactctaatctttagcccttgatttgagaaatatttttctaaccttttgcataaaggaataatgttttatttataggtatgagttgggtgaattcaaactcgctagggtttaaaggtaacaactaagcctactgatgaggtgaaatacaatttatattaactttttaccgattaggtaaggcctaatttacgagaaaacgctcattcatacatgtggggacagtgtgattgtgataggtatcgttccccatcatgctggtacagtaaatgttggaaaaatatatggagttgaacaaaaaaaatagttttctttggcggtgcatgcactcttcaggtctaacgtaaggtaggggtgaaaatcggtcggttatggtcggtttttaaaattttataaccgaccggacggttacggttttattttacgaaaaccgttaaccgaccgtttagaaattataac

SEQ ID NO: 321156 - DNA, 1465 bp, Cannabis indica
tttttttttgaaaaaaaaaaagactcattagctaaacataatgattattcaaaaataatactaatttagttaaagtgtgagccaccctattaacagtccagaataatacttaatgtcaataaaattattacaatgagtaacaatatactaatattacataataaataatgacattgataacagtaaaacaatcagattccaacataactctctgaaagccaagacgacatccaagcatgacctcagaatatatatccaaagcctcagcaatattaagagaaaagcaatcaattcaagtccaagtatctaaaactaagacaaaaccagtattatatatcgcgaaacgaaatactgtaccgacctcggatttactcaactcgaaattcaatcctgcattacaattgattttcaccaacttaaatagagatttaaatcatctgacaactgattgattctcataaagattactaagatgagaggtatgtccattcgcataggaatatcgtagtagatagtccatataatccaatcaaataaaaaattgtcatttacacaaattttttcattcacccattattccctcaaatttattcataaattttgattcacttcaccctaggtttggtaaggggaacagagactaagatagaaagagtgataaaattaaattgaaaaagaaaaaaggataagaaaagggaagagaaagatgaagaagattatatttacctcctaagagtttttatatatatatatatatatatatatatattaaataaaaaaaaattctttggtgaatcagttttgataagtatcgtaagatattttttatttttgatatataagagaaattataacctaaatttaggtatatgatagtgtacattgtaattatattaggtattctacttgtttagagaaattttttaataatttacaatgccgaaaatacaactcaaatattcagttgcacaaggttctgttttattttatgcatgtgcaacagaatattttgaactttatattttttgacaaggtaaaatattcaaaatttctcgaaaacatacaggtgtcttttacaactacaatataaatcatcatataaaaaaattgggatatattttctcaatgtatgaaaaataggaaatgctaaaagttatgcacctacctaaaaaactctctatataatatatttaggtttgtaaaattagtaagtgtgcaagcaatattattaacccacacatatttttatatatatatatatataagtaatgacagtaaaatggaaaataaaagatcaatccagcatctaacacacctgtgagcaataggtggagactggcaatgcattgcaaaaattgcattacacatgtctctgaacattgcaaggacttgttttttcatcaaaataacctgagcctctactatccagcacactgaccagagatttctcacaaaattccatgac

SEQ ID NO: 321157 - DNA, 1448 bp, Cannabis indica
agtaaaacgtgaacacccttgtatcccgtgaataataattaaaaactaatacttttacttaatgaaaacaacgacgtaataagactctactcgatcactctaaacaagatatttaacgcaatattaacccaatgttcaagtgctaattaatcctgattaaatttattaacagctctttcaccacacattatattatactttcaaaaataaaaaacataataattatgtattttaacgtatacaatttggatggaggtttgtttatctcctttttacaatgtattgattatttttaataaaaatttgttcaattgtaaaaaaaaaaaaagaaaaaaacttaaaattcttaacttctttctttcccgttgtatttttcttttttttttttggttttgttaagtagaagaagcagagctttaatcttcttttcagataatagttaatttataaaccacacatttacaagtttgtgattctcaattatcctttaatcttcacttaaataataataataataataataatgagtctgagacaaccaaccattggctgcaattgtaatataagaaccacatatacataatcatatacacctacatctaccacaaacactttgtacgtgataataataatcaaaactgaaaggtaaaaaaaatgtaatcttaattaattaaagttacttattgcagatgtggtggtgatgaagaaaaagttgaagtggggactaggcaccttagtaaattgatacacccaatgatttattttagttggtaaagtaatttttaatattaataaaattgtaatcgagtcaaatttcgttaatatagattattttattgtcttaaagctcaaatttcaaattattaggtatgtacaaaatcgtgtaggaccatttattttcaaatctttttttaacaaatgctaaaatcaagtttaattacaattttaaaacatttttaaagctcgtacaaaaagaattaaacaaaattatagttttgctaataatattaagtaaattaccttataaaaaattattgagttgttaccggttgcaaaaatgaaattttagttgcttatacaacaaataatccttattattattattattattattatacttgtaatttggttccttgtcaattttattgttttaataaatttgtaaatttttgcatccatcgcttactgtattttagatttcttaaaaattctttttttttcctaaaggttaatattgttgctgaacaaattaaatggctttctacatctttttttttttttttgttaaggtcaaaacatttcattcaaccaaccaaaagaaactacaaaaggtacaggttttcctgcatttaaaatagaagcagcagcacaagagggtaaaaccgtactgaccaaaaacgaaattacatctttgtctttaaagtacccactttagtctaaagaagtga

SEQ ID NO: 321158 - DNA, 728 bp, Cannabis indica
agaaaatccaccaaatacgtgaaatacgagaaatcaagagcatcaacgtgacattccaggaacttcccatggatcgcaaaccagaagaatgaacaacctaatataccagaatcatctcgcacgaatgcaaatgctaggaagtctctaccagtaaaccaagaaattctagagcatggaaggagaaacgctagaaatcaacctaggataggtcgacccccaaggcatccacaaaggcctacttgcaatgacaaagaaagcacacacacatgcttgagtaggggtcgtgtgtcaaatctctttcaaagaaggatgccaatgcgagaagagtcacgaaaaattggctcgagtacaaatttaggagaatcaagatcaaggacctgcgtgcacaacctggacagtcaaaatagaatcagaatcggataagcagaacccaacacaccaggccatttgtcaacttggacgatgggtacctcatttatgaactctcaggttatcattttgatactttcaaggttcttgaacttgaggatgaagtctcctaccccatttttgaccattacggattcaatagttgaatcagatttgacatttaagcaatcaaaaccagcgcaccaggttgattgtcaacttggatgttgggtccagtaccagatcaaccagggcgatgggccctatttctacggtctcaggtttgtagatttctcctcgagtttgcttgaatcttcatt

SEQ ID NO: 321159 - DNA, 897 bp, Cannabis indica
ggacagtccaccgtggcacttaactgtgatttttggacggaggtgtgcagagcaaaacgaaaccagagtttaggtagtttagctgccaaaaattcagtttttgtagttaagtgttagaaaccgtaaagttcaggtgatttagccgccaatatcccttttacttttagctacaaatttttttgtgactaattaaaagtaaaattttttgtagtaatagttgtactaagaactcattattgttcagtcctgatctgcttattgtttatattcgaagagagtttaataaggtcgcacatagttgtactaaaacagaattaggattaagcaagaattaggattaagcaataagtgtatttgaaagtcctaatttctacaacatctaattggttgaacttaacagattagtactaagaataaaactagaaattaagatcaaataacacaagatttacaagcttcctctgcattggaaacgcattccaaccgagtagtgcttgggttcccttgaaccgggtaaagtaacatccactataaaatcaattcaattacaaataccagttatgattatccaaatcaaacattgtaatctgaaataatttttacacaatgttacctaacacttgaacacattcaagttttgagatctaaacatatttagatctaattacacaagaacaccttgcattcacacagctgaagaaccttcagcagtaaactctgaactcccctcagatcatcaagcagattcaatctccatcttcaacctctcgaaaacttcaagaatttccatctgcatataacaacacagaacaaaagattattttgccctagcagagtgtaacgtccccgcttcaagcctccattggatccttacacccacggaatgaatggctctta

SEQ ID NO: 321160 - DNA, 1813 bp, Cannabis indica
cgtagttctaaagattgagagaaatttgtgcgctttgaagggttgacaatttaaaaaatggaaaaaagtagtaactagaagttacaaggggtatttatacccaaaaagtaattcacgtgaagaggaaatagatggccacgatcccacttccagaaacatatgtcttcatccaatggttgtggagtccaacaatctacgtgtatccttgcaattaatgttccccagaaccaaggcgtagatcaatgatgaaaatgcttttttaatttttgtaccaaaaaatgaacagctgtaaaaaatatagctatttttggaaaaagactcctcgataatcacacatgttcactcgcatccagttgacacgtcgacagatcatcatcacagatggaagccaccttctacggtcgagtagcactggaagcttggaggtaaatgttatctgggatttcagtattggacacatggactccaggtcagcacataagacccattgtggaccccaataaaggtaaagtgggctaagcccacctagatatgtccttctaggaacatatcttggttccgcactcgcaaagtcttctgccctcagcgagccgtatccagaagtatgttcagtactacaagactagagagatgagatagtgcattctcgaaaaaccatccggttcccctttttatccttgcacacaaataagaaaacttattgtcaaattacaacagagtatcatatcaagattaatgggaaaacttcctataacaaatattatgcaattaattcagattaattgctcacaatcagtgtacacgatgttgactagatcaatccaaatctaatctgcctagtcaacagatcatcttatttatgggttggacttcatgagatagcctaagggtattatttgctataaactccccaatagagagaaaaggaaaacctaatgtaattctcaaactactataaatacccctcgaatccaatggattaagggttgaactctcttgcaaactatactcatgaaaacttgagaacctacattctttgtattctctaaggcatttacaaggtaaagatctattgaataatattgacttgtggactaaggctagttaatgccccaaccacgtaaaaaactgtttctctctttttactctttctcttttgattatttgttcttcagttcttatatctatagtttgtttttaaaaatctcagtaaacaccttccacaaacttaatcttaacaagaatttgattaatcctttccccactatgttactttcatctatcaaaaataatacccctacaactgactatagacaaattagattttcaggtatatgtaaagacttcaggccagtaatcctactgataatactaatgtacctgcaactataccaaaacaacatgacaatactggagaacaagctgtagcagcaccacaatctccaatcgaagcacctatagttccacaaaggacaactaaaaacataaagccaccaatatttcttcgtgattatgagtgcaatttgatcatacaagactaatcttctactccttatcctttccataaatcgatatcgtacataaacatatctcctgctcactaagattttatttgtacaataacagctcactacaaaccacgcaaattcaaccaagtcattctgcataaattctggaatgatgcaatgcagactagttatatgcactgcttgccaatggaacatggactgtaacaccctaactagcatatgtgtattacgtgattttaaacatactgtgcagctcgttgctaatcaacgaggtttctggaaaa

SEQ ID NO: 321161 - DNA, 1295 bp, Cannabis indica
aagatattggatcttttgcctaagatgtcagaggtagagtcttagagaacttcttagtcataagggaagagtccaggatgtttatggttataaccactaactcttcttagcatccaggcggggtgtctgcgaactcagagcaatgctaaccagagtaatatctcctaaccttggctacttaataggtaacttctggctagaactatcactgacctccctctttagcataccttttgacttgtttgacatagctgcccagaagaaaatacttggtaaatatttaaataagtaaagagtaaacaagattaattattggaaaagctacacttaacttcaggaggagcaccctcacgaacaagtaaagatggggcatcctcattggaggagtctccttggtctggctcctcaactatcgcctttccttttccagcaaccacttgagcagttgtgaataatatgtcatacatagaaatcccacacagttttattttgtcatgaatctcatagtagaaacatgatataggattgtcctatgtgtttatgtgtttacctttgtttttaaaactgaaagcatgtaaactggctaagattaatttagaattaacttggcaacttaaaattaacttattaattttaaatatttttaaattaagaattaaagaattaattcagatttgataattatgactaaaaatttatctataattcaaggcttatattataaataaattaatcataattattaaagtagtaaatatgcattaattataaaaattaataaaacaaacacattaacctaaaatagtgagtgggagaaggagtacatctcaatgtaaccgacaatctctattggtcaacaccaaagaagtatagtctagcatcgagacgacttagattttgtccccctaaggaatcgatcaattatcaaagagtttttttgtacaataacttaaacaagattttatgtgttttacttgtatgcgctcatgcatcacgtttagagtaattttaaaatgataattattattcttgtataatcatggtgtcactttatttcatacatgtctaccatgccaaatccccttactactttactaggacttgaaaagctgaatggtaataactttcataaatagaaatcgaatcaaaatttaatgttagtttgtgataatcacaaattttttctaactgaggtgcacctagaggagcccactgctaatgcccgaaaaatgatcagggaagatatgatgcttcgattcaatcaaacaacaaggccaaatgtttcatgcttgtaa

SEQ ID NO: 321162 - DNA, 803 bp, Cannabis indica
gaacggggcagccaaaacacacaaccatgagccacaaaagaaagactattaaacaaatgcagaaaaaagaggaaaaagattccaaaccgggatagcattctggtttatagcagtaactaattgaagacaatccgaaaagaagttagcctcccaacagccctacttcgaacacagcgaaaatgcatgacataaggtgaggcattcagcttcaagggccgaattagcagcaacctttgcagaaagagcatccacaaaacccccagccctgtcaaacacaacaacaacaatgtatgcatcgttcccacggacagcagcatccacatagaaattgaaatccttaggctcgtgagggatcactctacccactccaacatcttccagcaccgactccgagtttattaccaaagcctgacgaagttcctccactagtttcatagttttagccaaaacatccatcggctgaggcaaagagccatcatgaaaaacacgatttctcgtttcccacaacgagtaacatagcagagccgcaacctgagtgaaccgctccgcctccgagcggttggacaccacacctgatgggggatgaagaatccaagaaacaatatcaggagtagaattaagggatacctgatcactgtggagacaatagtggctgctgaaccaacacgcacgcgcgaacgggcaatggaagaagagatggagcaaggaatcttcagcatcattacacaaaacacagcgcctggtagctccaaaaatagcctggatgcgagtcccacaggggaggatgtgttggaaattatttt

SEQ ID NO: 321163 - DNA, 825 bp, Cannabis indica
ttaaaattttaagtttgtaagtgacataaatttaaagtttatttgtaatagcataaataccatatgttcgtaaaattagaatttttttctaatttcaccaatacagactctgttattcgcttaaactggatacatataaaatcccaattcttgatcattgtggtttagacagaaacttgtagtatttattactttcaaatgttattttaataaattcaaaatgaaatatttattgatgatcatctccagccttttttggatttggacacaaaagttatttcagtttctttctcagtgtcttttaacaacttgttttatggctcatcaatattaatgtcgagaatattgaagagggtttgtcttgttatattctctattattctaatttgaataattggtgtactgccagggccggtcctgaaatttagagagccataaaaaaaattattttaggctcttatttaaaaaaaatataatatttttcaaaatcagtaaaaaatattgtataatttcaaaagggaaatattttttttggactcttgggctaggtgggccctaggcacaggcctagcccgcctatgcccagggccaggcctaggaactgcatgtttttattagaaaatctttggatgaatgtcatttcacatgttcatttgggatgaaaatttagatttttttgcattaatttaatactttactctaaaaaagatggacattcttatcgatccaaacgtcgatttatttttatagttacaaaccactataaaaagccactatagtgtcggttacaaactgacgctaaccattagcgtcaacttataaact

SEQ ID NO: 321164 - DNA, 535 bp, Cannabis indica
atgttgtgaatttttaaattaaaataaaacacacttattatttaagggaaatatgcgacaaaagttcccaaaaataccattttgatgcagattagtccccaacctctagaaatagtagtaatagtccccaatgtcatgttttttataagtccgtcggtacccaatttaacagctttgtgaagtactaacaagaataccacgtgtcaaaatccacatcaaaattttaattaaaaataaataaaaatacaaatacaaattatttaaaaaattaattattttttttctttttttcttcttcttcattttcttgctcttcttgctgtccaggaactagtgaaccaccacccacatcccacgatccagaaaatgaaccagccacaccccaactctcacgacggacaactatgctctagccaccctcgtcccaaacataccactactccatttcccccacgcctaggaatgtcagtcgggccgggcccggcccggcccgccacaaacccggcccggcccgacatcactttggcccggcccg

SEQ ID NO: 321165 - DNA, 2084 bp, Cannabis indica
aagggtcatcgccaatccaaataacagcttcatctaaccccgaagcccattgagccagcctgtctgcaaatgtattagcggaacgattaacatgagatatttgggcagcagggagttgagacaaagcttccttgatttgccttataagatcgccaaaaatcgagatgtcgtctttggggaagttcaccgcatctgtgatagctttgcagtctgtttctaactcatggacatggaaatgttcttcaatacacaagtcagagcagctacgacgaggccttcactatttctgataataccaccaaacccagccttcgatctgtcattgggaattgctgcatccacatttagcttgaggcgaccaggatcaggaggagaccatgatgtaggagctggggacctgcttgaacgggcaagaggagagtgggctgatgttggaaggttgtagtcatccaagaagcttcttgctaagttcgaaatggcatgggcctgatcatgtgcctgtcctctaacagctttattcctgttaaaccagataagccaaccagtacaaagaaagagttctacatcttctttggataatgagacataaaccatatgtgcaatatcatgaaaagtaatttcagtagagcaagaaaaaatataaggagaaaaatgcgtacctttccagactcttcgaatgctcttacagtagagcaaggcgtgtgacaccgattcttctagatttccacaccgatcacaaaccgaagactgaatgattttcctagaggctaggtttttgagggtggggagggtggaattggtagcacgaaaagtaaagtgtttcaccttggggggaatttttaggtgccataagtttttccaccaaggtgagggagaggaagaagtcggaatatcaggaggggtcaatgaagaatagttgaggtggtatcctgttttgaccgtgtaaatttctaagttggagtgcccccaaataaactcgtcactagaacggcggagaggaagaggaatagagagtatcatgtcaacaacatgggaaggataacacctcctcaacgaagatatgtcccaagtcatggaaggagtgataaaagaggcagccttatcagggacagaggaaagaggggtaatctgacagaagcccggtatccaatgatcccgggtggtgaaggtgttttgcccgttaccaatcttagaaataagtcctttgtgcaacaactcttttccccaacaaatactacgccaaacaaaagagggcgagtgacctaacgtgctgtttaggaaagatgaatttggataatatctggcaaacaaaatttttgacacaattgagtttggttgtttcaagatgcgccaagcttgcttagctagcagagcctgattgaagtgaactagggaacgaaacccaagtccaccatcttttttaaaacctacagagtttttgccaactttgccagtgagtcttgggtcgattattgtcgttgaagcctcaccagaaattagccataatagactccagagagtggcaagtggctgaggggatgcgaaagcaggccatggtataggtggggataacctgaatgacagacttgagaagaatttccttgccccctttagagaaaactttattcttctaattatgcatatgggcccaaactttgtcatgaagataatggaaaatttgcttttttgttcttccaatgtgttggggaaggcccaagtatttttcaaaagatgatctaatagggatttgcagaaaatctgaaattaaagtttgatccctaagaccaacatttggagagaagtatagagaggatttttggaagttcactttttgccccgtagccctttcatacaccgcaaggacctctttaatgatattataggactgaatagaggccttacagaaaaggaagctatcatccgcaaacagaagatgggaaatagcaggagcacgcctgggaactttgaagccaataagagaatgacttctctcttgctattgaagaagagaagagaagccctcggcacaaagcaggaagagatagggggagagcagatctccttgccgaatacctctgattgaa

SEQ ID NO: 321166 - DNA, 1394 bp, Cannabis indica
ccaagactcgaacctgaacccagacccagacccagacctggacccgcgctagaactcagacctcaactcaagatgaactcaagcccgacccgtacccagaccccgaccccgacctatgcccaaacttcagaactcgagacttgagatttgcgagtcagacccgagacccagactcgagactcggacccaaactcgagactcggacccagactcaaacccgaatttggaccaggaccgagacccgatcttggacccaagacccagaactagactcgaaccgtagttagtgttggggtcgagtgtattgaaaatatattataactttacacaatctattaagacaagtcaatactaaatatagtattgtattaaaaaaatactgatacaatataatacaatacaatacaatacaatacaatacaatataatacaacgtaccaaacgagccctaaaatgtgtgtattatatttgattaattttaaaaataaatttgaaagttactaaaatatatattaagtaataatatattatcatataacctaaaaataagtaaatatttttttaagatgcagacaaataaattttgaatgtatctcaaataatgtgatctagaaatgttatatatataaaaaaaatagtattattaataataaatacagataactattgtcggaggaatttgaacagacaataataaaatataattattaataaaaagcgcgagtactcaatctagaacagtgagtattcaaaaagaaggcacacagacaaactgaaaaactgataaacataatgaacacaagagaattatagtggttcagtcaaatcacagtctgcctagtccattgttgcaagaatttctatcatatttttattcatattagatcactcctttatatacaaagcaagtgtcgctttaattacacaaaacttaattattgaaccgttttataatgaatatcaacattaaattaagagaaaacgttaattgaataaataaagaacaatttcgatccgatttactaaccacagtaacgtatgcaacctctatggtgcgagttgtctattcatattctcgcacaagctctcgggcctagggtgcgtataggactaatgagtctttgggataagatagttgcgccctattcgagtcgcgtatacggatacttttttagcgttgataactcaggacgtgcgagtccttatcgggtcatcgagtgcgttaggtctttcgaaccaactcgctaagtaaagaatcgatctctactaatttgcaggagaagtctttatggacatcgcatgtatcttggtagatgcgagtctcaaacatggccttcttggtcctgcatcatgtgaggtataataatgtgctggctctgtcaaggtcacatcat

SEQ ID NO: 321167 - DNA, 1607 bp, Cannabis indica
attgctattaagtactagtgatgtctagcattttctcgatatgtcgcgttgcaattggctagcaatactctctaaaagctattatattaaattatatggaacccgatacttaattggaccaatagcaatattaacacatagaaaagtgctagacaccactgatacccttttctctatttttattacatataaaataaacatacataattaaaatgagagggggcgcaagacgtggagtcattacttttagtgtaagtctttatttaacattaatgttgatccaaatttggtctccttgatttcatatataaataaataacaattaattgcgttcatacttgttgtctaatgacttttatgtacattagaataccaatccaatttatattattttatttatagtgtattagattcgcactaagtgtggcagcaatttttggcgtaaaccaaatcattttactgtcaaagtaaatgtcgacagagccatctttgaagctcagcataagttcaggtttggctgggtggctcgtgacaattttgggaatcttattgaagctgtctcggggagtaggtggggctgtgttcttcctaaaattgttgaggtaattggtatcaaggaagcgttgagttggattaagcgcaaaggttgggacaaggtggttgttgaattggatgctttagttgttttccaagcaataaaaagttcaattcaaatgccatctcagttcgggttgttggtagaggactgtcgtttaattttatctacattaaataatgtccaaatttcttttgttaatcgtttttctaatagggccgctcattgtgttgctagggggtcttatttttcgtcagtatgtacgtataatgagcataatactccttcctctttacgagatattgtaattgcggatgcaagttgattatctatgacataatcctttattcaaaaaaaaaaatatgcataataactcaaatccaatttaattcaatccacaaaatacgaattagatcgattattttagattgatcagtttttaatattaaattatttatatttattaaaaaaaattcatataactaacaataaaataaaataaattatggttgtctaacaataaattaaaataaataaaacaaaaaataataaatttaaaggaagaagaaaaaatttatatgcataaagaaatgtttaattttattttagattatattttctttgtaaataagaatgaaatgtatatttgatctaatatattttaaaatatatttgtataatttccccaaaaccagaataaccaaaaaaactctgagaatatatcgtcaggactctgagtattgaatcggaatatcgtcggaccaccttcttgtccgctcaaaaaccctctgacacttggctgtggatcttgtgttgggatatatgccctaaaagtaagtaattgttggataatatattattgaatatatgaaatacaattataagattaatgaatacattaattatagaagtataattaaccaatatatgaaaattccttattcatatggaaaaggtatataatcttgtaaggatgtacaagaaaattaagattatacgatatgaataaaat

SEQ ID NO: 321168 - DNA, 2442 bp, Cannabis indica
taactttaggtttgttgaggctcgtttttcttcaactttgtcaagtgattcttctaggagagaatgattagcttcttgatcgttggtcaattttctatggtatggaggttctaattctacgggcaatataacttcataaccatatgccatagcaaacggtgtttgtccagttgctattttttctattatttggtatgactaaaatacttccggtagttcctctgcccagctccctttagcttcttcaggtctttttttcatggtgtctttgactgtcttattgactgctttgacctgaccatttgattgagggtgtgccactacggagaaactctttatgattccatgagtcatatagaaatctgtaaacaattggctatcaaactgtttgccattgtctcaaacgattttgtgcaggagtctgaaccgacatattatgttcttaactacaatgtcaatacttttttagatgtaatggttgccaggggttcggcttccgtccattttgtgaaatagtcaaattcgaccactgcatactgtaccccgcccttacctttgggcaattgtccaatcagatctattccccaaatagcaaaaggctaagacttttcatttcagttggctcgttgggcggtgcatgggatatttttggaaatctctagcatttgtcacatttctttacataggcctttgaatcttcaatcatggtcggccagaaatatccttgccttagtaatttctttgataggctttgccctgatgcgtggttgtcacaaaatctgtcatgtacctcggacaagagccaaacaattacttcttttattacgcgtcttagaaatggcattgagaaacctcttctatacattacaccttttactatgatataccgtgcaattttcgtcatcatttttcgagcttcgtttctagcatttggaagttagccattattgaggtaggctgcaatgggtgtcatccagtattacgcgtctttatcacaattgatgttgggctcttctaagaattaaatagggtgtagaccggccctatctattactatgatgctcgcaagcaaggttaaagcgtagcagttgtgttttcttctcctggaatttgcctgagggtgtaacccttgaattgtgagaggagatcttgtatcttgcttagataagtcatcattttctctccctaagcctcatactctcctgaaagattattcactaccaactttgaatcactacagacctcgatgtaatcatcatgcagctcccgagcaagttttaagccatcaatgagggcttcatactctacttcgttattggaagcttcaaatccatatttgactgctccgtgtagatttgcccccaggcatgacaaagacaatttctacattagaaagttggtatgtcgccgacctatctacgtacaatttctaggtaggtctgtctttgttgttatccggcaatggttcttgtactggctccaagttatcccgtatgttgctttcttctttgccagtgcactcaaccacaaagtctgcaaaggcctgtcctttaactgatgtttagggttagaagattgttttgtactgacccaactctattgctcatttaagtaactttccagaggcatcgggtttttgcaatatttggcgcaatggttggttggtgtatacccagacaggatgagcctggaaataaggccttaacttccttggttctaagattaggcagtaagtgagcttctctattagaggataccatcctagcttcaatgagccttttgctgatatagtagactcgatgctagatgttgttctcttctcttatcagaacgacacttatagcatactatgtaacggctaagtatattcctaacttttctctgtccaggggttttgagagtacaggaggcttttcatgttgtctttttaactcttggaaagtgttctcacattcctccatccattaaaattttttgttaccgcgaagtatgttgaagaaaggaacacacttgtctattgacttcgaaacgaatctactgagtgcggctatttgaccagttaatctttaaacttccttagttttagttggtcatttcatatccaagagggattgtattttctctggattggcttctataccctgagcattaacaataaaaccaagaaacttacccgagctaacaccaaaggagcactttaagtgattgagtatcatgttgtattttttaaggattttgaagcattcatccagatcttctatgtgcccccaagccttcctagatttgatgagcataacatccacatatacctccatatatcttttgatctagtctttaaacattttatttactagcttctgataggtagctccagcatcttcaaaccgaacggcataaccttgtaatagtacagacccattatatgttcaaaaacttgtatgt

SEQ ID NO: 321169 - DNA, 574 bp, Cannabis indica
caaggtaaccaaggctttcgtcgaggcagaaatgaggtttggcagccttaccctgaatgcccaaaatgcaagagacaccacttgggtgaatgttggtctagagtttgctaccaatgtggagtagcagaccattttaagaacaactgcccgcagctacagaagcctaaggctaagaaagagagtcatatggttcctgctagggtatttgctttggtccaagcagatgttgaggctgcccttcatataagtctcacttcctgactctaaccaattggaactccatatgttttttgtgagggtggtctgctctatgagcttctcttgcaccttgaacatgtcgcgaaactcgcgcaggtaggcttcagtgagctattgcccctctagttattctggtaggggtgggtgtgacttctcatttatattctgctctattcatcacctcttgccagaatagatcctcatcgatcatgtatctcttatgtcgcctccaatggaaagatgttctttttccattgcagaaagcacaaaatccagccatgaaaaaaaataaaacgaaagcaggtccccacaaagt

SEQ ID NO: 321170 - DNA, 853 bp, Cannabis indica
atatatatatatattaacttgtattttggtccaaagaaatttccatagacaaagtattatgatcatcaccaactccatttttatttggaagactcagaagtcataacttcatttatttatttattaggattggactataaccttgttttttaaccacccatcaatggatattgcttaaaccaaattaattttttttagaattatatatatatatatttttactttaagggaaatacattgggttcgtttggaacaccgtattaagtcgtattgtattgtattgtattgtattgtattgaattgtattttatgcaatatttttatgtaaaactatatgtggtattaacttttatggacacttaaatatataatgttttagtataaattaaagtttaacatagtattatataaaaatatgatatataatccaatttaatataatacaatacaacacaatacgacctagacgttccaaacgagccctataacaattattgtaataacaattattacataattagtgaatattagacaagcttaatcacaaataatctttgaggacctcatcataagatatgaaccactccaaaaaaattggttttgttacattaaacttatttggctctttaggttcactaaactcaaaccacccactccatcaatatatatatatatatatatatatatatataaacaccaataaaagagctataaattagtgccaaagattccaaaaccattgtttgtgcattttggcaccttaataatttttctagacactatatatccaaatgaatattatatcattattattgcatagagggtaattatacctcatcatcattatcattac

SEQ ID NO: 321171 - DNA, 520 bp, Cannabis indica
attctctctttttgtgaatttataatatatgtatatgtatacataaccttaatgatgccgcatgagacaaagacttttcatatatatatccacatcctcacaatgagtgagtggtttgccattattttttttttttaccagattgtataacataattttcctttcttttaactgtatcgctttcttcttcttttttttttcttttcaaacatatattaaaagaaagtaatgtcatatatctgtaaagaaaaattaaagagaatgagggcatctcaatgttttagtggaatgagggcattccttggatgagagtatttttttatgaaatgagagcattccatttctttttgtagaatgtgggcattccttagatgagagcatttattattttattttatttttttgtagaatgagggcattccttggatgagagcatccatttttttgtggaatgagggcattccatggatgagagcatccaatttttttgtggaattagggcattccatggatgagggca

SEQ ID NO: 321172 - DNA, 493 bp, Cannabis indica
tagggcataaaacccaacagctagtatggctttaacctataacactgccaacatgacaatggattgttgattgaggtgctacaagacatatatacaataatatgaaggtctttcaatctatatgttttgcccctaccactagattaattctatctaataatgaatctttagtcgttcagcaatgtcgcacagtggaaataaccaaagacatcattcttaaaaatgtgttgtttgttttaaattttaaatttaatataatgtttgttagctgtataaccagtgataataatgttattttaatttcagcactggcaaattttgtatccaagaatctctcagcaagaaaatgattggcaaaggtaaagaatgcagtggcctctatgtcctagagaaagacaccactcatgcttacaacgttgccatctctgctcgttggaaattattttaccaagatcttagatctactcacaagtatgttgattaacaccctaaa

SEQ ID NO: 321173 - DNA, 1034 bp, Cannabis indica
agtaaaacaaaggcccttatctctcctttcacgcagttcaataggtgagagacgtttaacaagaagagagttacctgttttagtgcaattagaattggagttaatcgatggggagccaacaccaataactgcactagccccttgaagcaatggcaacaaattttgaactaatttagaatcccaatcagctcgttgatttgatccccgagaacgcaggagcatatcatcattacgatattcgtacagttgtgccttagccatggcattggccagattggagggagtagcaatcgaaaattccttacgaatttctacctttaatccccccacaaaaaatgtaagaacatctgctctgggacaccagtaattcgtgtcattaattcttcaaaatcccctcgggattgagaaacccgccctgtttgcattagtttcgcaatatgatgtagtggatcatcataaatggaggctctgaatctcacttgcaatgcttggataaatgaatcctaatccataaaaccaccaccctttttatccattaaaaccaagtagatggagcaccatctaggtgaaaagccacgacagataatcgcattgcagggtcgactcgatgaagattaaagaacttagggatcttatatattcaatcatcaacctcggtttcatcaaatctaggcacgttaacccgaagagtgttgagaagggaattaacatctcggcaatcaagctcaacatcggaacgtcgattggttgctcgggtcgtgactggggttgcactactctcaccacctatgtcaggtgaaagaggaggtgataattgcgagagacgctcatcgagtaaggccttgagctcctccatatatatgtgatgcaactcgctgttccattttgagattgaaatccctggtcatgttctaaaacaattgtgcaatctcctcgtttttcatattgcaaggaagaagaagaagaaggcaatgaaagcaccagtattagattgggtccacttcgagacaggacaaatctccttaagcaatctc

SEQ ID NO: 321174 - DNA, 1378 bp, Cannabis indica
ataattcacaactaacatgcaagtttcgtaattaaaccctaattatcaactaatttccaaattaaagttaagcgatctttacacccacaaagttaatcaaagtgactctgccagccttagaaagcatcttggccttccaaccttgtagttttgatatgaggttgttcagaacaaagttaatgtttgcatctttctatcttgttttgaacatcctgaggctaaataattgatcttgccctcaggaccctttacccctaaaatctcttggatacctctccttataccttgattggtattgttactaaaataaatattagttttgagcttattaacctattggcctaaccataagcaaaacttgtcagttcaatccaaaagctctttggccttagcaatagtagctctccccactagaataaggtcatcaacaaaaagcatatggaaaaattttggggcccctactcaacttgatcccagagatcagaccctcatttatagcattatcgagcaatctaaacaccatattgattgcccaaataaataagtagggagaaaaggggtcaccctgccttataccgcatttaggctcaatagagttcactgggataccattcaggtagataaccaatgacgaagtataaatacactaggatacaagtctacgaaaataggatgagacactaaaagctttaagcaccttctccacaaactgccaactaagtttatcatagactttcactagatcaatcttaatagcaaagaaacactcgttttcttttttggccttaaatgagtgaatagtctcttggagaatgacattattatcttgaatatttttccaagaataaacacagcttgagtaggacaaatgattctcaggagaacatgcttgatcttattagcaataatcttagagatcgccttataaagcacattgcataacgaaatcgatctaaaatgtcatactctttgaggattagggattttaggaataaggacaacatttgaagcgttaatacccctattcatcttaccggactcgaagaaatcacacacagattcataaaaatatctccccaacactcgcacagtaatgcttaaagaaaatgtttgacaagccatacgggccaggagccttaagactactcatagtgtttaaagtctgcttaacttgttagcgtgaagaagaaatattgataacttgttgttaacacttatggattttagtttcattcaaatagaagagaagatatagttattctagctctaaatttttggtcaatttctaaacgacaatgtatgaaactaatttctatacttttacttatatacattgtgtaatgaccgttttagtaaattggattagtaaaggcaatta

SEQ ID NO: 321175 - DNA, 842 bp, Cannabis indica
atctcggtcaaagtcataaatctgtattaaagaaaaaaagaaaactatgtcaaactaacttttaaatgctacctcaggaagggatataaaataaagagaaagaacccatcaaagaagagtcaattacatccccataaagacaaaaaaattaaacaaatcaaggaaaaacatatgtaaccaaatgaagccaaaaaaacgagaaagaaagttagcttaccaagtcacagttcatcatatacttctttaagcactgaaaaaaaaagcaaaaaattatgtaatttatgatcgaaatttcaaatcaaagactacatttttttaataccatattaatcaagatcagggaatctttcagcagaattctcgtcacaatttttttcgtaaaaactttggaagaagaaattgagggacaacactgaaatcaatttctcgaagtacgaaactatttctgtgcaccatcatatatttcattcagccatgctagtaaatgtccgggttttgctgtattactcaccaaagtcatgcactcatctatattcaaaataactttctcatctcatcatatagagatgtacatactgtataccttatttcttattcaaaacattaattaaagggcatgatcaattctttttcattttgacacactgttgcaaaagctgcaacaaaaaagctgaccttttctggtggcagatctatccccaaattttcacgagagagaatgataccatctgcttcttgtagaatctcatcaaaatgagttaacccctagaaagatagagagagagagacatttcttgttaagaatcacattgtaatgaaaaggagaaggaaataatggcaga

SEQ ID NO: 321176 - DNA, 1081 bp, Cannabis indica
aaattcggtgatgacgtggaaccgaaaattcagttacagtttggttggtttgatggtcggttatgaacacccctaacaaaactctagatgaatcatagtgtcgaacttagatactttgacccacttatctttactaaataaagaaggatactttgaaccttgctttaaaagtggcgctcctttaaagtacagatagtgacagagccacatatcaatataggagattgtaaccctttatcttttttcatctcccattatttttaatgtaaaatattttaaaaatatctacatttaaaataatatttttgaaacactaattctcataaatatcataatcaaatcaaggtaattaaacacaacaataataaggagatattattgtatgatgttaaatgtctcttacataattttgaaaagaaaacaaaaggttgtcctttattgtacggatacatatatattatatttacaacagccgacagtaccaacccaaccccttaaactcatttaacttaaaccaccaatcaactaaaaaaaccaccaatcattcttctctctctatccaatttactatcataccctcacacttgctaattaggcttacattatacatatgaaccaactatgttattcactcgaagttagctcaagtggccataggagggtgcgtgcgtgttggagatcctaggttcgagttccaaattatgcatgtaatatataaacacttaaatcaaaaaaaaaaaaaaaaaaaaaaaaaaaaaaaaaaaaaaaacctatgttattcatttgtgttaattttcatttattaagataaccaaatttgttaagataaccagccatgaagaggtaaaatcctctaaatcttaattttgttttagtcttctcatttattttaatttgttaagtatcgaggtaagattgccaatatgtaataagtgtacacacggcaagttttcactgtgtaattattgttgatagtttgatctatgaattttcatttattttgttagtatttgttttgtgtatttttttttggtattttttgtatttttggtttttaggtgttgtacttttagtattttag

SEQ ID NO: 321177 - DNA, 1259 bp, Cannabis indica
attgttaataaatcttataaataattggtattattatttttgttagtatatatattttagtgaacggtatatgtattttttattatacgttatactatttttaaataaaatttaagttctattgtacttttgttgatatatatgatatataattttatttaacatttttatatatttttgattttttatttattttttattatatatattttcgattgtgaggcatatatttgttgttatgtagtatataagttttattgtatagtatattattttattttagatcatgcatgttcaattttttattttattttatataatggtgatatataattttttgagtatgatataattattgtatagctgtatataatttagttaatatggtatatacaattgtatcagttaatttattatatttggtcattttcctaattaatttaaaaaatggacatttactaacttagtttttaaatttaaggtcattttgtatctcaacccaataaaattgtctagcatagaattttttttttctcaaaatgtagaagagctataagtttctcttttgaaggagaatccccatagggatgtaattgactcggctgattgataaaaaaattaataaaatatttcaaataataatattgatacaaattttataaaaatattaaagtaaattaatttaaaagataattatggtaggctatatatgaaaataaattagtgttgaaagtacttaagtaatcaattttgttatacttaattattagtgtaaaaaatgagtaaattgcggcttaaatacctaagttttatgtcgagtagcagataagtacctaagtcatattattggtggtataaatacctttcgttactagtgtgaaatttccgtaggtacctcaccgttaattgacaaatcagtatctacgcgttagccactgatagaggtccatgtcttttaatttttctttattatttaaaaaatcattaaaatctaaaatttacttaaaaattatttaaaaaacaataaaaaaaattaatgttaaaataatgtaattgaaaaagaaaaaagaaagaaccctaatctctttctatcttcccaacacatacacttcttccacaccctttcttcctcacacactctctctctcttcctttctacttcttcttaggcaagttgcagcctttctccatcgtcagccaatggagctcttctctcgacgtcaagagtgccgacgagctcaacatcgtctctctctctc

SEQ ID NO: 321178 - DNA, 1018 bp, Cannabis indica
gaaacattatcgattaataaaaaggtcattttttagttagcattacaattttgtaactgctaagattatgagtagatcatggtgttgtcttctgttagttttctttgctaagtggtactccactccttttgtctttactttattagtagttttgtattaatgatgaattttactactttccatgagaactccttttcttggcctttattattcatgtaattgtagtactatttaatatgaaaattacttaactgttaaaccacaacaattttctttgtaggatttaaattattcccagctgcttttcataatggttgactgtcatgagcctggctagatgaaaatttcattatcttcatatcatcctttgcaaaacacttccttaaacaatgcatgaacgaaataaaagaagcaaaaaactaaaataaagcaatgacaattataggtactatccttcatctttggactaccatcttagaatttcgagtcaacaattgaaaagtttcacttttgagttcctatctggtggattgatccatgttgaaattgagtcagctccaaaattagaatacttttgttacaaaggtgatgtaaatttcagcatatccatggagtcatctaattcgataaatggaaagattgcaattcatgagaaagaggagttggactatgacagaaaatggttcacagatttgattttatttcttgcgaacctcaattgctcttggaatattgtcaccctacatgttagcacatataaagtaagtttattaatttgtctaatataatatatattctttaatttgattttctggttttattactttcaagctcatactcttaatctgttatatgtttcctttgtatacatgaaggctctcatttggccagaaaatcttaagaacatatgtcgttcttccttgcttaattggaagcatctcagagttattactgattgtctacccgagaaagagtcggagttgaaggaagcgttgatgtggatttcaccttctttaga

SEQ ID NO: 321179 - DNA, 526 bp, Cannabis indica
tttaaaataaaatctcatgcaccttagttactttaattccaaattctaaactctaatgagtctcttgtaatcggttctattagggtcttttcaatatctacaaatttcttgctaattagttttgagatagaatctcgtataccttaataacattcattctaaattctaacatagataaaagttctactatatatgagtcctatgtattaactctcttcaatctttaattcccaaatcaaaaatgtcaattaggccatcttcaatgcaagccacgtttatacgataaacttacttaatattttaaatcaacaaaaaaaattagcagtgacagtataatttgacaactaccccattaaacatgcccctaaggcagggccggccctgaaacaaagtgggccatagggaaaattttttttggacccttatgttagaaaaatgtggtatttttcaaaatcggtaaaaaaatgtataattttaaaagaggaaaaaaaaattttgggcccctgggctgggtgggccctaggca

SEQ ID NO: 321180 - DNA, 826 bp, Cannabis indica
aaaatagaaaaatggaccattaaatctcaagcttgagctttaaaagcttaaacttgagctaaaccctaaatagagaatatttattcttgattaaaaacttgcataaactttgatagttaatattcataggaaatgatctatcttccttcttaataagccacccataatgacacaacaggttggttaaaccctaaattcatcatcctttgaggtcaccaatttactttcttgagttttgttggagccattatatatggtgcctcagaaccacttctgctctaactaccaaaacatcaacaaagtctatctctgttgtgatgataatttaagaagctctacttgaaatacatccaagaactcttataccattctaatgtccaaaggctgaattgtctcccattgctaatgatcctatgtatctatcccatgatggatctttatcttttatcatcgtaagaactggagcctaaaaacctcgtcccgataccataatacaaacaagccttcactttcaagttgaaaatttactactttctatttggaatcattactagcagcttatttagataataattctatatagtaatatctcatactctaatatacccaaaactacgaggtcaatattcaactttaattggcatagacctaatgttgtcgagtgaatttcgcaacaccaaaaagtactatttaattgatataaaagagaatttttagggaaatgacaagtgcgagtattcaacctagaatggcgagtactcgactgggaatgcaagaacaaacaacaaggctggaaaaagtaaacaagacaatgaattatagtggt

SEQ ID NO: 321181 - DNA, 627 bp, Cannabis indica
ttaactttttaagttataatattctcgttagttattttttttttgaaatatttgttttatttattattattgtgatagccattttttttttatcaatttacacctaaaaatgctactatacactatgtattaaagtaatttctatattttttttgactaaatataatacttgctccttatcaaatatatataatataatatttattcatttttaggtaattcatttttattttatttttttttttgagaaaaaattctcaacacctcatagaacaaaaaataaaaagtttaaatattatattatatttattttagataattaactgaagatatttgaaaatattatattcttatcctaaacaaataaagaaaaaaattgaaccctaataacctctataaatagtgagaatcgaagccatgatctcgtcattattatacattttgagctcgtttggaatgccgtattagatcgtattgtattgtattgtattatattgaattggattatacattatatttttatataatactatgtcaaactttaagttatactaaaatattatatatttaggtgtccataaaagttaatgtcacatatagttttacataaaaatattgtataaaata

SEQ ID NO: 321182 - DNA, 897 bp, Cannabis indica
gcaaagcttctcgccaacattcatggagatcgacaaaagcttctcatcggttcatggtgattgagaaaggcttctacatccctggtggtgtttctttaagaagctacgttaattatagaacaaatctagaatctttttgtggtggtcggagttcgtgtagagaccgtacttttgaattattttttttcattctaagttttctatttttgtttatttttctttatagcagtacacaactaaattttagacataataaagttataacataaaaaggcccttctttacatttgtcatatgagaaaatatatatgagattaaaaaaataaataattgatttctaagaaggaaatttgattaaatatgcataaaataccttaatctttttttcctaaatccatatgtattaaaattggccatatatgaccacacctcacatttgaaatcccaaaccaatcagcctcctctctcttcctctcgctcaaaccacgctcaaacccacggtgacggcgcagcatcccattcaacccacggtggacccaatcgacgaccgaacccacgaccctatcgacgaggcaatcgatgaccggatccacgacccacacggtgcacgccatccataactatgtcgaaggtgtgtttttattttcttttttttttggtctgaaagtgctaaccatttatgtcggatttgtgaaattaaaaaattttgagaaagaagaagaaggctcgatgggtccgatgctagtccgatatgggtctgatgggcccttcaattggtttaaatatgtgtaggttcgatgggtctgatgcccaatccaatgccaagttcgatgcccagtccgatgggtccgatttaaatcgggtgggaagaagaaaaaagaatagagagagagagag

SEQ ID NO: 321183 - DNA, 707 bp, Cannabis indica
aatatttatatttttctaaaaaaatgccaacattttttaaatagtaattttgaactttatatttatttgaatttgttcaataaaaatacaaataattaattaattaattaattaattaattgtgaggtggctacatacaatcgtcacgtaataacattgtgaaagaatttgaggttttgttttgtcatcacatttcttttaaattaggacctcaaagtcaatttttatattcaattacgttttttagttacgtaacaaaaatatatataaaaacaaaatcatatttatttatatttatgctaattaacttacaaaaatatatattttaattttattcttaaaaaaataaaataaaaaaatagagtcgtgtttgggtagaagaagatatttgcaataattggagtaacactgtcagaatatctaacagtctcattttgatatttcatattagcttgtcatcgtcatcaaagtacttccttattccaatattattattaataattaattttttaattaaaaaaactttttttttcctaaacacttattttgtattatttttagtgttttattattattggtataattaaatatgaagtataacttatgacacatttactatacagtattcaaaatcggaataaattagtaaaaaaatataacaaaataaatgaaaactaatcaaaatcaatatttgtaatatgttattt

SEQ ID NO: 321184 - DNA, 1176 bp, Cannabis indica
tattctagtgtatgtagatgataattgcttctaataatgatattttttcaatgctttcaaaataaaaactgaattctatcttttcagttaaaagattcaaccctttttgtttcttttcgggtttaaagataagttactcttctataagaaaatatgtttcttagtgcctttttacactacaattattgtctgatacaagtttttgggggactaaagtggcttccacacccatttatgaggacactaaggctaaagaaacaagtcaagttccagttggcccagtgacgagggcgcgagccaagagtttcaaagaagaactcaacaacatagttaacaaaattttaaaacaagaggagaccgtggtcaacactgaaggtgagaaaaaatttgtgtttctcatcaaagtagactcagtttaggaatctttgtggctgacacctttttcaaggcaaatggcacctttccttttaattttgtttccttttttttctgtcttagagagtcttcaataaggggtgaaatccctttgttttttcattgttttagttctttttttatttaatcttgtttgtaagttggctatttaaagccttgtaaactctttggaaaatcaaattatttttgaataaaattttaagaggttttcttcttgagtccttgaaagaacttttcgaacaaatctatgactttttcttgtggcgttcaacctgacttatcaaacggacttccatccccatttgttgcgtcttccttcataccaaggttcatgcttaactaagcattggttcgcggttccacatcccaaattcgtgagttgttggaggctgccataattggtatcgggtttcatcacaactgtttatgtggttcgtatcatttagtatcagagcttaggatcatcaggtttggcgtatctacattttgtgttttttttctattcaattcatatactcaaatcttgttgaacttgtattctatattcctgtcaattcgtgtttcaactcttcttttttttctttgtgaaatccaaaactgttaaaaccacattctgataatttttcttgtgtcaaacatcgtgtctttactatcattagtttcccttatttttttcttttcttcttaaaaaaatctgaaattaaaaaaatatttgaaaaatcaaagcctagagccataatt

SEQ ID NO: 321185 - DNA, 3115 bp, Cannabis indica
aaaagaaaaatatatataagaaaaagcataatttaaaacttttttttaaatgaaatagcaacttcattgaattaatagcattctgaatacaagagaacctttagatcggcctaaacattatgataaaaaatgctacaaccagaggaaaatcgagcatgcctagcaacaacatgagtaactcgattggctgatcgtttaataaatcttattttaacactaggtagagaagacaataaatgacaacaatcctgaataaccaggtcgaaaatggatgacattctctgactgcttcagattgcttggacagtgagaaggctatcagtctcaagctctacattgtgccaattggtactcttaatccagctaagagcttccttgattcccagtgcctcaacaacttcaggcgaataagagcctgctttatagcatgtctttgcttcaataagatggcccatactatctctagcaactataccgaacccatatgagttctcatgatgaaaaagtgcagcgtccacgttaatcttgatgtgatttgtaacaggtttagaccaaagctcggccccatcatcactattatagagagatagtgatgataaggcaagagtatcttgagcctttcgccagtgatcaagcgtggtggaggctgaagctaaaacatcattagtagtacaattgcgtttcttccaaacaacttggttccgagatttccataaggcccaagcaatcatagaggcacgacaaacttgttctgtatcacaaactcgcaacatgttctcaaaccagttaccaaaactggaaggggctgcaacattaataggccagccgaaaagagcccagcaggctttggcgaaatcgcaggtaatgagcgaatggatggcaatttctgggtgcgttttacatacaggacaatggcttgaaataggcacatgtttggtgacgagattgacacatgtggggagagagtcggagacgacacgccacaaaaaattcagcacctttggtgggatcttcaaatgccaaagttgtctccaaaatcctgagttatcgggagtaggagttgatggtttttcctgctgtagcagggagtaagcacttcgcacagtataaagacctctgtggtctgctgtccaagaccagaagtctgcccctgcagaacgactcaagggtataccaaggatgatgttggcctcaagtgatggaaataaatcattcacaacatctgcatcccagctacggtcattaacttgagaaagagagttcacaaggttattttgtagacttggatgactagacacaagacacttgttctgttgattcggtacccaaggagtgcctaaaatttttgtgcttagaccatcaccaatcgtacgaatagctccaagacgaaccacatgttgagcgccccaaatactacgccaaacaaagcttgggttgttaccaagttcggctgatagaaaatcggagtgtgggaaatactttgctttgtaaactctagcagcgagagaatttgggttacacaaaatacgccatccttgtttagcaagcatggcaaggttaaagtcatgtaagtgttgaaaccccatacctccttcttctttaggcttagcaagacgatcccatgacatccagataatacctcgtccattactagtgttggttttccaccaaaagctcgccattatttttcctatttccttacaagtgccaagaggtagcaaaaagacactcatagcgtaagtgggcaacgattgaatgacagttttgagaagattttctttccctgcctgagataagaatctcccatcccagctattcacccgtgcaaactttgttttttatgaagccgaggatagcatttttattgcggccaatgatgttggaaagaccaaggtaaagactgcctttggtagcttcatccatatgaagggtagaacaaattcgatgcctggttgtgtcatccgtattgggactgaaaaaaattgatgatttagatggattgaccttttgaccagaagcactttcgaacaaatgaagtagattgttgatgctagcagctgcattctcacttgcatggcaaaagaaatagctatcgtctgcaaacaacatatgagtgatagatggagcacgattagcaacccgacaaccttgtaaaattctatcagcctcaaacttttgaatgagggcagggagaccttcagcacacataatgaacaggtaagccgatagggggtctccttgtcgaataccacgagatggacaaatagactccagaatgtggccaccatgtacaactttgtagcgcaccgttgaaacacaagccataatcaaatcaacccatctactaacaaatcccattcgaatcataaccgctcttaaaaagccccattccactctgtcgccttgctcatgtcaagcttgagcgcgatgaaccctttcttgcctttcttttgcgcttcaagtaatgcatcacctcaaagactatcataatgttgtcagagataaggcggccaggtatgaaggcgctttgggtttcagagatgatatggtcaattagatcccgcatgcgattagaaatcactttggagatgatcttataaagaacattacatagagagattggtctaagatcactcatagcaaaaaaattcttcttcttcggtatcaaaacaaggtgggtatcatttagtccagcaggaagtaccccagagacaaagaaatctttcactaattgaataacatcggtgccaacaacttgccaatgatgttgaaaaaagccaggacacataccatcaggactaggtgctttgtcaggatgcatagaaaacacagcagacttcacttcttcatcacggattggttgtaacagtgcctcattgtgattagcatttaccgaagctcttatgttgtcaataatcagctgggacgaagtattggacgattggaaaagattgagaaaatagtcattgattacagtatcaaggccggttgaccaattcttccaaacaccatttgcatcttgtaattgttgaatttgatttgatcttttcctagcactagcagtggcatgaaaatatttattatttttatcccccgaatgaagccaatattgctt

SEQ ID NO: 321186 - DNA, 942 bp, Cannabis indica
ttaaagcattctgattacctttcctagttatgtaaacaaaataacatgattctggttttcttttcgtatagtttagtaaatagcatagtaatatattgtttccgattattttctattttgaaccgattcatttctcctattaattattctgattccagttacagtttagtaaacacgccattagtactatttttatttagtttcaataagtaattagattttatatttttatactaaatatatatataaaaaaattaggattaaaattttacttatttatttattttgaataagatggatctaataatatttgatggaatccaatccaaaacattggactagatctaaggatggaatcgattcgatccaaaaattattaagtttaaaaatattgaataaattcaaactaatccaataagtatacatgaattatatttaatagataaaatcggtccaatccaacagttagattagttcaaataattaaaattaattagatacgatcagttggtaaaattcaacatctaatatataattagatcaaatcttaattggtttaaaagcattagatgtagtcacataattcttagtaagttaaaattaaaacttaaattgaattatgtaaaaagaaaataataaagaataatttgcaacttaaatatgagttacaaataaacatttaaatttaatttttaacggtaataatatttaaattgtaagtatttattatgccacaaattatttaataataaaataatatttaatatttttttttgaaagatacgttcataaatcaaaaggttagaccttgcggtcattacacaaaatgttcataggaatagatgcaacatcaaagcatccaaaacggttatgggtgttaggctaaaattagtctaagtttcgggttatattttcggttagttttcactctttgtttctagt

SEQ ID NO: 321187 - DNA, 745 bp, Cannabis indica
aagtgttagagattttcacatatgcgtcgcgtgccaccaacagaactaaggatgatgacctcgccttacccatttactatatgggggattgatctgattggggcacttcccacagggtgaggggagccaagtactcagtggtaacaattgatttccacactaaacggaccgaggctaaacctcttgtctacataacttggaagaaagtcctcaactttgctgtcaaaaatattgtctgcaggtttggaattccaatgaagataatatccgataatggacatcagttccatggtgagttattcactaagttctacgtgaggaacaaaaataattaagagcttctcgtcagtatcttctcaatagttaacgaaaccttgaaggatactatcaagacgaaattagacgctaccaaaggaagacggttcgatgagttacctcacgtactttggggtcacataactattgagaagatagcaacaggacatactctattctcgctagcatttgactcagaaacaatgttacatgtggaagtaaacatctcaactcataactgagagttttataatcaagaagaaaaccaagaactcttaagattgtccttggatctgcttgatgaaaaattttctgagtcccagattactaatgcagtgaaccaacatcgagtaacaagatcctttaccaaaagggtcaaaaagaggctatttaatgttggagacttggtgctaaggtgagtatttgcaaa

SEQ ID NO: 321188 - DNA, 935 bp, Cannabis indica
aagagaaggacattcagactcatgatcttggtggtactctgcgacaaaaatgatacaagggttagagatctgagtggatggagacatattattccgctgcaaccaatgtaaggtttcttaaactttatatgtgttcattatcattttagaagttcatatttagaatgttaaaaaacatacttgttagtaaatctaagatcctggtaaaataaattctaacactttatcaatctcctatttctgccatacatgcttaaaaatccctcaatcacatgattggaggattaaaacccagaatatggctaactaaggtagagttccaataatgaatttcttcaactttgtcttcttcacaaatcttagcacttttaacttagcaatttgtgtttcaaaatgagtaattggaaaagaagaattagaagcctcaccttaattttattttccaccagatttattcgctcgagcgccaattatttcaaaaaaggttgccctcatttttgattgcagaaggtgaagtttcgacgatttgggggaaaggccaattcccactccatcgtcacccaccattgatttcactaaaatttgtcaaaaatcaatctcaattgaaccaaccaggaaagaatcccaaacatctttaaacttagagtctaggagctgaaccgcttctactcccatcaattgatccattgatttttcctttttacaatattcgaagaagtcggtcccctcttcttctttttcctaattgggtttattgggaatttatgccctaaataaaacccctttcaatataatctgatttgttatcaatagaagattagaggtcatttatgtttacatgtagtttcatgtttatggtttaaagtatacaatttctgttaaatccagaatatatagttattcacaattatagtgatgtcaacatagtggaaggt

SEQ ID NO: 321189 - DNA, 1003 bp, Cannabis indica
ttaaagatacagagaagaaaaatcaataagaggagaaagtatattacttactgtcttgactgaaattattgaagaaattggaacttcacgattgaagtcttgaaaattgaaaggctgggtcctgataatttctagaactatagacgtgatttgatgtaacacgcaagaagaaggtgaaggacaacgagggtatgcaaattgtaaaagaaagcaatcacattttttcagaaagcttgaaggtttgaaaaaacgaaaatggcaaaattagctttcagtttcaattttatacccaacaagtgatcaccgttcgatcaaaagagatcaaatcgaatggatgggaatgttacaaaatgggaacagtcagggcattaaatgctcaatgatgtgcctcaaaatcctgaactgccaaaactcaaaacatgcacttttttaaaagggtttaatacgattatacccctatgatcatttaaaaagttctttttatttaaaaagcactttttaggggcaattgttatactcaaaatttggttatgtaccagaagctgatacgtgtcctacataaggaatatgaatcaactcaaggaatacaataatgacattatatcattaaatgcaattcaaataattcattctaattaaatacaagtttgatagacatgttcaaactcactgactacttagtcgtatgcaagacaagaataatttctattaaactagaattgacgagatatatgtccacctcaagataaatagagtaataaaatatacgagacaagatatccaaagacctcgtgaatcattgactctcccacacgagcaaggtgaagatagtaacattcaactgcctctcgttttacacaacaaagtagtcatctcgtaacatcaatacaaataaaagtgtacaatgagatgaattacttctacacttagtattttttcctctcaagacagataagaaggataactgattttcggcgagattcaacctgttgggttttatgcc

SEQ ID NO: 321190 - DNA, 823 bp, Cannabis indica
aaaaaaaaaaaagtaattttaaaagaagataaatttttttttgggcccctaagctaggtgggccctaggcaaggtctaacccgcctatgctctgggccggccccgcggctttgcctcatgaccaatattatgaacaaaaaacatagttttagattaccaaatgtaattgggacaaacctttgtatagttccacgaccatggcttccaataaccaataattggacattgaacttgtccacagcttcacatattttttcttttggatcaccaacttctgttaatgtctctgcctcaatctgtaatagatcaaattaaaccaaaactaccttaattggattctttaatttcataaaccaatatctcagacatgtcacttgcttaaaatacttactaacaaaatgcataatccattatctttttttagtaatccaaattgaagaacattccattttgaagttaatcaaatcaaagaaaaaaaaaacttcaaaataaaaaggctagtaaggactgcaaatacattcaaaatatcaacattatctattgtttaaattctcacttgtccatatatttccttgtcattcatgttgatcatgtttgctaatccataataaaaagtaaggaaattacaaagacaaaaagaaagggattatttcacaaatacataaaaaaaacaaaaaaaattaaaaaaaatatggtttcacggaattttaaatatttttatgattattttgattttatttacagaaaatacggtcgttttatgttgtactcttgttattttgttgttaatttttattatgtgtatgttatttttgttgttatt

SEQ ID NO: 321191 - DNA, 1391 bp, Cannabis indica
ctatttatagggacttaatacatggggatggtttcccttttgcttataatgagtaatatagggaactacattaattctataactacaatgcaaagaataggaaattagaatgtttgtcgttgttctttgactcaatcccgcgattatagtgattgtcttcgcatctggacacaacgagattcatctctaaaattggcatcttccatgcttctctcgacataagtacatctgcatcttggttggacatctacctcatcaacttgctccgtcacccgagcactatggatattgactaactataactgagctgctaggagtattttccttcgcccaggtattgaaaacatgagacacgtgtcattcattcctattgccacatcaaggtgcgaaaaataggataacagttatcaatgtcaaattcaaagcagagatgtcaaagaaaagaagataaggcttatatggagagagttgatcaaagctctagatagtatgtcatgcaaaaatccagacacttcgctagacgaggccgctcgacaaagatcactacaagcaagatgaaagctaaaaagtccttatctaaacagatgtttgaacagggactgggggtaaatgttataaaaaattttatccacctaacattgcatgtccatgtaagttgagactgaggacatgtggaatacaaccttgtcaatagcaagacaaagtctctttacaaggcatagtaaaattgtcgagaaacaagaaaaaggagttaaacaggccaccaagaagctacagaaccatgtctggtcggccaaggggagtatataggctggccaaaggaagcttgtatggctggccaagaattgaacacaagcttgttcggcaatagagtgactgtcagaccaagatgggcctgtttgaccaaggaagcctaacatttgcaagaaaagtagtacaaaggctggccaacacatgctaaggttggccaacacatgctaaggaaggcccacacatactaaggttggctagcacatattaaggttggccaggacaaaccaaggctggccaaaacgtacaaagtatggccaacacatactatggctggccaacacgtactaaggctagctaggacatattaaggttgacaaacgcttaccaaggctagccagaacgtaccaagacttgccagcacgtaccaaagttggcaggtacatggaaagctattaggcacatggaaagctggtaggcacatgggaaagctagcgagcacataaaaagttggcaggcacatcccagggctgcatgagcaataccttgccaaccacaagagtgcataagccggcgaggttctacaaaataagggtaggcgggtaggttggccagctcctcttctagcagacacttttggt

SEQ ID NO: 321192 - DNA, 884 bp, Cannabis indica
ttgataacttttacaaaatacgattctaaaatagtatttactcaaaattaaattatctttcaaaaaaaaaaatatcgaaggccacccaaaaaataatgcttttagcgataacaaaatatgtgataaaaaatacaccatcatatttacttagcaataacaaaatatgtgacaaaaaatacaccatcatatttactgtaccattaaaaagtcaatgacgaactaaactagtttagtaaaaaattatcaataaatattacttttagttgcaaattctagttacctttcacgatctatttctaatagtagcttttatggtcagttaaaattagttaagatttaatttggtctacaaacaacagaaaggaggttgttaaggttgtttgttagttttattcatttctcatattaattgtttagctaaattgtttactataagtattggttattcactctatcaaattttgttattgattgtttttacagatttgacaagacctttactggtatttttactacagtagatcaatctcaaccacaggcctatatagctcacacaactctggatcaagatgacaactggtacctcgactctagagctacaaaccactgcactcccaatggctaaaacatcatgatagaagatgaacatgaaggccctgatcagctatatgttagaaaaggagcagccttgcttatctctcaaactgataactcatatatgcatcccaatacttgtcaaaaaccattaattctgcataacttacttcatgtacttgaaatcacaaagaaccttcttggtgtctctaagtttgctgtaaataataatgtgtactttgttttttctatcctgatgtttgttatgtcaaggatcaggtgagcgattt

SEQ ID NO: 321193 - DNA, 850 bp, Cannabis indica
acccatgatccttcaaaatctaatacccatgcttgaagcatgtcttctagaatcttaatggtctatttctctaacatatagttctgcatactgatcaatggaaaaattcgttcgaacaggtaaaaagtgtgctgactttgtaaacctctcaactatgaccaacacatagtagtattgtcccgtagtcataggcaatccaactacaaagtctatggcaatgacttccaatttccatttcggaaggttcagtggctgcagcaaacctgcaggcctttggtcttcagctttcacttgctgacaagttaaacacttagtaccgtattcagctatatcattcttcattcaaggccaccaaaacatggccttaaggtcttggtacatctttgttgtccccggatgaacagaataaggagtcatatgagacacattcagaatttccctctgaataacatcatccataggcacacagacacggttcataaactgtaatattcccgtactatctattgtaaagtcactagtcttcccagccgaaatcctatctcgggatttcattaagtccgaaacttgcaattgcacttctttaatttgttctagtagagtagatttcagagtaatgttagtcatttccccacaataaactcaatcttagctcaggtcatctcatctgctagctttttggagatttgtttcattacatttatttaatttcgacctatcctacccaggcatcggctacagcattggccttcccaggatgataaagaatttcacagttataatcctttaccagttcaagccatcacctttggctcatgttcagatctttttgggtaaagaagtatttcag

SEQ ID NO: 321194 - DNA, 1177 bp, Cannabis indica
ctaaagcccatatgtatattcagccctaagagtaagattcagcccaagtatatatttcaagcccatctaatctaaatctaaccctatgtgactaccaatataaagaaagagaagaaaattgaaaaacctaatgtcacttcttcctcttctcttaattttttttgaaattcactaagtttctctctcaaaaatattattccaaaggtgtttgagtatcactccactctattcaaggtgacactcagacctttgtggaagactgtgatgaacacaattgaaggaagagaagatccagattcagatcttgataatgctcgactacagtcaagaatcaaatgctagagatctaaagagaaggagtcttattattctgctgccattaatgtaaggttttctatacctttatgtgtttaatttatcgttttaagaatttcatatttaggatgttagattatagaaataatcaacatacatgttattaaatttaggttctggtaaaatatatttccaacaactagcctcatagccatggtaataattttcttttgtgaaatatggatttataataattttgggttgatgatttggaggtttcatgttgtgtttttacatgactttgatgattatttgtgaaaatataaaaacttccatgataaataattttaattttcttctaaaattattttagaatgaatacttgtaaaattttaagtaagtttgttttctacgaaactctatttcgataaaaacgaagcagatgtgaggttttgaatttttgaagccatggctaccgagaaaccatgcacgcaccctctttgagcgctgcaattctcggagaccagccttgtacccgcgcgtgttttgtctaaacaaacacacggtgatgcattttgcccgaatcaataggctgcagcctcctgcgcgcgcagttgactggcaattcagacaagggtgtttttcacccaaattttacattcttgggattttttcagtcaaattcgaatttttctatttcaaaatcctaaaattcagtatcaaatattatttttaatatttgaacctaaatatcaaatttaaaattgtaataatatttaattattaatttttgatattttgaagtttgaattagaaatttgttattttatgatggaattatggttaatttttttttaaaaaa

SEQ ID NO: 321195 - DNA, 1259 bp, Cannabis indica
ataagatgaaaaaaaaactgaatgagaattttttaattatttatttcaataaactagatctttatttatataaaaatatgactagaataatgagaaataaaagaaaatataatagtatttatggtataattgatttgggtgattcggacattcatatatataatatttcataacactctcccttaaatgtccataatagctatcttataaaaaaccttgtcataaaacctaataggacaaaaactcagccaagaaaaaaagagtgcactatgaataaacttcccatgatttaggtatttgtggagatctttaaatcgatgaattccaatcttttgaaccatcttctcaaatattgatatttgtaacgcctactgcttaggcacgctacaatatcttttaaattactgtgcacacctttgctcatcaaagggtttctcgaaaaaatgtgtcaaatttaaacctttttacaaaaatttaaacgtttataaatatgttatatatccgtacaaaaagcttggatcccgcttttaaagtttatattcatgttcaaaatacattttataatcatgtcgcacagggcctataaaataaaacacaagttgtcctaagactaaaccctccaggtcaaactatgttgacatgtacattcatcctcgagctttggactcactattgctcagccttggcctttcatttacctacatatgtaaccaataaatgttagtcaacagactctataagaaaagtatataacacatatgtattaccgacttgtatttaggcacccatacacctatccacaaggcttaataaatgatcaagaacgttcttaacaaaagtacgacctctgtactacatgcaataagtagtcatcctgtacttaattgtaatgaccgcattttagaatatggattagtaaaggcaattagcgttacttattggtaattctctaaatagttattaatttaattaattgtgggtcccattattaaaaatgggcattagagttataatttatcagtttcggagattttattaaactcaaagtgtattgtttgagatatatatgaattatgttatttttacaatttttgctcggcgacaacggaaaatgcgatggatggctattcaaatcacatgggtaagtttagaaactttttcttagtgggattaatattagagataagtagaataccgagtttgagcgaggttatggttttgaccattttaccactaagcctttacattacttatggtgt

SEQ ID NO: 321196 - DNA, 648 bp, Cannabis indica
gaaggagtattctttctttcgtcttctttcttttgaagctttttagagagagaaagtgttttgtgtgtgtgtttgggtttgggtttttctctctctagctctctactctctgcaacagcggcgaaaaggcaaggatgatgatgagaaatatatatatatataattattatatatatatatatgagagtgagataaagggagagagaaagagacagagagagaagaaggggaaaaagaaatggtacgacggtcaaacacagatttgaagattagtttttttaaaaaaaataaaataaattaattaattattattaaatttaattttgattaattaattaattaattaattttattttagtttttaatatttaatttttaacaaaaaaaaaataacggagtttttttttcttcttttgttatttcccacgtatactcctttagatttactttatttgcagtttcaccccttttatgtgttttattatttttcttttgaaaaatatgaaaatacatgtatctttatatatatctttatatattaaaagtgtctatctaacggcaattcttggtttaacagaatatacttaaaaataaaagaatattctgttaaatttaacgattaggtttgatctcccgttaagccaataa

SEQ ID NO: 321197 - DNA, 1091 bp, Cannabis indica
aatatgtctccccctcatgcacatacaatccataattattttggtgatcatatatctcataagattattgttattacttttaaaatatcatcgtatattatctatgcctatatattatctataactctttcagagtgacttctaaattatggataaggagttcctgcaatattaatatttatccaacttattaaattattcatgtgtgcgtatacacaatgttgttcatactaaagtttgaactttaaataatatgaacataacacatgaatgataatataaattttcatttgcgataataatggtactccaagatcatatatttgtttcattcttaatgtatgatcttatattaaacttactacacctatcttttttatcttatattaattgtgtttatataacataaagtttttttttaatattgtaatttaaatttaaaaccgttgcatatatttacaaaaatatctttctactattattttttttaccaaaaaaatgtataggggaattacctcatatactattttcttaacttttttttttaaaaaaaatcggtttgggtttctacagtagttgcagtgctagttgcaataggggtttctgtacgatttttttgttgcaatttaggttgcagcgctagttgcaatagaggtttctatgtagaatttcgtgaaaatacaaaaaaaaaaaaaaaaaatattttgaaatgtaaaaatgaaaaagccccaaaaatatatttctattattattatttaagaaaataaaaataaaaaaaaagtagtatgatatttcaaaaacaattaaaagtatacaactaataatacaacaaatttattatattattatattttttttttctataaataacacttaaattaaacattttttaactatataactaaaaatatataactaaaataaaaactaagaatataatatacgtatattgcacgtaatattaactcagtatttatatactagcaaatagtgattgtgtcgttttttattatttaaattaataaaaatttatttttttttctaataaataaaatcatatttaaactgaataatttgcttaaactgagaag

SEQ ID NO: 321198 - DNA, 1116 bp, Cannabis indica
ttaccaattttttatttttttttttatgtttttgcactaaaaaaaagtatgaaaaatttgagaggggtatttttgggttttagataaagtggtcatatattttcaatggtgatatgtattagtttagggataaaatattaggtatatgtaagtatagaaaatcaaatttctcaaagagtatctggaagcgcatttgaattctatctcttttagatttgtgattagatgtcaggagggtcttgcagactggacctatttttggatgctcgtagagaccatttacaactttcataaaacaaacttcagactgtattcttgagagcacaacctccacaccttgaactagaagttatttttgattgcatagtagctaaggacattcttgagtgtttccttgtccttgtatacctgatctttttcaatttcagggtggtttttgtctattatgagctttgcattgttgacgtcaatctctggatctattttttttattgttgttttccaggttttctaccatttcttcatcaacaagatttgcatagtcaactatgtcaaattggtcattgtctcttgttttagtttcgtcttcttcttctggttgctccagtgtgtacgattcaattattggcgcgttattctcaagcattctcacatttttttgatattgggttgttttttatgtgaacattggtactattgcagtagctgttgtgatgttgttctgtgtgttgacgcataatggatatatggtgaaatcagtttctttgatctttagttgcaagtaaaagaagagactcgcatcgttgaatattttaatcggtggtattccctatttggcttggtactggatttgtagggttgtttttgttgggtcgcaccctaataaagaaagtagaatctacacgagttgtccatacttgcaatcttttggtacgaattctctactagtctcataatagacacaattttttctttcttcccatcgcccattgttctttaagagaaccggtatagatatcataacctgtaatattttcccaatatttaataattcaacattttaattcacatacaacaacagtaaaacaacattgaaaaaattgacgtttgttattt

SEQ ID NO: 321199 - DNA, 850 bp, Cannabis indica
tttttttttttcatttatttttattaggaagaaattataatttatataattatgtatgttatagttataattttatagtctatcgcgatatggataattttcaaaataaaaaattgaaatcctactttttgtatatgcgtacaattggttgtatttttaacttttatttaaaaatattagatttttttgaaaactaaatataaaatttgctataactataatataaaaaccatccattttttcaccacaaaaataatacttaattaggcacattcaattattaccaatgttaatattactctaataaaacattggacgtcccttaaataattagcgactttataatttgaactatgatcatcattatattttgcctctcaaattttcaccactatcaaattataccattttatttaatataattaagttaatcgatgtgacagtgataaaaatttggagacagtgattatacttcgttcacaaaattactaattataaaacaaaagtctaataaaatcgaataaattcgaaagtacgatcgttttattattattgttaaatgaaaatgttgatagtaaaatatttatttcctgagaataaaatagaataatgagaaaaaagagatagtggagggtgagaaatcctgttattttgtgtgtcatttttagtaaaagttgatatattttgtttgatttttattttttatttatcattattattgtaataaaagtgagtagtattgggcaaaagagacagttacaaattggcgttgacacttcctcgtacatctaatctatcacctccgtacttactcactctcttcactttttttttttatttaatatatata

SEQ ID NO: 321200 - DNA, 1095 bp, Cannabis indica
ttcatatttaggatgttaattcaacatacttgttaataaatctagatcctgataaaatattcccaacatgtacgacagaagatccttgttgtctcaacctttgaatctcctcatcttgacgttgaatcctagcttccatctaaacgaacctttgctccaaatctagcagagcatgtcgtggattttcataaccaacttcttgaaaccttccatcgcctttgccatgtccacggggatttgtgagattctgacctccccaaccacctccagtctcaaccatattatcataactccttgtgttttgctgggtgtccatattataagacttgccttgcgaacccataagtcaggttggtcaggcagatcacatataacccaaatactgcaatcatgaaatttaaggcaacacatttaaataactaacatattattaacatgcttttttttaatcacataacttactaatacgcaaaagcttatagaaccatgagtcgagcttatctatgatgatgattgtacatatcttgatggtcttcgataaacatactggcggctttgataccaaaaattgtaacgcccaactgcttaggcacgctacaatgattttttaattactgtgcccacctttgctaatcaaatagcttttcaaaaaatgtataaaatttaatcttttaaacattattaatatatataaatatccatacaaaaagttaggatcccatgtctaaaatttctatccatactcaaattacgttttacaaacatgtcacacaatgactataaaataagtcgtctcgagattgaactctccaggtctaaccatcttgatatgtacaatcacccccaagctctagagtcattggtgtttagccttatcctctcctttacctacacatgcaaacaatatctgtgagtcaacatacttagtaagaaacgcatataacacataacataatatcaacttgtatttaggtgcctagacacctatctacaaggcttaacagatgatcaaaagcgttcttaacatttggtactatctatgggaatttattttaccaggatcttagatctactcacaagtatgttgtttaaaca

SEQ ID NO: 321201 - DNA, 1603 bp, Cannabis indica
aacatacttgtgagtagatctaagatcctggtaaaataaattccaacaggtgcatctctctacgctgcttttgctgcagctacttcgctttctaattttgcgttagtcaatctttcacaaagtttgaaattttttaactccaccaatggctcatcatagcgatttcgattgtaagcaccacgattcctcttttctagaatttcatcttcattaacatctcattcaaaatcccattcagtaggaccttcctgcatttcagttttcctgggtgtttgccacttaaggctctttcccaagacggtatgttgcccccttgtttagtacagaatcattgtttaaagtattttccatgatcatgagatgattaaagtttcgttaatggagggagatgcattttcttagagtttattaatttgcaaaggctctcaatgaaagcactaaaatattaactcagattttcattaactaataaatgagccttaattgataattaaataatactgaagaatgactgtaaataatagacaaagaagttttacgtagttttgaagttaaatcttcatagtgcacgagtccatcttatttttaaattttttgtttacacaaagtacaagtatcatacaagtattgatcgtaaggatctttgtattctttgaattcccccttgcaccataggttctgtccatatttatagaatttttgagattagcggttatttctttgaatttaaataactgctcgtgaaacgtggacaattcccacatttcatacattcacaacgtgttattaatatgtacatgttaaattaaccatttatttagccttatcatatacgcatgtagttatttaccgagatacccacttttaaagtgctactcgcaattcacttagataaacttctatgcagacttatctcaacctatctcacagtatacttgctctttgtaatgaatcatcatctcgtctttgtacatatctttgtatttcttataaggacgcatttgtcctgtatttagttatgcctcgtgttgtacgatgacgagacgatatatgtgagacacatgtttggacattcttctcgcattgatcatatgatgaagttttgggaattctttttcataagcttttaagtaagctatcttctgtatcatttatgctcattaggttaaacacctttatactgtcttgttcgaccaatcaaagttccttgtcttatttttcttgtactctcctcttcccgagttggttgttattgatcttgctgatctactagtcagctattattttgacttatccttagtcacctaaggaaagaattcaatggtctcaactagtataaggatcatgagcctatacaactgggcttccaatgagctgaactagaatttaccgagtaaattccctaacttattaattccttgttgtatgcactcatagaaattggaattgcactctcattcatatagaacgctctatatgttccaccatatagatacgctatcaatatttaaccatcgtataatctcaataatgaaagatcctctatagatgatttacaccgagtaggaataaatttaccgtttcactcctcaatgtgttttat

SEQ ID NO: 321202 - DNA, 743 bp, Cannabis indica
catggagcttttgtgcatccctaaatagtgtattcttagaaaatgataattttatgtgcaatctccaacaatggttttggattagtgtttttgctcatttgtattcttcttctttagcaaaggttctacataaatatattttaggattttctatcttgaagcattttttgaaatatatttagatttgtaattatttgtatttcttaaatattttataaatcttaacaaatagtattagagtcacctttattagattaattgaagctatgataatttaactttatgaatttttgaggatttctaagtatatgaatttaatttttgaatattaagattttaatcattattgtggctgatattatttttgtttggcttcatctgccatttatatatatatgtcaatttaagttgattaatattatttgtgtatatatatatatattgggataagattttgtcctgttattatatttttaggtatataatctggattgtattgtaactgctagattgagtcttgtcattaattaaattgttgttattaatttgtagagttagtaggctttagtatgagtattaatatatttattaaattggcaaccggttttgtaagattaataaaatattaattgtttggtaactttttttaaaaaaaaaactaaaaagatgacatgattgatgtcagactacttttaataacttgttaaattatattaattatattgtatttttttttaaaaaaa

SEQ ID NO: 321203 - DNA, 1775 bp, Cannabis indica
gatggttgatgagatagacatgtagtttttggttactatctgtttgagaaaattctttaattagaaatgtgaatatttaatagataataatttgattttgtggatttattataggaaatatttcacaaaaataaaaaaaaaaaaatacaaaaatacggtttcacagaattttaaacatttttacgatttttttgattttatttacagaaaatacggtttttttatgttgcaatcttgttaatttgttgttgatattttattatctgtatgttattttttgttgttattttgatgttatttttatgtaattttcttagtgattttatattgttttcgtgttattttttgaaaaacagtaaaaatgtaaaaaaaaattctttaaacataaaaatgtaattattttacaaaaaatggtgtcttatgtaattattcctttattatattattgattttagattattactactcttcatcgtcattcatgatcacatgtcttattcgtatcgtgtcgagacttatatattccagatgtttattaaccgtgtcagaaaatgaaacctgaacacgacttgtataacccatttataaatatattttgtttaaatatgtcaaccaatgatacatttatgagatatccaacacatttataacctgttaaagtactaaaaaactttaaatataatgggccagttttgtattcactgtgtcaacccaaacatgatccgtttattaaataggttagaagagtcaacctgaacgcatttaaaacaaactcaaacccgctaactttcgtgcagaatttaagtcgtgttatcatatctcacccgttttgccgacccttatgccatcctctttgatttgaatatgtttttctcatttgttattggatagtgaattaagatttatatctacatattgtttttataaatatatagtgtatataatatattatatattaataagaaaaaaaaaggtttttcacattattatatttgatggatgattctttcttttattgagagtttgatcaatcacttccattttgttttttgatcttatatatcatatattaaagatgttattctctctttgtgtatgtcaaagagagaataacatggagaatattggaattggagttgatatatagaagacattctcatagttgcagaataagatttagatttactaaaagtttaagccctaggttaagcaagtgttaataaaggagtggttattttgcttcattgggagaaagaaaggtatttgctgttggagaattgttaaaaaacaccattggtacttagcaccatcttgagtgttatactgttattattgtaattaagtattggattccatgtcacttaagaaaataatttttagggaatatcgctaaccaatcgtggaacgctacctatagaaaatggtaggcaccactgatgcccaataataacgccaaccagcagaggatcaaagtaaagcataggccctttgatactgggtggttgtatttcgatcttttttttttttaaatcaataaattatggataaatactattttagacttccgtattttgcaaaaattattaattggactctctattttgttaaatgacaaaatagaccgtgtattttctaaaatagtacaaataggactctgaactcattttttgtctaaaataaaacttataataatatgatctaaaggtgttatgacaaaatttgttatattaaaaaattgtcaaaaattgagctcaaagtcctatttttactatttt

SEQ ID NO: 321204 - DNA, 952 bp, Cannabis indica
agcaatatatataatatatatatatatagtatatattggaaacaaaactatggatggcccaaaggatataatataatataatatattttatatatatatatatattgagtagatctcaagtttaaattaaatgacctaaagttatataaatatgtatatatttataacttgtaataagagtaaaattaaagcctaccatcaccatgcaacaccgtccttttacgtaagacactgcttagaaactttgctgtacatatatataatatcaaatgttatacaaccgtgtatatatatatatatatatcttctacatattaatatattgtttattttgaaaaatatagtgaatttcatctcttctatatatataagtacttaattataaatattatgtaagaatattattattagttaccagtgatcgtttaacgacgaaaagaaaagagcgagtggagttattttgccctctcaactttattacaaaataatattttgttttatgcctccacaaaattaatatgttttatttacgctagctcttatacatttcaatttttatactcataaaattcatattttttttagtttatcatcatgtttttcttttattatttttattcctataaaattgatattttttttataattcttttaccaattttttttttttgcccccattagaatatgtggctggcgtagtgcataacaacaccatttagaggtagcgctttgtgatattggttaataatactctataaaaattattatagtaaattatataaatctcgatatatacttaattatactgattatatataatattatatcttgaagaatattaaacacaaatactgatatctataaaatactgtatttagggtagtttgtttataattttcacggcttcttgtattgaaaatataataaaatgttggcacaataaaattacaaa

SEQ ID NO: 321205 - DNA, 1129 bp, Cannabis indica
cctccatgtattgatccataattagaattagttaattaccgttttacctttctaattacctctttatcctttagtactattaattcactagtgaaagtataatttagatccaatccaaatttgtgcatcaagttctcagctatttaccaagttttttggaaaccgattataataaaagattaagctaaataaaatatgattaggatgaaaatgagacacatttttttatgtcgttgggacattaatgagccttagtctatgaggtaattttttaagctctttgatattgagtttttacagttctttaatgtattttctagtcatgaaccaagaaagtcgaaccctttgcatgaaatttatagtgccatatttataggcacacatgcttaataggccaaacagatttggatcctattagggtttgtacagtaaatcaaactaatggggtaaaaatacataatttaatatgataatttgagatgttgggcttggtaggagaggcctaattctgaagagtagccttctgtacgatgtagtgctattgatagtgacatgttgaggcgtgtgccattgttgggaaaaaggaatctcagagcagtgggtgttcctctaaaaggttgatttccttcttgatgcgtgcctttgtaaggtctggcagaggggacaagtcgctagatttcttaggattgtgttagagatgtggcatgtaagccacctctgggatggtctatgatcccgaatgcaatcttgatttccattctcggaagacccctgagggcatccttcttagttccttgcatttgtcttgtgaaattattagagttgaacctctctttccaggacctcgagggatccgggaggtagagtcacgtttgtatgaactgtttggtttggtatccacctgggagtagggccttgtccatctatctgggccaattgatgggcccaaggcttaatgggcctcctaataagccatgtgtcatccgtctagaatctcaggtaacatttatcccaagctttcatctgcttgagagctgtggaggcttgccactttgatctggattatgaatcctgtttgggtctatcagtccagctaatcttttgatgttgttgttggattttgtgccct

SEQ ID NO: 321206 - DNA, 1730 bp, Cannabis indica
aaaagtcagggccggccctgcccctcggggtgaggttcgcaaaccaactatacttaacaacacctacagaacatgcttccattgaagtcacgtccctctggataagtccctctagaaacttcacacgccaactccatggcacaccatcctcttaatggtaattgaccaagacactcttatcacaggataaaatttgatgcgtccctcttggacaaggcttgctggccaactgcaaggaatacaacaccaagtgcactcttgcaagcaatctcttctcgaagtacttagtattggccctctggtttactacacacccaggacttcatggaaaaggcccctctaacccaatgcataagtgctcctctgagcttctttcatatggtcaataatatagcaaataccgaaaaccaagaattttccctctagaatctgcttgtgtcggctctctaacactatgtcacaagtccatctcccaaaatcaaccctccatcctctgatgactcgctaaattttgacaaacctgataacacgaagtcttactcttaagaattgatgtcatcccaatccgctatctcccatcggcatatgctctctgaaccattcgacttacagtgtcccataaaacatcagtgttctcataaacacaaagcacacccataacatgctgcaaactagctcagtcttcatcttagtctacgcccttgcatattatctatctgtagcttgcagcaatcatgcaagttttcacactgaacaacccatctgttgtaatgttccctctagattcacacacgaaaactgaacaagtaccctgattctttaaacatatgaactagtgggttcccccacttcaactcgggaagaaattctctcttataggaatacctctcaaggaatagctcgaaagctaattgcatactcgcatacggtccctccattccaaatgtcactttgatgaagatgtgaactaatgccttagtcattctgattctttgccccttgacatgtctatgttgccttactaccgtagttctgctgactttcatcttaggccaacattatcctggtgttatcttagtacccgagtcttgctgaatttcaccctagacaactggcacagcctgcgtctagagttttcttaactttaaatactgaaaaacaatccatctccatgatactcatcttaatgcttgtaatgaatacctagttgttgggttttgtgccctaaataaaactcatttcaatataatcagatttactaattaataaagatcagaaatcattttatgttgcatggttcacatgattaatttcatgattatctttgatgtataaattctattaagtccagaacatatgtatttgtttatgattatagtgttgtcagcacagtggaatataatcatgattatatattcaaaaagtttaattccctgatttgtcatttcattggattcagactggcatgataatcagcgataggtatatctattcaattcaatatcacctagttgatcctgaatcaaatgatcttaatcctgacatgattaggttcaatctcaagagtgctattcgtgttctttaatttgttagctaagtctattttttggtcagggtgatacgtacattttgggaacatgatagtacaattgagtggaagcgttaaacatagatatggaatctatagcttctatatgtatttagaagtgaaatgatgattccttcgagct

SEQ ID NO: 321207 - DNA, 694 bp, Cannabis indica
ttaattaatttaattacaaggataaaatacacaagttgagcaaaacagaaagaatttgaggcaagtggttgtgtgtgtacacacataaataagaaaagaatcattagggattttatatagaaggcatgtgattaagagaattgtcacccaaatactctctctccgtatccgtatctcattatatgtgtacatacacacaacatacaagtcccataagcacacaacaattaattagatcccttcctttaaaagctttcaagtagagacccctacgattggaacatccataaaaaggaccaattctactcctttgaccaacacatttgaaaaattgagtttttttaaatgtgaataattattacaaaaatatattatatataaaactgtatacgtctgcagcagcagaacgtaattctgttactgtagaaatcaattttacagagacaaaccagagcaggcaaaatataaaataatagcagaaaattaaatcacttgacacaagagatttgtacgtagcatcagtgttctttcgaacactcctagtccacgggattacgcccagagaaaaaaaatcaattaataaagtatcaacaactacaaagacaattgatttaaacaagtttagactccttctaaattattgtcgcagtctttgtaatgcactttatgaatctgatctcagaaacaccttcaa

SEQ ID NO: 321208 - DNA, 529 bp, Cannabis indica
ttaactattttttaatatcaaccatctatttttcatataggaatgcctcgaatagtaatctatgttcagtacgatggagagtggaaggatgaacaagtggtcgccaaaaaataagaaagttatatctataattatcgatgaatcgagcactgcatttgagatgttattggataaattgtataagaagattggagcccatcaaaacgacatcgaattaaaagtaagttacttacccgtaacacttggaggaaacatgccgccacttattttacgaggggatgaatgtcttgcagcttatcttttggattgtgaagagaacaatcgcagatctacactacgtgtggagcttatatgaagtaagacataggtgaaaaagatattgaaagttgcacaaaagaaattgaacaacccttagtagataactactttgataatgaattctactttgaagaaaatatttgttatattgcttctgcaccaggtgaaagtggtgttaatctcgattgtgaatttttggatcatcttaaca

SEQ ID NO: 321209 - DNA, 907 bp, Cannabis indica
tttaaaaaaaacacacattttgaggtgacaaatagcatataaggggaaaaaattacactgattctagtatatagtatgaaaattacacagtaaaaaaatatgcgcctaacagtaaaacttttttataaaagaaacagtaccccatataaatagaaaaaattacattgtatacctactttacttcacttattttaattctttacctttgtttctatattattttagatatacccactttatagatgatgcccccatcatactccttaaactaatataaattatgtgctagatttaagtagagggtaaaggtatattgagcaacccattcacaaaagtagatatatcttgataaaatataatatgagtatatttttaattaatgaatataaaaaagaagtattcctccacttatctcatataaataccgtaaaggaatgtggttaagatcatgttcatcggagactcgggcaatggaaaatccaacattctttcgaggtataccagaaacgagttttgttggaatataaatctatcatcagctttgagtttgctactagaactctccaagtagaaggaaacacgtttaaggcagaaatatgggatacaataggtcttcttgcctgtacgacttagttggacagggatagcgtggggtggactagtcggaggaggaggttgtgcaggattggctatcggatggacacttattgagggtgacatttatatactactttttaattattatttaattttattttatttgttgaagaggtggttagtgaaaatgttcttgaacagttagtttaggaaacaggactgtaatgaaatgaaatgcttgatcaatcaaactgatcaagtgttctgatatatatatagcagagttttacaacctaaaaaccaggagaaa

SEQ ID NO: 321210 - DNA, 2601 bp, Cannabis indica
tctttaacaaactcatatgttctggacttaaaaagaattcatacattatatacatatattcatgaaataaatcatgtgaaccatgcaatataaaatgttatttctgatctttattaataagtaaatctgattatattgaaatgagttttatttagggcacaaaacccaacatatgcaaccttagtctcatatgtggttccattagatactctgtatgaaacttaatggtgagtctttatagttgaatgttcaacttatgactcaacattcatccaagttgttacacttgagacttgtactttgttgatatccagcttgtacactaacatggtttggcaagtacccttaggtacaatttcctagagttttgtctatggcttggaacttgtaaggaactctaccttaggcgttgtttggtatgtggtccctataggaactatgttcgattcttttctagctatacggttcttgcagggccttggcctcatgcatgtgaaccgatttcatattcggcctcaaggctttcatgttcttgcttttggcctataggccctctattttctagcactcctaccatttagccttaaagccttttatcatggacatatgatcgttttggctatcttcttatgagcttgacatgtaagtatccgaatttacttttctttatgtcaagccaaagtatgcatgtacttgacttagaggcaggtttagttgcttattccatgtgtaaaaatttctctacataagttttacgtgctagtttgatgcattgtacagtgtaggtgctcccaagtgaacacgcagacttacagtctcttggtcacttacaattcaacaagtttcatagaccttacataggaattttcttggagttctacctagtgtatgcatgtcgaactggcaaagaataactttaagaagttatcttttttagtaagtagtttagacacagttggtcttatgtgtaacaaaagcttacttttaaaatcacgtagtggctacccctgcgcggcttaccgcgcaacgaccatcactgaagagtgatgggaggccatcctgaaagcaatgggtactagctcttttatgggtccctacacagtgaaacattagaggaactaattgacaagttggctggtgagattacttcctgagatgttccctaatttagtatttaggtagaagtaccaactccaagttctcgttgtacttgccagacctgtatgcacctttactgttatcttgtaacatggtgcggaccttttcagtttggtccgaacatgcttgttgtagggtctttgatgtcaagtaatatccttcagggagtaaatctcttacgaagaattcttttctcgatttgtttgttgaagggcctagtaactctttgtgggcaaacatgctgctttgagttggcttggttgtcaaggcacaactagctagtcgagcgagtgcatcgactgtcgtgtcgtctttgggggacttacctcttagtacagcctttgagttgacttaacaagtcttgatattagctcaagtaggccatcatcttattgtattgagctgtatattcacctaggacataacctacgactagttgagagtcgtggtgtatgtctaggtggtcagcccgcgcttcgtgtgctagcctgaagccaatatttggagcttcatgttcagccccgttgttagaagctttgaaactgaccttgttgcctcgtgcatccactgccgccaaggtggtcaatgcacctcttgggttgagttgtcttgctctttctcacttcttctttggctcctacttttctcctacaccttgagagatttgaggagacatgcttatatgattatccatgaagttggcaagaggttggcctttgttggccatgcttggttgacaggtggccttatattgactgagtcccagtggttcacttgagtgatgaacctaatgcttcagttcttgtaaagcctaccgcaaaggttgatcagtgtacacctttatagggtgtgcctggaagtatggccttagtttctggaagccaaaagcaagttgtaggtcaacatttccatgagtgggtactgacttttagcattgattagtctcctagtgatgtagtatacagggtgttgtacaccgccttcttctcttgtgacgacatcactcacaacatgttttgtgattgttaggcacacacctagcccttcattgtctaggggtttaggaaacataggtggttgagccaattgtttcttcaacttctggaatgcggtttcacataccttcgtccactcaaatttttcgttacctctgagaatgttgacgaagggtacacattttttcagtagacttggacacaaatttgcttcgtacagcaattcgtcctgtttggctttgtacttccttgatggttatgggcgacttcatgtccaaaagggcttggatcttgtctgagtttgctctgaaagaacatttgagggggttgagctttatgttgtagctttggggaattttgaagcatttgtctaggtcctccatatgcccttaacctttttggacttgcaaagcatgtcgtccacatacacctccatgttgcggtcgat

SEQ ID NO: 321211 - DNA, 1387 bp, Cannabis indica
taacgtattataaattataatttagagaaaaaaaaagtaaaaaagagataagaattttcttagtatcttattctaatgggtgatctcctatttatacatatatgatagtcgaaaattaggagactaaaaaaaagaatattaattacaattaatggtaataaataaaaaatttaaacatccatgtctctactaatattaataacattcactatattttcacctaaatttgaatctagaacttgtggtgtggggacaagggggtgaccaaaacacttataaaaggaacgtaaatgttataggttgatttttttttaattttattcatatcttacatttaaaaatttattcatattccataaaagaactgaatagtagaattgaaaattttatacctccaatctttagtattctgaagaaaaaaaacccgtagtttaaaagtggagaaacaccttcaacaaaagatccaagaaacaaatttagcccaattgaagagttttttatcattattattcattcttattttttctcttctattttctatattattaataatattttgagacgatgattctcacagtttttaaatattgttatatggatatccaactataattttgattaattttgtgatttgaattaatgcaaagtttattttaattcaatgttacttttgtgttctattctgtttaaataaatttaaaattgtgatttatatattattttacatctctcgaataggtggtggtagtagctgtagttgcacttgtctcacccttcatttttttagtagattttaattacatgcataacatttgcctaattattgagactctatcttagagtgtgtcttattctgagtaaggagagattttgaaactttttttcccatagctatactaagaatgtgatgtcatttttacatttagattacaaattacatgttgggttcataattaaactctctgcacatttctgttatgatattgagcatgcatcagtgatcttaattttttgttcttctcgaagtgtaacgccctaaacaattaggcacgctacccaaaagtacttataaaaccctaatcccctaatttggattactaatcaaaatagcgcagaatttaaacttttatattgaacagaatgaaaataaaacttgtaataaatttaaacttttaaacagttgggatcccaaaaatatttagatactttattagaagtctttttctttcagccggcctaagctgcaaaatagagtttcaaaatacatcactggtagacccttaacccgcttggtcagatatggctcggacatgtacattcttcacccagctcctgaactcatggttgatcagctaatgccttaccctttcctgcacagtagagcacc

SEQ ID NO: 321212 - DNA, 1259 bp, Cannabis indica
ataaaattaaatattatatcatcacaaaaaccgcatacatatttaaacacataaatatgtaaaaataataataatattctcagttaaaaaattataaaaataccctttctgagttagcggatattacaagcccaatccgtcgttgtgcctaaccactttgcctgagaagaaaccacaccagaacccaaaaaaaattgaagcgatttggagatataaaaacccttttcaacagtcacatattctcaaagtaatgggaaaattgaagtagtcaataaaataatcaagcacagcattaaaggaaacctcgaggagcaaaaagccatctagctagaggaattaccacaggtattgtggtcctacaataccacccctcaattaacaactggtgaaattcccttctcactattttatgagtgcgaagccatggtcccaattaaggtaggagcgagttccctttgacgtgatgttttcaacgttgaagataatgaaaatagttaacttctccaattatatttattggaagaagggcacaatcaagcccagctaaagaacacaacctatcaacaatgcacaacatgttatttcaactctaaagtaaaggaaagaagtctgggagtaagaaattttatattatgaaaaagtcagtcataatatctgcaactcagtgcatggggttttcagcgattactgggagggcccatacctcatcgctaaaaaataggtaacaaaacataccgattctttgatcttaacgactcagtctttgatagagcttggaatggtgagcacttgaagttctattatcagtagtaatcacatgtatatacttagctgatttatattgtaaaaaattacctaagtataggaagtatacatgtactaccactaccgtaaataaaaattgcactactgattaatcaacgaattgcacattattttgattggcaaagcttcctacagtgcttagaacctcaagccgaccataaatcaccaaataatacggcccaacatcgttgtcttctttgttgccggtgtaccattaaaaatagagttcaataatggcgattttcgttcagggccttaaagcttcaattctccacgtcaaaacagatccttggggtcctataagcttaaacacaatgttctttaaattggttcaaacacgtttaaattcgatattgctcaagaacatgcttgaatgtacatgaaaatagtggattttgaaacctctgctcttagcccgtttggtcatgactatt

SEQ ID NO: 321213 - DNA, 672 bp, Cannabis indica
aatattgattaagaaataaaaaaaaactatttggatattttgagtaaataagaattggaggagttcattacccttagttgatgaatttggcacaagcgtaatacttttgttcatgaccacaaacttctagctgatgatatggtcagttcttgggtgttaattacctttggagatattaggaggctaacaggggtgggctttcgtcccatgatactcttcctgcacaagggacgataggtatgtccaccgaaatagatcttgttttaggtgaggtgaacttatttgtggatgctgggattcatattgatgattgcaaaatggggatgggggttgtggcgtctagtcctaataagcatgttttcttctccaatgcatttttgagtgtggggtctcttgagcctcacatggcggaggccaaggatttgcttcacagtctctccctttgcctgcaactgggttatacgtctatcactgctttctcgaattgcttgcatttagttcttgtggttaatagtcatggcactcatttcaataagttatgtattatacttgttatcccaattttcgcactctgatgtggcatcacatgatggtgacacgtggaataaacttttagaatctgcttggaaagtacagtccgaacaggatacctcataggcatgcccaaagcaa

SEQ ID NO: 321214 - DNA, 3203 bp, Cannabis indica
ttctctcgagtcttcttttcttttagtgttcaaaccacttggattttcagcctttgtcgagacggtacttgccgtggcagtgctaggtttgtttcccgagccagtcttcagcaacttcatctcatttccttcttcttctttgcgcacaagaacttgcgctcttttgttgaattcattattatttctcactgggcgactgtaagtcatcccatagctcgcccccagctattgagaggtcagccgcgatccctgcttgaagggcagtaagctgaatactgtcattcaagtttctaactttactagcggtagtactaaagcaactcaagtaagccttaagtgactcgcctggctactgctttatgttagttagggatgatgcttcgggtcgcctatctctagctgcctaaaattgcttcttaaaatccttggacagttgttcctaagaaattatcgagtgatgagtgattttatcgaaccagttactcactgctccagttaacgaagttggaaataaaatgcatcacaaattatttgagatgttactagcttgcattatggtattaaagttattgagatgagcaaatgggtttgaagtcccatcatactgcgagacgtgagggtttttgaatccctgggggaatttagagttcataatatcgggatggaaaggctcgggctcatcgtccgagtcataaccaggtaacttcccgtatttcccatcttggtatctcctgaacttatcctccaactcaatgatttgaaattggattggatcctcttactgtcagttaccattaagctgttgacacaagtcagatgcattctgatttagatgctttcgtaaatcaagttgccctctatgcaaatgctcacaaagatctagttgtcttcgttcataatgtctcacaaaccttgtatttgagtaactcttagattgataacttctcgtattgctcaaactctcttgatcaacataacaccaaggtctgcctctgtaacaccctaacaattttaggcatgttaacgtaatttttaactaactgtgcagctcgttgctaaccaatgagtttattgaaaattgtgagtaattaaaattttgcttaattaattgtaaacattagaataatacacttatataaaacaaggatcccgtttacaaaagtttcactgtgcatatacaaaagattgtcgcctagcgactacaaaataagccctgatgtcccaaagaccgtacgctccatgcctaactgcctcgacatgtacaattttcatctgctcgttctcacggctgctccgccttagccttgtccttacctacatatggaaatagcaactgtgagtcaacaaactcagtaagaaaagcataaacaataacaaaataataaccttgattataatcaggcgcccatacacccaaccataatcctatccccatgtcccacacggtgctgagtctaaaacgttcatacgataataccatcgaccataatatcaacctatactcaatatgctagtaatactctagccatactgatgtgatagaatcgatcggtatttgtgccaaacatacatttatcaatatccagtgtaactctttgtatatcaatactgctatcaatgtactctaacatgcataaataaaatgtacgtcaaacatctaaatacatatgcatgacattatactaatcttacctcatttccgaattcaggtgtgctagccaacctgagtggaacaactgcttgacgaattacagacccctaaatcacatcattcataacacgggtaagtgacacgctaaatcatatccagggacttaggttttgcaccaaaagttttcctactgaaagttaacatggcaagtttgggaacacgaatcgacaacacgaaaagttcgggaacccagctgctaatccggttaaccggttttgcaccaggtaacccaaattttttgaaaccccaaccaaatcgaatccaaacctcaccaaaccttccagacgtgcttaatctaccttaataagcatatcccaagcaacagaacaacataacatgctcaaaatcaaaattcaccattaaagagctaagtttaagttcttaaactcaaagctttctcaaacaacacaacaaccaccaaaaccagcttaaatcaacataaataaccataatctaacttcagaaaacatccacaaacaacaacagcaactacagaaccctaaaatctaatttcatgcataaatccttaacttaaagctcaagaattaaaaaagggaaatgctaacgaactttaccttggattaatacacttggaacttgctgggatttcttgaattaagcagtgaaacaatcaaacccttgttgggttctatagggttcaaaagagagagagctctttttctaattttgattttgtaaaaaaaaaatgaataaaaatatattttatttagttaatacaagccattaaaatcaaattactaatctattaaactatcactaaaagacgaaaatcccaaaaaggcaaaaagaccataatgcccttgcctacactaaaagtcatgaaatcacttaggggtaaattgggaaaatctaaaatctcgactattcccgacattcccaacgtctaaatattgcctcgctatactaaaaattctaagacgtgattctaatagtcaaacgtatgaaattccatatgtgacatataaaattccttttgagttcaaataaaaatctctgcaaattgacaattcataactaacatgcaagtttcataattaaaccctatttatctgataattttaaattaaagttaagcactctttacaattatccccccttaaaaggatttcgtccccgaaatctaacctaaacaattttagatactgagccctcatttcgaactctaactcccaggtggcttcctccaccttactatttctccagagtacttttaccaaagctattgtcttgttccgaagaaccttatcttttctgtctaagatctgtactggctgctctttgtatgataagtctgattgtagctcaagattttcataactccacacatgagcaggatctgaaatgtacttccgtaatacagaaacatgaaatacgttgtgaactgctaaaagagctggaggcgaagctatacagtatgccacttgtccaatcttctcgagaatctcaaaaggtcctgtaaacctagggcata

SEQ ID NO: 321215 - DNA, 537 bp, Cannabis indica
ataaataatacgattaattattactctaaaaacccaaaacaaaactcaaactcattattattcccaaaccagcacacacaaccagcccaaacccatccgaatgacccgaacccgaattcgcattagcgctgggagcaggtgccggagcatccacgttagacggattcacagtggccggagcaacagcgggtggctggggcactactgagggtgatggtgatggtaaggcaggagcgggagctggttgtggctgtggtttcttgtcgggccttacagccataaccacaacgatgagtttctgacccttctgacagttctgggcgttaccgcttatgaagaaaaagggacccgaccggtcgaacgtgaagaccgaaccgccgtcagataacgacagtaacggcgtagctgtgttgcatgtgttataatcgtctggctttaccaccaaaacggagtctgatccttgtttgtacttgaaaactgtatcaaaaacaataaataaaaaacacaactaatattatatatatgtatagatatata

SEQ ID NO: 321216 - DNA, 694 bp, Cannabis indica
tacaggaagttatggccagaaataggaggggaaatttgtacagttgtgttacaattctttgaaaatggtaagtctcatgctggccttcataaaactacagtttctttagtgccaaaaatagactgtccttctcaagcaatagactatcgtccaattgcttgttgtaccaccatttataagggtatttctaagcttctacgtatgcggttagctactgtgttgtcgtggcttgtgaccaaaatcaaggggctttcattaaaggtcattccattgctcataatataatgattctccaggatcttatcaaaaactatggaaggaaatctatcacccctcgttgtgctatcaaagtttacttgagtaaagcttatgatatagttgattggaggttcttggaggatattttggtagctctttgatttccaactcagttcattggctggatcatgaactgtgtgagaagcacaagctatcttttgatgcttaatggaaggattcaaggaaagttttcaggaaagaaaggtcttcgccaaggtgatacaatatcacctctcctttttgttctggttatggagtacctcgccagaagacttcaccatgcgtcattagatagcaagtttagctatcacttgatgtgtagaagccttcagataatctctctttattttgcagatgatcttattatcttttgtaa

SEQ ID NO: 321217 - DNA, 656 bp, Cannabis indica
ttctaagaattctgggattgtaaaatctagatcaaattaggtcattcttatgaacatgtgcaatcctaatttttgaaaaattaatataacctaacctatgaatctatgaatctataacctaaatcttttccttaatcctaaattatccacacaaataaaataaaaattacctaaaaaaataaccaaacaaagcagataaaggagacaataaatcataagacaaaatttataaataccgaaatgaaaagtataaggaagaaggggatgagccactcactattttgatgaagatttttgggcaaaaaaaatttcgcgattgagattttgatgattgaaactatgggttctgagagtctctgaggttgaagatgaagtttgatgaaactcgcaagaaataagtcaatgacaatgcgagcatgcaagttgaaaggggaagtaatcgtgatttgcagaagaaatttgaaggtctgaaatgcgaaaaatggcgaaatgaattgatactattgatttttataccttgttataggccacagttagatcaaaagaaatttgatctaacggatgggaacattgcaaaagagaacagtcagagcatttaatcctaattcaaaatctgaaaagtgagaattgggaatgctaaaattggataaactagg

SEQ ID NO: 321218 - DNA, 795 bp, Cannabis indica
cttttctttttttcttttttgttttaaatagaaatatcatgcacttaattgtactttgtgactttatttgatattgactttctaatagttaggagagaactaaactaaaaaataaagggcttacccaatttgcatttatatctaaaagtgaagttaccaactttatactaataaattgcataaggtgttagagatgtatagattctatattttctcatgcaatcttaattataaatagtaaaaaagtgtttgtttatgttttgttaagtgttgtgctaattatactacttattatattgtaatggcatcttattattgttcatggcatttgttgagtgtgaacaatattttctttttattgtccaaaagatataatgttagtttaatctttattaaaaaaaaaattattcattcaaaaatgttatattatactatcattataagcttgaaaaaggctaccattgctttccatcaatcttcattggagacttttgaattgaaaaattgtgatcaaccacatctaatagttaacagtcaatatcaatcatcaatatatcagttcaattcaatatattatatataagaaagtaagtttatgtttcttataattttttctttctatttcttttatttgtttaacatattttcttattttatttataaatcaaactacccatataactaaaagtcctatattatttagaaattgtttaaatttaactcatataggttataaataatattcttactacattacttttctttatctaaaaaatattattttttatgagtgat

SEQ ID NO: 321219 - DNA, 2501 bp, Cannabis indica
acgtgtcgtacccccagtgatctgtcacgtaaaaaaaactatgtgcattcaagaatcatgtcaaattttatgaggcagacttcggcttccgcgagagaaggctacaattggataaaaattcaagcgatgacttcactttaaaagaccaaagggtgaaacatcacttggcatgtcatagcagatcacaagtgaaggctacagacgcttcatttgggaacccaagaaggggtggagacgatacttgccgtccaactagacatacattgtctgaccagacgtagccaataccatccctgtgggccgtccaagtaccggtgcctttggcattcctattgctgcttccgctgtaactgtttccaagcataccaaccgaacaccatccagggataggatcatggctcgcccaaaatagactatgcagagaattactacaactgttcctcacgtggcccagcttgccacgatgccaagcgctgaacaggcctggcctcctgctgaggtggaggatagtgaggggaacgcacaattctaagagatagaggatcagggaaaggtccatcttgatagtccatctgaagccgatgtagaaggagttgctcagccattgtggttcgaaggctataatgaagtaggggaaccggtgtttgaggtcggtgacgttctgatagagggtgatgattacgtcactgaggagtacgttgaggcagttcttcaaagaaggtagggtgtcttaggagctcgttgggtgtctcttccatcaatcgtaacccagacccagttgaggagttttgagaaagatggatacctgggcggtgttgagtgcttcttcccttctcaaaatcaccaggaaaccagcccaagacagggatactgtgcctagtcgggtgcccatactaagcagggtgcaatgctgcccttgcttctgtacttcaagaggattgcagactaataacatctctgcccgacccagttcacaccaaagggcatcaaatacttatccaccctattcatcttctatgcttcccaagaatggggtgagccatctccacacaacaccaacgagcttttcgacctgaagtcaactcccaagcagagcagatcggggtacttctacttctcccaatcggatgagaaatggctatagggtactatggactatgatgtcagaaaaataggatatttttgtggacgagtactacttcatgcagagcatggataccgcccacactcgatttcagtagattccctcgtactgtcatcctcctttcacattgggagttaggttgagggcacaaaccattctccaactgccagagggcgcttggaatattactttgattaccactgaggccaactttgtgaagtacaagcttttccgaaaggattttgtgccaaagcccatgaaggagaagaagaagaagtccaagccaaactgagttgatgatgccgagtaggacaaagagctcattccactcaagcgtgaggctaagtcgaagggaggtgtcggggccaagcattatgctcaacaatattcagaggaagagcagtatgctcaagaatattctgagcaggataggtcgagaaagaagaacaataaagctcccctgaccgagcaggcaccaatagaatattctatcaggattagagaacctggtacgctggctcggccatctacccttgtagaaggaaaaggaaaagtcatctttgtagagcaagaagagtcgtcagatgatgatgctccttctgtaattgtttgcgaaaatgccccttcccgcatgcagggtactttagcttgcatttacttctctcattttatgcttttcacatattttatgtctgcttaaaattaccttgctttatttgtgcagaaatgtctcagaagatgatccaagctttaaagaagagagtgggagataactcgggcctgtcccctccggccaaaaagtctaaagggggcgagactccgtccaaggagaaggtgccagttgatgagctcattggcctactcaggtaattatcttttttttgcttttaatttcattctcttttatgtagctcaaactttaacatgtttgtcgtgcaattaattgttaagatggctttttcctattcttgagccaaatcagctgctgcgaagaaccttgccaccaccaacacactgcagagggaggtgcatgtggccagaaaggaaatggaggacatgcagagcaagctcggggaagtgaggaatgagctcggggaggtgaacaagaagcttcttgctgctaacaccaaggttgaggagctgaccaaagagctgcaagatatgccttcaaccgagcagctagaggctaataatgtttctttgtccaaggaggtcaataatctcaaagatgagagggagagtctctagacttgagaaggaggtcagagataagttggaacgccctaaataattgggcacgctacccaaaatacttataaagccctaatcccctaaccgggattactaattaaaatag

SEQ ID NO: 321220 - DNA, 1600 bp, Cannabis indica
taaattagaaataagaatattacataaactaacctaaacaatttgacttttgatcaagttggatttacagaaggcctatgacaccattgaatgagatttcataaaagagatgctatatggatttcaattcccacaaaattcatcaacttgataatgacttgtgttaggactcctcgattctctttgatgataaacggatcattaaatggtttttttgaccccaagcgaagtttgaggcagggagatccaatgtcgccgcttttatttgttttgggaatggaatacctttctcgaatcatgatgaggattgggaaaaagtaagattttatatttcatgaaagatgttggggtcttgagttgaatcacttaagtttcgctgatgatgttcaattattttgcaatggagacttcaagagcatatattacatgttccagggattgaagctcttctctcaaacatcaggcttgtttcctaacccttctaaatcagctatttattgtagcaacatgactgacgcagatgtacaaagaatcctggatgcatcaggtttccaaaagtatgacatgcaattcaagtatttgggcgtgcctatctgtccaaagagaatctcctcagcaaattgcaaacttttggtggagaagatgatggctcggatcaaaacttggagctcgagaaatcttttctttgctaggcgtgtagtactcatcaacttagttctcatggccatacactcttattggtgccaagtgctgctactgccaaagaaaattgtaagtgaaattgaatccatttgccgtagttttttatggaatggtcaatacacattagtaggtatttccgtggttgcttgggcctcgatttgtcaaaaaagctcaggtggactaggattccagtgtatctcggactggaacaaacaactttattcaaatatgggctattgctaagaaggaagataacctatgggttaaatgggttcataatgtctacattaaggatgaggattggtggacctataaacctttagctcaagcaagttggtattggagaaagttggtgatggttaaagatcaaatgaagagtttgggctctttaaacaaggtacaaggcaattacttagtggctgttggctatagagaaatacatacacagttggctagagtggattgggacaagtttgtctggaactgttttaatattcctaagcatagcttcattgtatggttggcgatgcttgggaaaatgaagacgaaggaaagattgaagagatttggggtaatcgaaatagatgattgcctgttgtgtaactgtggcaacgagactatcgaacatcttttcttttgctgtcagttctcgaaggattatttgatacaaatcaaacattggctgcaatggaagacctcgacagcaactctgaaaaatataagcaagtggttaactaaggctagatgcaacaacttcaaaaagaaagtatatgctgctaccatagcagcgttgatctatttgatttggagcaaccaaaataatgtttttttggaatgaggagatagaaaattgtgatagaattgtctgcaaagttaaagctgtcattaaaaattgaat

SEQ ID NO: 321221 - DNA, 2982 bp, Cannabis indica
aaatcattttgaaagtaaggttgtattgtatagtagaaaaagtatgcagctatctgtcctcttacacaaaatttactccactaccatggccctagcttatcatctctattatactattccttagtgtttcagttacagatctaaaattcttgaacagaagtaggtataaagcaaagaaccaaaacatgtattagcatctatacaacatgtggtatatccaaatcagaaactaatttgcatgtttattgactactttccaccaatcatatattcatatatctgatttttgatgaacaaaaagtacaaacacactttcaacaaaattcccaattactaaaattgtcaaagaataaatgaaaagtgaagaacaaatatatatcatcatggtcactagattagaactactaaaggaaaatataattgaactggaccatttatgataaattttatataattctctctagtctaaatggggtagaactaggaacaaaacaaaagagaaaaatcaagagagagggaataaattgtatccagtaagttaatcctttaaaatcagaaaaggccatgctaaaaatggaaccgcgaaaacaaagaagctaccctaaaagacaagctatttaattaaccgaagctaccattttcccaaaaaaccatttataatattaatagagagccacgaaaaatataaatttaataaactaccctcagtataaaataaaacaatcaattaaatacttacagtttcaaaaaattaaattgtagaaagaattggtaatataatccttccatgtatgagatctttttaagttttaagtcttaataccagtataccattcatgggcaaagtataattgaatgaattcctacatcctaccacagtataaaataagaaaaataaaacttagtagaatgaaattaatgagaatacctgtccggaagctttggaatataaattaaatagattcatcatagtataacaagcattaggagttgcccgacaaaaaagaatactgtcatctgcaaagaaaagatggaaaattgatggagcagttcgagcgactttatatccaaaaatttggtgtgtattttctgcatgacataaaagagaggagaaaccttccgcacaaaaaagaaaaagatatggtgaaagaggatctccttggcgtaaacctcgagtcggaaccaccttccctttgacttcaccatttatattaaaagagtagtgaaccgttcgaacacacttcataagtagactaacccatggagttgcaaagccgagttgaagcataattgattctagaaaattccactccactctatcataagctttactcatgtccaatttcatcaccgaataacatcgccttccactagtaacgcctcgtagattatgtaataactcataagctaccattgcattatctgtaatgcggcgacctccaatgaaagcactttgagaagagtgtacgatagagtctaaccatggttgcaatcgacgaaccaaaactgtagatacaattttgtacagaacattgcacaaactaatcggtctgaaatctttcatattgttggctgctttagttttagggactagagtgacaatcgtagaattaatagaagacaaatctccttgcccattcaaacattctaaaactgctttaataactacatccccaacatcattccaatgattttggtagaacattccattcataccatcttcgccaggacttttatcggaaggcatagaaaataccgcttctttcacttcattctcagtaaatggaagtaaaaatgaattattcatctctggagtgactcgacactgcactaccgaaaggacagcctcaatttctacttcagaaggataagaggacataaaaagaaaggtgtagtaactttctattattccttggatgtccattggatttgtacaccaaattccttctgaattaaaaagccctaaaaaacagcacaggaaaatagtcaatcacaaaattcccatgatttatcataattttgaaattcttttttgacaaaatgataataaaacataaacattaagtaccatactaaaagaattagaaaagagaggaatatatctttaaaatattggggttgctaatgcaaaaaatctaatgttaatttcttataataatttccttacaaatatcatcccaatcaataaattggactatagtagtaatagtagaagaataccaaaaactagcattgaacagaaatttaataagcagtggttattacgtcctgaggaagcttgtatcataaatcccaaattaatctaatcaacatacatccagtatagtagaaaggacgtcctcagaaatcatacttaatacagtcggatgatagtggagccaaacttattatagaatatgtgaacattaagagaaaagatcgagacccactatcagagcaaatattaaggtatcataagaataaagtaacaaataagaagtcatacttaattaaatttaactatcctgaaagcactatatgaggtttaagttagaaattgtttctgtatgtatatatgaattgatagtgaataaatacaaataaagtatgaatataaactacctgacaattaaggatccaactgtgatccaatagaagtcattcctctcacgttattagtcatattgtttaaataaatatttcagggattaaaattaacacaatataaaattagcagattatcaaaatagctcacataaatattctgaaatctagtattagcatgacgatgaaaatattttgtgttttggtccccagcctttaaccattggactcttgatctttgttgccaaaagatctcttctttctctaggagactggataaactagattcaagttgagcaacttcctcccgattgtacaagttatgatccatattttgggctaaggataatttctgtttggtatttcggatctctttaggtagtgcaccatattttccta

SEQ ID NO: 321222 - DNA, 1928 bp, Cannabis indica
ccatagtctcaattgggctattcaacatcaactcccaattatgcaaattgagaccgatgcgcttatggtagcaaacgctttaaaagctcccttcaatccaaattcatctttttcagatttattagtggatgttaatagtctcttatccttttttcctaaaataattgtttcacatattaaacgtactccaaatgaagcggcacatagtcttgctaaatttgcattagggttggatgaggcttgttcttggttggagattattcctccgcctatctactctgttattgtaaacgattctctatttgtttaataataacaagtacttttcctcaaacttttttttttaaaaagactctttgtatgaagagagatatatatacttatatttgatatttttatttatttactttttatatggaaagagatatgtgaattcatttttatataaaataataaaaaatatcttttaagattataaattaatttaatttataggtaaaaaattactactatattataaaattattaatattttgtttattttttttaataatatgtattatccgcattttcgcaagcatgacacgtggaaattaatcaggaaaggtcgaggaatcattaagccgcccaagggcctcgctccgcgctccaggaggataaaggtcctaacctcggggaactgacctccgcaagagaagtcttctcgaatgcgagcaacgagagagatgtccgcgagctagcaactctctccattctagaagacgagacccattgctccaacaaaggatatggaccttccatcaagatgcactagttcggggtacgcctttgacccacggaagctctgcccacatatgtcaggctacaaatccaatggtgggccttttgcttgtacgatgtcagaggttgtctaccacaccacgctaccatgcagagcacgtgtgcccctgtgtactgtgctaaatgatccaacggctaggaagaaggataattcaaatgagattggccctggaatgacacgcgtcgaaatcactgccagtacagccagtataatctgacatcgataaagaccacatggaaaatatgtcacctaccaatccaacggcaggggttcatccctacaaaaatttatcaaaggtgaccgaggcgaggggatcggcctataaatacccatgaagactcacaaggcaggggacttcacttttccttcctttggctcttcaacttgaaactaaagactaattctttgtaaaacatcgtactgtaaccccataatcaactctagaatattcctactaagcttcctcttcttcaagaggaacacggtggattggagtaaaagtccattcttttttctatttgtattaacagtcgccggccaaagagcctaataaaatggactcgtggactaaggataattaatgcctgaaccacggaaaaatctctttcctataatcttgctatttacgccttcattattttccttggctctataaatatttggtttcaaaaaaactcgataaacattttggtgctttcattgagagctgaagaaagagatatgcatggtggctgccgacgtaagaccgtctggaagaaggctctgttggaatatattttaccaggatcttgatttactaccatgtatgttgtttaacatcctaaatatgaatttctgaaacaatgtaatttaaacacatataaagtttgagaaaccttacagtggttgcagtggaattaaatgactccttccatttagatctctaacccttgtatcctttctgtcgcagagtatcaccaagatctgggcctaaaactccttccttgtgtttggattcttcatagtcttacacactatgattgaggacttacttgatatgtgtgggcatgcactcaatcactaaggcttgaaattgtttgtgaagaga

SEQ ID NO: 321223 - DNA, 1479 bp, Cannabis indica
gtgcctcgcacgtagttttttgctagtatatatatataaatatgataatcttggacatatggtacaatgataactaatcacatacgtacatgatttagtaccataaagctaatatattatgggacgaggatttgttggctaaaagcttaatttagaaaattggtgatgggagttctatttggaaaattgaagaccactggattcctatgaataggtacccattttttttcttcttctcattctcttagtactaatcatgtatcctactttattactccttcccgggattgcgacttagagaaattcagaagatactttgacgaaaataccattgaggacattttgaatgtataattcaatgaattttctgttagttcagcctaccattttttcctctcgtctagagatattccttcttcttcatcttttaaaaactctaaatctttttggactaaactttggtcttctccttctcctcctaaagttaaatatttttttcgaagagttctttccaattttgtttctgttgctagctcttaatttcataaatcatggacgcactttaatttttgtaacttcaattgtgataataaatgtcatgatgttattgatttcattaataaagttgttgatacttttgatgagcgtgatttctcactatttttatgttttatctaagctacatggaaccaaaaaaatacagcagaatttattgagactaaaataatatttaatataaacttgatgatgaaatataattaatatacttttattaatatgcttaaatatacactatacaaatttatagagataaagattattaaccgtaaatgccatttttattggagattcgtattatccggttggtgctagatagataaaaaaaattaactgcactaggaaactttgttaattatcttcaaatgaataataattatatatgttataaattttggtgtaattttaaaataaaatgatttaaacatatttatagcgtttgatatttgctaaatttacttcaaaactaatctgggataaaaaccaacttctttttcattcataaaagaaaaatttgttaacaaattcaactttttccaaaaaaaaaaatgatttattttttgtgatgtacttggctggtctaatttatacttgcaaaattatagtaatgctcagcaggtcttccaaaaaaatatttgaaggatactaatcgggtttgtactatgtgtctgctttgttgaagcatgaagatcaacagtacactcatgcaattaattataaaataagaaaatataatcttagtgttgtggttcgggatggttaaaacaatattaaggcaggaatcatcaagcctacgtgtggtaatattccttctgttatagtgagatttctctcacctataaactcgagacaagactcctatttagaggacacgtatattcagatttccaatggaagctgaaatgtccatgagagactcct

SEQ ID NO: 321224 - DNA, 1486 bp, Cannabis indica
cctgaactcgaaccagactcagacaaggactcaaataccgacctaaaaccggaccaaactcagatccggaatcagaatcatactaggacagggactaggacccagacttgtgatcggaacaggacccaagcctaaacccaaacccaaacttggagtacaacttataccaggacttggacccagacccaaactcggatccagaccgggatcggatcctgggactcgaactggaaaccaaatcgtaacctatattgggatcgaaacccgagactcagacccgaaccctgacctagacctcgacttgaaccaagagtcggacccaaaccgagattcaaacttggactcaaacttagactagtactcaaaccccgacctagacccagacttgaaccccgacccagaatcataacgcgaaccgcaatcggaccagtaccaggaccaagaccaggaacaagacccgaacctaatcctagactagaaactagacagggacccaaactcagaccaaaactgggaccaacacttggaactgggacagggacttgggccccagaactgggattgggacccaagacccaagactcgactccaaactcggacacgaacctaagacccaactcgagatacaaattttgacctagggcttagactcgacccaaagtcgctgtctagatttgggacaaaaaccgagattcacacttagacttaggcccagaccaggacctggactcgaacccaaacccgaacccaaactcggacctgaacccgtaccccgtgacctaaaactgaaactgaaatcgttacgggaccaggatccaaactcagacacagacccagacgtgcacccaaatccaaactcggacctagacgcgaacccaaaactagacaagaatacgggaccaagacttggacctgggactgaaatcaaacccaaacgcaaactagaacctggaccgagaccttgacttggatcaagacctgggacacaggacccaaacccaaactgggaccctgacctagacccggacctaaacttagacctgaacccagatcgggacctcgacttagacccggactcatgattcgaacctaaacttgaacctagactcagaccgggacctaggatccagacctagatggggaacccggacccgggacctgggccccatgcccaaaccttgacaaatactgggaccaacatccgaacctagatgggggacctagacccgagaattgggccctgaaacatggaccaagacctgaatcttgatcctgggctcaagacccaggacctaacccgaaattcaagacctaggaccagactaccaggacccgatcccgaacccagacctagacccaaacctaggacctgaactaacaagaccgggactggagaacgagatctagattaggacctggggcttggacctgaccctgttaggtttatgccctaaataaaactccatttcaatgtaatctattttat

SEQ ID NO: 321225 - DNA, 918 bp, Cannabis indica
cccctcctcatagatcgcattgccataggtttgaaagttggtaaccacagttccacgtctaaattagctgtactgactcatactatgggatagccgagcagtacgggaccatgctggataggaaagtcatttagatgcgatctgggatttagaaccaattaattcctttgatatattcaggatcacgagatgaagggattttagtggatattatagtccttcctcttcatcttctcatgattatggtaaatcccttaggcaggagattatgccccctaattttccccttttacttttgttttgaatgaatgctaacacactgtattatctcgcaataatgaatgttgaggatctctttcaatcatctggtaaaagggaaagaagaggttgaccgtctcggagtctccaccaaatgtcaacatggagcctcttaaaaggcccaggaagacaactaccaataagaagcaagcctcctagactgttaatctcgagatccctgaaactgagactcatgctttgacccatcctccgcccccgcacataccgacgagcccatttccaaaacgaatcaagcttctacctcttcaagccagccctcgaaactctacctgtcgaggctaggagtactggctcagagtacactggggaatttggtgcagcttgttggcgtcattttaaggctttcctccccaacgaatgggacttaatcaacaatggggacttagaagagatgcttgaaaggagtgtcgcccatggcctctcgataaattcttatatccttatcttcttacttcctttttcaacatccttcaaaaatacttacacatttttgtttgttggttttcagcaaacttttatctccttcgttgcccaataacggggcatggaaaaaaggaagtacatggagagcgagattca

SEQ ID NO: 321226 - DNA, 2198 bp, Cannabis indica
attgtattccctaccaaaacactaccctcaatacaaaaactcaattacccttttatttaatatatgttagcacaccacactaatcctaggtcctaacattaccggccgcccgagtttcaccttttcctcaaggtgattgatgaaatcaccaatgagagccccatgctgtgtgcaacctctgtcaaagaaccaagctagtaatgtggtattttgtgatgtcctggatgcacaattagaatgttggagttgtatttggcgctctctatcgaaaagccaccgaaggattttgagcatttctttcttaaatatccagtgacatatatcaaaatgctcctctttatgaactccattaatcccataaattctgtacgaggaaggaagagagagaagaagttcatccaagtccaccattacttttcctttgtgaaaattaaatccatcccaacaagccgagaagaatgagagatatgggagaagaatttccaagagataggcagacccaagagaaccccttccattttcccaaaaagctgaaagtaatgaagaacaaaagaaaaaattcccatagaaaagagattggagcgctcgacccgaatcccacacatggaagaactaaacatatatggaacttacagattttaatgggttgacagaagggaaaacttgagaaagctgaagttgtttcttccccatggctagaatcatggtagctgctgctgacatgtgggacacccaaaagaaagtgttcgagtttgagctggatccttccatccatggtggacgttgatggtaagaggaggtacttggaaaggtgccctaccgtgacaagaagatgaagaggagataggaaagtgggccatcatattagattgtaccttacttgggtcccaaaggccagatccattaattggaaaaattaggttgagacatgtgtcataatgggctagatttagagtaaattgaaataagttaggccatttgtggtagagaggaatgccacgtgacctttcattaaatggcacatgcttttgtttgggtcttttatgtgaagaaatattgattaaatgggttgtgtcaggatcccattggacccgcccattgaagtaatgaattagggtaatggttttgcttaggtgggccaagtttggtgggtttgggtatgaacaaaaagttaagggattgggccttgtgtgatagggctttgagaagtttgtttcaccaaactcatctctcgcaggcaccatcttcaacatcatctcttctgcctgaaccgtggggtaccttgacaatttatgactcttcccattcgacgccggcggtggtaccgccgctagcgatattttctccaccgtcgccaacacctccgatgtcaactcctgtaaatatttcttggcccgcgacgttttcccttgctggttcttctctggcatcgtattcaatggcatttttttctttggccatttgtcttcttctccatcgaagatgatcttcacagcttcaaacatctcaggcgacgtcactgatggaggggaatcttctacttctatttcctttctgtatacccgctggacctcctcaaagagctccatcacggatgaacatgagcgaactggttcccaatcttctgagatctcctcatcttccttctgcgacagttcctcgtcaacaaaggatggctccgattaaacagaatctgcaaccgcatcaacctccgcctcattatcagttaaaagcttcgattgtataactgcctcatcaccatcaacatttgacacccactgtgtcacacttggaatcggtggtgctactccctgaactcgctggctgtcagttagagaaccagtgacgatttctctgaagctgtcgagtctagcaaaggctcgtttgtgttcacttattgccatttccatttcttcatcaccttcaacataagtgaggttcggcgcgatgcgactccggattccctcttggttgcgaacccatactgattgcatagcctggtggatccactcattgagatcgctgtcctccaatatagttgcaacacgacttcggagatcgcgggagagtcggagtaaccttacttgcccgagaattacttgatccaaaagagaaacaagatcctccagtgtattaaattgagattgataataataagactccgatttccattgctcctctaatttctcctccattct

SEQ ID NO: 321227 - DNA, 1326 bp, Cannabis indica
taagaaacaaaattagaatttttgaaattgaataatcgagtaaagagttatgcgcgttttagagccaaaaaaataggattttgccactgccctattttcggtctactactttctaaacggcacgtcgcttttcacaaatatagcagcctatttggaaaatggcagaccattttttctaggaacttttgaagaacaagctaacgattataaacggctagtttttatttaaactcggttttcattcaaaaattcaagtttgttgagcatttatttcatactcttaatatattcaagtgagtttaatgagctcctaattctaaatccatcaaacgcttttcacacactttgagccaaactttgtgtttaattctttaagtgtgcttgctaatcactctagattttttttattattttatcaattgccttaacttcttgatatgcaattgggagtgacttcatcaaccttgtaatttatattagccaatcctacaataatctcattaaatctatcaatattatcatttaaagaaagggaagaaattattctaaagccgtataacctttctagcaaattaatcttgttaacaattgatggtttcaagtataattcttccaatttattctaaactcctttcatcgtcttctctgagataagtttctttcgaacattatttgacaaaaatatgatgatcgtgtagtacgcatctcctccagttctgctttttcctttggtttcttttctgccaataacttctcgtatccaagaaccttggagatttctcgtgcattaggattcctttgaggctttctctctatagtgtaaagtccccagttctatcgaatttctctaatttgaatctctccactgatgacattcaaagtttttttcaagaattgcagcagtaagaatcttaattatgcgttcttaatcgattaccaagctctgatttgtgagaaattatgtctaacagtgcagaatcaaaccacttaagttctaaacaatcaaacaattaataacgacaagatctaacaaatgcaaacagtaatcggaggaaaaatatggatgaacatagtacggaaaaccagaaataacaaatgcagaaaataaagaaatcaaccccaagatatatactggtttaagtcctctatttttagaacgctaccaaatcctctttatcgattgagcaagaacaggtacagtacagttgagaaagagtctctttttagttctctaaaggtgtttcaactcacacactcttacctaagattcttctttatccacataagattattcttacaaaattcaaactcaatctctctctctct

SEQ ID NO: 321228 - DNA, 2199 bp, Cannabis indica
tttttgatttttttttatatatttttaagggccccaaaatttaatccgtcttgggcccatatattttcagggccggccctggtaggagatcacgtattcctacaagtgtctctaatgaaggggattaaataattttggaaaaagggcaagttataccctaggtttacaaggcctgttaagatcctcgaaaaggttggattggtagcttagcgtctagcattgcctccaacactattagcttagatagacactgtgaatgtcgggaatatttgacgttttagatttgatcgtaattccattaggtggcaaggttacttcttgaggaagcaaggggtaaattggtcattttaccctaattttctattattgatttattaggtattttaagtaattccaagcttattctttttataataggttgaatatatggatttattagatacttattccttaggttttaattaattaaagtagaaaaaaaatagaaaattgaaccactttctctctctcttcttgagtcggtcaccaagaaccaaagggggaaagtcaatgttcctcttcattttggatcaattctataggaatttagtaaccttgattctagtattttggtgaggtaagatcttcttctcttcttccttgggtttttaaatagaaaggtatggtttgttcgtgcaattttgagttagggttctgtttgtgcgagttgaggttaatttaatcttgtggttaaattgaagttgattgagctgatttaagtttggtgtgttgcttgttgttgtgattggaaaaagtttgagcttaagagctcaaactttgccctttcatggtaatttttgtttctagggtttgtatatcgttttgttgcttgaaatatgttcctagaggcatcaataggtactttggaggtttgacaccatttggggtcaaattaagttctttgtgaagtttttggaggttcctgcactaaaccggtcaaccaattcagcaatgccctttagaactggtccaccggttccccccaggaagaccccatagaaccggttttcgggttgggaatcgatttactggttggggcagtttagggtaccctaaattatcctgtttttgtaatatttagggtattactatgttatccatcgatagggaaactttagtttttattctaagcacccaaaaagtgattttgtgtatcacgcaggttgaccgacacacctaaattcgggatagaggtaagattagtataatgatatgcttatgtgattacatgtttagtttacatgtttatggttgcctgttagattactttagaatggcggtatcagtatacatagatttatattggatatcggtgaatgtatgtttggcataagtactgattgaagctatcacatttgtaatgccctgtccaacacgaacgccacgtgtgtgtgctattataaaattcttatttgataaattaggtatttatacaaaaattgtgggtaaataaaattttccatttaaaatgattcctttctaatattttttttaaaagttaaatactattctttatggggaccccctcgtaacaaaatacttacattaattagattcaaaataattttgcaacataaactttacgtttcaaaatacaatcaaagaaacaccctgtccaccgggcgtggcatcgcggctgagaatcgaggcttaccatactcatgttaatcacttaatccgaagtgatgtataatacttttttcttacttcaacccagaactcaagtgtgcgggccgacctgagtggaaaacaagttgggcaatccaggtcacaaccaaaacttaataaaaacctttattaaattctcgggaacaaaccctaactctcatgaccggataaccctatttccccctggatcaaactaacttaaatatctctaaaatactatgaattacactctggaagatactccgaactgtaatcaaacttgagaagaaaacccaaaattaccccatgaaggcaaactgtttgaccaaattacagcacctataaaactgattaacctgcttctcagctggcagaaatgggaaaaatttgttttcaccccaaaacaacccaaatctcctccaaaaagccatgaaatcaactaaatcatgcacaaacaaacttaattccacttagaaatcatgctcaaaacttatctatgttggaaattatttt

SEQ ID NO: 321229 - DNA, 1207 bp, Cannabis indica
cacatccaactgaaggaaaatcgggctcagatcttgattatgtaaaattaattccaacacattgttggtaaagttatttcacaagctgttctgaaagttctcaatgatggtggagacccttcctcatttaaccatactctcatcaccctcattccaaagatcaaaaagcctaattcaatatcacatcttcgtcccattagcttgtgcaatgtgctctataaattggtgtccaaatccattgtcctcagaatgaagcctttcctctcagatgtaatttcagaatcccaaagtgctttcttgcaatctcgccttatcatcgataacatactgattacttttgaacttattcactcactgaagcatcttaaacgcggtaaacaaggatatgctgctataaaactcgacatgagtaaagccttcgataatgtagaatggcattttgtacgaggtatgttgctgactttgggttttgctccttctctagtggctttcatcatcagatgtatctcgactatgacttactcttttcagctgaatggttctgtccaaggaaatattatacctcagcgagggctgagacaaggggatccattatctccttaccttttcattatttgtgtagaaggtttatcgaggttgctacaacacgaggaaaacataggttctctacatggtttacagattgctaggggtgctccatcagtctcacatttattcttcgcggatgacagcttgattctatgtaaagcaaaccgaagctctgtaattgcaatttaaaattcactgactagctactgtcttgcttcaggtcagaatttaaatgaagataaatcggttctctccttctcaccaaacacggtgcaaaacaagaaagatgtgtttcagcaattactaaacgtgccaacaaaaccatgccatgaacggtatcttgggttgccttcctattcaggaagagacaaaaaaatcctttttggtgaaattaaagacaagttgtggagtcttctttcagcatggcaagagaaattattttctgctggagaaaaagaagtactacttaaagcagttgcacaatcaattccaacatatgtgatgagttgtttttgtctcactaaaaagactattgatcaaattgagaaaatgatgaataagttttgtggggttcgaacgctactggcacaggtgttcattggaaaaacttggaatgcac

SEQ ID NO: 321230 - DNA, 866 bp, Cannabis indica
ggcaaaaccctatcgtgacaagtggcagtgaaaatcccttacacggctaaagtttaaaaggcagtaaactgccaaaaaaaaaacagtataaatgttgtttccagcgtggcacagtataaatgtaataaaatgggaaaaatcagtagtgggtgtaaattttcccttctattatggtaatagatatattatttctcttattagcaattaattttgaattagaactcatacatatatcttaacacctcactttcactactacaaaaaatttcttccatgaacatcaaagctgacattgtttagtgtgataataggaccactactagaaaaataggctttagagactgtttttgggacttacaatgtcgactttagcaaaattcactaccgatacagttccaagcgacgctgtagggggaaaaacaatcgacgacataacctatggcatcaattattataaaataaatgacgacatagtgtttctatgtcgtcagttattacacaataaccgacgtcatagttcctatggcgacaattattttgaaaataacaaataccataggggctttctatgattttttttagctttagaattaattttgtgtaaattataattttatttcttttatatatattattttattattaatagattatatataataagtataaataaatattaaattgaaaagttaaataaataaacatttacattattctaagtgtttgtatattaattatatttttatacatttaaatttataatatgtatatattatatattagctatatttttataatctaagtgtttgtatattagctatttttttatacattactctaagtgtttgtatttttctagtatatta

SEQ ID NO: 321231 - DNA, 623 bp, Cannabis indica
acggccaaaaaagttcagggggcatgatttagtacatgtcaaagttcgaggggaaaaattgttaaatagcctttacccgaccaaaccgaacaattgattaggcgggttactaattttttttgttcttaattggatggattacacttcaatttttgtaactcgcactacaaaaatttttactcttagtcacaataaaatttgtgactaaagataaaaaatttgtggctaattataaattatcattatagtgttgtgactaaaaggttcctggctaaaagtattagtcacaaaaattacaattttttgtgactaaatgtagttttagtcacaatttttgttgtgactaaaactgaattagtgacaacttgtaactaaatactatgttttagtcacaagtaactttttgttgtgacacaaaaaatttatattgtgactaaaaggttgccactaaaagtagcagttttttttagtatcaatctttactttagattgaataaaatatagtattaagcgaccaaaccaacgtacacccctaactcattctatttgtaaagagtttgagaaattcttataacaaagctttgctaagaacagtacaacttatatttgttggaaattatttt

SEQ ID NO: 321232 - DNA, 1430 bp, Cannabis indica
gtttggatgagtaattagattttatattgttatacgtcaaatttatatgtatatatgaaaattaacattaaagttttacttttttttttcttggattggatggatccagtccaatccaatacatactggatctaaaatattggatggatccgatccgatccaaaaattactaggtctaaaatattagattaacccaaattaaacaaaaatatatatgaaatacatccaatggataaaaccgatctaatccaacatccaatggatgttggatcgattggatgacgaaattaattggatcggatcggatggtaaaatttaacatccaatatatgattggatcgaatctggataggcctaaaaacattggatgtgatccaatgaacacccctaaatactaggatattaaataaaaaggcataagtgtaattgtaatggggtatgagtattatatataggaaagaatagtaaaagaaagggtgtgaagaatttggttttgtttgtaactgttttgggagaaaactaggctctcgaaatcctaagtattaatgaaaggcattttgccatttttatccaaaaactacagctatttctctattttctacaattgaagaatctttataggaaattcctatcatatgatttggcagtgagaatcgttcaagaggaatttaaaacaacataaaaaatttaaaaggcacaataagatagtagtaatatatagttaggggataaaaatcatatacattatataatatatgactatgtaatataatttttagtttaacgttattttttgtgtttccctattaattttaacagaatacacgattacttaacaaaatattgttaattaatttaaatcaaatgaaatcaaaggtggcattataaacttaatgaaaagataaataaaacctagaaaaggaaaacattatttctccctcttaacgcacactcctctggaaatttgattaaacaacatcaataacagattttacatcaatcatgatcccctgcctcaaagaacctgaccaaaatcatcataatcatggaaattagccatttttgtgcttggaaaaattaagcgaggaagataagagagataacaagagagatttgatcttgatttgtgtttgacacgattttgagattgaatttgtctcaaaatataatcccaattcttttaatgaacattaaaattgcaataattagataatgcccaattattaagtgtaattgattagtttttgaggtacaaaattaggataaatgtagtttgatttgaaggagaaaacataactacaaaatgatatgaaaattgtaaaaattcattgtaaaactggccaaaatgtaacactgaaaaaaattaggaaaaccaatacaaactaatattgtgggtgtttcttttaattttgtaaaacgatctgctaata

SEQ ID NO: 321233 - DNA, 1607 bp, Cannabis indica
tcccctagttttggattggtcggaagctcctcagccttggaatccatcgtttctggctccaattgaggcttgaagtctttggaaacaaatagaaaatggttggtgcatcttggtattataagttcgagagtatgagcttctgaactcagaagggacattctaccaggaaagagatgatccattctgaaaatcgatctcactaaaaagccagaggtttgtgaaaaatcacaagcttcagccgcccttttatacacaaagtccagtgataagaaagctaaggattgggaaatctaacggttgggattcgggcagaatataaagagatgattcataatgatcctccaaactatacaaccgccagaatcaaaggatgcattttttccaagaaagaattttggcgaaaatggcctctgtaattattaaaaagctctttttattgaaaaataactttttaaggggcaacaaatacttggctttttggaggggccttccctccaaaaaggggccttccttttatacttccttgatcatggtcttccctgatcctgatagatcgctcaacaagtacttggctttttggaggggccatccttttcttcttcctcttgctcggggcctcctagtcggatactttctcttttgatgccacaacttttggtacgaaattggtcgaaaacaacttatacttgataaaattagcctcggtggccaagagagagatgtttcgttcagcagaagaaagttgaagaatcttctgagccctcttcctgagctctagtgtgaacagagggcgccagtaggatggcacctactgaaagcttgtgtggtcggtgtccatccccttaacaaaataatacccatcaacaaagcctccaatatttatcaccttagtggccgtcgcgcccgtcaaccatgacttctcgatcattctttttagggcttgactttagatcaaaaagccaattggtatcatggggggacagttcaccccatccttgcgaggcatagagtatgaacagggcagataaatgcttgagacccttgagggtgaactaggtcagacttatgtgatagtagtctgcaatattcttaaaatatgggagcaagggcaacatcgcaccctgcttggtgtgacctcccaaccaagcacagtaaccttctcctagatcagtagctagcaagtcgggggagggaaggaagcatttgacatccccgaggagaccacgatcgagccaatatgtcatcttcttcatggtcaccaaggatggtggagaaatccatcaatcttctagtgcacctctattgggctttatgccctaaataaaactctatttcaatgtaatcttttctatgcaattatcaataaagaaacaggtttatttttattatttatttagtgtgttatttggtttatgtgatcatttatatatttatttgattgatgaattcatccaaatccttatcacattgatattcttctctattgtgtcgtcagcagagtggaaagtaatcaaaattatgtgattcaatctattcctatgaattattagttcgcaggatttaactgataggataatctacaatgtagtttacttgcactttggata

SEQ ID NO: 321234 - DNA, 506 bp, Cannabis indica
acatctgcaagttgctggtttgtgttgacagggctgaggcgtaactttgctttgttgattttgtcacgaataaaatggcagtccaactcaatatgttttgttctctcatggaaagtgggattgtttgcaatgtggatagctgattgattgtcacagtatataaatgccggttgatgttggggaatttgaaggtcgtgaagcaggtattgcagccatgtaagttcacttccagtggcagcaagagcgcgatattctgcttcagcagaactccgagacacggttggttgtttcttagtgcgccaggaaattaaacaatcaccgaggaagatgcaaaatcctgtggtggatcgtctagtaatcggacatgatgcccagtcggaatcagaataaccgcggagatggagagaagaagcagcagagtacattaaaccttggccaggagttccttttaagtatcgtaaaagatggtgtgctgcttggagatgaggtgttcgaggagaagacat

SEQ ID NO: 321235 - DNA, 1312 bp, Cannabis indica
gggcataaaacccaacaatacacgtatatatatgatgaatgctaggccattgcataaccttacttgagtaggtaatatgatatatggatactaacatccaagctatacctatgaggcaaccgttataaagtaaggactatgaatcgaaactgctatttgctaggtcctaacattatcaattttctaattaggtaatgataatgtgatgacactatggacataatgtatgggctcacctaattaggtgatgcgatattcctggcaacgtatcgggcgtaggtatgggcatcagtgatagaatgaaaccattgtagagtttcttcctggcgacgtatttggcgtatgtacgtgcgtcagtgatagaatgagaccgtgtagggtttccctattgccaggttatggcacataatgaaactgttgtaaggtttcttcctagagacatatcaggcataggtacgggcgtcagtgacagaatagaaccatgtgcggtttccttattgccgggttatggcacagatcgaaacccttgttgggttttttcctagcgacgtatcgggcataggtacgggcgtcaatgacatatgataagtactggtcgtaggtcaggctaatctaattagacgatgcaatatatagtgccaagttgtggcacgggttcacctgattaggtggtgcaatgatattatatatgatatatattgcattatgagacgaacttgcctgattagaaaatgcaagcatatgagcatatctatttctatgtatatggatggttatattacctactgttgaatgttatggtataattattttatgataatgaaatgtataattagttatttaatatatccattcttattacttttcttactgagtctatgtaactcacgggtgctatgtgttgcaggtaagggcaagaaaaagttagaagagccatgagatgacggtcttcctcagtaatgtacatattgacctcaccgacctgtgtgctgagtttctaggagttgttttggactgtgtatatctgctgtattttgaattgtatatagtcttttgagtaaatcttttataacagggatccccgaaatacctttttactaccgttatgatatctttttttagtgttttatttttgtcaagtttttaatattatcaaagtacttaataattaattaatctattagtattaaactagtttataacattacacacgtggctcttgggttttgtgctcaaaataaaactcatttcaatataatcaaatttactaattaatataagatcagaaatcacttttatgttgcatggttca

SEQ ID NO: 321236 - DNA, 814 bp, Cannabis indica
atatttccactctaccaaacataggagtgtgtattaaaaaaaaaactttattattattattattattattattttcagttttgtgattaattatgtttcatgtcttttttaccccataaatgagccgattccgaatgatgggtacttgtaccatgcaccttaatgtttcttaaatataaatttattactaattattattacttcaaggatatttatcgtcacacgtgaactttgtcggaaaatgaaaattattaacaatgaaaaaaattaacataatagttttaacaaaaaaaaaaaaaaaaattaacataatgtatgtgtataacattaacaactacgtacagtagtttgttgtttgttgttgttattattgttattttggaaaggcagtagtttgtattaagatatatccatatgtttatctatttaaatttaagttaatataattgatattagaattcgaaatacccctttcgaaatatatataatactgtatatcaaaaaactctttgttttattttttttggtaattggtggtgagatattgaataatatattgttacacatatttcaaatttatttgttggaaaagtacaaagaaataactccaacaatattaaaaaaaaaaaaatttcaattattaatttctccacgtcccagaaccgcgttcagcgccaaataatttatttatgtcgattttttaagtctcctttatttctcttcttataatatatctttatatattaaaagtgtctatctaacggcatttcttggtttaacagaatatacttaaaaataaaagaatattctgtta

SEQ ID NO: 321237 - DNA, 844 bp, Cannabis indica
aggaacgcaccttagctccgtgataagatgagcttctgccaataattgatcgtatacagaagcaactctagtatcgtgatgctcgagggtcagacaacatgtttctagaagacgagtccagtttccctttttgatccaagtgcacagaataagaaattaaatgctcctcaaatctcgacagaagatcatatcaatctaaaaggggaaattacctaaaatggagatcaagcaattattttatgattaattgtccacgattataggacacaattttgaaaaattcaatcgtatccagtctgtcagccagcagatcaactccttcgtgggctggaccttatgagaataatccaatttacgtattttcatgtgaactccctaatagaagaaaaaaggaaaactaagtataattctctagtcgccaacatagagatatgagggtcataaggtggtgccatgtggcatgtctgcttcgtccttgccataatggacatcgagtgtctagaaacagtaaccatggtctccgtgacaagaagatcttttggtgaagaaattgccctatcaacaggcaaagtatcgggcacactgtcctgaacaatgtaagtccaggaaccatgaagaaaatacctccacgcgaggctcaactcccaaatgaaccagctgtaaatctcaccacctattcgctctgaatgacggtgatgctggactttgggttctggagaaccactactaacatcaagatcgctcaagaagctactagaggaatcaactggacactaatcctcgaagagaatgttggaatttattttaccaggatcttagatctactcacaagtatgttgtttaa

SEQ ID NO: 321238 - DNA, 1227 bp, Cannabis indica
tatacattaaacataatcatgaaataaatcatgtgaaccatgtaacattgaatgatttttgatctcttattaattagtaaatctgattattttgaaacgggttttatttagggcacaaaacccaacacaatctccctctttaaattctgatactcattggtgtcatagctgaagtcgttgtggaactgaaagaacttcgacatgtccatcttgcttagttccctcttgatggaaaagagctttctatatgggattattccttgagtggccatgaagatggcctcacatttctccgttaagagggtaaagcatgtatacttctcctccttgtctttctgattttgtggcgtgggagaagtgttaaacttcccctttttgccactctttctcccagagttgtttttgttgtgcttgctcctagggttcttgccactggagatttgggtagagttgctggtgcctgcctttgcacctgacaagtcatgggactttaggatgtcttatgactacctattgtttactttccttgtctgggcctgtcgtataacttcttctcgtttgatgaagtcatcagctctgttggggaactccttcatgttgttagttgagatcctctggatgtctttccataagtcactcaatgggaggatgccacccagtatggtcgtatattggacctcttttgtaaggcctttgacctttgtggcctcggtcatcaacctttggatgtaatccttcaaaggttctccttgtcatttcttgacttcgacaaggtcttctagctacgatgggacaagccttgaggatgagaattgtgtgtaaaattctcgagaaaactcagcctaagaattgaatgttcccagagcaagtttaaagtaccattgctgagctatttctgacaaagttgctggaaatatgcgacattgcacatcactagtaatcttctagagatcgagctacatctcgaagtatttaatgtgcgtcagttgtcttctcgcccagtatacatcttctgatggggattatttaccaagatctagatttactacaatgtatgttatttaacaccctatatgtgaatttctaaaataatgtaatttaaacacatataaagtttaagaaaccttacattagttgcagcaaaattaaatgactcctcccgctcggatctctaacccctgtatcctttctttagcagagtatcaccaagatctgagcccgattctc

SEQ ID NO: 321239 - DNA, 2076 bp, Cannabis indica
cagatgaattcggacctttctttttaggttttctattggagatttttgactttcccacagtcttggacctcgttttcgccattgcaccagctcagagagagctgcaaggaacaaagagagagagaaaattgattatccattcagcaacatattaaagttataaaatctttaatcaatgattgctagtacagttcactaatgcccgttctacggtacaagtaatcttggttcgggttactgaagtagtgagatatctaagtgaaagtgttgtacataatagaaattatatgacaaggacctatatgaataaagttgtctttattaacatgtcgtttaccataaagacctaattcatatcataacgatgatcaatagtagatcgacctaactcctgagttatcatgaactcctattcatgttattagtttaaagtttctcagaaaagatgattcttaaaacttatgttttgagaatctaataatatgatggttggaaaaatgatctacaattatggaatttttactttcctaaggaatcaaatgtcgattctattcatgtgttcattttagtactagaaagttgcacgcaaattcagatgaaattttgaattatatttccattagtgaattaatggaactaaaggataacaaagtaattaaaagggtaaaatggtatttgaccaaaactaattacgaccaacacatggaaggctaattactgtaatttcttatatcaatggacactgtagttaaactcagtaaatagaatgctataattactaagagttcaattttatatttatattggaataatcataaaattaataaacaaacattatttagttaatgggtcaataaatccatattccaaacattagtatcataatttctattgtacacccaagcaaggaagtcatacattcatatacatatatcgtcctaccttacattcaaaaaaacaataaaaaccgcaataaaactcttacagctttgaatatttcaaatgaagatatatagacaccgaaaaagaaaactcatagatacataaatcaaggttgagaaaaattaaagctactaatataaattgttaaaaatttataaagaatgatatgaattatatatgatcaaatataaatgcgaaataaattaaacatatatgcattatgaataaaggattgaaatacccttaattattaatttttttatttttaatcccatatgagttttgaatctgcaaaagaaagtttgaggagcatgatttggtaaatatcaaagttcggggagcatgatttaatatataaacaatcactgaaagagtaaaattgaatgaaattagacaaaagtccttaaatctaacaatctcaatagttcagggggaatttttaaaggcaaaaaatgttcagagagcataatttagtacatgtcaaagttcgggggaaaaaaaatcctaattagcctaaattatttttgcatgatggttaacgagggaaacaaatgtgagaaagcctttcattctagaataatataaaaagtttatgatgcaaaagaagccataatacaaaacaaagttgtgtatacttaattatatatatatatattattttagggtgtatatttatttatattacatactatagaagaagcgtattaataacgcatttatttatttgacctaagaaatgtgatttttgccagcatatttttgtgctgacaaaagttggtattgcgctggtaaaatagaatttacttgtgatgtgttggcaaaagggggttgaaaaaataaaaatgaaaagcgctggcaaaaatgacttttcagctcgtaaatgcgctgataaaagttagattttagccactgcaaatgtacgttggtaaaactttgacctctttgccaacacagtttgcgaaatgtgcgggtaaaagttacttttatcagcgcagaagcgaaatgtgctagtataagtgacatttcttgtagtgataaaggcgctaagtacaagtgacacaactagtgatatattttaggtaaatattattttggattctatgttttgtaaaagttaccaattggaccctctat

SEQ ID NO: 321240 - DNA, 1740 bp, Cannabis indica
aaaaaaatagggcatctctatctctcaaagaccctttacactccaactgctccaagacactggctacatagcagccaaaccagcctctacacctatgaagtcaaatctaaaattaagcaaagacaaagaggccctcgtctaagatcccacataatatagaagcttaattggaaagctcatttaattgactatcatacgacttgacatgtcttatgcagttaatcaccttagtcaatttctcaccaatacaggggtaccacattaataggttgcattttgtatcctccaatatctcaaaagaactccaagtcaaggactgttcttccttgccaactcctccccaacactttcaacctatgcagaaaccaatttgtctacagccaatgttcaattatctttttttgctgatgctgactagggaggttgccgggacacaagacgatctatatttggatatcgtgtcttccttggccaatctctcatatcctgaagtcaaagaaacaataagttatttctcaatcctttgctgaagtcgagtatagagtcatggcaaatgctacttcaaaagtaacctggatccttactctcctcactgacttcgacatcactcacaataaacttgcatatctatactgtgacaacacggctgcaatttatgttagtgaaaatccagtctatcatgaacgcataaaatatgtcgaaatcgattgccacttcatcagaaagaaagtgcaacaaggagacattaaactacttcatgtctcctcccaacataacatagttgatatatttacaaaagctcttctcccatctccatttaacaccattgtatctaagatgaatgtctctaatatatatacttcatcttaaggggacctattagaatcagttaagtttgttactcgagttagttactacattcagccggagttagttaatcacacaactaactcaactccctgtcttggtctatatataaatgtaccttgtacattgtaattgaataatacgaacataataataagaaaatattttagctttttatccttcactctggtttcctcatagtttgtgcaagccattttttaatctccatatcagttgttctgcaatcaatttttaagtccaaatttattaattatagtgacaaagtttttggtttgttatttgttgagttcatgtatggtaattattgtaattttcattttcaataggaaatctaagtttatatttgatgtcacccaattaattacactgcggtcgcggtagtaaattaccactaaagattagtttagtaaataaaaaataatagaaatatgaatgaatgaaaattaataaaatggtgagtgaaaggggatgattaaataaagagcttggtaaggtagaaatgtagttacgcaagtcctattctaataccgatattaattcaaaacacagttacaattctacaccattaattaaaactggaagatgtatatagtaaaagtgcaaattaattcatcttgaataaattgaatctcacttctaatttaacaacatatcatattatatattttaaatcaacaaaatactactattggcagaatgcaaaacgacatacaatataataaatatagcaaaataattaatagcctaacttacataagaaaagtatgactgaacttatataaaagatactattaactttggaaaatatgaagatgaagcataaaagaatcaatatcaatattaagaataaaa

SEQ ID NO: 321241 - DNA, 554 bp, Cannabis indica
cgggttttgggtcgggttgaacggacccgcgtgcagtaatcggatcaaaactgaccccgctggaggtaggagacgactccatacgacatgtcttttttctcatgtgaaaaactacatgtcgttttcggtagagagtttttgaacccactccatacgacgtgtcgtttttcccttacgtgaaaaacaatatgtcgtttttcagtataaatttttgaacccaaggtcgtacgacgtgtcgttttttcttatgttaaaaacgacaagttgttttccagcatgaagcatttgagtccgactccatacaacgtgtcgttttttaggcagtgattttgaacaaaaaaaaaagaaaattccaaatttataatttttttttatttatatggaatataaattattttcctattttgtgttgatttagtcaataaattatattcattcaatttccatttttaatttaatacatatatttagaattaatatgttatttagtataaattgaaaatggaaatttattttaatttgataattaattacatgatttatttaggcatgta

SEQ ID NO: 321242 - DNA, 1812 bp, Cannabis indica
aaaaatatcaatgtaacaacaatgacataaacaatccttaatattatattaatagaaatgtttttgagtaaatataatattttatacatgtattacaatttggaataaaattactaattctacataaataattttataaaatatatgtatatattttattaagatgtaattattcttatatggaggtatactttgttaatacgggacttagaaattgtataactaattataatttagaggttattcttatttataataggcccaaattgggacttgaattttttaaaactaattagaggttattcttgaatagggtattcttaaatagaggttctactgtatatatatagtagtatagatagatgaagaatataaaaataacagtaaaaaatgaactagcattactcaaataaattttataacaaaaagtaatcaaagatacaaaataattttactttcatatagaatcatccctaatcttccaaggaatattaggttattatgctcatcatcctcataaaaattttagaaaaaaaatgagaagaaaagtgaagataaattttactatagtttttttacaataaaaattacgcacctcatacaatgaaaattagctcatatttatagagtctaaaaatgattaaaatgcaaaataaaaaataaatttaggttacaaaataaatatatcaaaaatctgaatattgatttttaatatgataaatattattattttgagtgttatgattgatcttgtggtatttagaatgaattggtagtttgtaatgatttggtggtccataagatgatattgtgaaagtttgggcttcaaatgggttgagtgcactcaagcccaaaaagactcaccatgtggtagaatagaagaaacgtggagggagtaacaactaatggagaagcgacacgtgtgcgagctggtgaagaagaggatgcgccacttaggcgctgatgtaagctcctagaacgaatagagaagcgccatttggcgctgatgtggcgcgggacccatggctaatgaagggatgggctgctcattttgggctttctcttgggcctttttcttccttttctttctttttcttcggacaactctacttctaaaatgccaaaatttgctcttcttttgggctttttttttcctcctttctcttctgttttttttttttatttgcaattgggcttcttttctactatatttctttttcagctttaattcttttcttcttttctacaataaaaccatttaattcctacaaaatattaacaaataaaattcaaataaaatatttttaaaataaaaatatatctcattagtttcataaaaatattaatttaaacttaatttattttaaactttaagatcaaaaaatgtatatttttcaccattaatcatgtgtaatttgttcttatttactttaataaatattttagactgaccatctttaatgtaatttatgatcctaatatgaaatttgagaagtgaatataagaaatgctatgatagatcaaacatatattttgatgtaaaacaaaagtttttacatagcctatgtgacatttagattctgtattcaatgcaaattatatgttaacttattttaaagatgcaaatagataatatatgatttatgaccttaatgatttgaaaagagttaaggttattcttgtaatctatcatcatttaaagggagaaaactaatattttaccttaacaattgggtagctaaaataacaggattcatattcctaatcattcatccatagtcaactacagtattattgtttcttttttttttt

SEQ ID NO: 321243 - DNA, 578 bp, Cannabis indica
aaaaaaattgcatatagcattatatgattaatatgcacgtcacctaaatgaaaactaatggttggatttactacaataccctcattaaaaaaattgggagtgatgacgcgaaagttgttttagcaatacaaatagaaaaagagagacccggtttattcgtaaagtgagatctgatctcaaaatttggtatttacgtacgtctaatatataataataattaaataaatgatgaaatgtgtaaagtgaaaagtgaaaagtgaaaaggatataagatagttagattttgataatatggaattttaaaagaatttttctttaatgtcttgtcttgggcaaaacttttacgttgtcacttgccaccagataaatatttaagttgttttaatataatttaatttatatacatttttttgtttttcttacaatagataattagtaatttttctcccgaactttgacatgtattaaatcatgtccctgaacttttttggctgttaaaaattccccctgaactattaagattattaaatttaaggacttttatctaattttagtaaaaaaatactaacatagatgaa

SEQ ID NO: 321244 - DNA, 1620 bp, Cannabis indica
tcagggcagtagctatggcttttcgtgattattctttggtgggtttttggtaaataggtaagtggttattcgctctgtaatgatataaataataaagattaattcaaatgatggattagaagctgtctacaatgatatgagtatgagatcataacctatctcaatgaactcaatggaaatgcaacactctaaactataaactgtaaacataaattgaaagggcaccacaccatagaagagcgattaaatgaagattattaaaacaaaaatggttccctaagcctgacctgcgtgagagagagagcgttggaggtggttccggtgggtgaggggaagcaattagggtcggcgccggcagtgtgagggcctgagaagaagactgtgaccgtggtggcgtgatggcgagtgagagagaaagtcgattcagctcagagagagtagattgaagatggagattggagaggggttagggaaaaactagagagaggatttgtatttgttggtttttataagtaacatttttattttaaaattttgtttttaagattttgtttttaaaagaacaaaaaaaaaagtattgtataatcacttttaatttttaattttaaagataaaagataaaagtatattttataatttttatttttatttgttgattttatttaagttggatttgaggtttgaagttgagtttgaggctgagatagaggtcaagttgagtctgggttccaaggtctaggttgggatcggagtttaaaatattaatgaaagaaaaaaattattaatttaaaaaaaaaattaaaagtgattttttttttcaattaaaaaaaaattaaaaagtataaataattttataaaatatgattttagaaaatacttttactttcttaatttaaaaacaaaaaacagattaaaaaagtgatttataattttaccccataaacttgttttaattaataaagtcgtcgaccactaaaaaattattacaaatgtcttttaattgtattttatttttctaaaacacaaaattttatataataataatgttttttttaagggtaatctaataataggttagataaaaaaaatagttacgcaagaagtggagtgttctttcatataagaaaacttattgtctatcttaagaacatgattcgtcaattcacgagtcgcaacattaatattgccattaacatgtaagagatgactctcaaagatacacaataagactttaatatcaatcataccaatattaaggacaataaatttaacaagaacataccaatactaaggataactcattctggtacatcttggccaccttcatcctaacaaaagaattaaaactggtgataaatcatcaccagtttcttggtgattttttctgtaatttttccagcgataatgctaatttcaacgactttttcggcgtcagcggcaactccaacgacttttcggcaccgatagttactccgatgacttttctggtgccgacagcgaactctgatgacttttccggcatgagtgacaactccgacgatcactgtagtttcatttgttttatttttttttaaaaaaaataaatatatagggaattttaatattttttttatggtaatt

SEQ ID NO: 321245 - DNA, 2070 bp, Cannabis indica
agagagagagagagaaagattcaaaaatctaaaaaggaggagagaagattttctttgattccattttctaggtttgagagtccactaaatcaaagccgtgtatgttcctttaataaggtctctctaggtttaggtttagaatagaatgggctttaggaaaaagcaatgaaccttaaaagtccataataatgtcgaaatccacaataagcccatcatctttggatttttaccacttaatccttttaaatgagattttccaatctttttccaaaaatgccatttttctctttcatttaaatgataattttatctatttaattattataaataattatcaaacaaaattatcatttaaatatatttattaattagtgttaactcgaaaactttctctagtgatgtggacattaatgtttgacacgtggcatgaaggatgacattacaaagttagtagacccgagtcatagcagtcaaccaaggaaggaaccctaaccctgcacccaggttgacttcaagatctctaggatgaaagttcgaacttcaatgacttgaatccaacctactatctatcttttagtattctgtaccatgaagacatggaacaacctaatccaagcccaaggagctgaaattacacgaacctacaacccagaagccaacttgggcacctagagtttcacccagcacccaaattgacatccttaatgagggtttctgttttcggggccgtcttcttgtaaagtggtaaaaacttggattgggacatcaaccagacataccacgaacatatttgaggcatcagaatcagagtaagttgatttagcacccagcgcccaagttgacaatctgtcaatttaggtgtcttctaagtgtgtgattggagatatgacttttgtatcgaatccatcttcatcaaaaacaaggaaatgggtctttctgaaggaaaacaacaattcctgggcataaataaaagggcctagcccccagattgacacttggggctgaccctgtgcaaatgtcaacctaggccatttaaaatggagttttctaagaattcttttgagaatcttctctgtctacagaaaatattgagattgaactatttttggggaccaaacaaaatttctgaaagggaaaaactgggtcccagcgcctaggttaacacataggtttgggctgtttccgacctgttcagcaaaaaatgttctaggcatttttttgtcataaaaaataataaagattcaagtaaatttagggagaaaagcacaatcttgagtccctggaaatagggtccagcccccagtttgatcaagggctaggcctagtgcctaagttgataatcaacctaggacactgccttcaattactcaaatgccaaatgtgatgtgaccattgcatttggcatgattgaaaatgggggaagagaccccatcctcaagttcaaaatccttggaggtatcaaaaacagaatcccgggaactcgattgaaagggcctagcgcctaggtcaacaaatggcatggtgtgttgggttctgcttattcgaatttgatgctgtttcaaccgtccgtttagtttttcacaaatacaatgatctatgaagtcataggaatcaaattcacaacttttcatttctcattttcagcactcccaaaaatgaagagtttcgagtctcctatttctaaaacagcaacatctttgagaattgttgaccagctttgccagaacctataaatggactaagtgctatcaaactatcagttaggcatcttaaaggacatcccttggatgtttttacacttacccatcgtccaagttgacgtcagatattaacttaggtgctgggatgtcaacttgagcattgaatgtcaacttgggcgctgggacctaaactgccttcagtaaaacaactataactcactcaaattttattcgattgattcgattcaacttgcattttaaatctatttaaattatacataaagtcatgtctaacatcctaaacgtaactgtaataccctaagttaagaaatggattagcaaaaccctaattagataattatgaataatt

SEQ ID NO: 321246 - DNA, 657 bp, Cannabis indica
ccctcacttacatggcaaagcatctactggggtcgtgaactgcttctcaaaggccttcggtataaagaagggaatggatttcacattcaatgtggccttgataaatggatacccagccatacggagttttatccaatcacgtatacgggtcctctttccttgccggttgctaatttcatcacagataaaaggaatgagacctagaccttcttaacaattatttcggtcagattaatattgatagaattatcttaattcctttgagcttctttccttctgttgatcgtttagtttggcatcacacaacatcaagtgattacacagtcaagtcaggatttcatttggctgtaaacttggatgagcaacaacattcttcatcttcagacttacatagttcctggtggaaaatgttttggcatttaactcttccctctaaggtaaaattttttgtgtggaaggttatgcataatgctcttccaactgctgctgccttacatcgacggaaagtgcttgactctgctgcctgttcgatgtgttctagcgcatggaaatccattgggcatgctctttttaatggtccacatgcaaaatgttgggctttgtgccctaaataaaactctatttcaatgtaatcttttcaattcaattatcaataaa

SEQ ID NO: 321247 - DNA, 1478 bp, Cannabis indica
attgctattgggcacttgtgatgaccagcaccttttataggtgatgccacacgattggttagcgatattccctaaaagttatatttttaagtaataagagactctatacttaattacaccaatagacatcaagaaaggtgttaggtactaatagtgatttttaatgtttctcttattttgtttttatgaaaagtaaaagttaataaaaatccttttttcttattaggaaacatgattaaattacttacccaatagctaggtatcatttttaaaccgaataatactagccagcatgttttttttttttaattaagtactcatattaaattagatttaactgtatctataaatatatttttggcccccttaaaatttagctctggttccgccctgattgtaagcatgagaaaaattttactaaataatattttagtgtggttaatattttagtgtggttttctctcaacatgtttttctaagtttattttaagagattattgaagtactaattaataatgtgcattatgaatcctacccaagacattattattgagttaattctcgtgtgaagataattaagcaatttatcttttataatcataagtcacatagtaaaattgcagattcttaagtgatcaacattagtttaattattttcatatatacttggtgatgataagcttataacaggaacctagtggcaataaaacataaattataaaataaaattctatattgtcatatctcaattattaaaatatgtgaattaataaaagtggaaccatcgttgcagctaactcaatccaactagagctaccgccgcgcgcgctcttaaacgaactgtgataaattataatgctttgtatccttcgactccatttcctaaaaagtaattactcacgtgcccaatttataataaataatgaagatatataatatataaatggatatgtactatataaagatatatccatgctacaatcctactatagcactaatcaacatattaaagctaacacctagtggagaatctgattaattctcatttgttaagtgtatatatatagcactatctatctatgtcccaacttttggatatgaactatgaagtatgatgatgctctttatatgttctttaaacatgtgtcaaaattaaatagttaactaaccaaaaaaataagtttgaatggatgtgtcatagaaagtgttccacgttgtcttgggagcaacatggttatgcatgtttcctcctcgtcttacgcctcccaacaagtcctgtgcacgcgatcccctccagccaaggacggacatggattacactacaacaataatggtttataccaacgccactattaccaacgccaaaaagtcctcattaaaaatagtactatcaataacgacacttacctgtcgttgggacaactattattatttttttaaaaaaaaaaaattatcatcaataacgacaatgtcgttat

SEQ ID NO: 321248 - DNA, 1486 bp, Cannabis indica
cgggtccgatcttctatcaatgcttgattcctgccaaaaacagattagatattctgattgtatcaagatacaatcgaaatcaataaggaaaaggcaataatcaaagtttccctaaaaaagacaactttccaaaagagaattccttctcttttgagaagttttcaacaaaggaaagttcagctgaaagtgcaactttccaaacaaggaaaagagcaactacaatccgaatttataaggcaagaaatcgaatatgaatgcacaacaatcttaccataaatggaaaaattattttgtcaactaacttgccaaaaaaggactttacaactggtttgggtttcctttctccttgatttacactgtatttttgggttgtgtttgtcttaaggttagttcatttaacatttttgttttgtggatttgtattcataaagggtttatttttatttcatttccccctttcttcttctgttttaattcttctcttttgtggatttgagttttgttgatttcttttaattttaatggagtttgatttaatttaggtaacattattagttaattttaattttaagttatatttccaaattttcaatggataattccacgtaattggtatttttgtgacttggcacttgggctaccgagccacataagcagaaaacggggtctgttagacgggggagtgtatttgctaacggtatcgaagtttaggtgattttactaccaaaattttggaattgggagttagttgcaaaaacctaggcacttagggaggttatgccgcaaattactcaggaaaagaatataccaagagagacaagttgacatgtttgtacacaagtcaattatagctttcttttagcttgttttgttggaaagctctgttttgattgtaaattggcttgttgattaatgaaattcattctttaatcaataaaacaacaatgtaaataaactatttcattttcttgtaagtaattttcttttattttagataatataaatgggtaaattaatgtcacacaagatgactctaaccaactcatataattattgtgtcatttgggtatgactcaattttgatcagcgcctaaattttgtgaccataacccacaataattcttattatattgtcatcaagatttcctcccattactttcattttatttgacagaccattactttgattttaattatgtatcttaaagaaaaattataaatttattttatatatagtgaactttgtgtgtcccaagttttatggactaaatgagaaagaaaaatagaactatacattatttttaattgggtatatacgattttgtactttgtgttttgtgttttgtaaaagttatcgattgaagtttttgtatttgttaaatggtgaattgaaccttacctattctaaagttgtataatataatactctgaaaggattttttttgttaaaataaatgtagggtttttatgttggaaatattttacc

SEQ ID NO: 321249 - DNA, 1387 bp, Cannabis indica
tgaacttgaggagtgcaatgattagtagctgaatctggataccaatcagcatcatccatgttgttgtttgtggcaatgttagcttgtgctatctgtgcctgttgagggccattgctgcctgaattcatactagaattcataccagtttgaacacttgagaaagacttatcaaaccgataaaaacaatcgtgcgatgtatgcccgagtcgcaaacacaactgacattgcactttattattgacattgattccagatcttcctcctcgatgattgaaattaccccctcgaccaccagaattctgacctgagaatgaactaaattcattaccacgattgaaatttctattgttaaagaaatttccatactgaccaacaccagtggactgggaattgccacgaccacactgctgctgtttgaaccttctccaggcaacattagcttcaatcaatgaatcttgatcattagtcacaaggttcgcactcagatccacttcttttccagatttttctatcctggattcagaggctaaaagtaaagcctcgatctcacctactgtgtattgttcaacacgagtgttagtggagatcacaaaggtgtcgtactcactcgggagacatttgaaaatagctacaacatgatcacggtcactcaaggtttctcccacagaagcaagaagatccacgtgctgcttcaccttcagcaagtaatcgttgaggctcaatgtccctttctttaggttctgaagttttgtgcaaaactctaggatcttcgaagagacttgtagagtaaaatgtttttccaaagagttccagatctgatgagctgagttgcaccctaccattcttgtgagaagaccttcggtcatcgacgacaatagccatgaaacgaggagttgatcctggacttcccagtcgatgaaggtttggctcactctgttctgattactatcttcattagtcgcaaactccggtggtggtggttccttaatgaacttcaagagacgatttcctcgaatggcagtaagaacttgctgtttccacaacaagaaattgtagtcattgaggcgaatcgaaatattgtgattgaagtacaccggttcttgaggggcacagttctgtgtagcttgatgattattgactgctgcgccattgttggagatccctacagctccaaccgtagccatgttagtactgagcggaggccagcgctctgataccatgttaaacctttgtgccattagaacctgaaaccagaaatcaggaaaagaagaacaaagaatagaaagagagaaagaacagagaaagaatggagaaggaaagaagatctcattgaatcaagagtgatacaatatatttatactgttggaatttatttttaccaggatct

SEQ ID NO: 321250 - DNA, 1503 bp, Cannabis indica
ctcgtagtctagacaaactcaatccatgtctagaaaatactttgtcaatcgtgtctttaagtgaaagactcgtagtactagtaacatgttccaccccaataaaacgttcaatcactagaccatttttatcaacatagcgtagtacaacaactattttctcattcattgacacatcacgagattcgtcaacaagaacagaaaaacatttatctccaatatctttcgtaataacattaactgttttagaagcagcaacttaagcaatatctttttgaatgtcaaaagatgttaatttcaaatttctaggggcattcttcaatgtaacaattttgatgtcatcattgtgatcattcagaaaatgcaaaagctctaaaaagttacctcgattatttgaatcctcaaattcatcatgtccacgaaatgcaagcccttgtcgtagcaaatatttaacacaatcaatttatgatttcaaacaagttcgatattccattattgtcttgagtatttagatattattatttcaatatgttgcttttgattcattaaagcttcacaactcctctgagctttattatggctactattagagcctccgacatgttttcccactcttgacctttctttctaatatgaaaatccccttttgataaaacacttaccacctgattggtctctattatttatttaaaaaagatagcaatacaagcaaaacagagcatccttttctatgctatattccaaccaagtaggaaagtcgacataccaggattgctgaaattttcttctttgatttgcgatcattttgtttggaaatttaattatgggttgataagaacttttttgtaggtatgctctccgaatttggtctctaacattaagatcatattctaaaattggagttcgtagcccaggatttgaaggaagctctgcaagattaatctccacctttttttaattttgaactttcaatattcattcttgtagaggattgtgcatctctttttcaaccatagtacctctccataactatttgtgccaatcatttttaatttttaaaatgttaattagaatgatacatcaatatatagagataaatttaactaaatattaataaaatgcttgtgaatataaaaaatgataatgtttataatgcttatacacaagattcgtatttaatgaaaattacattattttatacgcagtattttatgttctattgaattatattttatgtgttattaaattacttaaagattttaattaaacaataagagatatcttttaactcatttgaacttgaatatctttattattttccccactaatactaatagaatatgtataacatttaatttaacactgacaacaatatgccatgaataattgttcctctcgactattaatatataatagggacatttttgtaagttttacaaccaatctctatattctagtctctcaacatgagaacatcaataatataatataaaagattcttgaaaa

SEQ ID NO: 321251 - DNA, 1081 bp, Cannabis indica
attattaaattaaaatgtgaacaatatataatatttaattagactaataatattataacacttcataataacacaaacattacttttggtatttattttaatgataatatgagtattttaaagtgttcaaatagtgatctagtgttatattttaacaattttaaaaaaattatttttccaatagtatattaaatttagcacaaaatataatattgtgttatatttagcacacaataaaaataatttttttaatataatgttatcagtaatctttaatatatattttataataagaatattaccattaaggtctttatggaggcgattttttcataataaccgattccgtagggtctttacagtgtcggttgtttttaacccctgtagcgttacttggaacagcgtcgatagtgaatttcgtcaaaatcgacgctgaaatgtcttaaaaaccgcttctaaagtctaattttatagtagtgatgaaatgttatcgtatctcagagcacaatgaattgataaaatgcattattagtgtctagtatcttcctcggtatcataccgttattggtctaattatatatcggatcctatttaactttaaaaaataacttttaggaacttttttttaccaaatttagctcaatatttacatgttatattagagatatggtctaataaagcatgctaattgagttgtaaatggaattaatcaaattaatttagccccacaaagcacaagtaggtgcatgcataaaaagaaaaataaaatttaagaaaaaaaaaaggacaacagtgtaggaaattggtgtgattgggtattttagtagccagtggttcacttctaagtccttcccctatctttagttgaccttaaatataaattataaaaatcaatctcaaatcaaaagtgataaaaatccaaataattgtagagagagagaaacattccataggaaaaagtaagataagaaagaggagcaggttgattgatgaggtggtcctctcatttagatattgttttttatttttattaatggttttcttctatttattctaaattgctaattattattattattat

SEQ ID NO: 321252 - DNA, 775 bp, Cannabis indica
aacattaaatgttatttctaatctatattaataagtaaatctgattatattgaaatgagttttatttagggcataaaacccaacacaagattgttgcgggtgttgagaaggctgttgttgagtgaaatgagcattaaatgggcggtgagggtggagatggttagaagttaaagttgacacgatggtagcaagtcatggcggtgtgacctattttgaagcaaatttggtatttgagcattctattgggcagtctaggagctgagggatttcagggaagaggagcacgaggttggtgaacagagggttgagagttattgacagtaggattttgaggggtatgttaggtattttcttcttccacttgtggggtagaacttatactatctagtgatgccatggtgagccgttgggctctgataccatgtcaggagaaattaaaattgtatttgatattcctcaaagaaagatgtacatagtacatgggtatttatattacccaattgtatttaggatacttgtcaatacaattttaaaagagaatagtaaacgttatttctattgtttaacattcatttctatttcatagtaggatgtctcccattttttgcaaaagttctggcttaaagcaagctctttattagtgtgatatagtggatctttcaattgttctggttgaatttgattcccaagttcttgtgaataaagttaagcataaatgaaaagataaaggctaggctaattaggatttttttcccactgaactttgacatgtacc

SEQ ID NO: 321253 - DNA, 1829 bp, Cannabis indica
aaaattaattttttaaataaaatatataaattaaatgacgtgggctaatcacatagtgacacgtggacactaacctggcacataacggcctggtgcctacggaagttccacactagtgacggaaggtatttttaccgccaaaaataggacttaggtatttatatgctactcgacataaaacttaagtattttctttacatgcattgaaattccatgttttttatttataccaatttattaattaatttaattgattgcagaataataatattgatacttaaacaattattctctgtaattgtagaataaactagaaaacaaatagtgcaataaaaataaaaatacacaaggtttttatacgtggtatcaacaatttttgcagatttttactaatccaccgtgccacgcatagagataagatttactagatagctaggtctcaaaaatacaaagtaagtgacttatgcataaatagaatatctcttattttatgtcgcaagcttgatgtattccaccttctaattgaattttactggaacttcaagtgttcgaacttccttcgatctctttgaaagttcttgcattctcctgaggcaagacttgaagagctatctcctgaaagcttgtggaaccttctcccaaagatagaactgtttgttcttcttcttttgtacacttaattacagactcaagacaatacaaaatacataaacacagagaaaaagacgaacaccctctcctctacacaacaaaaattctctttcttacaaagtgagatacaaagatataaaagagatgcaaaacctagctgctataacgtatatttctaatcaatatacacattatagataactcatacacggtttgaaaaagaccacaactcacaagaaacttccctataaagtatcttcaatcagcccaaaaatttctacttttgtacatataaattcgtgaacagtaagtgcgattttttcttttatagaaaaagaaagtcttatttcgatttttcttcacacaagatttgatcagaccaattaagaaactcatataggatcatgatataataagaaacacgactaggccaataaagaaaagtaaagaattatttctctattaaaacttaccagctgtatgtaactttcctaatttagaaaagattgacacttaatacgcctttggtagaataaatcaataaaagatatacatgttaaattacacaacaatgcagttgaaatatatagaaacaaaataaaattattttgtcaattgaatatgccaaaatagaattaataatctccccctttgcaactttgattgataaaatattttataagaagaaaactgttatctgttgttgcacgatttgttggttcagatggctttgcacgattagataatttgaaggatttccacttaccgaaagcgcgctattgttatctactccgtgtgttgtagcttgatcatcagtagccattgatgaaactcgagtgaatgaggtaggaagcgttgaccactaagcaagaacaggggagttgatcaagcaaggaccataatccaaagcttaagaagatagttgatggaagaagaaacacgacaagaagaagaagagggaaggatcaagatcgagggaaagctttactttttcgctctgataccatattgcagaataaaaaaatgatttggtttattgaaattgaaaacgtttacatgagaatggatgtaacgccccgatttcccgagacgtcacactagctagtccgtttaaaaccatttaagataaagacaataaaagacttctttaataaaaaataactaagcatgagatctca

SEQ ID NO: 321254 - DNA, 1796 bp, Cannabis indica
tccaccaatggacaagtattttttaggttatcattgggggcccccatcctgctagagactcgggcaaagctagagaaaagtatgcccaaaccttacaatatgaataaaatgatgcagtcctagccatggaggatagaaaacctaaaattaccacgtgttagagaacaagtcataacgttcactgaagccaattctagccatgtcctttttccatacaatgaccctttggttgttgaggtgcagatcacgaaaaaaaatggtggctcggactatggtggatgatggggcttcctcaaatattctattcaaaacaacatatgagaaaatgggcaacttaaatatttggttccttgcactcaactggtctacggattcttcgaccaaagtgtagcaccacttggataaattcacctaccacttacagtaggacaaggtccgatgagcacaataataatgacacagttcttagtggttgatgtcccttcaacttttaacatcatgttagctgaccagtcctatacgacttaagagttctcacatcaatctttcacctatgcattaagttcctaactaaaagtggagtggggtgtctaaaggaaaatcaaaggattacactcaatactacaaccttgccctatataaggtaaaaaaggaacgtacttctagccagagttcagagaagggaagaagcattgcccaataggaatttgcctaaggtggggacgaagacatggatccctaacttgggaaaacaaatttgtcatgtctcatgccctaaatattgatccaaacttttttctcgtccagcaaaaaggaggttgttggacaaagagcgtgcacaagtactaaaaaaagaagtagaaaggctccacacaaaaaaatttatcatcgaagctttgtacccggcttgggtggctaaccccatactagtgcccaagccaaacaataaatggcgagtctgtatcaacttcactgacctcaataagacatgtcctaaggagtgtctcccactcccaagaatcaatcaactcgtggacgcaacaaccgaacatgaaatcttaagatttatggacacttattcagggtacaaccagataagaatgcatccacttgaccaagaacacacaagtttctgaacaaatatttgtctatactgctataaagtcatgttgtttggtctaaaaaatgcgggagctacctaccaaaggttagttaacaagatgttcaaagatcaaattggaaaaatatggaagtatatgtggatgacgtgctcatccaatccaacaaggctacgggtacataaaggatctggatgaatgcttttaagtcatcagaaaatataatatgaaactcaatcctttaaagtgttcctttgtggttagctcgggtaagtttcttggattcattgttaatgctcgaggaatagaagctaatccagagaaaatttaagccctcctagatatgaagtcgccaacaaaagtgaaggaagtacaaagcctaactggtcagatacctgcacttattattttcgtttcaaaatcaacagacaagtttcttcccttcttcaacatccttcgaggtaacaagaagtttgaatggatagaggaatgtgaaaatgcttttcaaaaactaagaaagcaactcgcaaggcctcctatactcttaaaacctttgaacaaagaagaattaggtatatacctagcagttactaaatacgctgtaagtgttgtgctgataagagaagagaataattgttggaactattttaccagaatctagatttactaccaagtatg

SEQ ID NO: 321255 - DNA, 1064 bp, Cannabis indica
aaaataatttccaacagtattcaaattacaaataacttttctgtttagaaaaaaacttgttatattaataaattatgttcaataatatttaatctataattaacaccagattccaacataaaaaataaactaaaacaaaaattttaaaatctcatattattatttagatgctaaaatttgttccaatctatataataactttatccaaaatataaataaaaaatgtaatatgtattttaaaaaaaaaattattattttaaattttaataaaaattttagttagcccaccctaaaattatatcctgggtctgccacttacataatcaaaaatttttagactgattgaatatatattttaggaaagttttttgggagttgtactcatgtttaaatcgtgtatgtattgtataatatgggtatataatgcttataaatactcatattaacatttagatttagtatctcttttatttactttgaattaaattcatatcattagaaaaagattatttttattgtgtaagtgtgtttgactctacctatgtgtttatgtcttttgtatctaggagagatacatatttaggagagatacgccgaacttgcagcatcacaaataagtataaatcctctttttaaatagatggttattaatttattgagattaattatttagggaggagtgtatttcatattaaaattataaacaaaaggatcatatttaagtttttatgtgattttactttttcttgttttagaattctacttgtagaaaaataactcctattattattattattattattattacaaagtggagaaaaatatttttttacagatttctaattcacaataaacatatctacaaaagattcaacaataaaagacattttgcatataattgttccactaataatgatattagttcatgttcagtttccaattaatgacttttatatttttgtgtgaattgcatttgtaaatgagcattattatttggtaccttaatgataactctatggtatagagttatttttatgcttttaaactaaaagtattgtgagaag

SEQ ID NO: 321256 - DNA, 675 bp, Cannabis indica
gttattgaacaagtcccactccattactttttttttttttgggcaattctcgtttgagctaattaatgttatttttgttgtctattgcaagttgcttttcaatttttcaggtagaatgtgtggctctacttatagtcttatagcattgaagtaggttcttattattgatctttatttaaattttgttgagtcaaattgtttagcggttattaatgttttttctaagcattttttttttgtcaatgagcttatatctttgttagaagatttattagcaagttaatttgatgtctagtttttcaggagtgttcttcaatgaacgttggtcggttagtgaagttgcacatagagtttctcgccatgcgctctttgctttgatagaaaacttgatttggttagatgagatcccatcttttgttagggattcttgttctatgaagctcaatgacgttattatttcttgatatatattaatctatgtaatcttattcattaagtttattttattaaattattttttggttaacttttctttttatatataattatgtatatactagcaaaaaactacgtgcgagacacgtatactaaaatttatgctaatttttttctatgttatttgaaagcgatacaattaaaaattaaaaaaaacaagtattattaattattaggtga

SEQ ID NO: 321257 - DNA, 1694 bp, Cannabis indica
tcatgccacgtgtcatcatttttgtcacgtcattattgtcaaaatttgggtaaatatttgccccccaagtttttagcggtatgactatacggtagaaattttcctatgcagccagcgcttcaatttagttgttgatgacttagtagtacggtgtcaagaatgccatgcttatactagaattacatttcaaacccaagaaataatttctcctacttagcatatttttacaacatatcccaatgataatttttcccttgacaagtaaaaattaattacaagaaaaataaagtatttacaaaggaaataatctaaatatttacaaagaaaaaaataaataaattacttgtagcattataataatccttggaagcttcgagatctccatcgtcatagtgggtaagttctctacactttctcttgaatttttttgcttgaaattttaaatttaatgaagttttagcacttcttcttggtagttttgtccatggctgaaaaatggcattgaatcattgggctctttgagtttttgatgaaatgtgagtgtttgacaattgggtaatgtgtttttggctctggtttgatgaaatttggtgaaggaatgactaattttaaaacttttagttgcaagtgttcttgagctttggaagaacatcaagaacatggagaattttgattttccctctcttttcttgctttgattctcataaaattgagaaaaaggtgtttgtgaagatattatgtaccttgaaaaaattattgaccatgtgttggtggttgagattttaggttaccccttatttcccttcaagccatgacaccacttcatggggtcagggtggctaccatgagatgccccgagatacatccttcgggggtccgccttgattgcttaaaactttagggtataccccgagataggccatggatagttgcgttgactaccccaaattaagggattaaacgacgataccctgagataggggttgttactcgaagattagggtgtcgagtacaccccgagttggccaaacacgcaccccgagttggccaatatgcctcgagcttgtggcatttagtgataccccaagatggggttttaagcatagtaccctgtgattggggtgtcggggtacacctcgagttagggtgttaccccgagagaggggtctcgaggtacaccccgagttaattcaattttttacacacacctcgagattggggtttggggtgcactacccccatgactaccgtgtggaagtcagggtgcaccaccctgagaccaccacatgtaggtcagggtaaggtacctcggggagacccatatggcccaagatgcagctacgggggttaatgatgattgcctcttatttacttcttagagacttatatatatatatataatttcatacattgtttttgccacacacactcagttaaaaaatttaagtgtgtaattgtcattgttgcttcttccatttagctacatgaaaggttatcccttgatacactttctttcttgtgcaccatgaatgtacatatgtatgccttctcttttggtttggagtcatatggctttattactatatgctactatgtgttaacttgtctgacatataccacactatgagtaagcattttttatagctaaccatgtaccacatataggtcgctcaagacattaagcaatgcacaaa

SEQ ID NO: 321258 - DNA, 1764 bp, Cannabis indica
atacttaacctaaaatatgaatagaaagcccataataagcaatcaaaaatgtacaaggtaattcgcgaaatgaattatgtaaagtatatttaagtttgcttaaaacagattataactgtttatgtgaagcataattaataaactgctcgcaaattgaaagcatggcagacaataactgcttgtgcacatagtagatagctaactacttaagcaagatcaaaggaaaataagagcgatagaaatgattcaagtgttttaaatttaatcaaggtataattttttaatttgtgagaaaaaaaacacaagtaaacaaatgtattaagttcgaatgcaaaaatacgaggcaataaataaaagataaaataaagagcaaagttggccatccaactttacaaatttgtctttacaaaagtgccacaagggacaaaccattgtctcgaccatatggccattttcctaaatataaaaaaaaacacaacttaaaaaccgagcctgcattgtaggagacttggttggatcttcttgttctgcttcaacctcttcttcctcgcctagtttttccctcatggtcttctcgcaataggcaagtatggcttcgacattgtcacccaagaagctaaggtccaagttaggttaactgaccagatttgatagatggtccgcctgccgatgctattgaccctgtctttggtttcagcctccatttccttaagctttttgtcatgatcaacctattttttatcaagatcatcttagagagacttgagagagtcctcgagttccttgacctttttttggtcagccagacgcttcttttctgcttcttccttggtgcgagaaacctcggccaccaaatcgttccactttttggctagagcatccctatgctccctgatttggcgaagctcagtctcgagcattttgacccgctgagacgaccgatgatgtgtgacatgggagaggaaagaagcctgcgaggagagggcaaattaaagttagtaaaaattgaaaatgatgaaaagtgagaataggaagaaagaaaaactaacttgatgcaaaagttcataactccttttggccagcgagaaccaaagaatttcacttggtgcaccgacccagtgagtttctccttggcattccctgtagcagagacctcattccctgcaacaaagacctcattccctgcaacaaagacctcattccctttcttcggagacttggcaacctcgatggtgagctggctcgaggaattctttttgttggtcgtgattttagtccttttgaattctttggcgaaatccgaggcctcaccagcttggacaatcctcttcttagatttcttgtcagctggggaagtagtcttgaagatgttctccaaatccacatccatatctgcgaggcaagagaaactcattagcacttaaacaaaataaataagtgaaaatgggaaagaactcccacttaataaggttaccataatcttcagaggatgacgagggaggactctaatattcactaaactctctagatcctgtgatcataaagatatcataagggtttaatggatctaaatcccagcttgaatctatgtgacccgatctatccaacatggtcccgtactgctcggtaatcccatagaatgagctagtgcagctaatttggacatgaaactctgggtaccaactattaaacctatgagttatgcgatttacgaggagagggttccaagtgtaaaaaattgtaccgactatctcggaaggatac

SEQ ID NO: 321259 - DNA, 1019 bp, Cannabis indica
caatttcctttgcagatcaaagtttgttgggattgaagctcaaaaaatcaatggctggaggtatttcgatccttaagttatataatgtatatattcgtttattccgcattttatatacacatatatataaataatctaacatattcttaatttaaggatgttaggaatataatttataaataattacgttatttttgcaaaagaatttgtatagttacaacaataacaataataataataataataataataataataataatatatgatttcaaggattatcttgtgcaatgagttgttttcggtactagttcctttgtatttgtgcttttggtataggctggaaatttgtctattttttccttgaaaaaagattgtaattcgactgctacatggtcatcctcacttgtaagctgtttgaaattaaatgttgatgcaacaatagataacctttctcagacgattagaataggagatataataagggactcgagtggttctttagttgcttgtctttcaaaattattaataggtaattttaattattatttaatgattttataagggggactccccttcaatatatatacaatatatatttcattataatcttaatattatcattattagcatgaacaaataagtttatcatgttaatttatcttttcttagtttttggagagttaatgttatgtttgttaatatttttttgcaggttgtttttcaattgttcaggtagagtgtttggctttatttgtagcattggatttggctcttattgtaggtcttttcttacattttgttgaatctgatagtttagcagttgtaaatgcattttctaaatgctcttctttcctcaatgaacttggttccttgttagaggatttagctagtttgatgtctagtttccttggagtatccctaatccatgttcgtcggacaaccattggggttgcacatggattagctcggcatgttcttcgggtggatagagatctagtatggtttgatgagattcc

SEQ ID NO: 321260 - DNA, 1299 bp, Cannabis indica
atggataattaatagcgtatcttgcgagtgcactaccatcccgctcaatgcctctctcaacgcagtaagaattcaacgtgtctccttcaaactaggtcccattattagtgatgatcttgtaaggcactccagacctacatatcaagaatttattgatgaaggagaccacttgtttaacgatgatgctaactagtgcctcagtctctacccacttggtgtaatagtttattgccaccactatgtatttttccccagccctacctgtcggtaaggccccaatcaagtcaattcctcacatggtgaaaggccacaggctggtcatgctcatgagttcgaccgggggcacgtgctgtagctagcatgcctttggaacttatcacatttttttgcaaacaccgtcacatctttctccaagctaggccagtaatatccttattttaagaccttcattgacattgaatatcctcttgcatggttactgcattctccttcatgtatctcagataacactcattgcacttcactttcttttatacaacacaggagcgaggtggagtatcatcttttatacagaactccatccatcaagacatacctagtggccttgtactggattctttgagcctctttcttatccacgggaaacttcccttctcggatgtactcattgtatggtgtcatccaggagggttcttcctcttccactcacaacactagatcacactcgatagtcggttgggctaagaactccactggtacagattgtagaacattgattcctaggttgatgcaagcttagctagggcgttagcgttgacattgctttcccttgggatatttgcaatcgtgaagtgttgcagctactctaggtaactcctaacattggccaagtatgccaccatccttggccctttcgcttgtgttatccaagttttcattaatcagacacgtggcacgatcagagaggggacacaatctctacataaggcatctaggggaattaaaagaaatggctcccagatctagaaggcagtgagaggcaatggcttccaggagcaacatccttcactaaggaactcggaaagtggtacaggttctgaagatattggacacgtcagctctttgcaaaatagtgccccatagacggttatacctttttctgaacaagattagatcttgtttcctgtgccactcatgatagtgcgcgtacgtatccttgagcatgctttttgcccaacagcctgggtagagactatttcataaaggagagacctttggactgttggaaatttattttac

SEQ ID NO: 321261 - DNA, 636 bp, Cannabis indica
ttcagatccttctccttgttctttatgttgagatgtttgtgcatttttttttattattttttttttcactttgaatatactcacgactctctagatcgaatatagagttcaaatccataagtataattttattttcttctctccttgtagccatattcttttttttgcttttgaatcctattttttttctctttgaatttaatttctgtcagagttactctttcttaatgcttcaacaaattgtttactttgctccattagttttttatattgttcttcacttttaatttttcttttactttcttcacaccaatagatctttatgttaagttaacatcaatttgttcatcagtcatattgagatcaaataaattcataccaggagatttcgatatcgatgactcaaaattgagagagcctgattgggatccagtaaagttaccaccttgttgttgaaatctagttgctccattgacattattatttataaatttctcacaatctctaagaatgggccacatatgatcgtatttaaattcttttttgtattttggatcttgtgataataatatttttgcttgatttaactataaaaattaaaatattttaatgatatgaatataatttgaaggcaag

SEQ ID NO: 321262 - DNA, 1000 bp, Cannabis indica
tatatgtttttttttcttttttgtataggaagtggaaaactctcaaagaataatattgttttatatgtatcatcaaaatgaaggtacgtacatatattataaattaaccaaataatatgttacattagcaattaaactcttctcttgtttattatttctcacttatcaaccctaatataatatcattttttgatttttaataaaatttgtaaaactccactaaaccaattcatccatcaaacaaacaaccaaataaataaattaattctctatctaataaaaagaaaaacttaagaataaattttaaaattttctctttacaaaaaaataaaaatctttttaacatcacattttttttttttgaaggacattactttttattaatttcaataattattgtaattttgtttttttaaataacgtttatttttttttattctaattatatttaattttagtttttcatttaaatttttttattaatatttaaaatattttttattttgttttatctatgtatttaatttttgttatgtctgtcgacagagaactaagatcgttatcgaggtggaccagatatctctttgtcaaaagtgtaaagaaaaagcgaagaaaatagtaactgatgaaggaggtataataaattattaatatatactacacatatttatttgtgtcatattgttattagtgtaataattcgttaataattttattttagatttgaactcggtgacgattgaagaagaaaataaattagtagtgattggatctggggttgatccagctcaactaacagtttcactaaggaagaagttaaaaacattggtgaaattaattagtgttgaagaagtacttatggatgaagaaaatattatggtgaataatgaagaagaagttaatcagattaataataatcagcctgatgatgatcagcctcttttatctacagtactcccaccttataattataattattataattataattataatcagc

SEQ ID NO: 321263 - DNA, 1624 bp, Cannabis indica
ttttatgtgtaatgattcggtggaatgtgcttatgtctaaccattcctccaatatttgaaaagttttcaaataatttatatgtgcaaatgattatttaaaatgttttttggccataaatttttcgaaatatgagaaatatgagcaattttcacaagtgatgtcattccctaataatttccagaaaatttaaataaggaaacctattaagtttttattatttgtatgattaaaaatataaaatgctttcgaagtagacaacaaagtgttattaattaataattgtgacggtggtgtttagtaatatttttattttttaaaatttttaatttataaaagtgaaaataaaaatgtgttttataattattttttttaattttaaaaactaaaaaagaacaaaatacatgtttttgtaaattttatttttgtttttttgtttttatttaaattgagcaataagaaactcacatgagagaaagtaggtcagggtccgaccatcagggtttggagcaaggagcaggggtcaagtttaagtttggggtcgtatggtctgggacagggttcgaggtctagctcagggtctggttacgggtctcaagtctaggtctagggtctgtgtttgtgtttgaggtcaaagttggggtccaagtctggtgttcaaggcctaagtctgggtatgggtctagctttgggtctgagattggagtttgggtcagtacgaggtctagggtccgaggatagggttgggtccagggttcgagaacacggtcggggtctgggagtccaggatccagagttaggattcatgtctgggtatgggttgggtatagggtcaaggtccaggtctaaggtttgtgtccaggtccaaggtccagtccgaattagagtccaggttttaggtttggggtcagggtcctagtccatggttggggtccgtatttgggtccaggttagggacaagctaggtcgaggttgaggtccattgattgtgtctaagtttagggtccaatccaaatcggggttcatatttagggtgtggggttcaggttgaggtttgggtctgaggtttaatgtcaaggtctgaggtcacggtctgggttcggggtacatgtttatggtcggggttggggtcggggtcgaggtcaaagtccaattttcgaagtccaagtccaggtctcaaggtccaaggttggagtgcaggtccaaaatattaatgaaaagaaataccaatagactttaattgttaagaaaaattttgaaaattatttttttttctttcaaaatttttgttcttaatttaaaaattagaaagtgaaagcagctttgtaaaacatatttttttgattgtttttcattttattaattaaaaaagtaaaaaaaattattacaaaatgttaccaaacacaccatatatttctcttttataaagaaacaaactaaaagcatgaacacaagtatatagcacttgcataaataatattattttagctcatccaatccaatcagtaggattcaatccataaagtgtagatatccgcacttatgtagttagattggattaaaaaatttaagatccgcacaaattgacatataaaaataactgatctaatctaatctacacatatt

SEQ ID NO: 321264 - DNA, 983 bp, Cannabis indica
aatgatagattttaaaaaagaggataaaaataaaagagaacaatataaaaagggtatagagtctaatttcctctatttttattacttattgagatatttcgttacctaaagttttaaatttaactggcatatatttaatgattttttagtaacataagcattaaacattaattaaattgatacgtatttatcatttgtagtataaactttaattagtgtcttaaccttacttaacaagacgcatctaacttaagggtcagattttactttattggatctagcgaaaacatgtaatatcacttactaactatatgttaataaatttaagatacagagtctattaataaaattagatgaaaattataattttactaatataaaaaatattattaaaaaattcattaaattaatacaaaattttaaatagttatgccacaaaactatatatgtttcaactctgaaaaacaaagatattataataatgaaaaatttaaagcatattctataaaaatgttggcacatatctagttaaattcaattatgatatcattgattgatcctctaactcccaacataagtgacattattaattatcaaaaaaaaattgtcacttataaattataaagtgcagatcatataatatctatatacaattttactcaattggcaccacaaattgtgtggtgtagtgatataaaattttttattagtcttttttcttatttaggtcaagagttcgactttcctcaattataagggattatagttatcctttaaaactaatttaatgtggtgggacatcttttgggatggagacccttgtaagatataataccgatgataagaatagtcatatataacaggtacctataactagcacgtgtggtccttagggttgtcaaaagcatcgaatgagtgagaaatgtatttgcaggtgggcaatatccaattcaattgaactgaaccaatcaaattcaatctaa

SEQ ID NO: 321265 - DNA, 1896 bp, Cannabis indica
gttcccaaaccagcaagaacatacaatattaattgttcgtctgaaatttgattgcctgcagctcgaaggccatctgcaagattcttcatctttaataggtattcatcaatggccaaagagcctttctttgtggactgaagttgattcataagatgaatttgtcgtgctcgtgatgcagtgccaaacaattgctcaagggtagtccagatttcagatgaagtggcacagttaacaacatgcccaatcatagattcagatattgttgacattagccaggaaaggagaaattgatcaagacgcatccaacgattgaagtcaggattactcaccattgttgtagattctgggggttgacgaatccttgcttgaggccgattttgattgagaagaactccttcaagatcgtgtgcccgaatcgctggaaggacctgtgatctccaaaagaaatagttgcttcgattcagtcgtaatggaggaacgaacattgttgtagggacgatggactgttgagttgtttcggaggaggccgccatggaagtgtaccttcagctctgataccaagttgagctgaacagagagaatgaaaacagagagaagagaaagagagaaagtgatttctttattcaatgaatgaatcagttatgtacaagagttggtatatatatatatgactagttacaacagaaaatataactaatctttataacagaatgtacaactgttaataacaaactacagctgtcattaactgtcattaactaacacctaaccatattcactttctatctcaacatcccccctcaaactgaactgggattgtcccagggacagtttgctgcataaaaaattgaatttgggaagagtcaatggctttgtgaagatgtcagcaggctgctcttcagttggaatataacagacagttattttgccttcagtgaccaactctctaacatagtgtacatcaacttcaatatgcttagttctggagtgaaaaactgggtttgatgctagttgctgggctccttgattatcacaccatatgactggtttgcctactggtttgatccccaattcatttagcacagaaatgatccatacaacctccgtggcagtggttgataatgatctgtattcagattcagtgcttgagcgagccactgatttttgtttcttggacccccatgagatcagattaccacccaacttgacacagtagcctgtggtggactttctgtcgtccaaattacatgcccaatcggcatctgaaaatgcctctagagtaagacatgttgcaggttgaaaaaccagtcctctgtggagtgtacctttaatatatctaagaacccttttgcaggcattccaatgagcaatagttggtttttgcataaattgactcagtttattaactgagaatgcaaggtcaggtcgagtcattgttaagtattgaagggagccaatggtactccggtagagagtagggtcttcgaatggagcactgtcagctgtgtaaagcttgtatccaggacaggctggtgtgatgcaggacttggaagtatccatgttagttcgtttgaggatatccatggcatactgagattgtgacaaggagatagtgttgccagttcttgtagcctgaaaacccagaaaatatcccacagaaccgagagtcttgagtgcaaatttggtttggagatcagtaatgactttgtgaacagctttagagttggcaccagttataaggatgtcatcgacgtatactagaatcagtaggagactgccattggagttgctaaaaaagagactgctatccgagacagagtttgtgaatccccaagccaataatgcacttttgagcttctcataccaagctctaggtgcttgttttaagccatacaa

SEQ ID NO: 321266 - DNA, 1770 bp, Cannabis indica
tcagatcctatcctctcccagtaattctctcattgaactgccttatcatgtcactagctttcctgttacgatggtccaactctgcctgatgagattagaggatgtagtcctggtcatccatccatctcaggaatttgcgtctctgttgggtgaatgcatcacaacctacaacacttggttcttcagtttggacttggcttacagcctctctaagtatggccaactaaaagtcttctcctaagtccacatgaggctcaccaattgttggttcgccaattcctggccctatttccccagcataatatcgggaaacaaagttagttatggtgcgcgaggacagttccacatggacaaaaccctctgcttgaggtggtaatggcagatctaccctgggcggcagaggttgttcattggaatagtcaggttagcagggtcaaccaaaccagttgtgttggtcgagtttgttgggcctgccgtgttggcagaattggctacatccgttgagatcgtggaaactccagttgtggatggaacatgaacatcatgatcaacagtcatagggtcttgaggaagaccagatgaagcagaagttgtagttggagttctccttgttacaactatggtgattgatcagatatataaataacactctcaatgaaagcaccaaaatagtaatctcagatttggtcaactgacagtggagtcttatttatgatcagaatcaccacgtgtaaacaattaaaacaagtaaataaatggacacaatactttaatagaggttcgaccatcttagttagcgggtaacgacctactctccttttagttatattgatatgagagataataccactcatatcacaagtgttgtgagttttacaatggctctctttgaattacaatagtgagaatgtaagacagatctcaacgaagtgaaatgaggaagacttagtctctactacactgcaagtggcgtgtaggagagagagactagggtttcgagtgtttaaactcaagagcttaggagtgagaacttagagctttaggtttagcctagtgttctttatataagagagagctttcataaggtccaagccaaagtaggttgatatcccttaaaatggagatatcacctatttgttacatattaaatatataagaaaataacccattaattattcctaaaaaataggtaaataactgaagttgaacccctactttgtgggttgttgaagtccatttgtagctgagagtgtctgtctaggttgaaagctgcagagacaccaaaagtgtctgctagaagaggagctggccgacctaccacttgttggaggctggctggcctatgttgtactatggttggcctggggtggtccggctagaccccccctcgttggccattttattgtccctttgtcctgctttagtatttggactcttcgtcaactagtacgttgtgcatagtgacttggtcctcttaccgatagttgtactcctcatggcatcaatcttgcttatgtggacatgccacgtcacgtggacaaaaaattgggataacactttctctctttttcttttttcccttttcttcttcttttatccttaataccttagacggagatcctctctccctcatctatctacacggtgccactgctgggaaggctacattcgaccagcaacggtctgatggactacaaaaatatgattgataaacctccaaaccccaaaagacccgacctcaccttccctccctttctctctctctctctc

SEQ ID NO: 321267 - DNA, 1085 bp, Cannabis indica
tggaaaaacacacccaacaatatcaatatttacaaaacttaaagattagattactaaatagaaaataacactaaaactaactaaaattaagcaaaataaacacattttcattactctcctcacaatactttagtttaaaagcataaaaattaactctataccatagagttatcacacgaactttcattagcatggaaaaaaaagcagtctatcatctgcaaacagtagatgagaaatagggatagcacgcctagtttgaagccatagaggttgccaatttcttgttcatatgctgaaacaatcgtgacaaaccttcagagaaaattaaaaataggtacggagataaagggcatccttgtcttaatcctctagaaggggttagagcacctatcacttttccattaataagaaaggaaaagttgtttgttgttaagcatctcatgatcagcgatatccattcattacaaaatctcattttcttcataacttcttctatgaatctccattctacttgatcaaatgccttgctcatgtctagctttaaagatgcaataccgttacgacccgaggtcttgtttttgatggcataaaccaattcaaaggccaccaaaatattgtctgttattaaacagtttggtaagaaagcacattgagtttcggagatcacttttggaataacttgcttaaatcttgccacaaggattttagtaaccagcttggaaataacataacaacggctcattggtctgaagtcttgcatttgttatgcttttttaaccttcgagataagggtgatgattgttcggttcaagcttgttgggtcagctccatcatttagaacacttaatacagctttaggcacaagatcccccacagttgaccgattgtgttgataaaacatagcaaacatatttctgtcaacaccggggctcaatcaagtggtatctcaatcatagtgtgtaagactatgaagaatccaatcaaccagaaggagaatcgggctcaagaaagagagaaagagatccaggttcagatcgtgataatgctctgctacaaaaaggaattaagggttagagatctgaacg

SEQ ID NO: 321268 - DNA, 839 bp, Cannabis indica
tgagtttagctacttacattccagaaaataaaggtaatattttaatagttaaaaattgcataaaaattatctttgcaaagactaagtataaaaattcaagaaatactaaattcattctcactccataggtggagctttagtcagttgacatgtcctccgtgaaagttgtgtagtgcataaaggacaagtgttccattaaggactagaatcttaattttatgagcattgctataaggcaccagtggtgcctagcaccttctcgacatgtcacgttgcgattggttggcgatactccctaaacactattatattaaattatatgggactcgatacttagttggaccaatagcgatactgacacataggagggtgctaggcaccactggtgccctttagcatttctctaattttatctttgagattttgacacttattgactgtgtggaagatgtccttgtggtattagaaatatcttgaagcatctctcttggcttgatcatgcttcactggtttaggaacttggaatagaactcggtcctcattcacaacatagatggtttcttgagtttctatcaactctttgtagattaagtacatagggtgatattagccatctttctaaataaaatattttaacataaaatatatcacattaattagactgaaatatttcttaaaaatctaattaatttttagttcttttaataaaaataacgcatgtcttatcctttttttttcttttcttaattatgtcataaatactaattattaagtgtaaacaaagataaaattaattctaaaaaaaatattttcaacatacaaatatataactttaattt

SEQ ID NO: 321269 - DNA, 927 bp, Cannabis indica
ttctcctcgagccctcctgtcccctacccctcgaagttgggattgagggtcacaactaagctcacaacatgccactaatagttggtgcaacctcttgacacttgggtctcgcgattggggtctagctattcgcggtaataccaaggatttgacctaaagaagttatgggcttctacatcatgtcaatcatcatactttttcgttctcactctcccctattctgcctttcttactaacttcaatttgccctttctcctcaggcttcttttcttttttgtgctacacatcaccggtcatctcaacgggtcgagatgttaaagactgaggttctccaaactagggaatatagggatgtcgtagccaagaagtggagtgattctgaagctgaggtttcccgcactaaggatgaagcagaaaagcagcatcaagccaaccaacaaaaaaattaaagaactcgagaattctcttaaatctgttcaagctgatcttaaaaaacaggttgatcatgatcaaaagctcaaagagttggaggctggattcgaagagagggtcaacaatataggtaggaggaccatctatcagatttggtcagccaaccccgagttagactttagttttttgggtgacaaggccgaaaccatgcttgcttattgcgagaagacttggaaggaagatcttggcgaggaagaagagtttgaagcagaacaagaaaatctcaccaagtcccctataataatgtagacttgtattgtatatatattattttgttttgtttaggaaaatggcccaataatttgtaaagacaagtttgtgaagttagctggccaacttagcttttattttatcttaaatgccatgtacctttacattcgaacataatatatttatgtttgcttgcgttttcattcacaatgtaaacaattatat

SEQ ID NO: 321270 - DNA, 1007 bp, Cannabis indica
acatctgaggaagcaacataatttgacagagctgagccgactgatttgataagacaatctcttcccgcgctagaaaggagtttggctttccaacccttgatacgcaataaaacccggtcgaccaagttgttgtagttactagttcttcttgaagtattgaatagaggcagccctaaataggtcgccttatcagtcatttgcttcattcccaagatttccttgattgattggatccgccctcgggacactccacaagagaagaagaccgaagatttatggaggttaattgactgtcatgaccactcgcagtaggtggccaagcattccttgaaggctttagcttccttcatagaggcttgcccaaagagcatgatgtcatctgcgaacataaggtgatggatggccgggccgtgtctacccatcttgatccctttaatcaagcctttttttccttatccataagaaggcgagaaagtgttttgaccgccaatataaacagagtcgggaagagcggatcgccttgccgaagacctcgctcaggcttgatcttacccgctgtggaaccatttagaatgagcttgatttcatgcacagaaatacaggcacggatccatcccaggaagggattagtaaaccccatattcgagagaattagcaaaatgaagtcccaatccattttgtcataggctttctctaagtcaagcttgatcatcataaagcctctcttacctttcctctttttcatagaatggactatctgtcttgcaatcatcgaattctcagcaatgcttctgcctctgacgaacgccgcttggttcggggaaataattctagggagtaccccacgtagtctcgaagcaatgattttggagatgatttttgtaggagacattgcagagtgcaattggacgttagtctttagtggataaaggagctttcaattctttggggattaagcaagggaggtatcgttgatgaatcttgcagttctgaatgagtgaaaaaaa

SEQ ID NO: 321271 - DNA, 1234 bp, Cannabis indica
atgtctaaagcttatgaccgggtggagtgggattttattgaagaaatgatgaagtgcttgggatatgacgagcggtggataaaaaagatcatgggttgtgtgaagacggtcactttctcagtattacttaatggagaggcttgaggtcacatcattcgagaaagaggcttgcgtcaaggggacccgctatcaccttttttgtttctcatctgctccgaaggtctgtcttgcttactgaatgaagctagtcgagccaataagctacatggtcttcgatttggtaacttggatagtagattgactcaccttctgtttgccgatgatagtctagttttcttggatgcaacaatagaagagggaaatgcccttgcagaggtgctacgaacctactctacactttctggccaatgcattaacttcaacaaatccaacttatgtgttggccgaaagattagccatatggaaggtcaaagactagctacttctttgggggttacctttatagaaaaccacactaagtaccttggacttctagcgtttgtaggtagaaacaaaaaagaggctttcggtttaattcagaataaggtttgggagaaacttcaaggatggaagatgggacttttctctcaagtcggtcgtgaggttttgatcaaatcaattatccaagctcttccggtctacataatgagcagttttagaatgacgaagggtttgattcgagaaatccaagcgcttataactcgtttctggtggggttcttcggagactaagcatcgaattcattggggagattgggagaaattatgcatagataaatggtctgggggtatgggtttcagtaatttggaggacttcaaccaagcccttctcgcaaaacaaggttggaaactcgttactaaaccggacagcttgtttgctcaggttttaaaggctctttattatcctaattctgacttcttgaaggctggtttaggcacttggtgttccaatgtgtggcgaggtattatttggggtcgtgaactgcttttaaaggggctgcgttggcgtgtgatggatggtagtaaggttaagattaatgaggatcattggattcctagaggagctccttttcttcttcgagccccggcaaaggtgtcccccaatacctatgttaactctcttatgaatgataatggggaatggaatttagtggctcttgaagataagattcacgaagatgacatcccttggattt

SEQ ID NO: 321272 - DNA, 512 bp, Cannabis indica
acaaaagcattcccaccaaacacaacttgcatcaatctcatcttcaaccaaatcataattcaattccccttcttcatcttcacccacatgaaatctaaccacctttcctccacctcttgaatctaatcactgaagagcttgaactcataactcaccacaacacacacaagaaaaaaaaaaaacgtagtaaaatatgtaatttgaacctacaaattggaggtgtatgccattattcaataaataaatatatataataacaaaaatatcgtttttggcagtagtgtttccttagcagctgatgtacttgacaaaataataaaactttaacttacacaagacaaaatttatccttgcttgattttgtcaaaaaatgtttcaaattaactatggtgggggcacgtcaatggagttctcgaattagatacttcaaaaattagcaaattcataccttaactaaattatttctcttcaacatgaaagtgaacccacaaatttgaatattcacttgaaag

SEQ ID NO: 321273 - DNA, 1770 bp, Cannabis indica
taaattatttttcgacaaatcttaattattacaaacttatactttaaaaatcataacaataaaaattctaaaagaaaaaaaaagaactttttgggtatcaagttgataaatactcaaagtgttaagagacccaaactctctttaccgggccactttctatttttaagttagattttggaaattgagtgttccattccatcactaaatcctccaactctagctaataggcaattgctatagtaaaatagatataagacaagggtggctgatgattatgatttatgaatttaataatatcatatcaaatctttagtttagtcaataatcacaatttatattttattgccataatcaatgggattataacattatatttggccgttctttactcaggagttttcattataaaaaatatatattcatttgagtgagtcagtattgccaaatgccactcaaggaaatgaggaacttaaaagattttatattttttaaaagttaccaatttgatcatttattttgttaaatgataaaatagactttatatttttttaaaatagtacaaatagaaccatgaactaattttttgtcaaaaataaaatttaataataattcaatttagaaatattatgataaaattagttacatgttcgtgttaggaaatatcttcaaattggttatatgaaaaacaaaatattaaaaattaagctcatagtcttatttttattattttgaaaaatacaagatttatttatcattttaaaaaatagagaatacaatcagtaacttttacaaaatacatgatctaaagtaatatttacctatatttttattctaaagtaaatacaaaaaaaacattgttattggacatagtaaattttttaataactctcaatacaaaactattaaatccaaaaaataaataaattaatgcttgttcagtaatatttttgcttttttgtttttcgtaatattatttaacaaaaatttatttttcaatatttttgaataatttatcagaaaattgtttttttttatttggataccgaataagtaattattgttgagtcccaccaagcctaaataaacttctccttaaaaaaaaaaaatcctcaataaatttttcataattccattttattaggaaaaataaataattaagcctttggataagaccatgtccaataatagggtaaaaaaaatacttgagacaaaaatttgtaaatgttatatatatgacacactttttataattgtgttttaatatataatagtaaattaagatgcactatatcctattagaattttacagttaagtatgattttgcgagaatagtattaaaatgagtgagctcttaagaattctttgtgttgcacacctacactttatttatagaaaaaaacattggattttcaaaaaacttagtattgtttagtttgcttaatttttaaaattaaaagtatatatacatatggtaatggaaaaatgaaaatttattaaaaattagatatgctcaagtgattgttaagatatcatattctcctctgtcgactcaagtgcagcctatacttagtgtaggaatttggcttggtgaaattccaagtttaacctacaccaacttcaattttacagttagaaacgacagggacaaatttgtcccagaaaaatacaattttagaaacccaatcaacgacaaagaaaccttggccgtttctttcctgcacgacaacgaagcttgtcgttttttttactcacacgacaaatcgtttaaa

SEQ ID NO: 321274 - DNA, 806 bp, Cannabis indica
taattattatagaatatctcgtttgaggaacaaaaaatgaattatactacttttctagccttgaagaagcatatagatcgaaaacaaagcaagaaagcaagatatgatatggaatatgggtaattttattctatatgacaggccataatagcagtttgatagttaaaacattattaaaatatatggatgtgtataagataatcatgatttatttctaaggctctttcggtacatgggactaaactaggattaagatcacttatccttatttgatgttatttaaacattgagactaggattaattcaagttgtgtgagattatttatcgagcattgttattaagtactagtggtatttagctcacttaaaggtagtattctaagattggttagtaatattttttaaaaattattatcttaaattatatgggatcaaatatataactatatcaatagtgatatgacacagaaaagagtaatatacaccactaatactttttaatatttctctttatcttactcttaaaaatagaggactccactattactagttataatataaaattccaccacaactataaattctaatacacgtatattatttttattctttttaaaattaaataaattaaaatcctaatatttaatacacatattatattgttagggacatgattttgtcccgtgatttacttttacggaatgtattccgtggtacattagataggtctcggggtacattaaatgagtgtcagggtacgtttctactttttaaccctaattacccctagatcaatctcagccgtc

SEQ ID NO: 321275 - DNA, 655 bp, Cannabis indica
gtctgcacagggggaaaccccaatccacatggcactagctttgttaatcaaagcttcattggctaatacatgagcaacttgatttgcttccctataaacaaaagagatcccatgaacccttacgtcttgcaaaagacttctaatatgagtaatgagtccatcagcatctctacagcctccttcatctttcaacaccagattgacagcctgcaaacagtcggtttccaccgtaaaggatggcagcttcctctgcaaaccggtttgaatcccaactgaaatagcagtgacttcagcatgaagaggagttaattctttcctcattacctgtacaatagccccacacacccgcccatcacggtctctaacaaccgagctaacactcgccaatcctttccccactttgaccccagcatcaacattaattttaaaggaacccctcacaggtgcagtccaacgggcagcttctgtaacgccctaaataattaggcacgctacccaagatatttacgaaaccctaatcccctaaacgagattactaatcaaaatagcgcagaatttaaacttttgcaataaacagaatgaaaataaaacttgtaataatttaaactttatagcagttgggatcccaaaaaaatatttacaaattttattacaa

SEQ ID NO: 321276 - DNA, 568 bp, Cannabis indica
aatttggcacaataaacaggatccagagctgtatgtgagtaagtggtacaaaaaagaatattatatgaaagcttactctcactagattttcccaatttggaatcaagatgagtgttaagattggaatgaaaaatccagttcacaagaagcagccaggaaggccaaagaaaagtagaaaacttgaacttcaagaacttgttttgggcaagaaattgaagagaaaatatgtgataattaagtgttcgggttgtggtggcaaggggcacaatttaaggacatgtggcagtaacaagacaacttttgtgagtaattctatactattctctaactactgcaactattatttggttataatctttatcttgtctttaattagctactatctattgtgtattgctactgctactgttgtgtatttttgtgtgtattgctactgcaacaagacagcttttgtgtgtattgctactgctactattgtgtatttttgtatatgatgtgaatgcattttgaaggtgggtgtaaagcccgcttagttaatttggaaattatcagttaattatgattaatt

SEQ ID NO: 321277 - DNA, 1447 bp, Cannabis indica
taattatttttttaaaattaatactacgtggaccactaaaaatttgccaggtgtacaagtgtgtacacgtggatagtctaccgtggtattcaattgtgatttttggacggaggggtacagagcaaaacggaatggggggttcagtaggttttgccgtcaaaaatttaatttacgtgattaagtattacaaaacataaaattcaagtaatttagctgttaatatccctttaattaatgttctctattttccagggattcattttccaatatatataatcatctattttccaaattttactcatactttttttttactattgtggattggaaaaacaaagtagcacactcccttgcatataggggtgcacaaaatgtagggtgatctatttgactcagccaatttagatggaatttgaccatattgaatgaattagtatgtaattaggttattagatggataggatgataggatagataaaattatattgtatatttattttatttatttttatttttattttttttttataaaatttaagatatactcatttttatagatgatgcttccattatactcattaggctaatgtaatttatgctaaacataagtggaaggtaaaagtatattggacaacctacttacaaaaatgggtatattaataaaatataatatgaggatatttttttattaatagatacaaaaaaaaaagtatttctcaatttatccctatttaatagggctattttcaaaaatatgggaaaaattattaaggttatgataaatatggcataaaagtaaatgtcactaaatatttattttttaaaaaaaaaaataaaacaaatgaaactacagtcatcgctggagttgttactcttctcggaaaattcactagagtttgctaccggcacgaaaaaagttgtcggagtagctgtcagtgtcggaaaagtcatcggagttgccgatagcgccgaaaaagttgtcagaattagtattttcactggaaaacttacaggaaaataccaagaaattgatttcttgatgaagaaatcggttgtttcttggtgatttttccaatgattttactggccacaatgcaattccgacgactattctagagtttgctgttggtgctagaaaattcgctggagtagctgcctgtgtcggaaaagtcgccggagttactgtcgacgtcaaaaaagtcatcagaaatagcattgtcaccagcaaaattaccagaaaattaccaagaaactggtttcttcaccaagaaagtggtttcttcatcaaggaactagtttcgtcacgcaacaataataaagattatgaaaacaaaacaaaaatgatatataatgaaaatagttgaaactagtttcatcaatcaatcaaatagaaaaaaaaaaaacacaaaaaaaataactcatagatataaacaaaacaacacacaat

SEQ ID NO: 321278 - DNA, 1077 bp, Cannabis indica
aaaatagaaaaaaaaaataaaaagccacctaaactctcttatgcattcctttatatatatacatacatacataagatttttcattaaataaatcattcttgctttttatcgtttcaaaatattaatgtggtttaaacatatttgccattttatatttttatgaccttttgtatgttttattgttgttttaagagttgtcatttgagggatatctaacccattcaatctaatatttttatactgattaaattattattattttctgtttttttagaacatgattcaattataattagcttggattgattggattcgaaaggatcttaatttgtaaaatgaattttaatattaacttaaacatattaaaaaaaaattacatgacaactaaacattattactaatttgaattaaatattatacaaaattattaactttacaattctttttacgtaattaactttacaattttaatacaactaaaatcttaaaatatcttttatacaaaagtaaaaataaaaaatttaaaagacacttaacaaatagtcacaataattaaaatatttcaaaatattcaacataacaaataataataagatgtatattttcttaaaaattttctttaattaagtgtggaaaagtacgcaatactaaattttttctttttgaataaaatgcgtaaatatattaaaattaaataaaactagacatcatagtcattacataataagttatatggtatggaggacggatcaaccataccaattacattactggcaaaaactcattcagccacattatggaccgtaaaattacacagtctagaaataaacaaaaagttacaactaattaaaaggtttgagagatttttatattgaagaacatagttaccaataccccaaatagaacaagttccagtcattattttgatcaccgtctcagaatcactctcaattatcacaaacgaatgcttccaaaggatcgatgattctagggctaacaaataggccgcaacttctccaatgacactactacaatctaagcctttagcttcccttttttcaatccaatttataaaaa

SEQ ID NO: 321279 - DNA, 685 bp, Cannabis indica
tttacttttaataaaaattatagggaatcggtagttaattacctcagtggtgttagatcaagagcggtgccatattatatgattggctctggctcccttaattttatgtatacaatgattctttcattatataatatatataatttttttttttcattaatggcctaccatctatgttgcttttcaaaatctaatctatatattggaggattctatagtaggatttttttgttttgtccgcataagaaaataaaatagaccaataaaaaattaaagtagattaattgtaaatgaatttttgttgatcaacttgtagaagattatatcatgcaagtggagaggcgctggagacaaatgctgcatccgtgggtcctgcagtgggacaggaaaagggactcgccacgtggctgctggagactttgtggactggtatgagttgcagaaataccaaatttaattctctttgtttggtgtttgggttggcagacagggctttttgggcttaggcctatttttgggcttttgatagtaaatacaaatttatttcattttataatttgagaaaagttgagaaatatattttttttatctattgatcaaaattactctcatactatatttcattaaaatatacttacttttgtgagttgattgctcaatataccctcaccctctactagggccg

SEQ ID NO: 321280 - DNA, 2704 bp, Cannabis indica
acatattatttagaacctaaaagatctgaaaggagttaggttaatttataatctgtctttcacattgagataaggatagcaattaggtattaacataggtagcttatcaacaggattcacctccctaatctctcatcttgattaatcttcgtttattttctctttaatttctgagttatttacttttaaaattgcaaacttgttattttaccaaatagaatcataagtatagtttagtagtacttaatccaattccctgtggttcgacctcacttgcgtgagatactacttgatacgtacacttgcgtgataaacagaatattcgtaacagttacaaacaagtaacacaaacacaacctgtttaataattgtgtcagaaaatgaaacctgaatatgatccatttataaatgagttgacacaacacgacccgtataacccgtttaaaagtatattttgtttaaacatatcaacctataacacgtttatgaagtattcaacacgtttatgacccatttataacatgttgaagtattgaaataactttaaataggtcattaacgagtcagttttgtgttagctgtgtcaacctgaacacgacccatttattaaacgtgttcgatgagtcaacccgaatacgacctgcacccatttaaggcaaacccaaacccgttaactctcgagcgggtttcgagttgtgttatcgtgtttgacctattttgtcggccctaccatgaggtctccccttctcacttctggctcattcttaatttctttgcatctaaacgtgcctgaaggtctgttgttgacaaactaccttttaaaactgggtgaacctcttctactcccccattctggttaacaaaattactagggcagttttctttaatttccttgagcgataggcttttgtacctgaatactcaacttatcaccctgcgcaactctgcctttcaaattaatcggacaactttgctctggagcattagctgccttctttttttgtaaagattggttggcagtattcgtgttattatgtggaggagtgggaataatcttttttttagttcccctatgatacattttcctttgtcctttgcaggatcagaagttccaggatctttttggtttgtactcctcgtagcattattttcctaaggagcatggtcatcaagaatattgtcatcgtgagccacttctcctggttcaagtctagcctctaatttgattaaagtttcttacattcaattggagaattcctcctgatctgtcgatttcttcttaatttcagcgatttctttagacatctcagcaactgcaggatttggctcataataatattcctcttatttgtcttttctatcgtcttcaagatcatcatcctctggatcttcattgatgggattctcaccaacatatttttcagtatgttgagtcttcttgaaggatgcttgtttgcttctgttgagtcttcatcgactcctatttttgtctaagtattagggttcacatcttccatgggagcgtccctgtcacgaataccagatttatcaatgatggttcggctggctatcatggttgcagtatacaacttttttagtatcacttctttgttcaactctcagtaaaagtaccaatatatttaccaagattttcaaaaactgataaaatatgataaagctaaagaaatataataaactaagaatcgaactatagtttttacgtggttggggcgttaaaaaaccttagtccacgagtaaatattattatattaagactataaaatccttatgatttacacaagtatttgaacattagatttttcctaagcacttaaggattgagattctaaccctttgcatgaatgagttttcttatatttaaagtgctagggttcttgtttgtacaccttgcccactaatggaatacatgcaaataatataatgacatttgggttgatttagtaaggcccaacccatgaggctttgatattctactgacgtgaatgccacatcacgttgatagttgtcaaaacgtgtcctatctttgtggagaatatagacacataaatgcttgattaaaaattactttatttccttatttggaagatacaaattgtgggcatgatcttggaaataaagtcttgatattgtgatatttggtaataaattactgtgatacggagctagatatttgaatgcccattaatcactcatccgaaagatctattcgatgccatctggagatacactatgctggaggtgtatatcatttggacgagttatttatccagcatccggaaggcttaacttcgataatggacccattccattatcttggttgggcctggacaattgagctgaaaccgtctcgcaattacaggtgtcctccatccgaaaatacggataacaagtgttattcactcttgtcctactcatgtattgtgacaatcaaagtgccatccagattgttcacatcggatttttatgaatgcacaaaatatattgagattgattgtcatttttgtcaccatctaaagttgggcaccattacttttccttttgctccttctacattatagcttgctaaattttctactaagttgcatacgatttgttgtttttgttttcttttaggtaaactctcgatgcttcttgcatcataataagtttgagggagggtgttaaataattatttagaattatt

SEQ ID NO: 321281 - DNA, 1099 bp, Cannabis indica
ttctctatccactttcttctccatcagttccttctttggtagtgttaggattatttgtgtctttcatttgaataactttggagtctcttgttatgtgagtgtcgttacgatatctacaattttggggagattgatcattgaaatttgaatgtaattggaaatcctccttgaaattttcagtgaggctagctaattattcctttaccgtgtggtaagaggcttgcaacttggatgcatagtaaatcattgtgctggaatctgatataagtgatctatgaacaaatccaaaccccgacccttcaaaaccccaaataaatgatcacaaagaaaataagaagatgaagaggcaaaagaataaatgatttcgcttgagcaatgatatttaaggcttgtttggtatgcagtatatatgttatattgtattaaataataaataatatttttatttgaataaaacaaatgtattatattaattattacgtacaaatttttttaattacaatgtaagttatattatttaatacacaacaaatagtctatattaacttatattatactatttataaaggatccgagttcaatcccaatctccgatccagctccagactcgagaccacagactcggacccaaacttgagatccgaacccgaactcgggacctggacctagacccgaacccgaacttgaatcaagacctggatcaagatctcgaacccgagacgcgacccagaatcgatgatgaggtcgagtttattgaaaatatattataacttcacacaatttattaatacaagtgaatactaaacataatattgtattaaataatactaatacaatataatataatataatataatacgacatactaaataaacccttaaatacttgaattattaaaaataaaacattaatgctagaaacttgtcaaataaaaatagaggtttataaaagaaaaaaaatagatttgcacctaagaattgtattcaatatgtcaatttttttaaaaagtatattttatttaatgacgtcaatttttttttaattaaataggcacatgtatatattgcataatatgtactcttataagtcagtgataaat

SEQ ID NO: 321282 - DNA, 644 bp, Cannabis indica
atcgatttatgcacacccctattaatgtttataacgtgaaaggacggaaataaaatacctccatccattgtttcgtagactttttttcttgaaaataaatttcgtacacttaaaattgactttttttcaaaaaaaaaaaacaaacaagcatattaatggtcgaatttacaatctaaaatttttaattactaaaatacatttgtaaaattttaaaattacaaaaatataattttcgcagccaaaaataaaaaacaactaaaaaataataaaaaataaatcataaactataaaacaagcaaaataacaagaaaaaataatctcataacaactctaaataaattataaaacaactaaaacaataattaataattttactaaaaaaatatttttataaataaaaaagttcaaaaaaataaaaataaaactttttccgtgttgaaatctaattatatcttagaaaaacaacacaaaaaagttaccatgaatatgattggagttccaacataaaatttaaaattttaggatataaatcgtgttaaaagtaatttttcattgaatataatgaattatcattgaatttaaagattgaatttaaaggttgatatacaaggataatagtactccttaaagcgtcgtcctggtgt

SEQ ID NO: 321283 - DNA, 658 bp, Cannabis indica
tttttactctttttctttggttcataaccgacgtaaaaaaaactaatctgcatcagtacatgctttaatatttacttcagtttatgaactgagcaaatatctttaagcgtctgttactaagtgaggcaaaaaataaaactatttgcatctatgtttataagtttcggttacactaatagacgcaaattcattatgtgtcacttaaaaattgaagcaaaatgccatttttgttgtagtggagagaggtagagagaaaaaagagattgggtttgggttttgtttgaagaatcttctgaaaatgaagaagattaatgggtgaaagttgaaacactttgagagaatccaacacagaattgacctcgagtgtaatgtatccttactcttgctcaatcaacaaataggatttagtggtgttccgaaactggagtagagccacaaattatatcgatctatagaacttgaaccaatatatatcttggtgttgattgttattattttattactttatcttttttgattttcattactctgtacatccttgtttttttctgattactgtttgtagcttattattcttgtcaattgtttttttttttttttgtatgtaatcaggatttccattactccaaacaaaacaatacatcctaagagcaccaaa

SEQ ID NO: 321284 - DNA, 1202 bp, Cannabis indica
caggacatggcacatctcgcccatcccgcaacatcattagccacacggttctcagatcgagggcaatgcgcgaacacaacaagatcaaaacacttacaaatacatcgacaagattcaaaaacaggataagtgccccaagcataaggtaaacaaccattgttaaaggccatgatcgccaccttggagtccgacaggactttgatcttttttacacccctttcgcacgccacttacaaagccaagtaaatagccagcagctccccttcgagaaccccagaaaccacatggaagcgcgaagccacccaggagtccccaacaattgactcgtccactttgacagccgcaacaccagcagccttgttcaggatagaagcatccgtatagaaacattgcaagtcatcggagttctgcaattccaattccacatcaagagactcagaccgagccaaatgattcaaaggcacaaatcgcatctccatctccctaactcttaagcgaatatcagatatcaatcctaccaaagaaaaagaacaccctttaaatattatcttgtttctccaattccaaatcgtctgacataggcaagctgcaaataaatgcatcctttcatcgcttacttgagaccaccagatgccaaatcgaaaatgtcttcccaatgcaaatcttcaacccgaattccccaggaactttggaaccacacagctcgagcaacgctgcagaagcagaacaaatgatgtacaaattctgtttcagcttgacagaacgggcaacccttatctaacatacccaaacgttgtttcgacggtaagatatcagaccacactttccaaagaaccaactttaaacgaggatggatcttggactgccataaactctcccagactttatttggactcttaaatctgctgcattgacttacccaataaccacttttcaccgtgtaatgccctgtcttagaccccttccagaaagtgatatctccactactcatcaaaggcctaatacacagtatagccgaagccacatctgcatcaaagctagcctttataagctcttcattccacactttagtgccttctaagaacagatatgaaaccttcacaaaagcatgtctccaagaataatggaaactattccgaacctcttccatagattttccaggaacccatggaccgctcccaaagatcagcatccccgtcacc

SEQ ID NO: 321285 - DNA, 514 bp, Cannabis indica
tttctttactaaaattagaaaaaagttcttaaatccaacaatttcaatagtttatggggaattttttacggctaaaaaaattcaaagagtatgattttatacatattaaaattcagggataaaaatactaattagcctactattcatactacattaccaatgcaatagtagttttcaatgccaaacatagtgatggctatgtgatgaaatgtgtggatcttatatggtctttaggaatatgcacaattatggctgccttgccacccatgtaagaattagtaatattctatataataataataataataataataataataataataataataataataataataatgatggtaaagtataagatcatctctaatgcttacactatttttagtgtatttttttcttcattaatttagtgcataatttattatttttcatgtaacaaataattcaaactaaatatatatacaatttaaaatatttaatattttatattatttacattaataactaa

SEQ ID NO: 321286 - DNA, 799 bp, Cannabis indica
ccctacaacaaataaattaagtatttatgtgcaaatttctctttataatttcttttgcaatattcactttgtcatgatagcgaaaaaaaaaaaaggaaaagaataaaagtgtattatggtcaaatgcctgagttgatttggtagagtgaatccaaaaaaagacaaaaagaaaaaaaaagtaattgaaaacaaagtgtgagccctcataatattaatgtcacctttccaaccatgtaacacacacacagctacctgtgtaaaatgtaaaaattcaaccttgacttttttttttttgttaggtaggaaactcaaccttgacttaactacaatattattatgagagctctattattatatattatacatacaaatttcctgcaaaacccaactccaatgtactttgcaataaatgaaaataaaatagaaattatgcctatattatattcaacacaacaaatttaaattttagtaaagagccagccaagtgctatgtacttactcccatcccactgactcattttaccaaataggtacccttcatagttatattcctccaggctatgtttatggttcacacatttcaagattcccaatgtaatgtaatgtctcccaactcatattagtcataatatatcttaacataatatacaagggatgagattagtattagtattatggcatatgggttttctctattttttctatttgagtaactaatttcaaattttcaaacacaaaataatggagcctagtgtttgtgtgtgtatcaaaccaacaatacctctctctctctctctct

SEQ ID NO: 321287 - DNA, 907 bp, Cannabis indica
tggggctatccttgcagctgagaattggcttggaataggcttccttcttcgggatacgaattgtaagcttattgaagctttctcaagcagtaaaattggtgtggtttctcctgagattgctgagattatgggggttaaagaggttttaagtttgatcaagacgaaagcgttaactgaagtggaaattgaaactgactcattagttgttgttcatgctattaatggctcggttcaaatgccatctcaatttgggtgacttattcatgattgtcgtttgttactttctgaattacataaggtttttctttcttttgttaaacgatctgcaaatagggctgctcattgcattgctagacagtctcgtctcatgtcagatcgtatgtttgatgaggcttctgctccatctgatttactttttattttgtaagggaggattacttttcaagttgaataaatttttcatgttcgttcaaaaaaaaaaaatactgtccatatctatatttgtaataaaatttatttttatatttgtttttgtaaaaatatctattatttatgtatcattccaactgttcaacaatttcggagaattactaaaaactttagtcgtatcattttacaactaaaccgttaatccaatgagttaataattagttttctaacgtcatttaatacaaaaaaaagaaaactatgtcattaaattacattcatgaagtgttattagaaataatataatatgtaaggtattcatgagatcgagtacgtactattttgtttaaagtgcatctgatctacaataaatgcagattttatatttagaatcaaatcgtatctgcaaaatagctctaatcaaatcaaactaaatctaatagtgcagatttgataaattattttggattgataatttttt

SEQ ID NO: 321288 - DNA, 769 bp, Cannabis indica
tctgttataaaaatttctcctgaactataaaaattattgcaaatatcccctagaagttgcattatggtcatttatttaaataatttgttggtatagcactaacataacattaatctaaactagttatagagtccacaaaaataaatacataaatagcaatctaataataaattatgagagtatgcatgtgtattcttagaactattgtttgtatgtttaatgccaaaaaactaaattttaggtagcttatagttattaaatgaacaattatacctatgttcgtagccacataagcaaattgttttataaaatgagcatcatgtaacttgagagagatatttgcaatgatttgcatagttcaaaggcaatttttgcaaagagaaaagttcaagagacaaaactctacaaatgttatagtttaggggcaaaaatcttatttattctaatataacttagtggattgggcttaggtttgaggtcaaaatattatattatatggaaaattatagcaaatgacccaaaatcatagcactatgtaagtaaatgtcctcatttcaaaacttgttaagaaatgattcttttacactatttattattcatattgtcttttgccacataaaaaaattaataatttttttattattttttttagaattagaaacaaattacttaaagatcatggtatatctacattagtttagttaaaatattttttattttaaagttatgtcaattttttttaatttttatgggttgttgtgggttgttg

SEQ ID NO: 321289 - DNA, 1477 bp, Cannabis indica
atagcagaactggcttgctcagtggcaggttgaagagcttaaaacttcaggctcgttctttactggtccaacaacatgaagaggggagttttagtctacttggaatttagatagaattttttgctaatgaaaaatgggttgatgcttttccgaatgttgaagctagatttagatggggaaaaatatcagatcatagttattgtctcattaagcacatagcaatcaacaacagaggtctcaagccgttccgcttctgtaactactggacctcaaaagttgactacaaggagaatgttctaagcacttggagaaagaggagcaccacagatcttaaaagtctttatcaacaattatttaggatcaagcatgttcttaaaaattgctatacttccaagaatgaagatctgagcaagagttacaaagatgctaaagaagcttatagcaaagctcaagagcttgcggctaacgatcctcttagtgatgctacagctaagggggaaagaaaactttatgaggcttttttggaaactcaaaaacagtatttcagctatcttttacagaattcaaaggtgaactgggttagatatggggatgaaaacacgaattactttcattctatcatgaaaaagagaagggttgagaataaaatttgttcctttagtgctaacggggagattatagatgattacgatcgagtcattgatcacttccttacccatttttgtagctacatggggaggaaaagcacagcgactagaagtcttgattttgaatgccttgacaatggaaacaaactgaacatcttgcaacaagtgagactaactcaacctttctctaaaaaggatgtgaaaatggccttgtttggaattcactcatcaaaaagtcctggcccggacggttttggggctggcttctttaaagatctttggactgaactgggagatgagatctctacagtagtgttgggtttctttcagcatggccatcttccaaaggaggtaaatgccactaccatatctttagttcgcaagtctgagaacccccaaaatgctagtgactacagacttattgcctgttgcaataccatatacaaatgcatctctaagatgatctgttcaaggctctcaaaagctctccccgatctcatacacgagaatcaaggagccttcattaaacgcagacttctagctcataatattctgatcttgcaggacttgttgaaagggtacactcgaaagaacttatctccaatgtgtatcttgaagattgacttaagcaaagcttatgacacggtggactggaatttagttgctgatcttttaaaagggctttgcttcccatccaaattcattttatggattcaaagctgtctccatggagctacatactctcttatgttgaatggaagattccaaggctcttttaaaggcgataagggtcttcgtcaaggagatcccatgtctccgctcctctttgt

SEQ ID NO: 321290 - DNA, 1613 bp, Cannabis indica
ttttcacgagatgaaattatagaaaaatagttaaatttggatgctctaatttctagagagagaaattagaaagagatactctgacattatgacaactttaatagaatttgagaaatgagctacagcagttcttctttttattggtgaatgagatccttaaaaataggaataaaataattcaaaaaatatgaaaaaatacaggttggctattcttgaccggaaatgatgatttaacggtgaaaattaatttatgaggttgatcatcaatttctggagtatgggtcacgataatgggacctacttcaagtaagtgataacttaaattcataactcccttgtgtgtgtaatttgaagtcgataacttcagaattgtcattgaagtgtgtgacatgactttatagagcattgaataatagctttgaaatataaattgaatcgcatcaatcgaatcaatattgagtgtggtatgactattttattgaaggttgttctcggcccatcgcataggttggcatcccaacacccaggttcacactcagtgctaaggttgacatgtgatgtaaatttggacgcaaggtgagtgagaaaacgtgctagggatatatttttgatgcctttgttatattttgacattactttgtctatttttgtattctggcaatttgacacttgttcgcggagatgttcatattttgtagaaatgggagactcaaaactactcagtttctaaataaatcacattgtcggaaaagtgaaaatatgaaattgtgaagttgactgtgtacggatttaatgtcctaaataaaatctaattttattgtaatcttatttactttccataaagatcaaaaatcatatcttgacctttgttaacccaaattttgccaacctgatgtgccatgttgacgtaagccaaagctagtgtacatgtggagtacagccctgccagtaggagaacagagtctccatgcaagatatgatgaaaccgtcaagcagaaacagaaaggagtaaagcgagccatcaaggggctctaccaacctccctggccagccaagagaagcctataggccagccagggtgagcatatagatcgagcaggatctgggcacaagctggccggccaaaaagtgacttctagacaagggagcttccttcgactaagggaacctagcctctataaggaaacagtgtacggagctgtcctcaacttgcaaaagggtggcctccacatccaaaggctggcctcttcttggtagagctatagtgacctgcaagatcttggcagagacatgaccggccaagtcttggcaagagcatggctagccaagcctcatcctgcaggccatggttagccagacctcaacctgcaagccttgggtggtgtaacaccctaactagcataggcgtattatgagattttataaacatactgtgcagctcgttgctaatcaacgaggtttatggaaaacgtgattaattaaaaaattttgctttttaattaaacttgtaatatatttatacaaaatactcgggatcccgattacaaaaccatttacaaaagttttctgtctatacaaaatacttgtcgcctagcgactaattacaaaaatag

SEQ ID NO: 321291 - DNA, 786 bp, Cannabis indica
accatatcaatatatgccagccgaaatatacattaaataataaaatatttttgtcaattaaatatgccaaaaatggaattaacaaactgcaaaggtgccctatttattaaatgatagcagagagatgtcatttgatcactaaatcttgttttggttttatgctagctatccttttttttaccttatgcgagaaaattacttgttattcttgaacttgagtttttggcttcggccacttttcatgctctaattttttgactaaattataagtgtagtggagtgaacactagtaggcatggtctcaccttttacatgtaacaagtttgagtatgtctattttattaaaatacgggcagtgttagatgataacagtgggtcgaaattaatcaataatttttatatgtatgcacatttacattgtcactcatttgcactaaagtaaacattcagtgcttttggtttctcttcaaacagtatggctataaactataatagccaactagtcgaagaatttataaagacccataattgtcctattactttgctctcattaaaatgaaggatgtgaagattgtgaagaagattgagtgacctttttatgtatatgtgtgttttatcttctctatttattaatgatatttcaagtgaagcgggtgcctattcttagatgtactttgaggtttcctttagattttatgacatagaattattataagtgaattatatttagggaaagaaacagaaaaatacaaaaaaggaaaaaaaaagggaaatttacataatata

SEQ ID NO: 321292 - DNA, 1577 bp, Cannabis indica
aaaaaaaaaaaataaggctaaaaactagagattagaggctccacaagttcaagatcactgatgaagtgaactgtgtactgtgtgaatctgttgcagaaacaacgttgcatttggtttttgaatgcaccttcttgcaacagtgtttgcacaagttaaggattggcttatatggaacgcaacaacctcttctttacagggtattttgaggtggatagagagatcaaaactcagtaaatttaaggaggtatactctactgctattgcagcacttgtgtacataatttggtcgaacattgttaagacagttaattctgttactgacagttagtgcttagctgtattggttgttaagtgttagtttcaattcagttaattgttaagttgttatttcctattctgttattgcttgtatgtgtatataaattgttttcatcatcaataacagattgagacttctttctctccaaatctctttctctctgtctttcctctctctttcctttcttctttatgcttttcattagttcttgcttctggttcattaatggcgagacaattcaataggcaattcaacatggtatcagagcagtttcctccgctctctgctaacatggctactcttggaaacaacagcaacaacacaacttcgaccggagctcaagtcaccatgaacagacctcgatcaaatcaagaaccggtgttcttcaatcacagtctttcgatccgcctcaatgatcacaacttcctattgtggaagcaacaagtactggctgctatcagaggaaatcgcctcatgaagttcatcaaggagcctccacctgtagaattcctcagtgacgatgatcgaacacagaacagaggaaatccagtctatcctgattgggaagttcaggatcaattgcttgtttcctggcttctctcgtcaatgacagagagtcttctcacacgtatggttgggtgtaatttagctaaacagatctgggatgctcttgagaaacacttcaccctacaagtctcatcgaagatccttgagtttcgcaccaaactgtagaacttgaagaaagggagcttgagtctcaacgattacctcttgaaagttaaacaaactgtagatcttcttgcatctgttggagaaacacttactgatcgtgatcatgttgctgcgatcttcaagggacttccgaacgaatatgatactttcatcatatcatcgaacactcgcattgaaaattactctgttggagagatcgaggccttacttctagcttctgaatccaggatcgaaaagaacagcaaagacattgaagtcagtaccaacttaacagtgagtgatcaagaaactgatatggaggccaatcttgcattcagaaagttcagacagcaacaatatggtggtagaggaagctcacaattcaacaacaactcaggtcagtctagaaatagattctttatgcgaggtaatgaatctgcaccttactctaacactggatatggaggcagaggtaattttaatccaaacagaggtggcagatctgcaatagctatgaataacagggttcatgttggaaattatttta

SEQ ID NO: 321293 - DNA, 570 bp, Cannabis indica
aaccaaatcgattgtgagaaaaaacatatttaaccacattatgggcaacaaaattactggttctaggaatacaagtaaaaatacaaccatcaaaacatctagagagatccaagcaagaaaaaaagcaattatcaatctttcaacacgactccacgtagttgagagagtttatcaccactctcgagtcactctccatgatgatgaatctctggcctttgagctttgcagactccagagcaaaacaaaaagttgtcgcctcaccacacagcgcattcgcgaaatctaatctagccgtaaacacccagaccaccttgctcaagtggtccctagcgaccaccgcagcgcacgaactgtccaaaccaactctaacatcacaatttagcttgagtcaatcctagggaggagggctccagctatcccttgaaataggggtcacaacaggtaaaagagcgagtttcaaatctgcaaaggaacataggatagtgtcaatacatttagtcacattaggcacatgttagactttttatttgggcgttacattaaatcttattggttttattaaaacttggg

SEQ ID NO: 321294 - DNA, 711 bp, Cannabis indica
atgtttcctgaactttttttgccgttaaaaattctcctgaattattaagattgttagatttaaagatttttgtctaattttagtaaaaaagttttaacatggatgaaagtttaggggtataatttagtacatatcaaagtttgaggggcataatgtggtagatatcaaaatcgtggggagtatggtttagtaaataaacaatcaactgaaacagtaaaattgaatgaaattagacaaaaatccttaaatctaacaatttcaatagttcatgaagaatttttaacagctaaaaaagttcaggatgcatgatttgatatatgtcaaagtttggggaaaaaattgctaattagcttataagtaatttgtggcgtaatttccaccgccgtcattgagggaagctaggtcggtcgtcaacctagtagccgagaaagaaaggggttggggggagagggtcatgccattgtagggtgtctctctctctgatagtttaggattgttgtttctctttctaagtttaagttttcacggtaataatttctaagttaattatcacgtgtcaaattattgattggttataagtattggggtgattctacaatgcactcccttaaaagggatgtattgatgcaccgttgacttgttgcggcattcagaagtaaactctgttgtagattatcatattagtaaaaccttatgtctgataaatctagg

SEQ ID NO: 321295 - DNA, 723 bp, Cannabis indica
aatgagttatattttaacttttcaccacctatttacacctccattgaagatgctattacttactacttctgtcatactccaaattattctatttttttcacctaataattaatttaaaataaactctatttgtcatttctgaaaaaatgacttctttctatagtcaacactccttatgttatagaaagaagttccttttcagaaacgacaaatagtcaagactctttatgttcaaaatcacttgaggctagctcaagtggccatagagggtgcgtgtgtgttggaagtcttgggttcgagtcccaggtcaaattatgcatggttgtattatataaacgctcaaataataataaaaaaaagactcattatgttcaagagaataatatgacataaaacattgataggattattggaataagttgattttagaaatatcgaagtattttggagtacttgaagtttgccaaataccctaaaaatatagatttcttagtggctaaaaaatgataagataactattaataataaaatattatttatattatattattatatatataaacgtaagtttaatgttttgaatatatatatgtattattagttatatcagtaaacatataaataaagaatagtgaacgaacgtacgaaacatccttccttctctctcaacaaaatgttctctcatttttatctattttctttgattttcaacctgaaacttag

SEQ ID NO: 321296 - DNA, 584 bp, Cannabis indica
ttattttaacctgtatcggtttcatttcaaaaaataaaaaaaaaatagaatggtaattattttcttcaagtatttaaaaaggatgacaaaataaatccccacaagatccaacttctaagaaatctccctatttttgtaatgaagatctacacataaaagaacaatatttattaaataaatacattaatattattataagacactatttattaccaggcataaagagtactatatttattaattaaatacacaaacttaaataataatattattattaaaatacaacatgaaattatgcctattttagcattcattacaattaatattatttaatatatatgaattttaaataaccactagaagcccttctctcaaatttattcataagaaaatttcacatttaattgtcattaatttgaaaacaatcatgcttaattttgtgatgattatattatagtgtattcattttttttttgttctgtaccaaaaaaaaaagttagtaaaaaaaaaaaaaaaagagtgtataattgtattatctatattttgtataggagatgatctcatttctttctttctttttttgt

SEQ ID NO: 321297 - DNA, 1688 bp, Cannabis indica
taatatatataaaaatatatatactatactaatcaaattatatactacaattaaaatatatatacgatgataatagaattatatactaccattgtatataataaaatagaaattaattaaatattatttaaaataaataatatatcataaaattaaaatatataataataattaaatatatgtagtatttcaataaaattatataccaagttaccaacaacctacaacagctcataaaaaattaaagaaaaatcaacgtaactttcgaataatttttttttttacaaaactaatatagatatattataatctttaagtaatttgcttctgattctaaaaaaaaaattattgattttttttaatgtggcaaaagataatataaataataaatggtttaaaaaagtcatttttctacaagttttaaaataatgacatttattaacatagtcctataatttataatcatttgttataatttctctaaatctaattcgtgtcggcctggtcatgtctaggtctacgaaaaaaaattcaaaattttaggaaaatgtagtttatttaaataaaaacacaaaaagtcctcaaattattttgtacataattatcataaaaatatcaaaatttgtataaggttcctaattcttgaggaatgaggaccctcttgaatctcattaacaattgcatgcatgaagtttagaggaaaatagggttgagaaacattttgaagtttagtatcactatcattttgcttcttttctgaggtttgttttaccagttagttaaagtttttctaactgattgatctatatagtggacataaaaaaattcagtaattgtggtactaaatgacttttacataatataaatattatcattattaatcatcaaaatgaaagtggtcttgtatgggaagcaaaaatggcagtgattaaggctaaggcttttgaacgatatttggctgaaatgctagtttgagctatcttatggcccagacagacagacagccccacctgaaaatgaaattgttgcattctttaattgctatttttctttagcagtgcacttacacgcattcattactcattataagaaaaagagaacacattgtttgattggagtgtcctctaatcattatcttatcttatgtataatctatataataagcttatttataatgactcataaacaagtaaatgttatgtggtccaattacttgttttaccactcactaacttataaaaaatctccctttcaaaaaaaaaattataaacatttctaagaaaaaaagtaggtgagcactattaataacttttaaaatttgaactttatatagaaaagtggtggcgtttgataacactttttaaatcagttttctgcttttaaaagtagaaaagtgaaaatatttttcaaaaacatgttctataaaactgtttttacttttcaattttataattagaaatcaaaattttaaaaacaacaaaaattacttttaatatttttttaaacagtttttttttacttaatcaatattttggattacgaccagacctggacccaaattccctccccacggctctggcgctgaacccggtttttaacttgaacccgaatccgaccctggacctagacccgactttaataaaatcctaaaaaaataaaaataaaaaatgaaactttacagaacacac

SEQ ID NO: 321298 - DNA, 858 bp, Cannabis indica
ttttactacaaaacaagtcgataacataaagaagacaagaagtaaaaggaaaagataaattgtctttatatttgtccaagtcatataaccattcatttaagtgcatattaaaaataaggcataagtatataggacaaaagatataactatcaaattgattatagaaagtaaacaacaaaataaatattaggcctagctagtgatggtaccttagttcccttcccacttattttggtctatgtgcccacccatttgaaaaaacattacataaaacaaataagagtcataaaattcttttatttttggttggtggcactaaagttgctcaattttattttatttttaattaaaaaaagagttgctcatatctttaattgttattatttggtccatgtatattttttttttcatggatttggtcaatatatttttatttattatataatgcatcaatattctaaggtggcctttagttaccaattaaaaatagtgttaaggagaataaaaatagaaataaaatagaataaaatttttattattgtgtttggtaaagactatagaatcaataatagaataaaaactaaagtggcgtttagttggaaagaatgaaaatataggaataagaatggaaataagaatagaaatggaatggaaaaaaatttaaaatacatacaaaaattgataaaaaaatcaattaattttttttcttattacattggaataatttttccttcttttttaaaatagaaaagtcattccaccaaatggtaaaaacaacattctattggaatatcattaatattttaaaatgtcaaaccaaacaaaacgaaatagaatgaaaattgttaaccatactta

SEQ ID NO: 321299 - DNA, 582 bp, Cannabis indica
atcacccctctctcttcttctctcttctatttcactacactgtcgagccatcgggcctcatcgggcccatcgggccatatccatatttctattttttttacacagacatcgggcccatcaggcccaccatcagagcaatcgggccccaccatcgtgcccactatcgcgcccatcgagccatatcaaattctatttttttacacaggcatcgggccccatcgggcctttgtcttcctcaattttcctgtgataccattggaccggtgttgggcctgcatcaggcccgacctgcatcggtctgcatcgggcccgacaaaattaaactccaaacccaaattttgcccaaatcacatccgatgaaaaaaaaagatctgaaggcttgccttcgatatctccattcgaagctcggtggtagagggttggagtcgcgtctcacggtggtcggtggtctgggtacacggtgatttggtgctcggtggtggtgatatgtgttgggttttgtgccctaaataaaacgcattgcaatctgattatttatcaatttaagaaatttgaagtgatttatgtttgcatgaattttac

SEQ ID NO: 321300 - DNA, 565 bp, Cannabis indica
catcaacaatataaataaacatatagtaattgatgaagaaatatatacatataagtgtaattattaccaagtgtgtccccaattttaaaagtcttgtcttttgaccaagcttggtaatcaaaagaagtggtccaaccagttccatctccaactgtgatctctgttgcagaacaaatattattcatcactgcagcaacaaaaatggctacaaacaatactctaacattaacaaaggacaaacccattgtaaataaataattatatatttatttatgatattattttgtatatctacttgttattgtgtaaataatttgtatttggagattatatttatagtggagaacatatctaatttttgcaatttattagcctagttaatatttgagatttacaaaataaaaatcattgatacatatatatttctttctctttttgtggggtgaaatattctactctttttttttccactattaggaggatcacattgtgttaatattgaattaacattttaggatttttgcacaatattatacaaatattttcaacttttcttttttttttt

SEQ ID NO: 321301 - DNA, 2139 bp, Cannabis indica
ttattttatttattttttttggattcgaataagagacccgagaagaagacatgtaatttcaatatacttccataatatataaaattatatatttcaattacagaagtgaatttggtcatttttatttattaatagcataaacttgttagccttaaaatatgaggggtgaataatatttcatgtaaagaaaaagaagtaaacataataaattgatagagaaggataataataaatacaataatggataaataaaataatgatgcaaggggtggccatggaatggaggccactaaaaactaggaggtgttaagcctctaattgtagcactaaaatactagtctaattagtattattagaccaacaaagcaaaagcaagaaacgagggagctttgtcactcattttcttcctcattttgattcttcttgtcttttatttaaagaaaaaaaaatcattgttgacctccaaccctcctcccccttctttacccatatgctaatttgcatttaaacattatttttcatattttaattactaatttatcctttttattttgtctaatgtctaatcttgagtcaaattttgtgacaaaattatattttagataatagagttaagaaaaaatgtaatgttaaagttaaaaagtgtttaattttgtattattgtatatttattttgaatttatgacatgtttatataaaaagaatgaggattaatgatatggtattgattctcatacaattatttactaaattttgaaaatggagaaagtagtgaggtcacacaggagaaaacaaagataaatgttcttcccccatttttatagggaatacatttccctttcctaacttagtttattttaattttatttttattaataaaaaataaaaaagacaaatataccatttaaaaatttataaacagaaaataattacatgttttaataatgaaaattttgtcaaattaaaacattatctttcttagttatgtaaataaaatactataattctgattttctttctggacagtttagtaaatagcataataaaatattattttcgattattttctattttacatcaattcatttttttaattgattattttgattttagttacaatttaataaacgtgccattaatattattattattgtgtttatggtaaatttgacacatggaaccatgtgaactataatgcaatatgcatggataaacataatttcgagctactttttattttaaattcagtattcatattatattcaaattatcttaataattggtgggataaatataaattccatattcatctaatgtattggatcatatttcattatgataattacatttatatttatatttttaattatttttatgtggttataataacataaccacattcaaccactttagaggatcaactagtgttattgaaaaataaatgtcattcaccatcatcaaattttaaaaatagacaaacgaatcaacaaataataataataacaatgaaaagtggttatattattaatgaacgcaaagaaaaaaaaaaaaaaaaaagaaagatcagatacaacaacatcaaataaacattcataattatatcaacaacttcaaatataccaatttgaaaagtcatctcatcaccacattataacctaaaatgcataaaataataaaaataaaattccattacattattaataataatagagaaaattatagttactatgagattttaaaagtttcttatgataaatatgacacatttaagtttgaccaattcatatggtatttttttgtttttaggtctttttatggtatttgatatgccatatatatgtatttaggttttcaaatcccatatttaatgtttttatttgtttaggaagttttatttgttattgaagccgaaaaagtcaccggagtttgctgtcggtgccggaaaagtcgccggagtagcgatcggtgccgaaaaagtcgtcggagttactgtcggtgccagaaaattcgtcggaattggcattgtcgtcggagttgacaatgccaattcggacgactattctgacgctagcagctactccgacaacttttccggcaccgacaacaaacttcagaaaagtcatcaaaattggcatagtc

SEQ ID NO: 321302 - DNA, 1072 bp, Cannabis indica
ctggccgaggtaaaaaggttaatttcaactctcgactatttacagattagtcagattccctgagaagaaaacatgcacgccaacgccctgcaggcctaggatcttcttcccccctccacgtcacaagaacaataccattcaacttcatcctagaacccagcatttcgatagaagaagaggttaggtgcgctgaaatcctgacagaaacatcctaagactggaggcagccaatccttgaatacttaaaggaagacaaattggtgtcggaccccaaacaggcgagaaaaatcgtaatgagggcctcaaggtatgcgatactccaaaaccagctatacaaaagatcctaccacaggctgtacttgaaatgcataacaaggcagaagggaaagttggtcttaacagaggtccacgaaggagagtgcggaagccattccgggggacgagtgacaacccagagagtacaatgacatgggttctattgcccgacggtccaagaagattcggtaggtcactctcagaaatgcgaaaaatgttcatgaaagtggggaatggatatagtaggtcacctttcaacggcgcccgcccagaaaaaattcatgctggctctcaccgactacttctcaaagtggatcgaagccgactccttcgctcaaataaaagacagagaagtggaagggtttgtctgaaaaaacatagtatgtaggtttggactaccacaggagatcgtggtggataatggttcccaattcattagccacaagttcaggaacttctgtgaacagtggaaaattaaactcatattctcaacactacgctatccacagagcaatgggcaagcagagtcgtcaaataaagtcatcataaataatattaagaagcaactcaaaaaagctaatggaagatgggcccaagaattgcctggggtattatgggccaaccgaacgacgccacgcaccagcacgagtgaaaccccattctcgctggtatgcgggatggaagatgttatcccaacaaaaatgcaagtacccactttgcaaaccgaactaagcaacgaagacaacactttcctcag

SEQ ID NO: 321303 - DNA, 1170 bp, Cannabis indica
tttggtaacagtttcatcattctacttgtctatgtagatgatgttatcctagcctcaaatgatttgcaccagcttgaacacttgaaaaccagattgaataacatgttcaaattaaaatatcttagtgacttaaaatatttccttgggttggaaatatcaagatttgccaaggtaatatttgtgtcacaaaggcactatgctcttcaattgcttgaagacattggatatcttggatccaaacctgtcaatacacctatggaggctaatttgaaatcgagccaagacaacaaggaagatcatctagcaaatcctacactgtacaggaaaatcattggcaagctgcagtacttgacaattactcaaccagatttattttatgcaatatacaagttaagtcagtttcttgttactcctaaaaccaaccatatgacagcagcacaaagggtattgtaatatgtcaaaggcacacctggacaagacatttttatgtcatctaaattagacattaaactttaagcttttactgattcggattgggcagcatgtctagatactaggagatcaaccactagcttttgcatctttcgtggaagctcaataatctcatggaaaagcataaagcaacacacaatttcaagatcttcagctgaagctgaataccgtgccatagaaaatactaacttcaatcctgaaagagttgaaagttgagtacaagggaccagtaattttgcattgtgacaacaagactgctcaacacattgcaccaatttaatttatcatgaaaaaaacaaagcacattgaaatagattatcacattataaaagagaaaatttaagagagaatcatcaagactgttcatgtctcaaccaaagatcaaattgcagatttcctaacaaagcctttgtttccaagtcaatttcaaacactcaaagacaagatgagattgcaaaatattcactccacatcttatgggggagtattgtgtggacattgtcccacatggaataaatggtagagaattgagccatatataagaacatgggctactccactcattgccaattggttttgagatggaaccccatgattctcaacatggtatcagagccatatcccttgcgggcaagcgatcctatccgatccgcagctatacagatagtgaccatgtcc

SEQ ID NO: 321304 - DNA, 1366 bp, Cannabis indica
taataatataattcctcaattagtcataattatctaattagggttttgctaatccattccttaattctagggtactacactttcaatcaaacagcatccatctgagccgtcgatcgatgatcggagggtccagatggcgagtggatctcacctcgacagcaagagcgtgagctccctttcctcttctctccagcctgcaagcgtggggcccgtctatagtctttcttcccagctggtcctgccttgtcagctttcccagccaaccagcaagcgccacgcaacagcccgtcagcctcctctccattcaagtcgcgccaagtggcatttgcagaagaaaaagaagaaaaaaatggctattaattggaattgcacccatccgaaaatacaacaacaaaagtctaaatatcacacttttatcccacaatttacacctaaatatccatttactcttcccaatttatttcacctaaataaacattcaggatgagagtgttgggagtccaactgtgaggttttttcttgaggttttttctctctaggatgagagtgctgggagtccaactgtgaggttttttctcaccctgtagttattactaatcattttttccggtgaatttatctctacctctttccttcttaaaagcttttatttctcctacagttttaaggtttttaacggttctggttggtaaattctaaaaggctttctttacacgtcaacctaagtcgtaatatttattatctacgatggagatgaacatggctgatgggaatatcaaagaactcaactcagatgacagaaggaatgagcaagaaacggggccagagcaacaagaacaagccccagtgaatgagcagggaaaccctgctaacgaggctatgaatcaggaattttgggaagatgcagaggatagagaggaggaagttgaagaacttagaaaagagttcttggactcaatgactcttgagcttgaaccggacttcaaactaactgaagatattaccagcactggagttttggccaagttcttcggtgacgttgggtgtcaagaaacagactgaaggatatcctcagcaagatatggaagttgaaaggcaactggaggataaagactcttaacacggggctttggggaatattttttgatgaagaggagaactgcgtggaaatcctatacaataggccgtggctaatcaatggcaaactcttaatcaccagggaatggccagaagacggcatctggagtaaggtgaatatgacaaaggccattttctgggtccaagctttcagaccccccactccctatctcaatccaattaacacttctagggtggtagcaaaagcagggattgttgggttttatgc

SEQ ID NO: 321305 - DNA, 1169 bp, Cannabis indica
aattaattaattaattaaccaagaaaaggtttgctcaagactagctaagattaattaagtataaggctatgagctcagtcttatgagttgaaaaagtggcaaacttcacatgtccgattgtactacaatatattctcggaaacatgtagttaaatctgatatgaaaagagcaataattcagtagtgatataaataagttcatttgtatttttcccactttttctatttaatttttactctctcaagtcttttcaactattttttatgtctgtcaatttgaattattttgttgttatccagagaacttacttcatattatataatgttaaaatattttaccaagactaatatagttaagtgttgtcatctattagtattaatatataatgatggttatataatcggtgatattattattgtatcataatgagatggacataatgtactaatatgttcggagcctatgaacatactctaaaacatttttggtcagacaattaattctctctaattaaacatctaggtccaattagcccatataatctctaataaaaggagtttatggctttatttatggtggtgacaaataatatggcaaaaggtgttgaaaaaaataaaagagtagtgttcaacaaacctatgtagattgaaggaatagggagagcacaacagaagcatgagaattcatggctgtaagagtgcctttcaaaatatgaatttgatgccttaaaataagatgatactgtgttgttttagttgaacaaattattattgtttaatttttgattgaatcatccgattttgagttatatcgagagagttatgaccaaaatactatcgttcatcatagtaggaaactgcaaacaagaaactgtgaaaatctgttaagaaaagaggaaatcgcttgtaaggccggggccttgttttttttttgggggggggggaggaacttgaatatttggctctatttaaagagggttgaggcaaagctttgacactattcaaaaattgagaggaattcagagtgtagaaggagattaatgagtaaaaggcaccaatagatgactccaacattgttctatctctttactctatcttttatgtctttaattaaatttcttttattttaaaatgtcttttagtagctaaattcttttaagaatcattat

SEQ ID NO: 321306 - DNA, 1976 bp, Cannabis indica
atgatagtgtgctcttttgtcgtgctacttcacaatcagccaggtttattcagaaagtactaaacatttatcatcaggctagtggtcaagcaattaacccggataaatgtgtgctctctttctctccaaacacgaggcaatcaaaccaacactacttccaacagcttctcaacatgccaattcaaccttgccatgaggaatatcttggtcttccatcttttgctggtagagataagactaagctttttagtgggattacagataaaatgtggaagctccttagtagttggaaagagcaattgttttctgctggtggaaaggaagttcttctaaaagctgtggtacaagcaatcccaacatatgctatgagctgctttcgattacctgtcactttgtgtaaccaaattgagagcatgatggctaacttctggtggggatccacatcatctggcaatgcaattcattggaaaaattggaattccctttgtaaggctaagattcatggaggtttaggctttaggaacttcatccatttttatcaagctcttctagctaaacaagcctggcgcctattagaatcacctaactctctcctcagtcgtgttctgcgtcacagatattttttaaatggtaattttcttactgctggtttgggtgcctatccttctttaacatggcaaagcattgtttggggaaaagagcttctagctaaaggccttcgttggagagtgggacttagaaatcaaatcaattgcaaatcagatccatggcttcctggtcacaccgattttactcctttcagttttataggcaatgatagttctctccaagttgccgatctaatagatcaacatagaaattgggatttaacggttatttcagctaactttggccaagctgatatggatagaatactctctattcctcttagcatttttccctcagatgatgtcctcatttggaatggaactaattcgggtaactacatggttaggtcgggatattattttgcctcttcacttgttgagcttcaagatacaggcagtactctcacatgtgaacattggtggaccaaattttggaagttaaagttgccttcaaaacttcgtatttttgtttggaaagtgtttcacaatgtcttaccagtagctgctgaactgcaccgtaagcatattgcagatactccattctgtcctttgtgtaaaatgcagcaagaaaccattaatcatgcattattcctctgtacaagagctaaggaggtttggcatctttctctccttaatttgaacttcaaattggctgctacttcttcaccagaagaattcttgctctatgtctcggccaacacttccacacaagaatttgaacaatttttgactatctgttggagtatctggtatgagagaaatgcagaatatcatggtaaattgcctaaactggctgctgctattttggtttttgcaactgaatatctcctcaaatatcaaactgttcatgcctcatcactgacctctggctctactgctgtaaccaacacacatccagcaaatatcacaccagttgcatccttagctgacccttggattgcacctccagtaggaaaattgaagctcaatactgatgctgcctgtgatagatcgaacaaattaattggtataggtgctgttttgagggactctaatggatacatcaaggctgctctctcgaaatcaattctgggatgtttcaaaccaaaggaaatggaagcaactgctctagctttaactctgcaatggctcatcagtcttggtttaactgctgatttcattgaaacagattctttgttagtagttcagggtttaaaagcttcttatgattgtaattctgcttttcatactatgttaaaagatgttaactatttggtatcctttttcccacgagcacaggtcactcatgttaggagatctgctaatacttatgcccatgttttggctaag

SEQ ID NO: 321307 - DNA, 859 bp, Cannabis indica
taaaattttactcaaaattcaatagttttgtaaaaaaaacctcattaaaaattatatagtaaaaaaaaggtattattgaaattatttcataaaattggtatgagaatgaaaaatttcctttaaaatatcacacaacttatattattctcaactcaacaatggcagcagcaccagcgagagccgaggtcctggctctcttccgatcccttcttcgcacagctcggcagttcaccgattacaacatcagagagtacacgaagcgccgcacagttgacgccttccgccaaacccagaagctcaacgagccttctgctgtagcctctgcgttttctgatggaaaggctcagctggagatagctaagaggcaggctctggtttaccagctctatgctcctaagattaagagcgtcatggacgtcgtcaaacctcatatctgaagatgcagagatagattctagggttttgggtacttattcttatagttagtcttcctttctctcaatttttcaattatataaatttttagggtttctttgtttggatttattacaaatgaaatttaagatatcgaattgaaatgttggacatgtttgatcactgattttgaataaaacccaaattgttatatttaatttaagtggatggatcgtttatatataggtgtgttggaactgattcattagggtactgagattagtatttgtctttgattacttcttctggtgctatctatgaaatttgatgatgaagaaaaagaatctggatatgggtttgcttgggatttgattttggtgtattactctgtttgtgttgctttgttctttgttttgattcgtattaagagtaaaattcagtgttc

SEQ ID NO: 321308 - DNA, 579 bp, Cannabis indica
tcttatgtcaagtgatttaattttttgtaattatttttatattctgcctgttctggtttgtctctgcaaaacttgtttctgcagtaacataaatatattctgctgctgcagacgtatgcaattttatattcagtacatttttgaaataattattggcatttgcaaaaactcgatttttcaaacataattttaatctttgagatcaactttctccactgttttcttgaaaattctgagtgaaaaaaatagaaacctatgtcaaaaatcataccttcaaactttgataatagattaaaatacaatcttttagagaaaatcacatctaggtctgattaaaattagagaaaaataagattattttgttcttcatatttgagtgatgaagggtagaggagacgacgagagagaagacgtgaagaagagcttcggctaggtgagaaggtaggcatttgagagcagtgacgcacccagaatttttactttgtgggggcttatttatcattcaaaaatatttatacctatattataatcattctcactagatttatttaattttatgggggctttttctacgatttt

SEQ ID NO: 321309 - DNA, 524 bp, Cannabis indica
tttgtaagtttccctaatttttttcagaacttcaggtggagtggtagacgtgggccctgttaactgctacaacaggtgagattcaacaatatgaaaattacactgagtttttactttgtgtgcaaaaatatagtttttttttaaaaaaagaaaatattttttgtgaatttattttttaaaagaaatagtatgggggaaaataatattaggttaacgagttaccctttactatttttttttcatatatttcaattagaattaattttttcaataaaataattgttttgtaaaaaaatcatatttttacaaaattttgcaattaaaaccataaaagtgaaaattctcttcaacattctgcttgatggaagaatttgggcccacctttaattgaaatagcttaaaacccaataaattgaataagcaacgagccgacgtcaataccaacatgattgttatcccctattttagacgggctattttcaaaaatatgggaaaaattattaaggttatgataaatatggcat

SEQ ID NO: 321310 - DNA, 750 bp, Cannabis indica
cttatgcaatatgagtatgattaaatgaagaagtctaacacttgaatatttaggaaccacatataatttctaaccaaataagtggtgcgtatcaagtttggaatcatttttaattatacaaaagcaatgtatttcattccaacacaagtcgtaataagttattattagacagcaacagcaatgcaataaatataggttcttgaattaagatctcctataaaattagtgttgtcctattttgttaaattaatttaaatttaacactttaattaatttaatttacattaaatatgctaactatttttattgattcacttaaaatttaattttttaataaataaaatattaattacgtgtaaaacttaaatttatttaacaaaaatatgagatatcattttttattagggatcttgattccttatgttttcttatattatgtagtttttgtattttgcagtccttttcttttcttgctttagctttagtttcttattgcgcttggagacaaaagaccctgttattgtttctttatttaaacatctataagtaaagatcacttaacctataaaaatgtttcccacgtattggacaacatcagggtgtgtttttttttttttcttaatttatttatcttgacaaaatgatgtgctaattaaacaaatatttcataaatacagctgataataatgtggaaaacgcataagtacatccacttattcatttcttacactacaagctctttttttgttt

SEQ ID NO: 321311 - DNA, 1449 bp, Cannabis indica
caaactcattaaagcaggggtcgagaattctgggtttcataagaactagaagaggaaaaatccaccaagaacattctctgtaataaatactatcataaatacacagactcgtggactaaggctcattaacgcctcaaccacgtaaaaatctctctcttaattccctatagctctcttaactactattattatattggttgccgaaaacctcggtcaacataatgaaatacaataaaattagaattttaattatttaattacctactagttataaaaaaaatgtaacaagtggctagttactatactatatacattaacttttaaaaattttatatgtagatacatatataataaattatatctcacactaacaaaattttaaaaactttatttctaaactaattaaatctctcctatctcattctcgttcacaatacatatctatacatacatatatattacttagaatatatacaatacaattacaatatttacataaataatatatacaaaatatgtacacacaatattactcattaagaaatcatccatatatatataaacacatgttcaataaaatacaaaatacatatgtgtatatatattctatatattacggtttatatttttaccttataagcacaatccgatgaccaattcatcaaaaagtccggccactatgcacatacacaacaataatgttaataatatgaaaaatctaaaaaaattatagaaagaaaaaataaacaatgtatgttactaaaatgaatagaaatcatatttatacattaatggacgttgatattcaacgttttctccactaaaattggtgaccagagttataactgccactttctatgtatgggttcagtttacagtgaaatagtggaaaaatcaaaacttttttcgtgtatgtgtttaggtatcaaaaattgaagattttttttttttttaattaggctcaaatggtgtaaaaatgagggagatattggctgtgggagaagtggttggggaaggtggagatggtttggggtttgaaggtttgatgctatggttttgtgaggaagaaggagatgaagaagactaagctaaaaagggtattttatataaccttatcccgttagttattaggaaataaccgacgacatagggtacacatgtcaattatcgcgtgtaccctatgtcgttggttatttcctaataaccgacgggataaggttattaaaccactcccagaaataaaaatccgccaaccaatggtatagtctaattctatacctacagtttttataaaaaaaactgcctctaaatatccattttcaatacgttgctatttttacaccctttagcttcccttgttataaaacttgtggaaagaccaacctctaaaaagttgttttgtagtagtgtgaccttgtctctgttgggaatattttaccagggtctaga

SEQ ID NO: 321312 - DNA, 1708 bp, Cannabis indica
aaaaatatatcaatgtcatcaaatattcttcatagatactataaatagaagctcatttttagttattagagtgtaacttttaaaaaagagtaattataaaaataaaaaaaaaaaaaaattctccacttttcttcttagaaattttatgagaatgattaaggttagggataattacatatgtaaagtgatgttattttgtatttttgattacttgtaatatttatttgaataatacaagttgttattcgatttttattattacgttcttcatccatttacactattatatatgctatgattatagtaatagtaatattacttatattatatgtttaatgttcatttttatttgcttgtcattcaatggtataataggtttaatcatgttttccctgtgtatatataaaaaaaatatatattaatgttcatttcctttactatataccaccactatatctatctttttgtctttattttttactaatactatatagatcatcctcttttctatatgtttctaattagtaaaaataatatcgatttagttttatgtataattttgttttatattattgcttaatgtgtaatgtcatttataggttctatattagattaaattttttttattattatttagaacttgtatactcaaaatataatgaattttaatgttacatcttttgtgtcaactttatgaattaaatgtataaaataacttaacaaacataagaatgactcatgaagtctttccctctttaccattgattgcacatttttgttgctttcttttactatattattttaaaaacaaaaatcacaaatttattggttatcattgccattttttattaatcttttatttttatttttttaccaacacttttgtcccatcactttcttatggaatcgatcatccgatttatactgcaaccactgttattggaaatcacattttgggcattaaacatccttacacaagctagaactaattgttgagcttttatcacagctagataatgcttggatttgttcacatcttagcatcaagaattttcagatatgacaaaagataatggttgcgagagagggcttctggcgatggtggttgggcaaatgtgaaagggttttcagatatgacaaaagataatggttgtagcctatggaaataaatttaagattttcagattagggtttcagagctaatatctccgtacatatatgtgtgtgtttattttttggatttggatttgtttaaatttagttcaaatttggttcgacttttattttgttttgttttatttttgtgtgatttggatttgaaaaaagattggggatgtcggtgataggttgtcgtgattttagaagcggatggtggtagttttcgatggctatggatggtggtgctggtgacagtttgtgactggaaaaagaagaagaagaatgaaaactgcaaaataaatgtatgaaaaatatgaatgttagggaaaaaaatgtattttttatgaatttttattttctaaaaaattatataattgtgtggactaataaaattgtgtcacgtgtacactatgtacaataaaatttggcacttaacaactaaatttaaatagaaactataaactgataaaatggttatttgcggcataacccccaatactttcactttacttgcacttaacctcaaaaattcaaattttggtagtaaaac

SEQ ID NO: 321313 - DNA, 626 bp, Cannabis indica
atttcaaaatttataatatataaatgagttttttttgaatgtgacttatcactacttaacataccaaattatttagagccacatctattaattctttctcacattacaataacaatttcctcccgttagtcaaatttaaattaaaaaaattggatttagggaaaaaaaatttataagtttagatatttgaaaaaaaaatgaacctgatttgaataagttggatcagatatgatccaatccgaatatctaaactagcaggacgggacagatcattatatgatctggatcgaattagattatagacggatcaaattagacccgatctatttaaactcctattcacattatagccttattgtggacaatgtcccacatggaataaatggtagagaattaagccatatataagaagatgggctactccactcattgccaattggttttgagatggaaccccatgattctcaacatggtatcagagccatatcctttgcgggcaagtgatcatatccgatccgcacctatacagatcgtgactatgtccactctgatatggttcaagattgatgagcaaaaatagccatcatcttgagggagaatattgtggacaatgtcccacatggaat

SEQ ID NO: 321314 - DNA, 672 bp, Cannabis indica
agagagagagagagagagagagaagaatgagaaatacgatgaaaagttgaaatgagatagtatatgttttgggtgtgatattttcatcatcaattttaaataaaaaaaaatatcacaaaagttataacaacaatcaaatcaattttttttaaaagttaaatatattaaaaagattagattaaaattttgcactaccgcgtgtgattaaaatgaaataatttttttttcaacaaaacatagtataccgagtataaattagagtagtaaaaaagtaataaacacgtgcaacaatataactgtaaaaaattacaaaaataatactaagtgtaaatttcccaataaaaaaccctaggtacttcccatatggtagaaaagtttttacaagaaacaaattataaaataactttacatatctcctattggataattatctcaattcatcatttctaaagaaaaaacagtaaatgacatcctctaatatgttcatatttgttattaattactacattaaaatataagtactgtgcggagacaacatctataattaggaagaccattgttattagacaccagtggtacttagcacctctagatattagctagcgatactttctaaaagttattatattaaactctgtgggacccgatacttagttggaccaatagtgatat

SEQ ID NO: 321315 - DNA, 1069 bp, Cannabis indica
ctaattgatgatttcgattttgcttttattataacaaatcaaataaaattttatttggcaggtttgaagtctaaatttgtgatcttggttcaatttaaaaaatttccttgctggtcctgacctgctgctgtagagctagagtctgatgctgtaaatcaagaattttttttaataagttttctacaactagaaaatcattttgtagttgtgtctaggattgctatgttctaaaaataggacctagagagcaaccaaacgatttatctcttttagttttatatttccatatctttctttgtgagaaaaatatttcatttgtaagaccctttctaattgaaaatgtaaaagtttagctatatttagtacaaaaagcaattttgtgatatttttacatcaatttttgtgctctaatatataattataaatcttaatacaaaatttaatatttcatttaatatttacttaaaaatttattaaaaaaatataaaataatattaataatgcaaaagtaaatataaaatttaataataataataatacaagtcatttaatgtaaaaaagtatgttaacgaaaattcaataataaaatattaaaaattgtataatagtaaatataaaagcatagtatctattgtgatgcaaattttgtatcatgctatattgtgatttaaatttggatcactttttgttatgtgacatttaacacacaattaaagtagatttttaacaaatagactatattttgtatttatatcccttatttacatttttataggagaagctctaaaagttactgaaaaaagctacctattgtttttaaaaaatatataaatatattacaaaagtacaacatacaataccaatttgcaaccatttgatgcatacatagttaataataagacatgtcaaagtatcaaatgtaaataaatattactcatttatatatattttgaaaagaaaacaattccattaaaaggcgtcaagccaaaagatcgagaaataaaagataggtaatttaaacagctaaattagcgggcaagcccgatcaccacacctgagcctcatctaa

SEQ ID NO: 321316 - DNA, 2773 bp, Cannabis indica
ttgggatattattagtcataattgtgtcccaatttatcctagaaatcacaatcctaaaatccttagaattagtttgtcctcaaatttccgccataaaaatttagacccaaaactcataaacctcaaacctttgttgaagtaaacgatgagaaaattagggatcatctcgttaaaaccagccaagatgaaacctctaaccgtcataggcgattcttacaagagataatttagggtaggcgccactttttgcaagaagcagcttggcttgaacccctaaatttaaatgatattcccttagcgaggccaatgtttttacctccagtcactgttgttttttcaccaagtgacttagattttgaaattatggcccaaaaagcacgcaaatcaaagacccctcaagactctatagtcaccttcgagactgaactgatcgagtcttaagtcagatccatacgatcttatgttggggaagtattaaggtcatgtggcatcgaaaatgagcaaggatgccagattatgtctcttgccgagggggagttcagctattatccccctgaacgtgtagctcaagaagagggttgtagcaccaacgagccatctaggataggcgcttggaggctagaacatataagagttggagcagtactccctcttagggactattttaaggaattttacaactatctcgatatttctccatttcaacaggcaccaaatttgtacaagatattagtcagtttgaagtctttgtatcatatcctgaagtgggagtgtccgaccccactcaagattctttatttttactctataaaggcctcccatgcaaggaagcgaggttcaggtggtttctactaccttggaatacacaccaacgatcacaggattgttgtgaggcttcccaacaaaaaagagttgaaggatgattcttttggacctcgggtcttttccccatcaacaccaccatatttcaaatcatacacaagtgtttcttttctcaaaaacttggttttgagttttaatccaatgctaattggccatactttactgattttttttatttgttgtgttaacatcgatcattaggagacttattccaactcctaaaattgagaaaaggcacaggattattcttggccttcctttcagattgtgagcggcagacttcttgtcgcacgagaacaacttgaaggcttgcgctcttctcggcaagaatcagtctattggagacttcacggtcccaaaattgttagattggcaatgagttctagttcctgccgacgaggaggacagagactatgtggctcgcagccattatctgaataatacaacccctcgagaagctgaagatgaggcctcctgaattaataattttggtgtttgtggatggtctccaactgttcttaaagttgaatgaacaaccttagttaaatttagggatagtcagtacaacttttacatttagaactgtgtagatcgtattgcttataggtttaacagttggtaccccgagcatcatgtccaattaagttgtaatagttcctacttcagaattgccaagtaatatggcactaactttgataggattggtcattcggattgggatatgtctggttttaacccctttgacctattcatgataaatggttctagggaatttagtaactattatagttcttcttcctcatcaaatgactatggtagttttcttaagtgggagactatctcaccacatttttcctgcttatattgcacaagtattgacatttacccctctgtctcgcagatatggactttgaaaatctcttgtccactttgggttccaaaaaaggcacgaagcgagctgttgtgtcagagacttcttctaggatgaaccctgaaccattgaagatattgaaaaaattgacgaccaataagaaacacgtctcgatcctgatcgttagtgagtcagaggtgcccctagtggcctctttggtacctgctactacaaacattgatgaacaggctttagggtctattcatcaagttagattctcaagatcacaacctgagatggtactcttggagccttcttaccccctgccaaattctacaagcattaagggttcgcaagtttgctcgtagtatgccaccactgttggaatatattttatgaggacctagatttactaacaagtatgtttactaacatcctaaatatgaatttctaaaataatgaaacttaaatacatataaagtttgagaaaccttacattggttgcagcaaaatataatgactcctcccactaagatctctaacccttgttcctttctgtcgcggagtattatcaagatctgagcctgattctgctttagttgttggattcttcagtcttacaaactatgattgagtactagacttactatgggtctatgcactcaattactaaggcttaaaattttatgtgaagaacactctaggattcgaaatttagaagaaagaaagaggcagaagtctcaagaactctctagttgtctgacaagatgtaaactaggttaatacccattagttggattatgagactatcatattctttttatactaattcacttagggttaggattgaattatagggaataaaaaaatgataaaataatagctaaaataaacctatagtggttggccatgatagtggaccccactaattatatttttggccattttctaaccatttatctattatttctacaaatgtcatattttttcaactttcaatcctataaatgccaaactatt

SEQ ID NO: 321317 - DNA, 3006 bp, Cannabis indica
aagtgtccatctactagtggaggtagcagattttgttgttctgaccttggttggtctttacatacttctccaagtgcggattgtttttctttagaaattcaatttcccgcttctagatcctggtaaaataattccaatagacggacctagatgggggacctaggccgaaaaacccgaaccttgacctagacctagaccaaggatccggacctagatgcgggacttgtaccaaaaactaggtcccagaactgggaccgagacccaaaacttgacaacagactcgagacacgggacccgacactggatcgagaacccaggacctgagtaccgggacacaaccctaacccaaacccaaacccaaactaaggacccgacccaagactcgggacccgaattggaataagaccgacaaccaagatcgagatccaaatctagaactgaggcttcgacctgacccgtagtcagtgtttgaatccaggacccagaccaggatccgtacccagacccagaccgggatccagacccgatcccggacctggacctatgacttgggaccaggtctaaggctagaacccagacctaggacaataacaggacccaaacctagacccaaactcagaccagaacctatatcgggacttggacccagaccctgacctatgacttgggacctaaactaagaccgggccttggacccagacctagacccaaacccaaaaaccagggctggaccaaggtcctaagaaccagactcgaacttgggacctgaaatgtggacccacaatgggattgggacccaaactcggacccgaacccaaaccaagacctgcactcaaatttggactcgagactcgaacccgaactggaacacaaactttgaccgagatcgggacctaggtactgaacatagatggggaacccagacccaggaatcgggcccccaaactgggacaaaaacttgggccaaggaagttggatcgggatctgggagcttacccaagacccaaacctggacctacgacccaactcgggtcctgggatccgagactcaatgcttggacccgacccgtagttggtgtctggatctggaacttagaccaaaactcgaactcaaaccaggaaccgaacacatacccagacccagacccacactcgggaaccataactgaaacttgaactagaactggaccaagatcttggaaaaggaccgggacctggacccggaattgaacacggaaccagacccacccttggaccctaaccgagaccaaaacccgaacttgaacctcgcctcggacccaaatcaagacccgaaccaagactcggacctaaactcgactcgaacccgtaccccatgacttaaaactagaaccaaaaccataagaggatcgggacccaggaaaaggtccaggaccaggacttggacccagacccaaaactgtaaccggaccaagatccaaactcaaacacagacccatcctgggatggggtcccaaaccgagactcgagactcgaacccaaacctaaactcagacctgaacatggaacatgactaggacccagaattgggatcgagacccagaccgggacctgggacatgaactgaaaccagactaggacctgtgattgggatttagatcttgtctcgggatccttaaactgggcttggacaagacccatagtcggcgtattgatttgggacttagacaagaacttgaagctgcacaaggacctggacccagaccccaacatgggacccaaaaccgaaacttaaaccagaacgtgactaggaccctagaacaggaccgggaccgtgactaggaccaggacctggaccagcacccagaactagaccatatccaagccccaaaactcgagctcaaaccccctcccagacccaatcccagacccagactaggactgagactcaaacccaaagtcgagactcaatctcggacccaaaccaagcccctgaccgagactgggattcaatccttgacatggatacgaacccagacccgaaacccaatacaaacctagacccagaccgggatcaaaacacgggacctagactcagacccaaaccaaaacatgggacccaaactcaaacatggaccccgcctgggatctgaaaaactcgtaccttgactcggactaagactcggacccccaccccaactcgtagctggaatttgaattggaactgtgactaggacccagacctgagaccagaaccaaacccaaaccataagacaaacttggacaagaacctagaccgagaccttgactaggactaggacctaagacctgggacgcgaaccttgaccgggacctagacctgacctagtcctaaacccttgccgagacctagattgggatccagacccttacagggacctaaacctgaacccagtctaagactggtaccgagacctggacccgaacccagagtgggacctggactcaaaccaagactcgagacccaaaccggaacctggaccagacaaggacttaggaactggactttgttcggggacctagaccagggacctaggcctcaaaacccgaacccagatcggaatcagagacttgaacctgaaccaggacctgacctagacccgagaatctgaagtcggaccctaacccaaaacctaccccgaacccaaaccaagacaggaacctggacacggaccaggatcaaactcgaaccaggacccaaacccaaaatcggacttgtacgcgagacccaaactcagacctatacctagaatcagacccaaacctagacctggacctagacctgaactcaaacccggaccgggatcagaacccaggacatagacacagaactgaacccagactcagatcgggatcaaaacttgggactcggacccggatttggaccaaacacaagacctaaaaccacacaaggagcctgatctagacttaaaccaaaatccaaatccaaacccaaactcgaacctcgacccaaactcgaactcagaa

SEQ ID NO: 321318 - DNA, 1842 bp, Cannabis indica
aaccttgtcctcaaggttgaaagtaggaaattggtgacggagggtctcaaacttctcccacgatgcttcaaacaagggcaaatttttccaacgaatcaaaacttcaacctcatcaccgggcccatggggaccatggcgcacattcagcacttcctcgggttctacttgtaactccaactccggagtgagttgagaaggaaaggtggaagatgcggaggccgccccaatgacagctcggagctgggaaacatgaaagacggggtggaccgccgcactaggaggaaggtcaagcttataggccacttctccaacacgactcagaactcggaatggtccatagaaacgggctgctagcttctcgttacgacgaacggccaaggttttctgccggtagggacggagcttgacaaacaccaagtcaccaacctcaaagcggacctcccggcggtgtagatcagccgtggtcttcatgcggtgttgagcacgaaggagatgcatcttgaggtcatcgaggaaggaatctctatcctccaacaattggtccacggctaagacggccgagccccccgaatgataacgcaccaacgaaggaggatcgcggccatacaacaccttgaaaggtgtacaccccaaggaggagtgaaagctagtgttgtaccaatattccgcccaagacaaccacttggcccacaccttaggcttctcggaagcaaaacaccgcaagtaagtttcaaggcaccggttaaccacctccgtttgaccgtcggtttgtggatggtatgccgtgctgtgcttcaaaagcgttccttgctgcttgaacaattcggcccaaaagtgactaaggaaaacacgatctcgatcagacacaatggagcagggaataccatggagcttgacaacatgggcaaggaatgcttcagccacggttttggcggtaaaagggtggcggaggggaatgaaatggccatatttgctcaaacggtcaaccaccacaagtattgtgtctaccccttcggaacgcggtaggccctcaatgaaatccatagtgatatcatcccacacttggcccggcaatggtaaaggttggagcaagcccgccggggacatcgccatcgacttattgcgttgacacacctcacaactcctaacaaaattcaccacttgttgcttcatacctgtccaaaacgacatcagctcgtaagcgttggtaggtgcgggattcgccggaatgcccaccaatgggtgttgcatgatactaccttcaaaaaactgggggtaagagagatgaagtggcagccaacaccacccttcctttgtaccgaagttgtccatggtcaagggagaacccaggaacttctttgttttcctccaaatccgcataaatcttggccaacaagggatcggccaacacctcttgatggaccacatcccaatccaaccacgaagttgtggtgagtacggcgcatgctgctggaagaaccctggacagggcgtcagcagctttgttggcaatgcccgggcggtattgaatttcaaaatcaaagcccaataacttgaccagccacttttggtgtttcgcagacaccaaacgttgttccaagaggaatttcaggctttgctgatcggttcgcaccaaaaacttccgacccaacaaatatggtcgccatttgaggatggccaacactatagccataagttccttctcgtaaatagacttgagttgggcccgaggcttcaagactttactaaagtatgcaagtggtcggccgtcttgcattaggaccgcccccaatccataacccgaggcatccgcctcaatcacaaactgcttagaaaaatctg

SEQ ID NO: 321319 - DNA, 1060 bp, Cannabis indica
agacaatcaaggaaagcgagatcacacttatttttcgaggcctgttgggacatacggttcttgcggaagaaatagttgctgagctgtgtgataggaaaccttcccgcacaattcggaaagcactgaattagaatgagagattcaccaccacatcattgcatgcaaggggagcttgctcgatttgcaaattgacttgacttgtaattcacttttgactctattttcgataagtcgaccatagtgttttccttttttgttctcaaacccttggtaatggatccaatatcctaggttaggcatgtaaggaagattctcccattttgttaactggatttcattaggtggttctgactatccttcttgtaccaatttttctaccattcttcattcatccatttaggcccgactaagaacacgtggatccagggaacttggctcgggaacaacttcttacttgtaggggctaataaagcaaggtaaagagaagagatcccaagtttgaaagggctggcaaaacaggttagacacgataatatgacttgaaactcgcacaagagttagcgagttttgatttgccttaaatgggttcgggttgactcgtttatcccatttaataaatgggtcgtgttcatattaacacgactaacacaaaactcacctattaatgatctatttcaagttattttagtactttaacatgttataaatatgttaaatacttcataaatatattattagttgacatatttaaacaaaatatgcttataaacaggttacacagattttatcgtgtcaacctgtttataaacgaatcatgttcgagtttcattttctaacacgattattaatcggatcatattcaatcgagcatatacctaatatacctccacacggtatgaatacgaacccgcaaacacaaattctcacccctattccgaatcccctcccccaactactaaaaaaaaaaaaaacgtaaaacgtaaaagaaaaaccgtacctacaatatgtcggttagtacctcctacctactatcgcctccgacgtcctacctaagtaccgt

SEQ ID NO: 321320 - DNA, 731 bp, Cannabis indica
acataaattaaaacagaactggtgccacaacaaaattaataaaaataaataacatacaatagctcaaaaaaccaattctaattaaaaaaaaataagagagaatcaattctaacaaatataaattaaatagaaccggatccacaactaacaataatctatcttccactattatctttcacttcatcaacatattatttgcctaccaatataacaaattaaattctaataaagccatttatctaacaaattaaacacacatagattactcaaatttagttaacaccttggacatactgtcaattttagaaaccatataatatttgtgcatttatatttaccgaaaattacatgtgcttaatcatgtgaaacccaataaatttttatggtaaatgaaagagaacaataatgttaggaaaaaatttccatttggctagtaacaatagacacttaagttaaatgtcaatcgagaaatgatcaaaatgataccaatacttgtgaactcctcccaaagaagaaaacttctccaacatgtcatatgtccagaacttgttaacgttttggtccatctacaagatggacgagttaaatactatgggggttgtgggtgaagctgttgggttttatgccctaaataaaactctatgtaatccagattatttaatatcaataaagtaacagaagtaatttttcattcacttgtgtatattttggttcacttaatcaattgcttg

SEQ ID NO: 321321 - DNA, 1886 bp, Cannabis indica
caaaaaccaactccaaacagtaagtgatttctctctttgtttttgtacattctttttattttgcgtttctgggtttgatcactaatttcttagtcaacacctttgttacctcatttggttttagtaattttagggttgaattgtacctgggtacatttaagagtttaggcagaacgtatatttttggggttctccaatttaccaacttctggtttgataaatttcatccaggaattgggattgctttctctttgcagaaaaatgacccaatccaaaatatgtagaaacagagttctcactgaacttttcatcccatatattcccagaatttcagaacccaaatccaaattagaggtaaatgatgcaaagattagggaacacttagtaaaaacctaccaagatgacattgccaatcgccacagacgcttcttgcaagaaattaatgaaggaaaatgtcgtttcttgcgagatgatgcttggcctgaatcccccaatttatcatctattcctctggctaggcctttatttttttacccagagtcacaattgcttttgagccaggtgacttggactttgaaatcatgacctccaagcctcaaaaatcgaagactccccatgatcctaatgtcacctttgagactatattaatagagtcgaaggtgcgagtcatcggtgattacgtaggtaataccctgagggcttgtggtattgagtataagcgagactggcgggttagatctctggttgctggcgagttcagctattatccaccagtgagacttacttgcgaagcccctgagggaaccagtggcaaggccagtatgagtggctcgaccgggatagtcgcttggagcctcgaacatatcagggctggagccattaccccctgcgagactatttcaaggacttcttaaaccatatcgggcttgccccattccaattgattcccatttcatacaaaatcctcgcgagtttaaaggttctgtacaaaatcttgaactgggagtgccccactcccaaggaaatagagtatctctactctgtcaaggtcgttcctaccaggaagaatgcagcagggggtttttactgccttgggactcacacaagtaaccttaagatcattgtggatttgccaaataaaactccctttaaagacgaattcttctggacgacttgtctttccccaatcggcacaaccacctttcgcataatacgtaagtaattttacttaagacttggttaaactattctatgtcttttactcttgttatgctgaattcaattttgcctttattttcgaaaactgtctcgaaaagaccagttccaactcctgagatggtcgagcgacacaggcacctgttgggtcttccatttggccttcggtcatgtgagtttcttttgaacgaggtcaacctgaggtctgtgggtctcctaactgacaaggagtttacttgtgattataaatatcctaagaattcttcttggcagtaggtttctgtcccagctgaggaggaagctcaggatcgcgtggctcgggcgcattatcttcggaacatcgccccttgggaagccgaagaaggagcatcccgaggtaattaatgtggttggtcacccatagtgcttagggtcgagcgtaacaccttagtgtcatttcgagatagtcgttacaacttttacacttggaatccccttctcgtagattgcattgcacataggtttgatagttggtacctaaagtttcatgtccaaattagttatactgacccatactacgggatagccaagcattacgggaacatgatggatagggcaagtcacttagatgcgagctgggatttagaaccaattaattcctatgatatattcaggatcacgggatgtaggga

SEQ ID NO: 321322 - DNA, 2852 bp, Cannabis indica
ttgtgactcacatgtgctctgtggtccaggtaagagaaaggggaaactggaccagccatgagttagaagtctcccgacaatgtatatatcaatcgccatgttttggctcacagtggacaagatccttcttttgatgtattttgaaaatgtgacaacattttgtaataaactattatgtattattttgtaaaaaggttgtaattaaggggatcctcaaaactacttgtatcttgaatgaaaaattaagttataatttaaatagtattactagaagttttaattaaaccacatttttcttaaaccattagtttcttattataaactaattaataaaagcacacacgtggtgcctttactgtttagggcgttacaatatggtatcagagcgatcaaggtttaaagatctggaagactggttggatatgaacattggttgtgaagactcattcgactcatggtatagtaagtgttaattgtcagttgattattagattatttgttaattgcttgaattatctacttacctgaaatgtatgagttattagaatagtatgataagttatagatagtagatattatgcacatgtatgtatggaaaggcttattagcattggttttggtttggaagattctaaatgttggaaagttattgttgtaggtgtattagattattcacccgaggcgatctggtagggttaaacgcgagctttctgggcttggggttggtggtgaggatgcaaatcctccactaccacaaaattgggagcaaatgtatgctacgatgcaagagaccatccgacaacaaggtgatcagatcagagagttgagagagcaacaagctcagcctgctcccaatgccaatcctaatcctctagcacctttggtagtgccataggatgtgggaaattgtctgaagccattgtatgagaagttcaggaagcagaatctaccagtgtttgaaggtggtcctgatttacttaaggcggagcaatggatgagcatgataacatccatctttaactttatgcgtgttgagtgtaacgattgagttggatgtgttatcttcatgctgcgacaagatgcccgaattcggtgggatctgaataacatgacatgggatgcttttcgaaccttattttacaaaaagtactacaatgaatctatccatgctgctaaggcagaagagttcatacagctaactcaaggtagtatgacagtgacggagtatgccaccaagtttgatcggttggaaaagtttgcctttgatgaagtggccactaaggctgctagaaaggccaagttcattcaggggttggaagagcatatcgctcaggatgtaattgtagctgctaagtaattggggttgtttgaacttatgctcaggtgtttgagctagcccttgctgttgagagtgaaaaagatcaaattcaaaagaaaaataatatgagaagagattcgtagaaacaatcgcccaatgttggttctggtaggggtgctaaccctaatgatcacaagaaaagacctaatgactcatcatctatgagtcctaactagaaatttcaaggtaatcaaagtttctgccgaggtggaaacaaaaactggagaacctatccagagtgctcgaggtgcaagagacgccatcagggcaaatgtcaagctcgagcctgcttttgtgtagggtagtaggccacaattgtaaagattagaacaaaagaaagatgatactctggttcctgctcaggtatttgttttgaccgaagcagaggctgatgcttgtccttctactgtgacaggtcagatttctattgatggtattatgttgactgctttaattgattctagtgctatgcattcttatgtgtcaagtagagggatggaaattttaataagcctagtgatgttttactgagtagttttggtaccttactatctactagagaattagttgtctacagcaagtgggttagatcccttccagtgcatgtggagggtagaaaattctcagtagatttaattgaactaaatctagaatattttgatgttatattgggaatggactggctaacaatgtatagcgcaaccattaattggaagagaaaaatagtaactttcgaacctgagggtgaggacccatttgtaattgtgggaagggttcaaggataccaaatttaataatctcggcgcttaaggcaagaaatttgttgtgggatggatgtgtcggttatctagctagtgtggtggatatcacgagggaagtaccaatagcacctgaacatgttccagtggtacgagagtatctggatgtctttccaaaggagctactggggttaccaccaaaatgggagatcgactttgaaattgaattgatatcgggggtagaacctgtatctaaagctccgtatcgaatgacacatacaaaattaaaagaattgaaggttcaattacaaggtatgttggatttgaaattcactagaccaagtacctcaccttagggtgcactagttttgtttgtaaagaagaaggtcagaacattaaatgtgtattgactaccaggagttgaataagttgacagtgaagaacaagtatcctttgccaaggatagatgatctgtctgatcaaatacaaggaaaaaccgtcttctccaagatcgatcttcgatctggttatcaccaattgaggactcaagaggaggatattcccaagatagcttttcatacccggtacgggcactgtgaattcctagtcatgtcctttggattagctaatgcccgagcgacatatatggacccaatgaactgagtattcaacgactttttagatgattttgtaattgtcttcattgatgacattct

SEQ ID NO: 321323 - DNA, 911 bp, Cannabis indica
aattacttgtttaaagaaatgattattttattcacaacgaaagttcaaaatattacattagtgatgcaatttacaatcattaatctcataggaacttctccagttcaattgtttattttatcaatcttcgagaatcctctagttttgatagaatgggtttcaatgttcaaggtcaatccctaacatattcccaaaattgtttcaatatcccgggtcaatccctgtcattaacctcggtatagtcagcataaatgggtatatatttgttgtgtttcttttgtttcttatccttgggtagccttttgggatcgtctttcctctttgatcctgaggcttccaattcgaattcttcaatagaatcataccccaattgccttttgggttccctgacttgatgccttctaaacttattctccaactctccattcgtaaatggagtaactccctttgttttggaccaagtcgttgatcaagatgaggttttctcatgttcaaatgttctcgtatgtcacaccggtcgttacagctgtccgaccttacatttcctatatgttgcattatgcctttttgatcatcactgcgacgagtgttctctacacctcacattgattgattacgagatactgcacgcctagcagtagtccttgcctcttctcattctgttcttcctcttaaggtttgatttacctcgttcccccaacaggggtttacacgagctcctttcttatgaacttggagagaaggttggcaatctccgactgatgttccacatatcctaggtagttcccctagacttccctcaatttcctcaggttgcctcccctgagtgttctaggaatatatctgggttgtctcctgccccttggtttgcgagttgcgaggtttgcctcgtgaatctctgtttccaaggt

SEQ ID NO: 321324 - DNA, 1927 bp, Cannabis indica
aagtagaactgtgagtcgacagacttagtaagaaaagcatataacatatcacataatatcaacttctatctaggcacccatacacctatttacaaggcttaacaaatgagtaaaaacattctatactagggtacaaccattgtaccacatacactacgtaccaacattgtacgagtgttggtagggtttgtttcgtaccgtgagtaccactaagagatataccacacacaccctgtactttcccgtacttgtgctggtgacaccgtaatgtactctttgaataatttgcactttgtaccacttccgtacaagtgttggtagtgtactaatcataataagcatgcacatatatttcacacatacatacattcacatatatatcacatattctacactactcttacctcatttctgaattcaagtgagttggccgacctgaacagaaaatctcgtgctagatagatgccctaatcacataacataatcgggtaaataacactccaaaaccctaatctgggaaactcgaacctccaacttaaggttctgctattactaactggaactacaatatcctaaaaaaatagagaatcacccaattaagggactgaaattgacacgaatcgaggaaatgaattgttttggggaatctgccaaaaccagttaaccggttttacaggtcctggcaaatcggttcaccggtttgcaccaggtttccccaaacaattccaaacctgctcaaaacatgtccaaatcccacgaaactttccagaacacctataataaccctccacaatatatcccaatcaacaaaaaccaaaaaacatacataattaaaaaaagccatggatgaaccaagtttgagttttcaaactcaaacttgtgcatccatcaccccacacccctaaaccagctgctagcacaacattctaagtcaaattaagcttaaaaattgaattccaatacaaacaaaccctaacagcccttatacatcaaaattgcacactcaaaccaaaatcaaagcttcaaaaacaagaaattaagtgttctagggttacctttgcttgaaacctacttgaatctttgttaaattccagaaaagatgaagaacaaggctggattccttctggctctatgtgggccaaacaaagagagagaaagaaaatgaatttctcttgatttttttatttttctttgttttttccctaagtgaataaaggttgaataattaatcctttgctgaataaataatggttagttgtcaattccctaagctgccacataaccccccacttgccaaattactaaaatgcccatggtgcttaaacttaagctaattcaagcttagggataaaacggtaaaaaactacaaccccgctcaaacccgatattttatttatctccaatatatatcccactaaaaaaaggctctagacttacccatgtgattcaaatgcttatccatcgcactttccgttgtcgccgagcgaaaattgtaagaatagcataattcatatataataccaataatacatgtagaattaataaaatctccagaagtgagaaattataactctaatgcccatttctaaaaataggacccacaattaataaaattaatagaattatcaataattaacactaattgcctttactaatccatattttaaaaatgcggtcactacaattatcccccgttaaaagtatttcgtcctcaaaatctaacctgaatagctctggatatttagtcctcaggtcagactctaattcctaggtggcttcctccaccttgctgttcctccagagcactttaaccaaagctatggtcttgtctcgaagaaccgtttcctttctatcaaggatctaaaatggttgttctttgtaggacgaaatctgattgtagttcaagggcttcataactcaagacatg

SEQ ID NO: 321325 - DNA, 562 bp, Cannabis indica
ctacggtttatcacctgtcaagagtagtggttcatttggcattcaaaatcttataatctaagtgttaattaggggtcgaaaaacggatttgggcactgcacatgaacatgatatgaattttacgggttacggtcagaaaaattagacgcggatcgaaaatatgtcgacatgactagacacaaaataagaacaggtcaaatacgatacgacccacttaacacgaatttgacacatttgatatggttttttaactaaaataaataataaattattgttgtttttttttttaagaaattaagactttatttttattaaatcagagcaaattactcataatgatagaaataagtgcatggaataagtgcatggacattcctaaaactaaactcaagatcagcaagacaataagaatgttgcgctataaaatgcactgctcaattagcatatcgcttaataaacagtaaataaacattactcaaagactttaaaagtaacttacaatcttcaacaataagtccaaaacgaggtaacattgctgttgggaattattttaccaggatct

SEQ ID NO: 321326 - DNA, 901 bp, Cannabis indica
atcttgcattccgcaaacctctgctcctaatccgaaggagcttgtggtggatttacaggatgaccaccttgaattctgccacggccttggccgcgaccacaggaataatccttttgccctgacttacagatatgaagctatgatgcccgtagagctcaccccgccatctcatcaaagaatagcatatgaccaacacaccaatcataaactgttggctgagtctcttgatggaattgaagaaacaaggaaaagatttgagctccgaaaggtcgtgtatcaacaaagagtcgtaaggaactattactccaagtttaaagataggaaatttatatgtagagacttggtgttacgacgagtatacttgaacacaaaagatgcaatagcaggagtactcaaaccttcttgggaaggtttctatgtctccactgaagcactagaacccgaaacatacaagttggcatactatgactaaaacttaatccagtgctcctacaaaggtactggaagggggtgcatctaagacgatactaccaataaagcagttgtcttcaaaataagtcttttcacagtgaagattcactttacaatgtgcacgtgaagtgatctcctcttaaccaaaaaagatgcagcaaagtcatctttaggtgaagaggtccatcgacaagttatgcccctacactactagtcgaatagggaattagtgtagtcagaatcaatttagctaatccttgatgaaaaatgtaaatttacaattgctatttcttttttttttttgaaaaaatgtgactgaaaaattcaaaaacttaagaaaaaaatgaagaagaagatgaagaagaataactgaacaagaaataaaataagaaacttatatgttaatggagatagatagagagagagagag

SEQ ID NO: 321327 - DNA, 1796 bp, Cannabis indica
tggtactacatatatcaataaggcgcatcttattttctggtagcccatctcgaaagaactccacagttaagcgtgaacgacatccaatcaaatccaaatgaactaaactgattcaatctaatccaattataaaaaattggatatccaattacaaattagattggatgttaaaagttgaattctaattgaattagatagattcttggatgtcaatctcaaatctaattacatttatatatacaaaaaaaaaaattggttatatttacctatatataataaaaaaaatattaaaaaaataaaaaatatatttttagtggttctttttttgtattgaatttgtaacacttgattttttttgtgtatttattttcatatgttttgatatattttattacttgtcaatattgtgttttagttatcaaatttttagtagcattaaacttgtaaaaatgatattttatatagtactattaaacttaaataaatggtaatatttaatttttatgtatttttttttcatattttttaagttaatattaaaagtttatataattagatatttaatttaaaaattgattcaatccaattaatcaaagtttaattaaattggatcgaatcataatttttaaatctaattattaattaaattgaattagattataataaaaatattggattgaatatactcaacccttccacatgatcaaatcaataataaaacaattacttatccactttttaagcacatctaataatatataaattagcatctattgtacgtacttgaattaatatgatatatagtgttagaattaatcctcttttgaaacttcataatcataccgaccctccaaattcaatcatatataaatatgattagaaatgagaaaacataatttgaatccattaatggtttctaaatattatgttagtgtgttctttgaattttagaaatgtatattaaaaatgattgagagagagagagagaaatgataattagggtaaagagttgtatagcattacacaaaaattaatgtaatatttattattattaacttaagctattgttgaaaaattagggtgtatatatattatgaagtacatatgtcattagtcaagtttttacaaaattgatatgatttcataattaaataatcatatgtataaacttgtgataacaaattatatatttaacatgtattttgtgtacaataattagcttattatataatacccaatacaaaccgatttcaacaaaattttaaattaaattatatagatcaatatttgttttagatatataaaacacatatatatatatatttctcgaatgtgtatctttatctttgacgaaggattgtccatccatgcttctcttaatttgaataataatctcaattaatatatatatatatatggtgacaaaataccatcttgattcttgaaagatcaacttcaaatattgatatttttgtatgaagatatttatagaataatatgatgtatgttaatatgtgtttgtagtaattggaaaattaaaaaggttgaccattgaataaattgatgtgtagctaattaagctccacatttaataaactaattcaatgtgattaggactatactataacacaattatacacctatatacatatttaaatatgtaacgatatttgttattatagcaattggcgaacctttgatataagttgatggaggtgtactttttttttaagggtaagaacatatttttttttatatgatataacatgttaaaaactgatataaatttatatttt

SEQ ID NO: 321328 - DNA, 1196 bp, Cannabis indica
caaactctatacgtgtatgccttctattggctcttgtaatatcttcttctcttcctttaagctatataatatgcagcagcctcactcaatattttgagctgagtttttcattttgcttccctgctattttcttcacttggtaccagagcaaaccctaggcgtcagccatggcagatccagcttcagctccagaacaacagcagcaacaggtcaaaggttcaagaactgctacctcagaaacttcacaccagcaccaaccaaggccatcagcacaagctatgagtccctcactagtgactactcctttcagtagcactctaagccaacaattcacaatgaggctcggcagaaacaattttcctctgtggaaaacgatggttttcaccatcattcgaggtcacagactcgaaggcttcctcaacagcaaaagagcatgtccggaggagttcattactccaagtatccctgattctcccgactatattgtctccattaatcctgactatgagaactaacttgttcatgaccagttgttaatgggttggctttacggttcgatgtcggaaagcatcgcgtccgaagttatgggctgtcaattggcctttgccctctggacaacacttgagaacatctttggagcctattcttgtggtcatactgatgatcttcgcaccagactacaaatgacaagaaagggctcgactaccatgaccgagtacctcaaacaaaaacgtatgtgggttgattcactcgcacttgctagtgaaccatatccagaaaggcaccttgtgtctaatgttctctctggcttggagattgaatatctctcaatcgtctctcttattgagtccagatctgaaacaacatggcaagagctacaaagtatcattctcagctttgaccacaagctagaacgactatctaccatacctccaagccacaagaacttgagttctccctctgctaacctggctcacagacccactggtcagtatggatcgagaaacacaaaccagcaacatcaaggagggcgtggttcgtcgactaagtcaggtttttaacgtccacgcttcaagcctccattgggcccttacacccacggaatgaatggctcttatacacgagtaagtcactctggctgcttcatggacggacgactgacctacagaccaacacgagtgtttccagcatgcttt

SEQ ID NO: 321329 - DNA, 1460 bp, Cannabis indica
aatatgccaataattagtgtagagcataacagacatgccatcgatgccggggcttttatcatcactcattgttttgagagcgtcataaacatctgttgcagtgaaaggggctgagatgagatttcttgctgtatcatctaatgttgaaggaattgaatcaagaattatgtcaagagattcttgatcaacaccacgactggtaaacaaatcattgtaataatctgagatgatatgcaatacagccgagggatttgtttgtgtatttccattgacatcaattaattttcgaatctgattatttttccttcgagatgtagcatgctgatggaaaaattttgtgttggaatcccctgattgtaaccatgagatgcgttagcgttgatgccaataatcctcctccttagcaagtaactcatcaagaatttgttcagatgtttgtaccgcttgtaagtgatcactgtcattcattctggaattatggagagtggaaacatgtttttgggtgtccttaatttgctgctttagttggccaaaggtggaatgatgccatgattgaagcttactcgaaatggtagaaatattggctgtaacttgggcaatgcagttactggactccgtagaccaattgtcaaaaattaaagcagcacattgatcctcctgaagccatattttttcaaatctgaatctggatttgaaatgaatattttgtgcttgttcgttcagagctgcaatgaatactttgatggcgcgatggtctgacttataatagtccaagtgttgaactgtacaagcttggaaagtagcctcccaaagatcattaacaaaaccatagtctaatctttccttaagaggacctctgccattaccttgactgctccatgtgatacgatccccttcaaaaggcagtgagttgagacagcaactagtgacagtagcacgaaaagcttcaatttgagaaaaattcctcattgtacccccaattttgtcttcatgagagagtatttcattaaaatcaccaagtacaagccatggtgttaaaggagcaatatcataacatcgtttgagcattgtccatgtgtgatgtctttgagaaatagatgggtgtccatagaaaccagtgaagtgaaaggagggcccatcattaatctcaacaaagcaatcaatgtgattagtggaaaaattattaagggaaacagaaactgatgacttccaaagcaacataggcctcctccaaggccttgcctaggaacttcaataccattcggaaaacgaagagagtgtctaattttatcaatactaccagcttttaacttagattcaataagaaacaacaaacagggtgcttgctcattgactagcaagcggagatgcctgaatgcactggggttccccaatccccgggcattccaacttatgcaattcatggctgggggcgatgttgctgagcaacatccgccaaa

SEQ ID NO: 321330 - DNA, 1160 bp, Cannabis indica
gataactaatcatattgtaaagagttttatttagggcataaaacccaacagagtaaccatcatctcttccttttaacccgtgtacaagtaagtatttcttccactcaaactactatttctggatttgattgtgaaatatagtttcgagctcatagaaatgtgttgccttgcatgcgtaggatttaaatttgaaaattaaggttaatgcacttgaaatttatttgcatgaaccttggggtaatacctctggagctagggctttgttgaggtactttcccttcaattttggttgagatatatgtctattatttgggatattttggtttaggtgtttaggtctaacatttatgggttcatactagtttttcaaataattccgctttgttttgtaatgtgtatgcattttgttttgctgtgaaaaagggaatgtggactttttgatactgttgtatttttgggttctcgattcatcaccgtagttggttgctctgtgagggtgactttgtaggtgatggatctgatggagacctctccaagaagtttcgagagaggcctcccacaataccatatttgtcatttgaatatagggcattaactgcatgggttttctttccactttttcagtgtctagtgaagataacaacttccagttggcacttttaaatcttgaagagattagcaggcatacctcttgcgcaggtaaatcttgatgacccaacctcgctagaaaggccttctgaagttgtttggaccaagcagcaatgaaaagacaaaggcaaaggcaaggcctgggacgcatctccatctcctcttgtacttaataattctatttgggaaatagatcaacaaactaatttgatgagaaattacggtctgttggaggcgtactctactaatggagacgttcggaacatttcgggactcatgtgtggcactagatgtctgtcctttaggaatcgccatcccaaagtgtttactgaaatatcatttacaagtatctaagtgttttaaggataaaatacattgaagggtagaatggtaaatttttccttactcgatgtagatcaactatagaggatctttgattatttagattgaaataataagtaattcatatcacatctatttttggtatatagagtgttctatgtaatcaagag

SEQ ID NO: 321331 - DNA, 1328 bp, Cannabis indica
actcttatgtgtttatttcattgttttagaatacatattaggatgttaataaaacatacttggtagtaaatctagatcctggtaaaatatttccaacaggatcgatcaagtgtatgtggggaccctctgaaagcattgactaacatactagatgtcccagggaaggaagtaattttaaaagtaccttccaacctttgacaaagccttactatttgtgttgcataaacactggtagcctaataggctgaaacagaagtattttgattggccttgctttagtacagattttaactcaaagaagtacccaacctcgtagggtgagggctgaggttagcccagctcaacataaagaacaaaaagtgtcgagaggtacttgatgcctttcggggtgatctgagtaggacacagcacgaagtagttggcgatgtccctaaaatacagatgcaatggtaatactgctcctcgctccaagtggggattcgactagaaaatccagttgaatgccaagcagtgtgcaaattggactcttgtaggcatgtcacaacagactcctttcacgagtcctccactgttgatctcatcaaatttcccgactgacaaagacagtggacgggatatccatctttgctgctccccccgctcaataataaacggcttgggagtctcctccaagacatggtctatccctacctttgatagatggccaggagcattcaaaggctgccctgcctcatcataagaatccaaagggttgtttgaaaacatagtacaagtcttgtatcacctcctagtaggcatagcctctttgacttcaaatgcactatttgtcccagtcgaagcctcttcatctggactagccatgggctgctcaaccacaggttcttcaacatggccagcccttggctcatcatgttgaggttgttgggctttgtgccctaaataaaactctatttcaatgtaatcttttctattcaattatcaataaagaaacagatttaatttcattacttgtttaatgtgttatttggttcatgtgatcatctatttacttatctgattaataaattcatccaaacccttatcacattggtattcttgtttattgtgttgtcaacaaagtggaaagtaaacaagattgtgtgattaaatgtattcctagatttatccgtacacaatgtttaactgatatggtaatctacaacgtagtttacttgcaccttggataagtgctatgtcctttccagggcattggttaaagtaatcttgggttggatgtatggagtatgcatcgaaagggaccaatattgaccttgaactagatatgataa

SEQ ID NO: 321332 - DNA, 2958 bp, Cannabis indica
taaaataatttccaacagtttatccatatctgagttcatcgacaaagttcaaagcattgccaactctcttgccatcgctggttcttagttgatgattaagatcttgtgctacaagttctgaatggtcttggcccagaattcgatcccgttgtttctggcatcacatcaagaagcgatgtcttgacaattgaagaagttcaagctctcctcctttctcatgaaagtcgtattgaacatcatgtttctatgagtgatctttctctaattgttatcacaattttcgcactctgacgtggcatcacatgttggtgacacatggacttgattctccatgcctgcccgaaagagatgtttcgagcaaaacactgcatatacctgcatggacgaggtcctcccagccaagcagtggacaatctgagcagcatatcaacacttagcaattcaagcatttgcatcgtgaagcacaagagcaatccctataaatctcggatcgtatcacaaagatatggcaagctgtccaaatcccacaaccagtgtattctaaatatgtaatatgcattcttaccaattatagatattgttagtaaaagggagaccttccctcaaacatgtagccctataaatagtgatccattctcactagttcgagggtcgaaagaattatctaagagagtacactcagagatttcattgttagagctttaagagaggaatcattgtattctttgttcataagtcaatacaaatcaaggggagtaggctattactgaactgctcggggccgaacctttttaaaaaccctgtgttctttatttatcttttcatatcatatctaaattatatctttgatcgcttattattaagactcactgtcgttggctaaaagcgaggtcaacattttggtgctttcattgagagaaatgatcatcaagttgctctttacttcaagtctactcataaataagatggtggtacaaactcacaggggtgtagtcgatcaggtagatccactggcagtagatcccacactgcagactccagggaatgcaagggttccaccaatcactaaccctgaacaaccaatcacccaaccaccaactgcgggtcatgatgtgacgtctcctttggctagaatcacacccggtgtgcaagagactggaaataccagttcagcagccgatctaagtactcccagtactggggttcctttagcaacaaatgtccggacaaccgtaagagatgacaccgagatccaaaacctccgtaatgctcttggactcatgcaaggccatactaatactctgcatcatgatcaggaagagctccgtgttgcagtgaaccttgctttcgaagaacaaaggcatctgtttgccgaatggagggataaagagatagaaacattgagggctcaacaagcagccatcgatgaccgaataagacaagccaccgtactgatacgaagagcctactaagttactaatcagcaacccgcctctagcatcccactgggcggttcaggcaaagatctagctaggaacactttccaaactctgaatagtcaaccgtccaatccccagtcaggtttgtgggccaagcggtaggcggccataccttatttggaaattcgtcaggaggtgttatacctaataactccacccagattagcggttctggccaagtgctcggccaaaccaaccagtcactaagacagcctggtgcatctatatttaataggctgggaacagctcatgatctcagagatgatctgaacaaaatgagagtattagacaaacaatatgttccaccaaccactcagcttggggctcgcgttcaagatccagctcaaagagatcctgacgtgacactggtccgccaagaggccgaaaaagttcatccagccgtgcaggcacagttggatgaactgaaaaacatgttccaaggtctggccgatgaaaagcacaatgatctcgagttggaccgagcacgtagatccctttttactccagagatcaatgttctagagctgccccacaagttcaagatgccaacctggaagatgtataccgggaaggaagatcccctatcacatctcaaatattttgaaatgcaagtggacttacaaggagtacgaggagatgtgtgttgcagagtttttcctgccacactctcagaagccgcccaacaatggtacttcaagttgacactagggaggttcaactcttgaaaggctttctcctcggaattccatgcacaattctcttcttctcgccaactcccattgcatttagacgacctggtcgaagtgaagcaaaggccaggagagcctctccgagctaatatcagtagattcatgacggaggcgacaaaagtggcactgttaactgaagaagggaaattaaccgcaatactggggggcatcaaagttcttggagagctttggaaggacatcaagagagatggaccagtagattctatgagtgacttcctcgatcgcgcagacggtttcatcaagctcaaagaggccattcagcgagtagaagtcgagcttaaaccgaggcaatcacaagctccctctgctggattttgtggcactcgactatctcaggagtaggaactggtcttcgaggaaccgctgcaaacagacaaaagtttagtaagcgaccttaaatatataaattaatacatttcaaagttaagtttctaagaaagggaacttacgtatgatgcgaaaggcggttgtatttattggagagaggcctgtcgtccaaaataagtcttctttgaactctgtcttgtttggcaacctaactataatcttacgatcgcctgtatgagtcccgagatagttaaagcctcatgcagcatttttcctcgcaaggactaccttgactaagtaaaaataggctatctttaaaggagtagggccctcccatcctaaaatatggtataggaccttca

SEQ ID NO: 321333 - DNA, 896 bp, Cannabis indica
tgtaatcaacttgtcatgtcttggatcttgcattcagtttcacctgaaataaaaagcagtatcatgtacttagatagtgcatctgaaatgtggaccgtgttaaacaatcggtttaacgaaggtaatggtccacgaatctttgaattaaacgaaacactaacctacctcaatcaaggggatgactctgttagtgcatattttactaaactcactgccatatgggatgaaatcaatcagttaaggccctgcattccttgcacctgtgctgctactgcttagcgcttggatcatcaaaaccatgaccaagttcttcaatttcttaagggcctcaatgactcatatcatgctgtctgtgatcaaattttccttcttgatccattcccccctttaaacaaagtcttttccatggtagtcaaccaagaaagacaaagaactttgggtcatcgatcccttccaccccttgctgctgcaacatccaatactccccaagatactgtccctgcagcaaatgcagcctccaaaaacaaacgccctcgaccacattgcaccaattgccaaaaacctggtcactacagggaaaaatgctacttccttatcggatttccacctggttatggcactcgaaaaccaagtgacaaccccacaataaataccaaggaacttgaaactggtattcaaaccagaaacccccaagcttcacaaatttcagcaacactgatgtgtctaatccacaacttacccctgcccaatgtcaacaatgttgggttttgtgccctaaataaaatccattttaatataattagatttactaattaataaagatcataaatcacattttatgttgcatggttcacatgatttatttcatgattgtatttaatgtataaattctatta

SEQ ID NO: 321334 - DNA, 719 bp, Cannabis indica
agggaaaaagaaagaaagagtttttagcatattatctgtgggctcaattgtatgaataagctgtgtggttgggactatatttgtaaatctttatatcctcactcagaaagtttattttctcggtgagaacgtttgtaaactatattttggttaattatgtttttcagggaaaagagttctctctgatgcttgggttttggatactgcccaaaaaccctatgtatggcagaggctgaaccctgaaggtgatagaccttctgctagaatgtgagtactgttttcttatttatcattttatgatttaagtattctttggctacataaatacctacagtacactaatcaacaatattttgtaggtatgctactgccagtgctcgctcagatggtatgttcttgctttgtggtggaagggacgcttctggcacagtatgttgactctttctgtaaaagcttgatccttgtgcatacttgctgtctttgtttttccttttgatttctgcctgatgttttagtaggcatccatctaactttggaataatgtataaccatgtacttgcttgggcagccaatggcagatgcttatgggttattaatgcataggaatggacaatgggaatggacccttgcacctggagtttctccttcatcaagataccaacatgccgcggtaagccatgtacattttgaaaatactgtctaatgtttgtatactgtat

SEQ ID NO: 321335 - DNA, 483 bp, Cannabis indica
ttcagggagaaaaattactaattagcctaataataataataataataataataataataataataataataagtgggtacaatgtattttaaaaaattattgggagaacagtaagtaggtggaatttttaattcattcattcatttaagtatattatcatcctattctttgcaggctgtactaaagattcagttttattgatggaaattgaaataagtatatgtattgtcgaaatctggtgaatcataataatcaaaaggataattgtgataagtatctaaagttgtatgttactaatcatcatatattcattatttttttagcagtgtaattatatcttcattttcgataatataaattctgttttaaatgtattaaatgaagattttcgtccaacttaattatttaaaatgagtaatttgcggtaaaactttttcaactattaatttaattacaaaaaaccatccaatctcatattttagt

SEQ ID NO: 321336 - DNA, 921 bp, Cannabis indica
attgaattataactttttaaatctaaaaataaaaggccaaaatgcactatctaaaatacatttccaaaccaatttattcaaattaattatttagaattttctaaaaattagttggatgtttcaaataattacaatgtgcttgtttaaaaataataataatattaaaattattttaaaatctattttcaaaattttataaaaatttgtgaaagatcttaactagaaaaataaaaaagaattatattttttttaaaaaaaaatctcaaaaagaaataagaagccaaaatgcaagtcctactaaaaaaaaattatatataaatatataaatatataaaataatattagtactttacaagcatgtggatatgggcacgatctaattaattgaaaagaaaaggcaaaaacagatcacgcttttgctttttcaatatttcttaaaaaaaaaatgaaaaagagaaagaaaagaaaaacaagattaatatatttgatgatgatatataatttttctacatatactatacaaatatattttttagaagattactagattttttttcttatatatctttgtttgtgtagtgcacgtcattcccatatatatatatatatatgaatattattgtacatatatttttacaataattatattttaatatatataattttgaaaaaaaaaattaacaatgcacatcttacatcttaaatgggtgcattaatatacctttatctatatcgttatttaaaaaaaaaaaagtcgtgtacattataattatttaagtacatcctgcaaattttaaaatttaagtaaaatttaaaaatttaagtaaaattaaaaggtacaaaaactaagtagttaactagttattgtcatgcgtgactcttttattttattattacaagtaaataatctcgtaacactgc

SEQ ID NO: 321337 - DNA, 1767 bp, Cannabis indica
acagaaaagaacaagggttagagatctgagtaggaggagacatactatttcgctgcaaccaatgtaaggttacttaaaactttttatgtgtttaattacattgttttagagaattcatatttagggtgttaatcaacatacttgatagtaaatctagatcctggtaaaatatttttcagcacatgcaaacaccgccaacacatgatcagtgaaacaattcgaaactacaaagttaggaaaaacatgtaaaagagcacatatggttccagccattgaacaagcagttataaggttctcaatgagcaagaagggtcatgccttccaaaccagcgaggttctagaaccatgcaagcatgcaaacatctacagaagcacaagtagccctactcaatccattcggataagaccagcacctttgggatacaaaattttacgcactgctcagtcctaaaatatgtttctacaaacaacaccctatagttcaaacatgcagtatatcctaagcccagcttgaacttagcatttctatcttagatacgaaatagcacaaagtcaacagagtattaaggtacttacttggtgtttggacggaaaagggatggttgtcgtgtgaattggcttaggagtgttttacccagttaatgacacagttgtagccaacctgaatgttagagttcttatctaacatggggtggagcaagtaattaggatttatgggttcagcgtttagaaaatggaatgcacgacggtgtagaaagcattgagagaaatagggatcatggttcaaaaaatatagaggggtttctgaatgttgaaggtgataaaaaaaaggataaaataagctcttgaaacttatttttacgacagtggaagtctttgcgatttgaaataaatggcccatatcgcttctaccaaaaacatctccgaatccaacaaatggggagctaaaaagattgcattcaatattcagcccaaaaatttaacattcatcattacacgcctcatatgatgtgcgtattaaagaaggggtcatctcaatcgatttgacgtcattgtcactcctcccaagaaacacgcccccatgtgcatgtactgccaacaatagcatttaaggcgccactcacttacaatgtgtacgatttgatagttgtcaaagtttatgggataaagttgctaattaacaaagttatgtcaatatttaaatgggacggaactcaccaaaaggataaaacttctctaaatgtaaaagtttataaaaaattttaacaaaccgtatattttaaagaggcaaaattaatattatcaaaaactgaaaagaaaaaattattaattatttattaataaatatggataacaaatgatcattaattattaaaccaaaagtataaaatttatattttgataaaacacaaacaactaaacaactagatggttattcaccattattaaagggaaatttcattatttgcccttaataatataacccctatcaaaatttatacccttttataatttgtacaaattgattcctctaattttaaaagattcctaaaatacccctaaattaaactttccctctctcttagacgttccctctctctctctctgtcctcctctcttcacgtaatcctcacgagtcgaactagtcgaccctccctcttcaccaaccttcgccaccaccaatctccagccgacctcacgaacccacaaaccgacgaacccacgagccggtctcaccccacgaacccacgaaccgacgaaccgacg

SEQ ID NO: 321338 - DNA, 1180 bp, Cannabis indica
gtaaaatatatccaacagtttgctcctttcgactccacaacaactattggccattggcttgaccatacattcaacaattatgatgaagatgtctcttgtcgtgttatcatggtttgttgggctttatggaaggcacgaaacacacttgtttggaacaacaaagtctcttctccgatacatctcacatcagtatggaccacacttgatcattggggcaaagctcaagataaaaattgtttattatctttgtctctccaacaaaaagataataaaattgagcgatggaccaaacccgattcaaacacggtcaagatcaatgtcgatggagccttttttgagaaagagaattcatatggattcggtgtagttgctcgtgactcagctgggcatcttattgatttaattgccaaacactaaggcaatttttatgcggctgaagttattgaggctcttggtgttaaggaggcattaagttggctaaaaggcaaaggttggagtaaggtagaagtggagactgacagcatggttatgattcaagcaatctttagtaaacaacaaatgacttttgtttttgggttgattatcaatgattgtaaatttttattgtcatctctacataatgttagtcttcgtttcattagacgatcaactaatcgagtcgttcactttgtggctaggcgatctcgatttttcactaagctaggacttaattgtgaagaaaagagattttaggatttatttattaattaagagactttattgagtttaattaataaatatattaaatggtaattttatttgataattattttaattattaaataaatagttttgacatttaagtggttgaattgaaaaatatggcatttgtgaaagaataggataaatagttgaaaatggcaaaattgcaagtggtgggcccacatcctatgaccagccacttatgctcttttttaccatttatttatcaattttttaatgtcaaataatttaaacataaacctagaaggattcttatagatagatagtgatggattcaaaactgatagttgatacagcttttatttttcactagccttcagtcaaatttgagccttctctttctctctctatttttgaatccttctctctttctctcttcaaaaattcgaaccccttatagtgatagagtacataccca

SEQ ID NO: 321339 - DNA, 2462 bp, Cannabis indica
gggtcagtacgaaataatcttccaaccccaaacagtagtaagggacaggccttagccgactttatggttgagtgcacgggaaaagaagaaagtagcataagggaaaacccgaaaccagtataaaagcccttacccaaaacaacaaagagagacctacctagaaattgcatgtagatgggttagctacagaccaactttctggtgcaggaattgcccttatcacacctgggggcaacatctacatggagaagtccaatttggagctacatactgaatacattgaagtcagtagtgatttgcaattagtagtgaatcatgttttaggagagtatgaggcctagggaaagaaaatgatgggttatctaagcaagatacaagatctactcgcaaaattcaagggttacacccttaggaaaattcgaagagaagaaaacacaactactgctgccttagccaagcttgcgagtagcacaataacagataaggccaatctagcccccattcaattcttaaaataacctagcatccattaggaggaagaaatcgaagtgatagacacaacaccgaactagatgacacccataccaacctacttcaacactggagaacttccaaatgatagaaacgaagcttggaagatgatgaggaaagttgtacggtacatcataagagaaggtgtaatgtatagaagagggttctccatgccattacttagatgtgtaacaaaagaagaagctgtacggctcctctccaaagtacatgatggattctgtggtcaccacgcattaggtcaaagcctatcaaataaaatactaaggcaaggatatttttgggcgaccatgatggaagattcaaaggcttatgtaaagaaatgttcatatacaagacatttttgaaaataccgcgtgcactgcccaaaaaactaactcatgcaaagtccttcgccttttgctatttggagaatagacctgatcggataatttcccaagggtaagggcagagtacagtacgcggtggtcgtagttgattatttcacaaagtggacggaagccgaacttttggaaacaattacatctaaaaaattattggactttgtggtgaagaatataatatgtttgttcggactcctgaacaaaatcgtttcagataatgcgaaaatgtttacaataagttgtttacatatttctgtatgactcatggaatcataaagagtttctccaatgtgatacaccctcagcatatggtcaggtcaaagtagttaataagacactcaaaggcatcatgaaaaaatgacttgaagaagccaaagggaactggccggaggaactactagaggtgttgtggtcataccgaacaacagaaaaaacaataactaggcaaacacaattagctatggcctatggttatgaagctatgctgcccgtagagttagaacctccatcccacagaagattgacctattgtcaagaagccgatcatgatctcctggcagaatcacttgacgtaattgaagaaaaacgagcctatgcaaacctaaagttagtggcacaccaacaaaaggtggctcaatacttcaacaagcaagtgagggcaaggaaattctttgtgggtgatatggtcctcagaagagtattcctgaatacaaaagacagcatggttggtgtcctcggacctaactcggaaggaccataacaggtggttgaagttttaaatacggaggcatataagcttgggcagtaagacaaaaatatggggctcgttctagtactaaggtattggaatagggaatatttaaggaaatacttccagtaaacgtacaaggtcagatgatcattttaagtacacaatgctagaacatttacttttaagtagatggccttctaggcagaccccactcaaaggttttaaaagaataactaagtactcaggtataacgaccaattttaaagtacaacttttaaaagtgctattgttttatgtttaaatttagttaaagatcagttagatcatgtaatagatttcataaatgtaagttactacagtaacaaaattgtttttaccaatgaatgaataaagatgtttattttcattctaattgtgtcaattatattagcaagttaagaatttaccattaaatgcgtacaagggtttgctcgacccaaaagtagaatagacaaaaacctaaaatacaagtgacccagactcataagtctgctcggtcacttggggggcaactatacccatacaaagcattgcagtaacaagatcaaaaaaaagcataatagtttgcacgaacaatcaccaaaataaggggtataaacccgagattaaaggttgcacggtcagctagttgtctcaaaataaaatgaaatattaccaagtttaaagaacgcttggctggtcattttgtctttaataaaggcccatgggctgcacagatataaaaaaaaagaaaaagaaaa

SEQ ID NO: 321340 - DNA, 2121 bp, Cannabis indica
acataataaatatataataatatcaaatttgaaaaaaaaaaaaaaaccaatattaaaactataattagactgtctactttaattaaacaaatattttttgcatgccccaccatgtatatgatcacttcttatcaatataaatattaatattttcctaccaaccaattattcctctaataataataataaataattcaaataaaaaaaaaaacaaaatccttaacaaatttctcctacgtaatattgattacgtgggataaggctacgtcatggattcttacgtaatgtatacacacacagcatttttattgggtagtacttctgatggccatattttgtatatgtgatattttatgattggttaacgttattctttataaactattttcttaagttatatgagatccgatatactttttttttttgataaaatgaaataacttcattaattcaattaaatcatttaataatacagaaataaactccgagagagcattgctcgcttgtaaaatacgatcagcaataaaacaagtagatctagctagaaagtgagctccattgcttgcataccgtttaacaaaatttaaagaaatagacttattgtttaactcaatcaacaactccttagaaacaactctaccaaaataagaactcatggtagaagagctacgaatggattgtatggcaacaaggcagtcggattccacttcaacgccacactagccctgctgctttatccaacttagagcttcaagaataccgattgcttctgcaacttcaggcctcattacaccttgacgacatgacgctcgagcctccaccagtaagccaacatggtcacgggccacgcacgagtagctgtagcatgttgttgattcaaaaattcctgcatcagtgttgatcttaatcttattctcctgaggtgcttgccaatactcttctccatcttcaggagtcatcaaaccaaaagatggatcaaattgtctgtcttgagcataattccattgattaagagtagttgagctaacactaacacatctgcaacttcaacacttttttgattccaaattaaaccattccgactctttcaacgtgaccaacataacatactaatcaaatggagacccgatatacttaattacaccaataacaatataacatttaagaaagtgctagacaccagtaacactttttaacatttctcatacacgtacgcgacacttttttttatgacatgtatactgtaatttctatgaaccacaaataaatttattgtatatgtataccaagaatacaatttaaatattttgttacacaaatagtattactatttttttatatatacacatgtctaaactgattatttttgacatggtaattaattcaaaattttaacgaaatagataaaaaaaaatgtaacaaaatagccttttaaaggatgtatattatttcttttttgcttaatatattttcaaacaaatcactaatatttttatatttatatataaaagaaaagaatgatgagaaaagaaaaggtgtcggtggataatgtgtgctagcatccaaccaaaaatcaataattctatgtcatacattattattatctttttttaaagggtaaatggcggcaaaactcccaatactttggttttggtttcgctaaacctccacaacccaaatttctgcgggtaaacccccagaaccactattctgttatcaaaaacacacttccgttcccctgaccccgttatgtgcctacgtggctcaatccaagtaagcagcagctcgacacgtcataaattattatgacgtggaaataaaaaaatagggaaattttttttttttaactaatggctaattacccaaaattaaaagacaaaacattaaaagaaaaaaaaacagatatttaaattaaaatcctccaaacccagatctatattttcttagtcacgaagatctgggtttgcaaaggagggaaaatcctcagaccccattgtcgaagagaagagaagagaagagaagagaaagaaaagtgaaagtattgggtacctgtcctccattgtcgaagctgaagaccacaaaccagaaaaaaatgtctgcggggcctcagtactgcgaatg

SEQ ID NO: 321341 - DNA, 1045 bp, Cannabis indica
aaatttgaaaaaaaaaatgttaaaaaatagtatatgggataatttctctaattcttttgtgtgtaaacgtctcagctttactcatcatccctttaggtttgtagttgtcaaattcatttgattttttacgagagttaatattccaagtcttattctccaattggtaactatacgattattagtctctgtacgtatagctgccattgttggcgctaaaatcgatgatccttgatcgccgtaaaatcaaaatcgtaaatctttgtttttttcttttcttgatgtgtaaagttagtgaaagagaagttgtaagaaacaaaataaggaaaacttaagcgattgagagagagagagctcgtaaaatgaaatgtgtctagagtaatttgcaggaaaggaaaacagaaagataagttttatttataaacattttagttcgacattgatcttatcagaggaaaatagacaacacaaaaaattgcgaagagattaataataacactcacagaattgcaagtattcacctagagtagtgaatattgggattggaaagtacatctccaggcaacgacttggaaagtatatattgggagttgccccagttgcgtttttaaagcctgcaaagcctttcgcatttgtcagtccactagaatgttttgtttccctttaaaatctaatttttttttttacatttatcaaaagattatgaaaaaaagcaatttaaagctacgactttaccagtgaggctttgaacttctttaggcttagtagaagatcacatctctactaaggctttgacttttccagggttggctttaataccaagctggtttaccatgaagcctaaaaatttcccaaagcccacgccgaaaacacattttagtgaattgagtcgcatcttgcaatgacacaagattttgaacattgagtccagatatgtgacatggtcgatcgcttgtttggattttactgttaggttataattaacctatatttcgagtctttaaagttagcattatctggtgtcttttggagcagttttacgcttgat

SEQ ID NO: 321342 - DNA, 1072 bp, Cannabis indica
atatggtccaaaactataaccccacaataacctgacattataaatgcttaacaagatcattgcctcgctatttttaaggtaccaaactgtatctaagttactctacaagccacatgtcgcattctattgttactggacataaactataaaaatcataaaatttcacatatatcatatttaatacaccgagaatataaatatatctttataactgtgaaaataataattaaaagtctattataaaattaatcattaattaattctcataataaagctaaacgatcattacaggtttactattgggtattacacatcacaagctcatacctaataatatgtttactgcgctgtttttattagatcacttaattaccctaattttaaatattaactcaaatcatttttcttaatttgtaagcccacatattggactattaaaaatattctaacaatctcccttttgggctacagattaattccaataataattatatttgataaccttatgtgcacacaaacttgttagttttctcaaaatatctccttagacaatttggtccatctctaataccacttgtttgaaattagatctaaaatatgtatatcttaaactcatgtcaaattattaagattactctatgaatcaacatgatggaagagatacctaattgcatgatattggatacgagatgagattatgggtacatagtcttccatagactaatcttttctctatgggttttctcactcaattgataagaatgaaggagaagagtggttgagattaaccttggggaccaaacctttatgttctttatatggtaaactaattggagccccataaacactaattaggtttactattatagctattacacattacaaagcccatactaaataagaaattcattgggctcatttaatgagatcacttatttaaccttagaatattagctcaaataaattatctttatttatgggataatattttgattattaaaaatgatcaaacaatttaagaggtaaaatttcgtgttcatcatttttcgttagtcacaggaaattttcaaaa

SEQ ID NO: 321343 - DNA, 437 bp, Cannabis indica
tttattctgtcaaagcttgccctacgaggaaacgaggtgtaggaggcttctactacctcgggacccacaccaatgaccataagatcgttgtgagatttccgaacaaaaaagagttcaaggatgacctcttttggaccactggtcttttctccatcaacacaacaaaatttcaaattatacgtaagtatagttcttttcaaaaaacttggatttgagttttagtacaatatatgttttccatactttactaagttcgttctttgttatgttaacaacgattaccacgagacctgtcccaactcctgagatcgaaaagaggcacatgatccttcttggccttccttatgggttgcgagtggctgacttcttgttacatgagaacaacttgaagttttgtcgcccttctcggcaaagaacaatccaccaatgactttaaa

SEQ ID NO: 321344 - DNA, 596 bp, Cannabis indica
acaatacttgttgtgactaaaactaaattagtgacaacttgtatttaaatattatgttttagtcacaagtaaaattttgttgtgattaaaggtggaaattatcttagtgtctacatatatgtatgtatgtatataaattaggaggggaatggcttgtctcatgttcccattatatcgatcatatacacaaattagaattaagttggaaaagaattaaacacactataatatacatacataataaacatatgggtctaatttcatcattagctgtggtgattttaataaaacttcttgtgatgcttcaatactctcatcatagtcttgttaattgtatgcagccttcttgtcatgatgaagagaggagagctttgatccatttcaaccaaagctttaaaatagactgccaaattagagtggattcatattatggctttgttcctctctatccaaagacttcatcttggggatctaatggtaccaattgttgttggtgggatggtgttgattgtgacatgttgactggtcatgtcattggccttaacctagctcgttcttgtctctacggctctatccactccaacaacactctcttt

SEQ ID NO: 321345 - DNA, 1185 bp, Cannabis indica
agggcataaaacccaacatggctaactttgggcatccatacaggggtctagccagccatagcggtccaaggaagggactggctgactagagttgactgtttgacagtgatgttattttgctttgttttcaggccttgatgaaaacgagttcggctcgtgacgactctatgggatcttcagatgcttttcaggagcgtgtgaaggtcttggaggcatcccttgctgcaaaggacaaagttaattttgagattgaggtccttctagcagataagaagagctcactggattggagattatgctgagtgccaggaacaccgagaacaccaaccaagcagctctcatctctgggttgtagattgatcttaaggaacacaagaagaagatacaggaggctctcgatggccagtaggccattaaggaatattacatcgacctttcctgcgaacttacttttgagttttgcctgcgcaaccctaaacctgacttgtcatacatgggtagttcggccttatagagagaacactagcccgtgggagggcattattcgagaaccaaatggcaacggaccagaccgctgcttatcgagagcagtcatcatcacgtgcccgtgatgaagtgttggccgaccaattagtggaggaggtggccggccaggatgttacccaccaggctggctagcttggactttgtagatctcgacttggcagcttcaaattgaggtcctactgcccctgcacacatgcagatggaatttttattagtattccacatcatgcttatattgtatagactttgttttcatgttctgcatagcctgtggctttttatgacttgtggcattttagcttaggaacactactcactttgcattccatgtggcctatggcatatttgaaactttatgtctgttgacctcgcttttagccaacgacggtgagtcttatttagtaagcgacatgtagtttataacgattgataaatagtaaaataatataaagacacaagaattttatagaggttcagccctagcagttcggtaatagcctaatcctcgttatttgtattaactcaagaacaaggagaaagattcctttcgttgtagctcttgttgggttttatgccctaaataaaactcatttcaatataatcagatttacttatagatcagaaataacatttaatgtt

SEQ ID NO: 321346 - DNA, 2151 bp, Cannabis indica
agggcacaaaacccaacacttgagtatctcgaatggctctataaatctagtgcttaacttgcccctctttccaaagcgcctgatacctttcattgctgaaactcgtgggaaaacatgttatcctgcctaaaatgcaatatcctatgctttggatcaatgtaacttttttacctgccttgcaaagtaagcatccaagccttgatcttgtctattgcctcattggtcctttgaactaactcaagacctaaatacttcctttctttagtttgatcccaatgaatgggggatcgacattttgtaccatacaacattttgtactttgatagctgttattgtatgaaaattctatcaaaggcaagtatttgctccatgtaccgtcatagtccatgacacaggcgaacaataagtcttctagtacttgaatttttctctttgacatcccgtcagttgagggtgaaaggttgtattgatcttcagcttcgtacccatagctctctgaagacttacccagaatttctatgtaaactttggatccctatttgaaataatagatttttgagctccatggagacgaactgtctccttcacatacaactctacatattgatccacagtataggtgtttttactagcagaaaatgtgctgacttcgtgaaacggtccactatgacccatactgagtcatacattctagtggttctaggcaaaccaaccacaaaattcattgtaatatcctcccagtttcactcaggaattgctaatggttttagtaaccctgccagcttctaatgatctacttatgttgacatgttaaacatttagacacatattccactacatctcttttcattcgacaccaccaaaaatagggtttcaaatcctgatacatttttgtggttctcgggtgcaacgaataaggtgtagtatgagcctcatcaagttttttttttctgtgcccatcactgcttagtacacaaacctgagccttttaaagtaatattccattattcgagatcaagaagtctttaggtcgacctgccaatacctcatcccaaattttaattagctcagggtcttccaattgtgtctttctaattctttccaacaaatttgactaaagtgccagattatgtaatttcccaactacgaactcaattccagctttctccatatctaaagctaactgaggtgctctcattatggtactaaaaacttactcgggaccttttctgctcaaagcatccgccactacattagctttcccgggatgatataagatctcatagtcgtaatctttgactaattccaaccaccgtctctgcctcatattcaaatccttatgagtgaagaaatacttgaggctcttgtggtctgtttagatcttacatttttccccatatagataatgtcgccataactttaaagtaaatacaacgacagtatgttttaagtcatgtattggataacgctgttcatattcctttagctgacgggaggcataagctataaccctatcagcttacatcagaacacaccccagatcctatctggatcaaacttttcttggtctgatggcaaagctaagaccggtgtcgtgatcaaccattgctccaactcctgaaaacttatttcacacttgtcggaccataaaagctgctggttcttcttaatcaattccgtcagtggcattgaaatcttagaaaaacctttgacaaaacattgataataccttgcaaacccgagaaaactttgtacctcagtaactatttttggcctcggccactttttaattgactcaatctttctcggatcgaccataattccatcttttctgacaatatgccctaggaaggacacttccaacaactagagttcacactttttaaactttacatacaacttatgatccctgggtcattgtaaagccattcggagattttgctcatgttcctcatccgtctgagagtatacatggatgtcattcataagcactataacatagttatagaggaaatccttgaacactctgttcatgagatccataaaggatgctattgcatttgttctgttcatgagatctataaaggatgctagagcattttgttgggttttatgccctaaataaaactctttacaatctgatttgttatc

SEQ ID NO: 321347 - DNA, 767 bp, Cannabis indica
cgttttattataaagaaaagtagttcaatgctttgtcaactaatttttcaataaaatttgtgatgattacactatagtaaagttcaagttgaaagacactttactttatctacttcaccaaagactctatggatggttttcattttttcaatcaaagtgggggacatatgagatattttcattgattaaataaagtattacgataaaatatcataaattttaatctagttggggaatgttatatatttattatttaacaaatatattataaagattaaaatgtggcatattatatattaatatgagattaatatatattatatgtcggaggttctattatatcatatatagtataataatatacataaaagttgtaacatatgaggtgttataaatctaaaaatagattgtaacctaaggatcacaattgataaatatgtgagttattaaatatgaaagttatggaattaatgagataagtttttagcggttagaaagtgttacaatactcaattatatcatttaaatgggtattgagacgttggagaaagatttaactcaaagaggagttataaaaactaaattttgagttttctaaaaacagttatttaatggttgttattatgtcgttttgtggttattttttgaactggaatcaagtttttgaaaaacattcataaacttacataaattaattgagcatgtttccaactctcttgtctaacatttttatctcattaaacaccaattaaagtgttggtaacaac

SEQ ID NO: 321348 - DNA, 1161 bp, Cannabis indica
attattttttcgtgacctcagtttaatatttgtcgtttgtcggtacccttaattgatttgacagttatatatataagaggctcatttttgtccttttgttttattttttattttttttttctataaatattaattttgtaaatattattcatgggatctcattattcattatgatttttttagttaagtcatatgggatacttatattttaaagagtaatatttaagtttaatttttaattataaataaatatttaattttaatttttagcggtaataatactaatttataatgcttgaaaaaattattcatagtgcttctttgtatatttttttcttttcctgtcattttttataaatacctagaaaaatacagaagtgatgaacgtaacaatgaaaaggttaaggaatgtgaagtagggatataaaaatacaaagctgtagtgttagttacaattaagcatgtgtaagaaggatgagttggagtgaaagactgaaatggattgcctaattaataaacacttgtatttaatttatgataagataagatctgcacgtgtggtggagaattttacaccagtcaccacgtaattgttggcagcagcaatttgagggtgtactctcatgtacaaggtggtccagaagttgaaaaaagtgaaagagatatgttatagaaagatctaaattaataggaagaattttgatgatattcaaggctgtaccagcatttggtggaatgtcagcaacaattgagtagggatatcctttgagtgtgcggctagttgataagaaaatgcaactcagacaagagaatgttaatactcacaaggtgttactatcatttttgcagcaaaaagttaaggttaactgacttaaacatggagatatgataacacttccatgtttttattactaaaaattggatttttctgacaatgccatgaaaatgtgagaagtaagagtggacgagagagagtgtaacgtccccgctttaagcttccattgggtccttacatccacggaatgaatggctcttatacacgagtacgtcactttggatgcttcatggactaatgactgaccctacagaccaacacgagtgtttccagcgtgctttgtcctcactcacacgcttcttgggcaaacttcccaggaggtcacc

SEQ ID NO: 321349 - DNA, 2736 bp, Cannabis indica
tgattgctgcagatggtcatttttctgtttagttttcctactggtttagtcttagatttagttctgtttttttttctagtttttctctgctttctgtagtttgcttgactttgtttcgttagtgttcctggtttttcctgtagtttgttattgtggtgtttctgtcccggctaggctgggctcttttggccgtcaggccgccttgttgttgttctgttcaatggtttcattaataaaaaaaaacagcctaagcaacaaaataaagactttcaacaaatagtcttccaagtggcttaaattctaaggtcatgctagtcaaataagtacaccattcacctaagctctttaactcatggttgttcgactttagcattacttttacctgtcccataaagcacgcgtgagaaaaaatactcatcaagaaatgcataaagaactgttgattatgattacaagtttcatcattctggaagctagttattatttcgaaaagaagttacgagaagcttggtgttcatctggaaagttttgtttgtaaagttatggccaatctggatggttctttcgaatagcttgtcctccataaggaaagtctttcggatagcttgttatcagtctggaaatgtactttcagatagcttgttgtcagtcttgaatgcccatccagaatgcgtgtattctctttcaaattatatgtactgaaagtgaatttctaaaattgacgtagatttttgttgttggtgctgacttggagaatttaaggcgacattaattagcaacaattgaattagagctaattttggcaacaatgaaaatctataaatagctatcacctttgtaatccatagtgaatcagaccattgaaagcttgagtgaaaatcgtgatcgtataaagttagagtgagagagtctaaactagagaaataaagtttatcttgtaatctctgtaatagtttaaaaggattcttgtaaccttgaaaatattgatatcaataaagaagtggttgatgttgttccgaccgagatgtaaagcattacacaaggctcgaactcgtaaaacctagtgtaatcttttctttgtttcactgctttaattcgttacttagttcttgtgattctttgatagtattatctttgatagtattatccttgattgcgtgttttttcatccagtataattgcatcataaatcattgattgatcctcaataaactggtatcagagcatggtttgtaatcatagtcgcagcaaaatacaatgtagaaaagtttattggtacaaatgacttttgattgtggagaatgaagatgaaggctctgttagttcatcaaggattgcatgaggctctgcttggagaaaaatctcatcacgattctatgtctgagaaggacaagaaagatattgttgcaaaggctcatattacgatcataatattcttggagataaagttatgaggaaggttgtaaaagaagccacggccgcagttatttggctacaacttaaaagtttgtatatgactgaatcattggtgaatatattacatctgaaacaagccatatatttgttcaagatgatggtaggcaaatctgttggagaacaaataaacaagattaacaagttgattctggatcttgaaaatattggtgttaccattgaagatgaagattaagctttattgttactcaattctttaccaaattagtttgggcattttaaagatacaatgatatacggaagagagtaaattacactcaatgatgtccaatcatctttgaattcaaaagagctgaaccaaatgagtgagttaaagagcttggaaatggtgatggattttatacgagagacaaaagcaagaagagggaaagccataaaggatcaaaaggaaaatcaagatctaaatcacattctaaatggccaaaagtatgttaaatgctgggatttgtaggaaaccaaggcatataagaaggatgtgtccagagaggttgaagttgggtgattagagatctaaagagaagtgatgagtgacagttttgactcagctggtgcttttcttattacctctgagaatttagattctaaatggatcttggattttgggggttcgttccatatgataccaaatatatcttggttcgaagaattaaaacttgaaaaatatggggatgtgtatctcggtgataataagtcttgtaagatggtgcgaattggaactgtaagattgaaggtttatgatggcatgaaaatagtactaatagacatcaggttggtaccaaatcttaaaagaaatttgatctctcttggaatgctagatgatcaagaatttcttgtcaaagttaagaatggaatcatgaaaatttgcagaggttctatggtggtgatgagaggtaggaaattaaataggatttatcctctggaaggtgccatagtgacaaacacaaaggcatgtgtttcaagcaagcgtgagaatgaaactgaaatatggcacaagagacttggccatgtaagtgaaagagggttgtatgaactgaataagcagggattacttggaaaggtaaagcttgaacagttagatttctgtgaacattgtgttcttggtaaagcttgtagagtcaagtttggaactagcaaaaagaataccaatggaacactagactacattcatagtgatttatagggaccctcgagaacaccatcacacttcaaaagtaggaacttttctctgttgggttttatgcc

SEQ ID NO: 321350 - DNA, 926 bp, Cannabis indica
ttttaatttctaaattaatcgcagtcatttaatagtaatttaatgggctaaaaataaatataaccacatgtgttacgtaaccatttaaagctcctttatatatataaaataaagatgataccacacattattacatacaattacatatgttactatctcctcaacttcattctaaattctaacatggtattagagccaaataaaattctaatgagtatctgatccaaattcaatagccggtccaattgaatcaaaagagcagcatgtgattcgaagataataagccaaaaagagtcgttgtgagccaaaaatattgtcggtctaaaaggacaagccaaaaattgattcgatgagccaaaaagtacaacttgtgatcgagccgtccaagattagtgagcaaaaaagaagttatgatcttgaggggagatgttaaaaaatctcatgtgtggaagtatataatatctatgaaggtcaattaattttaagatgtaatcttacatgtactttactagaaagtcacattcatcctaaattccaagcgttatggagtggctaaagccttctgatttttatctaaaaaaaaaaagccttctgatttttttatgggatttttttttcatacataatttatataaattaaattaagtttattaattttttgttattaaaaaattttgatgtttctttattgatagaaaaaattgatgtttgttatactaagaaactcatgatcaaatagaactaaaagaaaatacattttggatcttgtgttttgttaaagttaccgatcggaccttatgttttgttaaatgacaaaatggaccctgtattttctaaaatagtaaaaataggaccctaagcttaatttttgacaacttttttttttaatataatcaacttgaaaacaattcctaatacgaacagat

SEQ ID NO: 321351 - DNA, 1103 bp, Cannabis indica
ttaagagtaaatttaatttaataacagcatataattcatatataatgttcgtagcaaattttaccaatttgaaagaaaaaataataattttgagctttcatcaagtgaattaaaacttaattattattatattttttagctcaataaataatacttagtttaactaaatgtaaagattattatttattaaactaaaaatattttattatttttatttaacttttttacatatgttgtattattatattttttttttataaataaataaaatatattaaaaatataatatttaaataatgttaaaaaagaaataaaaaaaattgataaatagtgtaatgtaaaagtaagaaaaaaatagaataaaaaataagattgtggtgtattttgaagaatagaattgagtaaaaaattgagtgctcttcttttaccacttaaagacaaactaattcgccattattccatgactaaaattaggaatcaactatcactaattttatgttgttcatttatttttcactaattttgttatttttaataatttcttagtagattaatgatccatgaatattttttttatcatgaattgaagattgagaggcacgttaagtgtggattaaaaagagaagccaattgggtcgcacgatacatctgatgtgatccactccactcaagcggagccggctccacgatacactagtaaacataaaaatataaaaatttacaaaaaaaaaaataatacaactaagtaattatcccattatcatttcataaaaaaaaaattaaaaaaaaaaaaaagaccaattgtaagacaaaaggacaataaatatacaatttttttaattataaccgtacaagaagagctgggtattacccagtgggtatcattagccacagcacaagttcagtaaaaccacaatataacactacaattataggcaaaatacacggcagtaatatgaattcgttgttatataaattaacatttaacccaagatctatttgtatataacatagaacacaatagtagtatatgataattgagtatgtgtacctgattgatccatagcaattatatctgattgatccacagcagttactccaat

SEQ ID NO: 321352 - DNA, 2108 bp, Cannabis indica
gacagttggtaccctagattctatgtccagatcagctgtcacaagtcattttatggtatagccaagcaatacggtaccatggaagatagggtaggtcacatagatgtgagctgggatttagaaccaatcgagccttttgatatattcaaaattacaagttgtagggattttagcgaatcctattgtccttctaccccttcatctagtgatagctcaccttctagtgattttggtaaatcccttaggtggaaatttatactcttcccctttttaatcgacttttataatgattgtaatgcctcgttttgttttctagacatgggttatgaagacatcctagaccgtaaggggaagaaaagatcattcaacccaggagtctccattgccaccgaggtggttcattccaagaagcaaaggaaagccagcgctcaaaagaagaagttaccggctgaacctaatgatttcaaggtttcggacaacgagatccaagagcatgttcgtcctctagtttttcctaacgccaatgcccctcatcccgaggcgacccccgctaccgcttctcctagtcaggccaccgagaccctgtcggtccctgctggagaagctggctctaagtttggccaggcatacggggtcgcttgttggcacaaacttcaaactctccttcccccagattgggattttcttaatcttaggagtccaaaggagattctttcaaggaccttggactgtcacttcatggtacgtcggctttgttaatataattatgctatctttttatacctcttttgtcctcatctatttgcaattctccaggcttcctttgcttcttttgcttccaattgactactctctcagtggcttcagtatttagagggtgagactcacaaattagtatcccaatgcgaggatgtgtgtgagcaaggagacatcgcccaacaagcgattacccgcctcaagaaggaagctgagaaagcgaaggaggaagcagagaaagcaaagaacgaagccgagaaggaaaaagaggaggccgagaaggcccttaaagtctaagctaatgagtttgaggagaagcttgctgaaaaacatgccaagaaagaaattgagaccgtagaacagtgcgataaagttggttttcgcgcagtctaccgggcctggctttggaaccgtatcatggatactagcttcttggaggagagggatgaggaaactttagctctctgcgagaaaaccaaggtaaaagaagaagacaacaaggtcgacgaaaaagaagtagttttgtccaagtctcctagcatgaagacttggtttatttatctcccttttttttaggaaatggacctttggccgagacaatggttttgtccctagtggcacccccctttttttgtaaagacaaattttcaaggttggaggaccaactttgctttttaatgcatagtactcttaagtataaaccttattatgcggacgtttgcttgtgttttattcacaatataaactatcacatgcataaagtttgttaggggtttccattgattgtcctttcttcaaatgttaagtagttaatttcctactttacgtgcgagcaacttacctgcccactccttaatctgcgagccataatcaattccatctcgcgatcattggtaatgatctcattttaagcacattcaaatatatttttaatgaacttgtcattttatatatattttcattgcttacatgagtagttaaaatttctaccaacgtgttgggtttaagtattttttcaagagatttggatgtctcgtttaatactttcccttagcgcgagccgttagtattcaactttatgcgctagtcgtaacttttgattttcctgtctcatcagataggttataaatcaaaaattacagttgtttgatccctttctcgttagaatggtttgatcaaggcgttataacgattcaaccccttttgcgtcgaaaaggtttggtcagggagttataacagtttgacccctcttccgtcaaaaaggcttggtcgagaccttttaaaaagtttcaaaaattttatatttttgaaactatgggtttgcattgaactatgtatttccaaatcaattc

SEQ ID NO: 321353 - DNA, 2896 bp, Cannabis indica
taatttccaaattaatcacaaccatttaatagtaattcaatggcttaaaaaaatgtaaccatgatggttacaataaaaattgaaccattgaaacctcttccatatatatatagtttttgtatgcattaaactatactcacttattaattctcaagtgcgcctactattacaacacacatacataataaggtttacactgaaaagtaacagtaggattataagcccacaacagttgttagcatgttacatcactttagcattatttatacaggtttagaaaagccataaccacatcgtaattaacagacttcaccaccatgtaaatattctagtaaaacggcaaaaaaggccatgattgattgggggattgttgcacaagatgtccatgctatataaaaacactagtgtgttggaatcaatcaagaggagtccgcttccatctggttaagatggaaagtaccttcattgttcttatgcacctcagccttgtaattctcttctttgcttcctctcttgactttaaggagcaggtcaaatttagcaaaatcatcaatcacctagagtaaacatgtgttagaattgtttgaataaaaggggtatttgtgtctctttctctatctatctaatctatcaagatatattatgtacctcagccttggcatgaacaacctcctgaagttcataagggaacaaggagttggatctcttttgaagagtggtgatagcatggtttgcagcatcttgaacagctggatcatgcactggcactgcttgccaccctgctccatgtccatctaatcacaccaaaacagattccttttcacatttattattcatttccattcaaaatgataacttgaaatggaaaatagtccaaattgagaacttgggtattctagcaatttcatgaaagaaaagaaaaaagaaacctttcttaacaccgagatcggaagaagtaaaagaaggagtggcatcaccagcatgagtaaactcctggagttccttaaagttaagccatggcttaacccaaaccttggctttgtaaatcttcttctgaccagcctcaatcgcttcaagagtcagatggtgcaacgtaccagccaccacctgctcttccgatttcaccaccctcgcgaactcgatcatcgcattctataataaaaaaccaaaaatttaaaataaatttatataaatttaacaataataataaaaaattaaaaaataaaaaagaaaaattggagacctctttcttgttgtgttcttctacagcaaaacgacccagatcttggagggtcattggtgttctgacatgattgggattcgcgtactccaccgagagttgccattgatgattggaagaggtgtgagaggaggaggaagaaggtgattgttgtgaatgggagaatcaaattcattcgcttttattgtttagaaatggaattgaataggaaattggggttataatgctttggctttggggtatccgaggtgggacctacctagtttaagtgatgcgtgtctcttacgcgtgtcgttggtacggtctttcttttttccctttacttgcttaatcaccaagttcttctcttctcttctcttccatttctgccatcaatacccataacgcacctttattattgtcttttatctttaacaaagacaatacccaatttggatattatttttggagatttttcttttaggatatgataggggagttatagtattttttttttatggatttttgtataataagcaactacttaaatataatttattttaatttttacaactaatattctaacacgttttcttaaaataaagcataaatgttaaacatacccaacttattacaaagataatcaacttaattatattaggctaattatattagtttaacctaattaaaaaataattaccaacataattattttttattagattactttaaaattaatttaaaaaaatacacttagtttaatgaaatatattctagatagttatttttagtagctaatttatatttttttctaatatttaaataagtagaaaaatatattattatccaagttttcattaatcaaacacgtggcacaatcaggagaaagagtatggtcacaacccaaattattcaaaggaaccaagaaaaagaatggctcccggacctggaagacaacgagagtcaatggcctccgggagtaacttcctttggggaagaacctggaaggcggtaagggttttggagacgttggccacgtcaacatcttgcaaaatatcactccatagacagttacaccttattctgacacaggatcagatcttgtccctatgccagatcgcggtagtgcgcgtacgcaccctcgagtatacccttttgcccaacagcctggttagagactatttttgcaaaggagagacctttgtgcaacacgtgtccaggggtcgtacaaaagtcctcaccagctgctgtgcaccgcacgatgaagaaggtttcctaccagccaatagtcagatcgtcctcttgcagtacaggcctttagtagcgtgtagaagacgaaaccctaataaatagtcttatttttcttgaggaatgggagaacaattttttacttgcagttactctgctcaaattctaagaaagctctcacacaagagaaacaaagaaatcactactctaacactttgtaatccaaaacgcttactcaaagaggtcaataatatagactcgtggactaattgtcacactattattttgtgtaattactaattattactttagaggctcgtttggaatgccgtattaggtcgtattgtattgtattgtattatattgaattggattatacattatattttttatataatactatgtaaaactttaagttatactaaaata

SEQ ID NO: 321354 - DNA, 625 bp, Cannabis indica
atgaatcgaggagaatgattcacgtagatggagaatatgttgtttgaggagagcaaggtttgtctagggtttatgagtttcttcttctgagctctgtgctaagttgattgatgctaacctctcttcccgccagaaccagagccagagaagaaaaagacaatttactcctcactcgtgtgctttgtacgaactcgataagagaagattttgtccttttatttttcttcttttttttttttttggtaaaagataatttttttaaagaaaaaatgaatcgcgtagtgcagatctcgtctctatttcttcggcttatgataattttggggatcacgtgctatctataagagtcttattctttatcctaatgacttgagtcatcgatcctacacctcatgagggttcttatctctaagatagcccactacacacaagtcagttttcaaggactaaatataatctctcacaattgagaggtcgagtgagagtcgaatccttgactcaaacaaaagagaaagtcaatataagactcctataaaaatatcgcgttatggtttggtagttactaagagcattccgaatagaaaaaagtaaaataactcattatctaaggtgccgtttggtaaca

SEQ ID NO: 321355 - DNA, 2564 bp, Cannabis indica
aatatacttatatatatatatatatatatatatcaaaaaatcgatccaaaatagttacttttgatttaggaatagtcaaaaatcatcatttgtgatcgaaccatctaaaattagtaataaaaatattcagattgttacaaactttcacattaataatatcataatctacttcacacatatacttctttccatatagctcaccttactttactttctaaataatttcacattttaatcaatgttttatctaatgtttaatttttttaatagatacatatatttaaattaaaaacaaaaaaattatctatcttattaaataacatttataaatatttgtataaattaatattggatcatatttattttgatttaataaataatatacaaaattgctaactagtgataacgcgccacatcaatgtggtaagatgcccaataacaatcctcttctccctttattttccaatgtggggtcgggcttgggatgacactccctcttctgcactgtctctgtttatattttttattttattatttgtatacatattgtaaatattatttttatatataattaataaattatacaatgtattttaaatcttatgtgtgtttattgtgtgtgttatagtagcaataatgcatgtgagcagttcatgtctcaccacatacctaggaaatcttctcaaactagatcaccgttgctctgtgtacgtatcttggtgattttctttttgtagccatagctgtaaatacatgtgagttgtactagcttggcttatatttttcgagctttttaaaatacaagttgtattgtattaggccataaaaaaatatggttcatgtcgtgttgtgccataaaaaatataggcggtattgtgttgtgcaataattttataaggtaggctcgcatgatttgtaagtccagtaatttcgtgccgtgctcaaatttgtgtcgtattttattcgtatttcaattataattgatgagctaaaatactaaaatataagtgaattttatggtttcaattatttttgttggaacttacttaaaagtttacaaaaatatataaaaaatggagtgtgtgatagtgttttgagttgtgatagaaatgtacacttccttgaaagtgtatataaagtgtaatcttgagatttgagttcggaccctaagggttattcagttttgtgtgcatcggtgaggactcacacaccggaccatcacacatgccatcgccgctgtctgaccgtgccgagctgagcttagctggtgggttggttgtgatgtcactttattttttacaaaaaaaatatttaattaaataaatatttttatttattaattaattatttttatgatgttattatgaagcagtaaaagcgatcacattactgttttattttggatcgactttttatataagtcgtatcagaacaacagaatagaagaatacacctcttcaacccaaaacattcatttctcttcaaaatctatacaatttctcaaagcaaacattttttacgtgttacaaagcgatatcgttcggtacagaacaaatcgtatacagatgttgttttattttggggacgctttggttaatagactgtcgtgcacacttcgagtagggccgagaaacatgttaaagagagggacatagtctgtgacccagccagaatcatcattcggtaattcgttccagctttattttttaattctggtatattaacttttatatcttttttcaataatagtcgtacacactcataagtattataatttaaatattactatcattttaattgataaataaatatttatcattgttattattattcaattattaagccttttaatgtgtcatgtttttgaattaatctattcgttcttacgtatcgtacttttgggtgtgtcgtatcgtgtcgtgcttaaactcatattttttgtatcgtatcgtgcctaagctcatattttattatatatgtcgtgttgtgttatgcctaattaagcacatatttttttgtgctgaccgtgcttgtgtctctcaattcgtgctagtttcgtatcgtgtgaaaaaaacctcactcatatttatttacaacattaaagaagactagaagtaatataaataaaaatagaataaaagataagtttctttcagtttgattattaaaaaacaaatcattattactcacatataaattacatgcggggaccaaataagatgtactaaaaccatatataattttttttttacaattcaattgaaattcatgtacagaaacaataataacaaatgtaaattgctaaaaaagaagaactcatatatcatatatgtagggtaattttcactaattttttcaaatatattttgtaagaaaggtcaccttaacatgggaaaaatatacaaagaaaattacataaatgcggatatgaaatttttttttataacaattttacggatttaaaatcgtcatttcaatgcttttacaaaaaaaaaaaaaaaaaaactacttctttcaaaaaaatacgaactattactttttacggactttttcatttttacaat

SEQ ID NO: 321356 - DNA, 573 bp, Cannabis indica
tattttattttaaaaaaagaaaaacaacctgatgaatgaaagtgagggaaagtaaaaaagaaagaaagaaagattagattagggcaaaaggggaatctgagggtgatagaggaagcaagttaattatagtgtcagatctgagatatacagtcacgtacagagaaaaaataaataaagagttatttagcttttactttgttttgttatgaaagagaaaatttaatgatttggtgttgagtggcttggttggtttggagttagctttgttttgtttttttttaatgagaaaattgaaagtgaaaataataattgtttgtttggtttggagtttgcttttgtcgtctcaaacacaaaatccgataaagttgatcagataccaaaccgaaccaaacaaacacaactacaaaacttctctctctctctcatcagaccccatgatttgataattataactgtatcatttttccctctttgtttctctccacccatatatacccaatcatataggtatatgattttgtctcgtggtgtatttttacggaatgtattttggtacattaaatgagtctcagg

SEQ ID NO: 321357 - DNA, 1230 bp, Cannabis indica
attctataaaaacacaagaaaactacataacaagaaaacaacataaaaaaaaatacaaacaaataaccaaaaattaacaacaaaataccaagaatataacataaaatagaccatatttatgtaaataaatactaaaaaactgtaaaattgttgaaaacttcatacaaatcgtattattgtaattttttttgttatttttatatttttttttcgaaattatcctaaaattaaatatatttataaaaaagttaatttacttaaaattaaaatactatacaatatttattactcaaagtattaattattatttcttgttcaaaaaaatattaattatatttcaaatacttgaaaaatctacgtatatataattaaaaataaattagaaaattaatacataaataattaaaattaaaatattataggtcattgtcgaggcatgagtgtcaccccaatattccttccaagttaacatttaggaacaaattttaatctttgcgtttcctatttagttggggaatattgtccacccacacctcattcaagaaaagtgtacactagctagtaagtatatttgtgaatagttagtgattttttatataattattattaaattaaaattatataaaattcatatcaatagcatagtagtatgatacaaattcgaaaaatttatgagaaatatctataaggtctgcttggcacgaaggattgaattagattatgttaaatgtaattaaaaatgaattgaattttttttttttaaataacaaaataaataaaggccaattaaatttaaaatatattttaataataaataattataacattttcacaaaattaaataataagtttttgtaaaaaaaatatatcaataaattatatatataatataatatacaatatatatgacaattaaataaatgttattcatgctttaatataataaaaataaaaatattttaataataaaaaaatatgtatatcaagtaagattttaatcaaataattttattacttaatttattaaaattttgatattaatatttgtagtaatttaaagaaggctaattaagatttttgtcccctgaactttgacatgtaccaaatcatgtcccatgaactattgagattgttggatttaaggacttttatctaatgtcattcaattttactatttcagttaattgtttatgtactaaactatgttccctagactttgatatctaccaa

SEQ ID NO: 321358 - DNA, 650 bp, Cannabis indica
ttatcaagttacataaaactagtaagggagcctacaagatgggaaggtacaacaagaacatggactcgttctcctaccaagatactagaatggagagcaccattgcaaatactactcataaccagcttacaaaactctatgaaaaattagtagttttatctactcaacattagagtacaaaaagcgctagcacccacgacccttcttaggcgtggtctcccactgttcttcaaagtggcctctactttacgaggcgagcaagggcagccacttgacatatacaagctaaatttgtgtaataagcgcttttagattcaatttatgtaagttgcataccaacgaagtccaattaatgaataattgccatatttatattctgtttattgtatctatgcaacactttctcacacattaactttttaaaagttattctcttagttccacatgcgtcctatggttccctcgcaagatagtgccaaggcaaaatctgtaaaacttggtcggtcacacaatccatgataaaaaatgtcataaggtcaatactagtagtgttcaaaaacggagggcttatggccaaggatacgaatatgaaggccctggggctgaaaataaagtaatgttataaaaaggcctcaggtcacataggacat

SEQ ID NO: 321359 - DNA, 756 bp, Cannabis indica
tgcattgtagaattttcctatgtatattattattattatcataaaaaattaaacttatgtatttatctgcaactgaaagttaaaattaagtatttatgtcgcaaattactctattttaatttgtagatccttaattattgatcttttctagtggcaatatcctctaatttatgccaactacttaaaataaattttataatatttaaataattaaaattacaatactactttagtgtcattaaatttattaaaaaaataattaaagttatttcgactaataaaaatattctacgtgtacatacagtagcagtatttggcatttaaaagtaaattttaaatcaggcctcaaatttacaaataaaagttaaattaaaggaatattgctaaaataataatgataattgtatataaattacaacatgttgatctcgcttttagccaacgataatgagccaattagagcaattagaaataattaataataatgatcaagcaaatagaacacaaaaattgttatagtggttcagtcccatgatggtggtaatatcctatttccatttttcttgtattgacttgtgagaagagagcaaggatttcttgatcttctttgaaagctcttacaatggttttagtagcgtaactgttctatggaatgaatgatttcggatccctgaatagtgaaataatttcactatttatagggaataattacattagtttagttttccaaaacaaataagaaaatttaattacttt

SEQ ID NO: 321360 - DNA, 1011 bp, Cannabis indica
catagttaggtaattgaccaaacaaacacttaaaaggacttttgttattaattaagtatgggggtagggagtctgttgatagtgaaggtggcatattgaaaagcatgccaccagtaggagaagtctaaacccgattgtgctagtaaagtgagaccagtttctactatatgtctatattttctctcagctctaccattttgttcatgtgtatgtggacaagggtgagagaatatgataccttgatcatacaagaaccttttgaaaggcttgtattcacctcccccatcaacttggacccttttataggtaatccaaactgtttctcaaccatggctttgaatttaaaaaacatgtcaagagcttgagatttgagagacaaagggtatatccaagtaaacttgttataatcatcaataaaatagatgtaatatttgaaaccatctttggattggatatgggagggtccccaaagattagtgtgaactgattctaggggttgactagcacgggtttgggatatgggaaaaggtaaactatgacttttgccttgttgacatgcattacaaaattgtaatgtcttaagggatcctgtatggggcaattgtggtaacaatttgcttagtgtggacatggatggatgacctaacttgcaatgccatgtattaacatcattaaaacttgaagtaataaaggcagtaggcaaagaaaagaaaaagtggaacaatgttctttatttatagaatgttgagtacaagcatgtacattatttgtgacattacaagaattgaatgcagtatttattcaagaacattggacagactcgaaaccagtagtgaaaagacattgtagattggacttggacttgtctgaaccatatcacttaacatgtaaagtccatctctacgcctgcctttgaggagaagggcacctgtttcactactacaatttagccttttagtgacatgatttagtgacacacacaaaaatgtgggtcactaaagagttaagagt

SEQ ID NO: 321361 - DNA, 2434 bp, Cannabis indica
aagcaagggcgaaattgtgaagaaagagattctaggtcttatttattaattaaaagactttattaagtctaattaataaatatactaaatgacaatattatttaataattaatttttagttattaaataattagaattggcatttaagtggttaaatttgaaaattggcgtttttgagaaaataggatggaaaaatgacaaaatggcaaaattgcaaagtggggcccaatccattatatggccggccacttagtgtgtaatttaccattttatttttctattattttaatgctaattaaatctaacctaaacctaggtggttacctataaatagatagtgatggctcacactcacacttaacagttgagatgaaattcactttcagaaaattgagcctcctattcatatggccgaaaccaccattccctctcttttcttcttaaatttttattcagccttgagtgatagagtgagtgcccacacacatcaagtggtatctcaatcatagtgtggaagattgtgaagaatccaatcaacaagaaggagaatcaggctcaaggaaggagagaaagagatccaggttcagatcttgataatgctctgctacagaaaggaatcaagggctagagatctgaacggaaggagtcattatattccgctgcacccaatgtaaggtttcctaaactttatatgtgtttatttcattgttttagaattcatattaggatgttaatgaaacatacttgttagtaaatctagatcctggtaaaatatttccaacatatattgagtgagttttattgaagtgtccattgataacgggcatcaatgaaccgtactagcaatagttgattaaaaattctataactttaatataatgttgactgttttattcatggttaagtgatattaattcttcgtacaataaaagtcataatctcatgtatgaatacgatttttttttaattttatatataaattatttaatattagatattaataatttaatattcatgcatatatgaaaatgttcaactcttatttataaacagaaatgtcttatagacttttcagggcataaaccctaacagttgtatgtattagattgtgttttaagcttcgattatagtagtttataagtaattcaaaggttagtagctactgttttggttgagagcatcaagtttgagtttttgaaactcaagctcgagctttaatggtggaaatgtatttttgtgtacatttgggttctgagttcatgggtatgtttaaaaagtgtgtttggactgttctcgaagtgttggttttagttggtgcaaggttggggcaaaatcgagtatgaaaactcaaagttttgcctactgatgcgaacaggtgcaccgggtgggaaccagttaattagaacctgtaaattcgatgaacgagatatggttatggtggaccaattgggaccatatttgggtgcctcgggttttgtattttctcgatatttagaatatttccatgctatttatcaatagggaaacatcaagttttaagtttaagtcctaaaacagatttaaatgagttatttactagtttatcgctattgtgacataaggcccggatttacgagtaatttttactcatgttcaccgacacacttgaatttgacttgaggtaagaaaagtacgattgtaccacataacatctcaatatataattcggtaaattaccatttataagaaagagttattattttattggttgtctcattaggcaataatataagaaatagttattattctattagttctctcaataggcaacagtgtaagaaagagttgttactctaatttgaaatcgttgtttggtttcttacttttttgttgtctcattaggcaacgatggtgacattagttgtctcattaggcaataatattaaggttgtctcattaggaaatgatgaataattgttactttattaagtagcactagcagcattagttagtcttattagataaaaatttgttattaatgattattttcattggataatgtgatttcctgtctgaattaattatgtttgcgtattgatgtgtagtgtttatgctttttcatttcttgctgagtctttgtgattcacaggtgctttgtggtgcatgtaagagaaaataacatgttggggcaaccttgaattagaggtcttccttgacaaatgtacatatcagctcatctggctcacaatgtcgaattgtcgagattttgtttaatggcgcctttgatgaatatgtgtattttgttgtaaaactgtaaacgacatcttttataaaattttaaaaggggattcccgacttaaaagtttataatgccataaattttacatttcaaaataataagtaaagtttttaattaaatcacaattttatttaaaccgttagtttattattataa

SEQ ID NO: 321362 - DNA, 537 bp, Cannabis indica
ttttttttttttttgactaaagttgcaatttattcgtataaccgaaaatgtataaaaaaaaattgaccctataattaattaattacctctacggggctctcattgtacagaagttggcatcgaaattcaggcttaaccatgaacccagttggaggttggtctagtccaagtccatatatgaactcaactgaatcagcgttttctagctagcacagtacattttaccaaaaataaccatcagccgccttataatacattttaattaaattaatgtgtaataatactataagagagagaagtatatttagaggagaggagtgtattttctcacacatgacatgtctaagcaaatgatcttacttgcttggttgaagttgtattgaccatagcagcagccacgtatatggcaatgtggactttgtcagcaaatttgtgtatgacatccgtgacagatttacccccagcgctatgccccaccactatcacctacaacataaaaagtaaaaaataaaaatatatatttaacaaataaaaaaa

SEQ ID NO: 321363 - DNA, 644 bp, Cannabis indica
aataaaaaatctaccaaaatactcccttaaaagatgtactatagacttatcaaaaaaaaattaataagaagttatttatttcatgataattggatatttaggaaatagttcattggccatccgatttcttttaaaacaaaatctaggaatgttagattactttttcaataagatattttttaaagataaatattaaaaaataataatggtacttagcattacttaagatgtcataattattataattaaatatcaaatttttataatttaatttaataattattatagaatattgttaactatttgtaagacgtctttttaaaataatactagacactattaataactattaaaatgctctttcttaaataatgtttttattcttttttttttggaagaagaagataacaagctgcaaaacaacaacactaagcacaagcagcaacaaaaaaggaattagaataattcctcatgaccttcttccctcaacttgatggcgtccttggccaggcaatgggcgtctatgttgaactagcgagctaagtactttaaggaggcttcaggaaagttggagaagaataacctgatctgagaaacaagaccagaaagggcagagtagtcttgccaatcaccgttaactttag

SEQ ID NO: 321364 - DNA, 784 bp, Cannabis indica
  modified_base (781)..(781): a, c, t, g, unknown or other
atccgttttagatatatattttttttaaaaaaatatatttttacggatgggattggttttactctctttctctgtcactcttttttctcccacttctccgtttgtttttgctgccactgccgccgagaacttccaaggctttcatcaagttgttgtgctgctccatagttattgcaagaccatcatgtataccgtatgtcattacaaaatttaattatataccttcgcaatttgatcattctatgatatattcagctcttagaagctataatagtttgcttccacatgtttaatcttaataagttgggcattattttgttatggagatctattatttaaatatatctttatatgtaattttgtccgaataatgtttttgcgaaattttcttatttattgctttgccaagttttctagacagaaattgaattttgttcgttcaggttaatgtacaaaagataaggataaaagatattgctacttttgaaaaagttagtcgttatgctacaatacaagataaataaaatatcacttcttgtaattttgttatacatactaaatataatttaagatcatttggacttattcgtagttaagtttatttgatgctacattaatttgaacatcaacatggcttgtactggttactgtttaaattgttctatttagagatacatattcattggttatgctcgcagaaagtcattcaattcaatgccaaccgatccaataaatagatattcaatcataattggatcggatcggatgcaattttaaaaancca

SEQ ID NO: 321365 - DNA, 1509 bp, Cannabis indica
taactctaaacttatatatgttattttttagaaaaaaagtttcgattcctttgataccagatacgttcccgtttatatttcattgatatttttgtatactaagtgtttgttccattagtactttatggtgattgagtataaaatctaatttatgatttatgatgatgatgatgatatgttgctatggtttgatcaaagaattagcattaggatgtggagagagcatgctatgctactgttccatttaacgtatttaccgatcgagctccattatctatatatggaacactattatttttaatgttcactagatagcttcaagacattaatatttaattggtatggtcgatattcactctatttcttctttttctatttatatatatatatatagataaatagatatataaattcttaatctttttctcactcattaaaatatttcttcataattatttagagatatacaaactttttttttgaatgtcgacaacttcactatcgtcgatgacttcaaattatttatgattagctcattaatatgaattatttgatatagaaaaaattattttttttaatgatagactcttaagattcatgaaaagtaatgaaataactattgtaattttttcttctttattctcacttgatattttctattttttattatatttctattgctctctatataattatttttaatacattttttttttcaaaaagatacacatagcacacatctttaatttttattatgggagattttcatatatatttatgacttgcgataatgtatatttattatatatttattctaaattttcattgtataaagtttgaatcatgtggtcaatccattctatctgatactttctttggtgatctcaaactccttgaagaccattacaacaccgagcatactcttggtaagaggtttttttttatcatattaagtaaactctttataaatttttttatttgtaatttattttttactttgtgacaaatagttttaacttttttgttcaaaaaaataataatgaataatttttactgtgccaaaatgaatttagtattttatttttttcctcaaatattaaaattaatttattaattatttactatttcttctctatttttttttttataaatcataaattttattgctacaaatttcatttaagaactagatagtaccaacaaagaaagatggcttgggttgtttagctactgctataatggacatgacatatatcttctataatccatgctaaattctgttgttttactttttttggcaaaatgaaagatatgttagggttataaacactttaaagaaatatataaatcacagatctaaacatattcctaaagtgctttaatatagaaaaccctaaatcatataaatctataaagcctttgctaaattaaagaagaagatgatgataaaagatcagcggaagcactaacctgaagccattgttggagattgcagagaaggttttgatc

SEQ ID NO: 321366 - DNA, 701 bp, Cannabis indica
atctatttttcgttctcgataggcagttaagttggcttttaattctgtccaactgtctcaactgccaatacctataaatagtcataacaacctacactgatcaagataacttcaacacctagaagatctttctaaaatctatatttctatcttttctttctctctcgaattgtaccctattctagagatttagtgtgtgaaggagagttgtaaaagatttttagtgtcgagactcttcattgtgagatcatttgtaattggtgttgtatactagtgtaattaagtttggaaactcttgttgtaatgtgctaaatgttaataaagattcaatcattttggtgccattgatttcgagctaagcctctctgttcttgttttatttttctagcctaagtttaattctgtttgaatgtttgaaattgtgattcttatgaactgttattgatcataacagcaagttcaaggtgaatctaattcagaacaacttactaggccccccgaaaggtcatactctcggttatacctttcaagtcccatgcttacaatgctgaagaagatctctctttggaccttataatctagggtataaatctatacaattttttttttgttaaataagaaaacatattatgtaatatttaaattttgtttcatattatattattatattcttaataactgttttactaatatatatttaa

SEQ ID NO: 321367 - DNA, 579 bp, Cannabis indica
gctcccaaatatcattatacatacgaaagcaaaaacagttgagcctatcacagttaaaaaacactattaacaatttagaaaaaaaaattaacagaaaagtgatacaaattcttgaaaatgccttaaatctgtaatgcatcagacacaacatctgaacactatcgtcacccattgggcccatcacaaaatagagtgtcaattccacaatcggatcacatcatcgagccacaatcgggcccatcaatatcaaagaccccaaattcatatcggaccacaccatcgggccacaatcgggcccattcaggcccatcaaaatcaaagtcccaaaacccatatcggacccctatcgagctttcatccttatcctaataccaagtaaagtatcagactaccatcaaggcaacatcagatcccatcggactagacaaaaaaaattacagaaccctggaaaaatatagttttcaaatacagcaaccatttgatcacacaaaacaataaaataatagtaacaaacgacagatcaaccatcgaaacaacattctaaactaaatgtaacaactaccaacaagattaaacaaa

SEQ ID NO: 321368 - DNA, 1525 bp, Cannabis indica
ttgtttctcttcctgttttctcagatcttagtgtcccatgagtttctactcaagcgtcttggctttggtacacaatggcttgtggttagcttttagagtgtcattgatataaagggggggagggactcaatttttttccaaagggatgtgcttctcttgtcttagcaccctcaccgttcagaaccccattggatggcaaaatgtaaacttttttcatcggaagatggcattgttcttatgtctttggtctgcttgtcttgggccttcgtgcgacctcctttgcgctagggaaagtcttgtaaaattgtttgatgttatgtttttatttggcttgtttattttattttgtttagttttatcgatgttgagcaccctatgtcctttgtggtgtttggcttttaggccttttttaggggggggtgggggggaggggggggaagtatacaacaattcaaaatttttatttgttcaattataatattggcatccttcataatgggcaaacattagatcttccttaattatattttctttgatgtaaaattactttaataaatatataatatatatatatttgtggttgttttttttctttccactcatttttctttgttcccattttgcacttccatttcttttatatttgttttaacatatttaacatgatatattttcatattactttttctaatagtgtattattttttaaaataatttttctactacgtacattttttaaaatatttatttattcttttgcattgtttacttttttttctaaaaaaaataataataattggttagttagttattactttcatatttataaattataacttattccttttttttcaaatctttctttatgtttggtagaggggtaagaaggagggagagagaggagtggattggaggaagagggatattgagaaattattttgttttggcaagagagagatagagagatgatagatagaaggggagagagtctccctcaaacacaatttttaatccctctggtgaaatttaagagaaagacaaaaaattgtataaaagatcttttctactcttaaaaaagtaataaaataataattttaatatttattttaccatactccacgtatattcctaataccaaacaacatgaaggagaacaaatatcacttctatttctcatactctccatccaatttactctctccccttcctaccaaacatagcctaaatattcccataaaagtaatatgttaccatctaaagggtaaccaattaaccatattataagtgtttaccatcaaagtaatttattactatcatagaagtaaccaattacttatattttatatcatcataatacttgttagaatattaggggtaagtggcggactcaagatttaagttgagggaggcgacattttttttcgtataagtgagggggtgcgtattttttttttctacattgtataacatgttaaaaattaatgcaaatttatattttagtattatagtataaagtaaaaaaaaa

SEQ ID NO: 321369 - DNA, 749 bp, Cannabis indica
tctatgggctgatatgatacatcaaagaaaaagaaccatcaccctagaagatgatgaaataattggaaattagtgatatttatttaattgtcttttttttttgcttaataaatatttattcagttgtcaaagtttaaacaatttattattatattatgttggtcattgattttttaaaccatttaaataggttctgacattacttacatagtaaattttatgtagtgtagaatttagatcagaaaatttggcatttagctttttaaaaatgtatttgtattattgaagaattacacaatcatgtcccaagaaaaaaaacagaagaaagagttacacaatctttcaaattacggtatctaatttgatagtcgttgacttatcaaaaaaaaaaaaaaaaatcgatagtcgttttcaaaatataatatatttccaaactattaatactttggaaacatcattctgttttttgtcgtttttatacttttattaacttttccatttcacctctaaattttgttttttttttggaatattgctaagttagtaggtgagatgttattttcaaaaaccattatttcattactattattttttattttttatcctttttttataaggattattttaattaatttgaaaataaccaatacttcatttgatttcgtatttttttttccttaaattgattagattttgtaaagtccttttttttggcaagttagttgataaaataattttttcttttatgg

SEQ ID NO: 321370 - DNA, 896 bp, Cannabis indica
tttttttttttttcctttttgtttttaagaccttatgagtctcttatggtttatttttatttacatttacatggaatattttctccatagtgtgtgttttttttttttttagaaactgatagtagtagctggttgctaccaaattaattatcataacaactggttactagtttcgaattaattattttaggaattgaattgatgcaatattatcatttaccatcatattactaataaagtaaaaaaaaaaatgtaaataccattttggacttgtattttgtaaaaaatatcaattaaattttttattttgttaaatgataaaatagatcctatatgataaaaataggatcctgagctcaattttcaacaattttattttttaatataaccaactttaagacaatttctaacacgaacagatacagaaaatgtaaccaattttgtcataacatgattattattaagttttattttgaaaaaaaaaaaaaactacaatttagggtcctatttatataattttagaaaatacatggtttattttatcatttaacaaaacagaaggtccaattaaaaacttttgcaaaacacaaattcaaaataataattacctacgtacaaaaaattggatagtgataattagttactaccatatcaatttgtaaaataaatattctgatagtagtaacctgatattgtaaagaaaacaaaatctaaaatataggggacaaattcatttaagttcccaaaagattttaagatacataatgttaccgcatagacttaactttttaagttatgtttttagtaacttatttgattatgtgatgtagggctgttcatataaactgaaaaattgcagtttaaatatggattactataatctgaactattgtaaa

SEQ ID NO: 321371 - DNA, 2077 bp, Cannabis indica
atatcaaaataccaataaaaagaaagacctaaaaacaaaaaaaaaatactatataaattgatcaaacttaaatgtgccatatttatcataagaactttcaaaatccctaagtgtaatttcctcttataaaagagctcccaatcaagttttgaaaaatgccatatttatacttttactactatttattaaaaaaatacaatatttctaaaaagacaatttgtttttttttaaaaaatactatatatttaatattttattaagaaaaaagcctaattattttttaaaaaatactttattttaacttgttacaattatatactaaaagtatataatttgttcaatttaatatgtttttattttcttttgacaaagaaaagaaaaaaacaataaaccataaatcttatgagatgcacccttagccttatggcattttttatgttatactttagcttgaatttctacatagtttcaaaggacatttacatgactcaatattatttgtttcaatttttgcttcataataaattttaaacaatttctaagaacgttctcttcatattataaggaacttaatcaatttcaaacttatgttttttgcttttggcaaaattcaaaatattgagttagagaagcccaaaatggttgcgtatattattgtgatctttagtttatgatttgggctcatgtaacaaaagtccaaaaaggttctttggcccaatttgtggctttacttagtttttaggaaaatttatattgtatactaacttttgccatttttttacaaaatactgtcaggcggtatttttacttttttactgtatgttttttagggtaaatagtggcataagtacccaaagttttaagtttgtaagtggcatagtcccaatgtttatttttagcggcataagtacccaatgtttgtaaaactgtaaattttctctaattttgtcagtacaagctctattattttcttaaacaggtcacatataaggtccagattcttgatcattgggtccagacataaacatgtagtatccgttacttctaaatattcttttaatatattcaaaacagagtttgtactcacaaaactggaggaaaattacagttttacaaacattatgtacttataccgctaaaaataaacattgggtttatgccgcttacaaacttaaaactttgggtacttatgccgctatttacccttttttttataagtttcatactgcagtatactgtgttaagttttcactggtgttttacttgtgttttttagttgttctactagtgttttgagtttttctgttttgtgttgtactggtattttataaaaacacagtatttttgtaaacttttccgtgtgacagtatttttgtaaaagttacctcaaattccaatatttttgtaagtttcctaattattaactgaaattaagaattcaatattatcatgtttagttaatttattttgactttcaactatgggatgtcttttatagattactattggacttgttcaaaataggcttggcttatatcaaaatagcaagtcatatttgtaccactcttgagtccaaacagtcaccaattctgtccaaaaaaaaaatgctcagagagtaaaagatacccacaaactcatcggagaacgacgactacatagggaggagacgcggttgggtattgttcttcttgagatgttcattctaatggttccatcccctaactctggattggtcgaagtcggttaaaaaatgtcgccaaagttccttctctggtgactttaactagcaagtagagctcactttgacatcatttttcgatgaattttcaccatttagctcttatcttacaaaatgtgtggtggtttggagcaactatatatgcatgcccaatcttgagatagagcgggctaggcccatgtataggggggataagttgaaaactacccttttttataacacattaaccaaatataactctaaaataattttaattgataaataccctattttataatcaaagtaccaaatataacctcacaaaacttatcaaaaatagactttctaatgcacataatg

SEQ ID NO: 321372 - DNA, 882 bp, Cannabis indica
aatgatgatgtaagcgtgtaggggtttttttgtaataaattgtgtaaattgtatttttggtgtaaaaatttcttatctttttgctaatttctaagaatacagacaaaattaatttaaactttcaatttcgtgtcccttttcttcattggtacatcaaaattgctttcaattaacccatcttttaaataggttttcccaatcttttgtgttatgatgtactaattaatttagcctattgttataagttatttaatttttttattgactttatttctaaaaactgctatttttattttcctattccactcttcttgttatccaacttgaggtttaaatgatttttagtcaatttaaattaattaaataaatgagttaaaacaattaaataaatgaacaaaaaacccaaatatgctattcaattttgattattacgagtgaaatttatgtattgaaatttataggggctttaaatattgggtaacatttattcttctacctaagatcaatacacacaattatgtttattttgtttcttttaagtgtcttttgataacatttttattttttaattttttaatcacaaaatgaaacaaaatttttgtttttaaaaattttcttttttgaaaaataaaaatgcattttgtaatcacttttgttttacaattttaaaaaagaaaaataaaagtgtgttctgtaaagttcattttcattttcagtttttgattttatttaagtcggtctaggtccggggtcagattcgagttcgggttagaggtcaggttcaacgctagggctctggcgggagatttaggtacgtgttaattccatttttgacatatttaattgaaaaaaatattttattatttattgtatatttcggct

SEQ ID NO: 321373 - DNA, 1593 bp, Cannabis indica
gcgcgacatgacgatcaaccaatacttcacaaagtaaaatctctttgtcacaaaatttctacattagaatctgttgttggtatgtcatattgtagaattagaagaattattattcattcattaaggccaaaatttagaacttttatctcttgttaaattagaaaacttgctaactgaccaaaaagcattagctaagcaaacatctagagtctcatcaaagagtgatgaagaaacactctttagtagtgataagaaaggtcggccccaaccaaatgctagtataagatctagaaaatatgatgactaggatagtcatcatggaagctcccaaacaggaggagcttagaagaaagacaaacagggtagccagtcaaagattaacaataaatttgatggacaatgctgcaactatggaaagttaggccacatggctaaaagttgctggttcaagaagaaaactgtaagaggtaatgtagccacatcaaatgcagaaaagacaagtgatgaagaatgggacgcagaaacatcatttgcgatggaggaagaagaatcagctctagcagctactgttcctggaatgttcgactacaataataattggattgttgactcaggttgctcaaatcatatgacatgagacgaagagaagctacaagacatgatcgagtacaaaggtggttgtgtagtggtgacaaccaagaactcaagactaccaagtactcacatcgataatacaaaaatcacgctgagattcaatccaaaagaagttccactccaagatgtctaccatatacatgggatgaagaaaaatttattgtcagtgacacactttacaacatcaggtcaccatgcatgttgtgttcggtcctcaagatgttaagatctaacaagatcttgaaatctctggaacaccgatgatgagaggatggcatttagagtctgtatgtaatgtcaacagaattagcttatgtagacaagacacgaaagaacgaaacaacagatttgtgacatgcaagactaggacatgtcagctatcataaacttaaaatgatgatgaagaagtgtatgctgaagggtcttcctcaacttgaggtcataatagagatagagactgtttgtgtcggctgccaatacagtaaggcacgctaattaccatatgaagaattaaagttcaaagcgaaagcagcattagagttggtccattcagacgtgttcgagcaagtcaagcaaccatcaatcaacgacatgtagtactgttgggatttattttactaggatattaatttactaacatgtatgtttgattattaatttaagacattttgtaaaatttagaaaaaaaatcaaaaaggtttaatatgctgaaaacatggtttaaacaacttgttgcatgtgactcttttgtttggctgcattttaaagtattggaatatcattccaatagaatgacttttccatcattgtgatggaatgaccattccaatgcaagttgagaaaaaaattaagggtaaataccattttggaccctgtgttttgcaaaagttatagattgaaccctgtattttgttaaatgacaaaatggaccttgtattt

SEQ ID NO: 321374 - DNA, 532 bp, Cannabis indica
gtatttaccctataaaatatgatatatgaggtaatttctcttaactttaattagtttcaacgccggcccggcgggctaggcccactcattttagttggtcaaataaaaaatatatatttttaataatttttaaaaataatatatatctttatagtaaaagctaaaaaaaaaattttacctatagtctatttgaattcagggttagaccttattagtttttacaaatttttgtgatgacacgtatttaattggaaaaaaagtaaataatttatttattttaaatataaatatgataatcaattggtaagttttcttaaaattcttcttccttggcaagaagcaatctatgttatagccattattaattataatattaaattatcaattatgtagccatttttatacttccaaaagttatgtacaagagaaagcaaaaaacgtataaaattgttcaactaaccaacatataaacataattatatatatataatcttatatttgttatatatatatatatatacatatatattat

SEQ ID NO: 321375 - DNA, 831 bp, Cannabis indica
tgtgggagtattctaagccctttcttttttgtgtaaaggtcgaatcccactatgaggtcctttcttggaagttttgatccaatgactctgtggacaacggaacattcggggaagaattacaactttatttgcttgctgattaattttgtgcggaggacttgattattttcgacatggaaatactgcttctttttcttccatagttcgggcgtaggatgttcgagtttataattatgtatgatgctcttgtgtcaaaaaatgcagctacttttattggtcttgagtattttgttgggatgacatgcattttgcaatcgagatcggttgactagcgttgaacgtatacatgttgaagagtccgccttatctatcatcgtcggaaccagaacacatttgtaatgagcacatagtatttggggatatttcatcttcgattgagaatactgactcgatgtcattagcggagagagacaccctaatggcgtcttctaggtgtgttatcattttggcagtttttcctctcagacattgttttgcaaagtggcccttttttccacacaagaaacattgatttgatgatttcccgaatttttcttttttcgaaggaatttccaaggagttttattttttgaggaactgtacttgaagctttttctcttttcgcccttccgctttgagcttgagcatgtgtctttggtattgtaaaacctttttggttgcatgctctgtcgagttattttgtttgctccatgtactcttgtaagaacttgttttgagagaacatcttttctaaggctctcatcaccatttggaataattctccaaaagttg

SEQ ID NO: 321376 - DNA, 1568 bp, Cannabis indica
aacacgttctgcatgggagatcgtaaatggttggacgttcctccagtccgaattctagtcatccactcgagatgtagggaccttttcctttgttagtgtattgtttggggatatggacttcatgtccttcccccccaatctgttggataaattgcttgatcaagtcgattgcctccttggaatggcaattcatttcttcttgctgggcacgcacagactaagcctaacgatccatctgctctcaaaattcacactgttgttgttcgaacgcatggttaacaaaagtacatgtctcctattggttgtggtagagtgtgttggtatgtgtctagacttgtcctagtgcatctctcaggttctccaacattgaattatcccccaaatttatttagggctctcctttagacagttgaccagtgtcgagtccagtctcttcgacgtattaggtactagtcatcgtaatctcttgaacaccagtcgtgagtccagttatggggtagtgaccccagtggttctggtgtttatccccgcagggattgtatctccacttcttgctctcacaggtgggttgtttcgaggaggcatccgagtggtggggctgtctaatcctaagtcagtgggtgcctagacattgggatacgtcaccatttgatcacatggttcaatggatgtagatcttcttgtcaaaacgattatttgtcgattcaagaatggattgaaagtcaaaggttggtgatagcaagatggtatttcagcctcccaacaaaagcactaaaatgttgacctcacttctagctaatgacattgagtcaattaaagcgatagaaataactatattgataatttaagaacataaacgacacttgaaatttataaagactcaaccccttaattcggtaatagcctacccccttttttattgtattgcttatgaaagaatacaaatatcacaaggtttgccaagtgaattttttaatatctctcgaaaaggctccaagtattttacagagtattgtctctttttaaagtgtgtaaaaaagaagccccttaaataataaattggcctcactatttataggggaaagggattacatttatttcaaaatattaggagatgaggcagtgagaatttaaatgtgaatcccactattttctcattttattaagtcaaattctatgaaaatatggattttatattagtcctaattttatagaaacatttaagaaaaaaatcatgaaatatcttcagcaaatttttcaggtcacccattcacgttacgcgacttactggcatcgctcggcgcaaggtacgtaaaatcttgagcccattcgagtaataatcactttgagcatttatacttcaaattaattcaacattgtcttgcccaatcgatcggtctagtataacattctattcaaggtcaaatttccctactatgtgtcagcttgtcaaatacaacgtcattcttgcgaattttgagataacaccccattaactgaattgtttattaaggtggcgtttggtaacacttttttaatcagttttctatttttaaaagtggaaaagt

SEQ ID NO: 321377 - DNA, 1946 bp, Cannabis indica
ttcccaaaaaatttaaagctattaataacaacaaaacacaatttaaaataatataaaacaatcacaacagcatttaggaatataaaaatttactactcatctgatcacagtacatatattcacagaacttatttcactatgtatgcatatttaagatattcaaactcatctaacatgcatattattccacccgttgatcggaccgcagtacaatatattgcaaaacctactaaattacaagttagtaactaactatagtattctaaatataatttgtaactagctagtaactaattttactataacaaactatataataattggcgatcctcacgcattcatgatttatccataaaaaaaattaagaaacaaatcttaataacttagtttaagagaaacttatatcaaataattttattctaattttactaaaatttctgcaacataacgactataattgaacattctcaaaaaatttaaagttattaataacaacaaaaaatatctaaaacaatatgaaacaagtgatgatgagttacatgaattttaatcatcattacttttatcattaatgttttaattcgagttttcttctaggataatagaatttaagattctagttttagaaacataattatctttactttagcttaagttttatgatacatttttggtacgtttcaattttatgtgatattttattcattcttatgtgttctaaaatattatttcaatatgatttttggcagcacaacgactaaaatataacgttctcaaataatttaaagctattaataataacaaaatataatccaaaataatataagataatcacaacaacatttagcaatacaaaaatttcccacccatccgaccgcaatatatgtattcacagaaccaattttaccacggatgaatatttaagatattcaaactcatctaacatgcatattattctacccatccgaccggagtacaatatatcgaagaacctacttcactatgcatgaatatttaagatattcaatctatactaagcattcatgattaattaataataaagttagtaaatgtatacctcaactagctagaaaccgatcaacaccgaataagcttgatccttgtaaattgaccccacaatctacaatataaaaaaaatactataaaactaatttttttaatttaactagttattagttatataatttataaataactagttactaactagctaatttattacgagtaactagttaataataaaaatacatcaagaggaataaaaattagtaacttgataagtagttgtaactaactatttactaggtacataaaaaataaaaatacatgaataaaaaataataaaatattaaaaaatagaattaatttttaaaccaatttttagaaattcatttctaaacattttttttaatactcctctatttcattctcatcattcacaatatttaaaaaaactattagtttaaatattttgttgacctcagatttggcaaaccgataacggatcgtatttaatattgatgcttgccagtgtcacacaatgagaacaataaattaaatgaacataggattttataaaggttcgacccccttagttaacgggtaatgacctactctccttttagttgttttcatacctagagataatactactcaaatcactacagtgacgggttcttaagtaactctctaaaagttagattataggaattagagttggcaaatcttaagtatgagaagagaagtgggtgtgtgtgtgagagagagagagacctagaactagggtttttattagaacttaatgacttcagacttagagcttagggttttagggttgggttaaggctctttacataggagagcttaaacccttcaagtcccttagaaataggtaaaataagttgttattgttggaattattttac

SEQ ID NO: 321378 - DNA, 1079 bp, Cannabis indica
acattagctcctttgtatttaagatcccagatgaacttgacccaatcccagacacgaatacccgtgtcacagaccggatagataccccaaggagaagaacgccataaatgttgagccacatcacatgaaagaaatagatgttcgacagattcttcacacattccacatagggggcagcttgtgtctgctatttagaatctgcgaccgattgcagctcttaccgggagagcgttagacaaaatgctccaccacatgatcttgtgacgctccaagattttgctattccacagattgttccaaagttttggagcgacgacacaatgtgaagctctttctaaggcttgggttagataagcagacttacacgtgaactgcccactactttccagagtccatacccatctatcaaggcccataccagaggggtggccccctttcaagatggccgctacagtttcatgatcaaaaagacacttcaacttttgtaagtcccattgaccattgttaagaataagcttcgccactttaattagtttagacggctcatcccttattcgtttcggacagaagtctttcaaatgtgcaatccagggatccgaccagatgttcgtagattcaccattagctaccaacttgcaggccccttttttcaggatagagttagccttgacgacacttttccaaaaccatgaatcagaatttttatacctgcaagagaggaaatcatttccccggaggtacttagccatcaaaacttgagaacacaaagattggctcccattcaagatattccacccccatttggccaagaaggcctggttcatttcttttgttttccaaaaacccaatccacctaaagatttagggaggcagagcttgtcccaagcctttagatggatcccatggtttcctttctcgaacccccaccagaaatctctaaccaaactatcaatccggttaaccatccgagaagagagcttagtagtttgcattgcatacataggcaaagacaagcccacagatttataagagttgcacgccccgcctttgacaaggtctttgccttccaaccctcgaag

SEQ ID NO: 321379 - DNA, 786 bp, Cannabis indica
ggtttgactactttcaagctctggttgaaaagggtcagtgagctctgttgaaacagatgaagaaatggccttcaaaagtttggatctttgattgggttttttggtgtggggagaaagatggagtgggaatgagttttgggaagtgggttttgtttggtgtgattggaaagcctagagaataaacagtgcacactctcagggctcccatggcgattgatatagaaaatttgaggctgtgtttctttgtaataacatattgaagtgtaaagaagaatgtggtcttaaactgaacacatcgatttgtacttacaacagaaaagtggttatttcgaaagtgtcgttattttttttgagtgtagcgtaatggtattttacaattatttaatagcttaatagcttcaaggtcctaggttcgaacccttgacctctctctctttcccatccctccctcttcgaaagtgtcattaagacattataaaaaataagattgaaaaattggtgcacccaaatatagatttacttttatgtacttttttttttttctgtgttttcatatttaaataattttaatcttatttttattctatataaagtgtgtctatataactgaattcttggtttatgagaaattcataggtgactttttatttttatttaataaaataataaaatattatttatacataataaaataataaaataaaaataaaataaatttcattaatatttgaactgatatttgatgataattattcgagagtcacaaccctcattccttctttattc

SEQ ID NO: 321380 - DNA, 1621 bp, Cannabis indica
gattcatatatataactgtgtatattgtaattctttattctaaataatttatttttgaattttacgtggattatttattattctttattcaaataatctcacctaataactaataatatttttctttaattttaattgtatcactttcaaataacatagaaaaaactaagcataaattagtatacgtgcctcgcacgtagttttgtctagtatatatatatatatatatatattacaaggaagtatttctctagttttgttttatttcactttctctatgtttggtacggtgaagaaaaaacggaaggaaagaaaactaacatgagagagaaaagtggagggaaggtcaaaatgacccaaaaacatactactatgtaatcaaatgtttttatattaaaatttgtagagaaatgatattttgacactatttattatttaagttgtcttttttcatgtataattttcacggttctcatatttttaatgttcagtttatttattttttcatatatatatatatgtatatttttaaaattttaaaggatatcatttaaatatcatggtatatttatattaattttgttaaaattatttttattctaaagttatgtcgattttatttataggttattgtgagttgttggtatacataatttgttgtatagtatatttatttttgagtaaattacaacataaccctcaatattttctattcgctaggtaataactcccaaaatataaattttgacagcaaaactctcaaaaccaacattctgttatctttaccataattagttatagagaatgaatttgattttcattgatatcgaaatgtttattcaattgaattacaatggcaaagatatatgtttgtatagagagtaaagtcggtttagctcataaccaactaaaccgaatataactaatagtaacaacatataactaacatgactaacttagcctcttaagtctaataagccccctcaagatgaaatgtaaaggtttttgatattcatcttggagacaatattatagaaatgagtgggaaagagaggcttcgtgaggatgccggctatgttagacttggatgcaatgtaattcattttgatggtgccattgttgaccttttcttggatgaggtgacagtcaatttccacgtgtttagtacgctcgtggtagacggggttttatgatatgtgaatggttgtattgttgtcgcagaataaagttgatgggagcctgttttgtatgtcaaagtcatgaagaatagaatggagccaagttagttcacaggctgcattagccattgctctgtattctgcttcaatagaggagcgagataccgtgtgttgctttttggacttccaagagatgagagatttgccaaggatgacacaatagcctgagatagattgcctagtatccaagcatgccccccagccagcatctgcaaaagcttgaaggtgtatttttttttttggaaaggaaaccgatacaagttaaaaaaacaaaggtaacaaagttacgcaaccagaggaggattttcttccatctataacagttcattgtctatcctaagggcatgcaaagatactccaggagaactagacaataaaaccat

SEQ ID NO: 321381 - DNA, 483 bp, Cannabis indica
aagatagtaaagaagatgaaggatatcaagaggaaaggaatggaaaataaaacaaaggtaggcttggtttttctcttcaaaatttgatcttacagtcactgattgaaccttttttaaggggttaactgattcatgattgttagtttgattcaaacaaaaccactttagaattaatacagcaatcaacaacaaatcatttgggaaagaaacaatacctgtagaataggcagaggaatgacaagaattcaccagagaaagagagatagttgggcaaataggatttttgggtaaatatagaacttggcaaatcaaagacaaggtaggttttgtaagtcaatgaagactagtttgtggaaagtaagacaattatctattactctttacgtaaataaaagatttataaaagagtgagttttgaaagaaaaaaaaagtgatgcattatgcattatcaccttcagctttttttttttcttttcttagaat

SEQ ID NO: 321382 - DNA, 1239 bp, Cannabis indica
cacacgtggcgtccctatagattagggtgttacagaagccatctgctctagaggatttatcgcctaccagttggaatgccgcttgctgaatctcatcaaacgtgaatggagcttccaaacacagggattctgcagctgtaagctttttagatattctagaaagaacatgatccatttgttcacaggtaggattttgactggtgaagagttgagtaaagtattgttcaatagtggttaaaatgctttgagtatcggtgacagtcgagccatcagatcgcgtaagtgagcgtattttgttcttggcacatcttgaagaggcaaattgatgaaagtatcgagtgttcttatcaccgagccaggtaatttgagagcgttgttgccagtactcttcttctttatagaggagccgatcaaggtctccttgaagttgccaacaaagaagaagatgggaatcaatgggttcaggatgattgtgagcagcctgtagctgagattgaacttttttaatttagtgtggaagaggaggcccaatcgatttctgccactcaaagaggatgagagcacaatgttaaagtttgttttcaagattagagatatgattgtgatcataggattctggagaggggacccaaggcttacgaaggcaagcctcaaagccattctcagctaaccaaatattatcaaagttgaaatgttggttatgagaccgcatactatctgttggaggttattttaccaagatctagatttactaacatgtatgttgattataatctataatctaacaccctaaatatgaatttctttatacgatgaaataaacacatacaaagtttagaaaaccttacattgatggcaacagaataataatgactcctttcgttcaatctctaacccttgattcctttctatagtagagcattatcaagatttgaacctggattttctctccttcagtttggttaaccacagtctttcacactatgattgagtacttaacttgatattagtgggcatggtactctatcactaaaggcttaattgatgaagaacaaggagaggaagtcaaaatactaaggaagaaggctctcttttactagttgcctgacaaaaaatgaaaactagcttattttaggtggatcagaatgaaagtatcttattccttttatagtatttattctaggctttaggatttaattatatagattaaaaaaagataaaataaatggctaaaatcca

SEQ ID NO: 321383 - DNA, 657 bp, Cannabis indica
gaacatcatgaactaaaagaccaaaagaggatgacaaagtaaaagaccagaagagtattaaatcaaatataatataatagtattccaatttattagtgataaaataaattttattttaataaaaagttttaaaaaaattaatgaaaattaaactctcaaagagcatcaattccgaatgatcagatagatcggaaatagagaaggacaatcgaaagtacaaatgatgtattacttggaaccataagagtctcggacagggaaagcaattttagtcatccccattactaaagcttgccaattttgatcaaatattcaaataaaaaggtaaattttttcaggatccaagactacaaatggtatgcactaaaagtcatatttttacaagacagccaggatcagtccaaggcctaagttctatgcatcaacaacataaagcaaacatacaactattaaacaaattgctaaatctagacttttatgaagattcaaggaacatacagaaagaagcttacttgataaagagcagggtggtgatgaaaaacttgaagaaaattgaaccatcggagaaggaatcctcatgccaaaagaaggtgttaaagaaaattctcatatggatggtcgatcaagacatgcaaccctagtttgaagagcataaac

SEQ ID NO: 321384 - DNA, 1285 bp, Cannabis indica
tcattttctaagagacattgtcaataaaggacttatcaaagtggtaaagattcacactgacttaaaccctgctgattttttgacaaaagtggtacgagttagtaagttcaatgttgcattgcacttacttggtatcaagacatgatttctagagccctaagaaagtgcctaaatccactaagtgctacattgaagaaattaggaaccaaagtggagaattgtgaagtctagtccctatatttttccaagccaatcgcgaacacacactcagattgctagttaaacactaaggccaattattttagttgtccaaggctcaagataacaaagttaattagctataattttgttattctctcctattcaatcaccaaccaaagcatataagtaaacccctagactgatcaactaagggttagactaattgttgtacaagttggttatgaactaaactaagagagagttggtgagttgagagaattgtagagctatgcgatcgagtgagatgaaaaccagtttgtgtacgtgtttaagtgtgcaacattgttctagaacttagtgaaattattctcaagccttaccgatctttggagtaggactatctcacatgcgatcaaatcaaaactaagtaaattgtggtgtttattgtctttaattttctgtattgttttttattactaattgtttgaattttagtttatctttgattgttgtttctgcattatttgatccttcactacaaaaaaaaaatgctatttttagtgaaaatattttaatcacaacataaatttttttgcttaagtttgttttagtatggattagatcctaacaagttttaattaacatccaattttattaatatagattgaattaagataaaaatctaattagcatatatttaacacacaaaacaaaaatatttttttttttctctatggcacacttaaaaaaaatctatgtaattagcagatttagttaacacctagattattaacacatttttaacataaatacaaaattaaaaataatatgaaaaattatactaacctgcacggacatattagtgggtggcggtggtgctggaggagctgccagtaccaaaaccaacggaaaataaattaaataaaaaataaaaaatagttacttttaattatatactaaaaataagtacaaaatttttatagtattcggtaaaaaaacctaacatttttattgttcatcatatataaatagaagtatatatatatctttatatattaaaagtgcctatctaacggcatttctt

SEQ ID NO: 321385 - DNA, 1166 bp, Cannabis indica
gcttggccatgaccttaaagcaaaaaaccaaaaacttgatattattgaattgttacacaatatcttatttcatatcacctttagatacaataattaatatcattttcctataataagatatctatatatacgtactttttgtatagaaaaaaaatatatttatcccaattgcataaattataaatcattattattcttatatagtgactaacatatagaattatttttatgtgtcaagttttttattgcataaattttaaatttttatgttacattttgacttttatattgttatttatatataaacttattacttattattatgttaaatataaatactttcaaaaataaaagtgaaaaacttagcaaatagtacaaacggtttggtttggtttggaattatgctaaaactgtagtttcaaaccaaactaaaatattcttaaaggtttcgttagctttaatttaattaaaagtttattggactgattttgtttctaatacttaaaaaattattatacttgtttcgtttaaaaaatataaaaaaatcggaccagaacaatccgtgaacacttctaatgttttgataaataaattagaattaagtaattattttcatggttttagatacaaaaattaattttgatgaaaataatagtttttttattttgatttggatgaaaataatagttaatttatctaatgttatgtctttcttttcgaatttggtgcacaagttatggtggtactggttagtgtgtatgtgtcattttaaaggtgtcacatcacataccaataaagagttttggtaatattataataaggagttttctgttttaattttctttagctattgaaaaatttattttgtttagacaccatttttgataacaattttatttttgttttaaactgtggaagatgttcaataaataacaaaattggggttaaaaaacagtgacaaaatcagaaaaagtaccaacacatttcttacctaaataatagaggttaaaacttatctggtgacaaaatcataaaaagtgctacacacaacaccttctttttatatgacatttttctatataaattaatatatatatattttttgtataaataaatataatattaatataattaatatatattatattaatataattaatatttgc

SEQ ID NO: 321386 - DNA, 1392 bp, Cannabis indica
catataagttttgcaagaatctaagggtgcttggcgccgggaggccaatactgaattttggaagcggctttggtccttcaaaattcctcctaagatcagtatttttttatggcgagctactttaggtgtgcttccaacgtgttttcaactctaaaagcattatgttcctgtcaaagttgactactgtttgtgcaactctagtactgaaactattcaacatgcattagtggaatgctcggttgcaaatgttgcttggcatcgcagcatagtggacgtcgaggctggggctgcaacgttcagcagctggttgttgggaattttcaccaggggcacgaagttgaaatggaggaagcagcgatggtgagttgggctacttggcgtgcgcggaatgactttatttggcaaaagaagagttggcttgcttcaaatattgtaacttcagctagaatcttgcttgatcaatacaaatttgctcaggaaaggaaggggctttcgttgtctcctttgaatgatgaggggcgaaactgtgagcattggattgcacctgtgttaaacaagattaaggttaatgttgatgaggctttatttgaacaagagggccggtttggaatgggctgtgtagctcgagatcatcatggaaccatggtagaagctttcaagaagggaaaggttgggtatgtacaacccgaaattgctgagatcgtaggcatcaaagaagcgttgagttggattgcgactcatccctgggataatgtagtgttagaaacggatagtttgatgtgtgtccaagcagtccaaagtaaagtttttatgtcctcacagtttggtcttattgttcaagatgttaggaatttacttttgaatttatcttttgttgagttatgttttgttaaacgatctgcaaacaagttggctcattgcttggcaagagactcttgtttctctacaggttgtgtgcttcagttggaggattgttcctctgaagtgcgttctattattttgaatgagtttaattaataaatcttccgattaactaaaaaaaaaataataattatataacatttatttttttacaaaattatatatagtatattatttaataaataaattaacatttatttgtagcacatgtatctaggggtaccaggatttttgtttagggtggacaaaatttagggtggacaacatataataatttaaattacatcaataaatttctgtatattaaaagtaaaattttaagttaattaagcgaatacgttacatataattttactatatttgacattattcaaaaaataattattagacaaaaaatttcttgtttaaaaaaataacatcttgagtttaactatgtgacatattttcaaaaatatgggaaaaatgaaccat

SEQ ID NO: 321387 - DNA, 876 bp, Cannabis indica
gagcagtaccctataaataacatttaagatattatttattattattgattattgattattgatattgaaaaaaaatggagttttgccaagagcatgaagatcttgatgttgaagagttcaataataataataataattctattcgtctaaagactccttctctaaacccacctaataataataattttagttatcgagatgctctttgtttaaaccttagtagtaacaaatttgttcaactcgatgagatgaatatgaagaagctaatttctatggaggaggagattatggcgacaccaagaaattgctgctgtgtacaatcatgtttccgaaataatgtagatattgataccttaaaggctgaattagacaaattaatagtagaatggaagagacgaagtgatgagagatcatcatggttttgtttaagacattaagcactcattctcattagttttgcttaattagtttattttacaattgtgattaatcacacttccttactatatattgtaagaatcttatttttaattagtcattttgttgttggttaagtccttcattaatttatttctctctagtttggttgtaagttaatgaaaattaatttagttacattttttacgacaatatctaataaattttgaatgataccattatatgtattttcttaatataataagtgatttccttttaacaaaaattacaattatagtaattaagtgaaatttacatataatctaacaacatggtaaatcaaatatgtaaattttcatgtttcaaagagcttcagtcctacaattccatatatggtatattatcaccgcaagtgttgctaaaaacatttgccttcgaaacttgtttagctttgctgtt

SEQ ID NO: 321388 - DNA, 488 bp, Cannabis indica
tcacaagttatcactataattgagctatatttgtatagcctttggactgaaaaatttctacttccaaccaatatgggactaaataactcaaaactattttatataacatttgaatagaaaaattgtatttctaagtaaatgtgggtcaaattacaaaatatattttattcacattttttttagcaggcttgtcattaatacatttatggttgaattttgatgtgtttaaagagtttaagtctagcaaaagactaaattgatgaactcaaaatagttatgatacatgttttcttgcttggaatttctctatcgcaaaactatgtcttaatttcttaccattactcatttcgttcctatatatatataaaaaaaaataaaagctcttgatggttattaaaatatttaactataaatataatttaaaaatattaaattattaaattctcattcaatgaataataaaaaaataaatttgagtttttatactt

SEQ ID NO: 321389 - DNA, 523 bp, Cannabis indica
ggtctatacattaaacaatcaagcgcttcaacaactgtatgttataagatacaatgaccaagtcaaataggacatttattttatttaaaataaaagcggttgcttgctgtttctcgcctattagttaaaatatatgaaacgtgaggaatgctaacatttcataaccattgtatggattagataaaaaaaaataactgctattctactcctataaatagcatataaaacattgtaaaaggggattgttaaatttccaacttagagaaattctaccgaattgtattcccatttataaaatctcaagaaataacattaacacgcgaggtatgtagaattaattataaaatcacgtacaaatctctatcttttctttattatcctgtatttaaatatattgcattcattatcattattattttaggcgacgtttggttgaggggaatgaaattataagaataagaatgagaataaaaatataggaattaagtgaaatcaaatttaaaatgtatattgataaaaaaaa

SEQ ID NO: 321390 - DNA, 1804 bp, Cannabis indica
tcagttttttttaactgagttattttatattattagcaataacatatatatatatatttattatacaaaaaatttatgcggatggtgtacataaataacatatcgaacaaaaataaataacatagtgataaaatatataaacatgttcattttaattaataaaaaatacaataaaatttaatgtttactaattaataaatatatttctttaataaataattattttatttttatatgtaattaacattaaatagatataataaaaaatatatttattttaatttttcaaaataatatatataagattcctgtactcaaccaaacagtgtaatttaattaacagtaatatgattacatattaccctacacaaccaaacacagtttacacatttctctataatcatattctccttcataatattccctataatcaaattattttgaacacctcataccaaacgccccctaaaaattaatcacttgttgttgatggtgttgttgagagagaagacaacatttccttttctttttgttgctgaggcgaagagatcaagagagggtagggatatgtagagttatgggttttgccctatgatttatgggtttaggttgggttcatatgtatgggcttaattaaataaatataaaaattgaaattttaaaaaatgcggtgcagtttgaaccgtggtttaataattcaaaactgcaaatcgcaaccgcactgcgaagaatttcaaactgtatattttttgcggtgagggcgacttgatgcacccctaatcacaagttttgttatgactaaaagtttgatttttttttatagtggttgccttatacagtttcgaaatacatgagagatctcctcaatgaacaaaactaagtcttttcaatactattgaagtttcaatagtgattgtagtggcactttttcaacactttttatttcttagtaactcatatgtatttgttatcctcgttaatattaattaattttcatattcatagaaaatgaaaatacttcaactaggatttttttttgaaaattaaattagagcacttaaattatataataaagatataacacaaataaagaagtatgttgtatatagtaaacatttcttctcgatttttttaataaatgacttcatgtaatgttttaattcaatttaatataatttgttatttgtattttttctctttgtcatatatatatatatatatatatttgtttgtttattattaaaagataaaaaaaactaaaatatatataactaaatccttatctctacagatcctttaacaaaaaatttaaattaattttcataaatttgttttgcattatgtactttatagaaaaatatatattatatttataataataaattatttatttatttatttctggtaatttaaatttaaattattataggtataaactagaagtatttatactaataaaattagttatagacttaaatttaaatcatatatattttttaataactaatacctaatatttttcaataataatcaataactaatttcttttctttatatattaaaagtacggcattttttggtttaacagaatataccatattctgttaaatttaacgatgttaataggtttgatctcccgttaataaataaacccaataattaaaccaaaaattaaacaatcttttttaattaaaaaaaatcatgttagtcacatatctctctaacaaaccgtataggctttgcactcaggtataggtttttccaaaaagtctatttttataaaacaaataataaaaaataattt

SEQ ID NO: 321391 - DNA, 2199 bp, Cannabis indica
gtgcggattttgaattttctaatgcaacccaatcgcacaagtacggatatccgcactttgcggattgcatcgtgcggattggattggatcgactattttataaacacccctattaagaatgattattgagggtggagaataacctttaactatttatctcatatcgtagtatgacattgaaatcatttttatttttatttatgttattttattctaatcgtcaaaaccctattttctaattcttgtcactagtttttgaataataaattgataatagtccttgtgggatcaacctgtatttaccgttatactgatgtaattagtaatatagacataaaaataattaataaattcgttgtggcttacgacacgcatcaatggttcaaccaagaagtgcaaaatccaatgatctacaagatctgatggttactaatcctaatgttcaggttcctccgaccacggagcatcacattcctaatgtacggcttccaccccatagcaaccaggagggaatccatacaattgtgaattgtatgttcgaacaacaacgacgtgaattccaagagtgaatggatcatcaaattcagatcatacaagcccaacaagaagaaattaattgacatacgagagaggttgctaacctaatcgagaaatttacccaacagactggaggcaaagataagaagtccagccgctcaagctagacaaaccaaaatacgagcaagacagattacctagttccaggccccgtgatcaaattactatccgcccaacagatgagaaattttatcctggtcattacctcaagagtagagctcagaacaacttctaacctggacctgaaagcgacctgctggatgactcaaatcgaaggagaagtgttctaagaagacatttcatcccctcgcacaataatcagtcgatcattctagaaatttatgttccacaaaacaaatatgatgtcgtaccctttgaggctccagggggtccataggtgacacaggtcggtcaatggttaggccaagttgatcaaggcatacaagcccaattaggtttgcttaagagcctagtacaaagtttgatcgacccaaaactcactgacctggaacttgatcggacaagaggtttaccattttctgcacggatcaactctctcgatcttccaaccaagtttaaaattcctacatggaagatgtatatggggagagaagatacattttttcacattaaatattttgagatacaaatggacttacaggtagtaaagggtgatgcacggtgtagaattttccctgctactttggcagaggccgcctatcagtcttacttcaaattagcagcagggagattcaattcacaggactcctttgcctcatagttctacacacaattctcttcttacaaaaatgatcacaacaacatttagcaataataaatttaacactcatctgattgcagtatatgtattcgcagattctactcatctgattgcagtatatgtattcgcagaacctatttcacaacggttgaatatttaagatattcaaactcatctaacatgcatgttattctacccatccaaccgcaatataatatattacaaaatctacttcactacagatgagtatttaagatattcaaactcttctaggtattcataattaattaataacaaagttaatatacatctagctagctagatgtaacaccctaactaatataggcgtgttagcgtgatttttaatgtactgtgcagctcgttgctaatcaacaaggttattgaaaatcatgaataattaacatttacttatttcattaaaactataaagtaatacatttataaaatcccgggatcccgttttcaaaataaaattacaaaagtttactattcatatacaaaagatttgtcgcctagcgactaaacagcaaaagccctaatgtcccgaagatcgtacgctctaggcctaaccgtcccgacatgtacaatcttcacctgttcgtactcacggctcctcaactttagcattgcccttacctaaacatggaaatagcactctgagtcgatagactaagaaaagcataacataaaaacatactaatatcccgtgttataatcaggcgcccatacacctaaccataaccctaactgagtctgaaacgttcttgataaagtataactaaccgcgaatccaacctata

SEQ ID NO: 321392 - DNA, 3249 bp, Cannabis indica
tttatagattaagttaggaaaaataagcttgtgactacgtttgttacctctttggaaggaaaaaatttgatccaagataagagaagccaaattgatgtttgcccctaaggtgattcagaaaagaagatgagccaagtcttgagacaccatagtcttgttggagttttgaagccaattactaagagcaaactacatgagtgaggcatggccaacagtgagatgagtgatacgaacactttggctagcaggccattcaactcgttcaccgatgagatcagtaagcatgaggtgacgatccatagtcactgcatcatttgtcacacctttgggcagtttcaaagcttcaactatatcattctcagcaaaacgatggccacgaacataaactttaccaaagaactcagatttcttataaagcaaatcatcagtcaagttagcataaatatttttgacaatgccatcaatatacccttcaaaaccagttagagtatcttcccaatgatgatattgaatatacttcacaatgccacaaactctatcagcatttaaatcaaaatttctttcattctcaaactgacgactagcacataaattccaatcacgctggttattattataaaagaatctggaactgataacttgacaggaagagaggttaccagacaaggtgctcttcatgggctgtttacctttggctattgcagaagctttggctactgaagcagaatgaatcgttgctgctaaaatttttggcaaggatggcttaggatccagatcaacttcttcactgtcagaggagacaacaacatctctggatttttttcagatgaaaaagctcagttttggactcaaaattgtcagatggcacttccatgggttcttcttctccattagaactcgaggaggccaatggaggattcagtttaagctttttggcagcaagaatgggcctctcatggtgcctttttgtgcatgcttccttctcaagagaagcttgttgggcacaaattcgagatgaagggccctttggagttgatgctgcagaagcaacaccaattccaacaggtggtgactcagaaccacgagatggagacgccttaacagtctatgatgaagacctcgagtcagacctagaagatttgggcaattggatgggtctcgcggattttcgagccaagatttcgggagccttttttctagaagtgggaatagaagaagaagctttcttgatagtcacaggaggcaactttgaaggtacaagagaggcatttgagggagtagtttctgtatcaaccatcttgcttggatgccctaagttctttgtcttagccatgaatttctaaaaaagaaaatgaaggaacaaagagacaagatactaaagagtagagggatcgggtagaagagaaagatggtgagattaaatgacaaaagaattggtttaaaaaaaaagatatgaatgaagagcaaaaggaaaccaatttgaaaaggaaacaataaataaactaccttgcccactaataaagagaaaatcgccactctctttttcccttattaagatattttttttttgtaaaaaaacactaaaatagataaaaggaaacaagaataaatagagattctttccaaaaataggccaattaagaaagaaaaaatcattcaagatcaaagaaaaaaaaaaaacaaaatacaatggataaaatatcaaactttaaaaggaaactcatcataatataccaattacaacaaatattgatgcttaccaaaaaaaacaaggactaaatttccttagcccactagtcaagtcacaagcgcctccctctttctttttgttatttattttttttttaaataattaagaaaaccagaaagaattatacaaaaaaaattattctatccctagcggcctggaactgtttcttaaaattattctatccctagcgacctggaactatttcttaaaattattaggtctttggttttcctttcatcctcccaagtatccacactgtattagatcctcaattttgaccttaagatgctttcactccttcgtgaggtgtccaacatctttaaggaagcagtagtacttgtttaggtcccttctggatctttctcttttcaagggcagtttccttttgaagggtactcagtgctcattagtaaggaagatgtgctctcttgagtgggttaacttgatgtagtgagtataatcgtgaggcagtggctctaactctcttttggctttcttgtctttcctatcatctttgtatctgtatcccctctttttatgcaacccttcaacccagaccttcttgggttgttcatcttttcccactcctaagttcgcatgcacttcctacaccaagatgtacatgttggctctttcatagaagtcttcaaggtcatatagctctctcttgagcatgttgttccaaagtttactttttggtctaacagtggcggaaatggccattttatggtcatctttagataacctccccaccttggctgcttcagcattaaagcgctggatgtagcttttcaagctttcaatttccccttgcttgatgttggctaggcttgtcctagggatgatgtaatctcgggaagcacgatgttgggatacaaactccttgctaaattgtttgcacaaagttattgacactgggccaatctcttgaaccatttgtatgccgcaccctatagcgtcaccgcaaagcccttacacgttgccttgctcgtgactctcttcattttcataatttcaatgaaagcatccaggtggtactttggatcagtgatacttttgtacagtgatatgttaggcactttgaaatagaggggtagctattcgaactagatttctcttgaaaagggcaactcatcatcatcccagctaccctcctctgatgcagttgtggctatccttcggtagagattttccatctctttatcaagctcttatctcctcttgttcaacttttcttgcaggtcttgtggagtgcgtctcggacctcctttgtggtgatgcatggacaacatcggtgctctcttcttaatagttttttttgttgagtttctccctcaagtctcctaggactactttcaaatcggccttctttttttgtgaagatggattcatgtttctctaggattttccttgacggtgatgcctctggtgtgttactagtcgagtattttgactagtccttcatcctctacttgccctacctctctacggtgacccta

SEQ ID NO: 321393 - DNA, 890 bp, Cannabis indica
cttggaaggggaaaagctaaggtaaacctagacacttcttttgttttgttaacgatttagctaggtttatgattacaattggggatttagtttttgtttaggtctcgagacatcttggattatatttgtagtctttgtgcgacaagttgtaaaaatattttgctagtacttgcaaaagtttaaataagggatcccggtttatatagataaatacatatatgtttatcaagtttattaaattaaattaaaagttttaacctgatacgattttcaagaaaagctctttaattagcaaaggaagcacatcaattagaaaattactgtaacgcgcctaaatattggggtgttacaactactaactttgggagcacttgaggaactgtctgaagaattctttgaagaagaactggctgtctgaagtgaacgataagcttcgtagagaagactgagcaagccttcgtcaatcctaatattggctgaaagtgattcaattaaaagatttttttgcctttctatacttctaaatctcagttagaagttttgagcaactactctagcaagatgtgcaagaccaaggatcgatagactaaagcaggggatgcaaatggagccttattgtttgatttgtggcctggaaaatgagttagttttggaatattattagttagttataaacacaaaaaaatattaattatattgtaatttttaaaaatcaatttaagctatttaattaaattaatgaccaactcattaaaactctatttaattaatttatttcaaatttattaaaaatcgtacatataattttgggaaatttttatatatatacattatatacattaatattacaaaaaaacgttatataaaaacaatccatccatataccgtga

SEQ ID NO: 321394 - DNA, 942 bp, Cannabis indica
tttaaaaatcaaaccataaatttaaaaaaaaagttaaaaaataatatatagaataattctcctaaattaatataatagtgacttcaaatcaaattgattaagtagaaatatatatatataataataaataaaaataaaaaataaaattatagatcatgtcaaacagaaatatactgtaaaataaaatttatataccaacaacccgcaacaactcaaaaaattgacataacttttacatataaaagattttaacaaaactaatatagatgtactataatttttaaataatttgcttctaattctaaaaagaatatgaaaaaaaattattaatttttatgtgataaaaaataatataaataataaataatctaaaatagttatttctctataagttttgaaatggagatatttattagcataaagtttttcacttgattattggccaaactaaattagtaaaaaaaatattaattgtgagtaaaatttataatataatgattatatatatataaagcaaataataaatgcactaacatgatatgatgaagaaataggttagagagctcgattggtagcttgaagttgcgtaattattaaatgcgcagttggaggatttgctgagatgaatagcttttatttctaagtatttcgttattaggagagttgtgtgtatatatgtgtagatatatataaattagattaggtgacactaatcataaaattataattaatttaagtctcaatggaagacctaataataaatatataaatacttacaaaaaatgccctccactttattattaaaaaaatagaaatatgttaattaaccatagttttaagtaatatattatagggaaatttgacattttatgctaaaaggttacacatggttttaaaatattccccctcactacacattttttaactatacttttaattctt

SEQ ID NO: 321395 - DNA, 2032 bp, Cannabis indica
cacaagtgcggatatccgcattttgcggattggattggattggatcgtgcggattggattggatcggatactttatgaacacccctattgtttaagatagatagaagctttcgacagtccatcaccactcccccaagaggcgaaaccatggtgatgttacttcgaataacttggacaattgagagacaatcagactcgagttcaacattatgccattcataatccttgatccgacttaacgcctctttaatggctaaagcttcagccatgtctagtgccatggtactactgccaaagaaccaaaagaagaaaaaaaaaaaaacagagcactcaaaaccaatatgaactttgcatgtcaaaagacaagacaccatgacttacaatttatattttaggtcatttaatcacttgtggtggatttgttagttgaggaagaaaggttcagattttatgactgaatttttaaaactagaatataatatctctaattctaaccgtgatctgaagagaatgtgaattacttaaataagaatgaaacagaaacatacacacttttttctccgttaatattactattaatgcttattaaaaatatacaaaataattaattttatttatattattttaatattttgtatatatattttatttaaagtcaattaattgtattaataagtgataaagaggtaattaaaaaatataatatttattgtggactaaaactttaacttatagggtcttttgtgacaaatttgacacacattttacattatcattagatttaaggttttagcaaaatgttttaaaaaaataacaatacacaatatttataactctccattaaagatgctctaagatattaagcactacaggcagttatatttgtgaagcaatgttgtattttaatttttatatataaaaaagtttatccgcaagttaaaacttggcacatgttaaagagtatcttcactaattggtattgttatattttagcatacttcaatgaaaattattctaataaaattctaaaaagtttttaaatttgaaaatttgttagcgtaaaatataatatcaatatataaggagaagaatgagagtctaaacttaaattaagatacaggatttttatatgcatgtatgtatatagtaaaaatcattttggtcaatagcatatttataaaatcgtttgtgtataattatgttaaataattagttcaaattagttgtgatttatatattatactaaaaaatattataacagcaaagagtgactatattacgtagtaaagaaatatgagacagtgacatgacactctaaaatctccttaaatagtattacttactttttctttaattctatcattcttataattttttattagatttataattattggttgattaattaattaaaataatatttagggattttttctcatatagctttattttggaaaaactttatttttttactctcatataggaaattaaacaaaaaaggaaaactcaaagtcttttttttttcaaaaatacagtctctacaatgagtttcccaaaataactttttcaaatgttctaaatctgaaattatcatgagctcacccaaacaatccaagatctactccataatcaatgtagcttctccaaacaacaccaccaacaatgtagaagcttttgccgatcaccatgaatgccgacgagaaagcttttaccgatcaccatgaactccggcaagaagcttttttcgatcacccatggaaacacgaccagcaatagagatctccatgaaaagttgacaagagaaggtcacgattgaggcaaatctccataaacgcttaattacttgcaaaattttctgagtttttcttagtaaaaacaaatctgatgttgattagtatgtttgctttaattatttttttaatcaattattgtttagttgattcacatatattggtggttttcgttcatatatttccctattttctggtattttttgaaaatctggaatgaaaacagtgaattgaagtttctg

SEQ ID NO: 321396 - DNA, 3425 bp, Cannabis indica
agtgagtccacgtgtcatttttatagatgtctagtctcgattttctaagtgaaaaattctcactataacacatgcccctagtttcgcgattgaaagcttatgtcatgagggaaactataagcgagaggcaagagaaaatatgtcacgagatggtgacttttggttgtctaatcgagggttttgaaaagacggttgtaatcattatacttaacccatttggtgtaccatgtcatcaaaactcttcaaaattcgtgcaggtgtggtgatagataattgttggattgtgagactttaggcattctctttccacgtgtctccatcccatataatgagggatgatggtatttaaccatcctgatacgaaatgatctttcaattcaaccctcatatttttacttatttcttcttttctctctgatttttaaaacttcaaaacccacttcacatttcttcttttctcttccagaaaaggtctcaaaagcttctgaatctccgaagaatatcgatattctcaaggttagtagaaaactgtttgtaactatttttccctttattttgagaatcaatccatattctacatttgaggaggtagaaaatgcatgatacattaggaagtatatatatgtgattttattttctgacaaaactgtgtatgtttctaggaaatataagcctgaaatttgagtaatcacgggttttaggaagaacactttgagtattcgcatctttcttgttaattattctaaatactcgcgagtattaggatgaacatcttgaataatcgcgtatatattcaccgaaattaatttagcaaatctaaaatttagctatcttaatccctgttaaatacttaaggtttattttactcttctgatttacatgtgtttttgttgtgaatattggttgagtcctttgaatggtgggtgtgtcaccgtaacttaacttttatgcgagcatatgcatattccttgggttactgtgatacacctagccattcgcgacatgtaaccaatttcctagcagtttttccaaagtctcatttttccgtgttttctcaatatttaggataatggcatgctatttatcgataagaaaacttttagttttaagtttagatccccgagaaggttttagcaagttgtttacccaattggggtgattgtgaaatagggcctccattcagtgcttgaatttccattcaagttgaccaacatgcttgaatcaggttacaaggtaagactagcataagatatgtatatgtatatgtgtatgtatgtaaattgcatgctatgtatgtgattcatatactactaacactagtatggtatcagtacggagtgcactggtatagtatataatgttcaaagggtacgatccaatcttaccaacactagtacgggacgagtacatagtgcatgtggtacaacactcagtggtactcagagtacggtttagccctaccaacactagtacaggatgagtacttagtgcatggggtacagaagtcatacttctgttaagattattcttgatgcgtttgaagccttgtaaataggtgcatgggcgcctagatacaagtcagtattatgttatatgttttgtgtttttcttactaagtctgttgactcacatttatttgcatgtgtaggtaacagaaaggttaaggccaaacaccagtgagtccaaagctcagcgatgattgtacgtatcaggaggatagttcaatctcagaacgatgggcctttatttagtagtcactgagcgacatgtttataagtgtattttgaatatgattataaatttcaaagatgggatcctgactttttagaaaccctttgactagcaaaggcgtgcacaataagtagaaaatcaatgtagcctgcttaagcaatagggcattggtattagagtcgccaagttatttactgaagaccgtcaagatatgtacaatcatcgtcaaagacaagttcgactcacggttcagtaagcctttacttgtttagtaatttatttcattaggaaagcatgataggaagcatgttagtaatatgttagttgtttaaatgtgtcacctaaaatccatgtatgcggtaactggattattgtgattattgtttacctacctgacttatgggatcgtaggccatgtcctataatatggattcccaacgaaacacaaggagttgaggtgatgtggttgagactagaagcagtcggggaggtcaaaatccttcaaatccctttggacgtagtagaggctgtggtaggtttcatggaggtgattatggaaatccaccacatgctcttcaagattggaagcaaaggtttgtagaaatgcaagcccaaatcaattagtaagatgaaaagattcagaggctgagacagtagggtcctcctacaatgcctcctcaaaaggttctacgctctttggttccagtggtgccagcagaataacctgttgctggcaactacatggagcctttgtatgaaagattctgcaaacaagcacctccagctttttgggaggtccaaatgtcatgaaggcagaacattggttgatagtaattcaaagaattttgaattttgtgggtgtcaccaaaaatgacaaggtgacttgtgccatgtttctattctaggaggacgtcctcgtgtggtgggaattggtgtccctcacttaggatgtcactgtgataatctgggaagagttttgagatctctttaatgataaatattataatggagaagtccatagtgccaaaagaaaagaggtcactgacttggttcagggtgaaaatattttagtaacagagtatacaacaaagtttgatagacttgccaagctagctttgggtatagtgcccacacactttagtaagaaaaagaaatacttggtgggtctaaatgccaagatcagacatgatttggttatcactaatgacaccaccacttatgccaagatggttcagaaggctctttgagtcgaaggtgcagttgggtttcttcaagagccccaagggacttcaagtgttgatgcgacaaccttttttcctactcctgattatggtagggatggtggtgattccaatattgattagaagaggaagacttttctgacatcaggtggtttgggttagaataaaaggttccgtgggaacagaggtagaggtggacgttaggtttattcctattttgagtgtcattgttgtaggaagcatcatcccagtgaatgtaatcgaaagacattatctagtgagaattagttgggtacttcaagaaagacttcctatagttgaatgactcctattatactatactgtttgactctggagcaacacattcatatgtgcgtcaagagtaattaataaaatgggtaggccctgtgattttattgataaagggttgagaaccctactacctagtggaga

SEQ ID NO: 321397 - DNA, 1531 bp, Cannabis indica
ttgtgactaaaaatacatttagtcacaataaattttaatttttgtgactaatacttttagccacggaccttttagtcacaacataagaatcataatttataattagtaacaattttttttacttttagtcacaaattttgttgtgactaaaagtaacattttttgtagtgtgtggaggacgatcttcgaagaagcaaaagaacttgaatttgataatcgatatggtgccttgtcgcccacttatagggaaagtattagatttccaaatatttcagaatatattagcgaacctttggaaaccaagggtatgtatgtgaaaatccttgagcaaaatcgttttttatttcaattctactatgagatcgatattcaatgagccattacaggcagcccttggacctatgattgcaagatacatatcattgtatatctgaaaacaacatcgcactaaacaagcttgacatgtgggttcaaatccataatctttaattaggattcaagacagaacgggtcgttcgtgaggctggaaattatatataggtgcttatattgattcggacctgaataatttcacaagcatttggcaggagtacttaagagtgcgtgtgcgtattgatcttgaagttccccttaattattaaatgaagttttgacaatgaagaggtgaaactttttatgctaatttcaaatatgaaaatgttcccacattgtgcttatttttggtattatgggtcattctgaacaattcagtgggaagtcatacgattttgtgctatgattttatctgtgcacaaaagtataaaagcatacaatgaaactccatgagctattagaaaaaaaccttccatgacttcaattggaggccggtgtgccccccaaaaacgtaacatactagagcagaattccaatattaagaaaccttagcatgcatcaaaataaattttagtctttgatattgttttcctttcttgaaaagaaggcccaacatccaaagatcctgacaattataaaataggagcgggattacagggtgatttacctctattaatacgtgttgtgcaaaacaaaaacaatcaataacttacaattcagtatatcgaaccagcaaaacacacaacacaatcaagaaacaatataccaagagatctcaagaatcaagtaatgaattataaagctgtaaaatagaaaagaataataccaggtttaacgagttcgagctttgtgcaatgctctacgtctcgaccagaacaacaacaatcatataattattgatatcagtattatcaaggttataagaatcctcacaaactctcagagattacaagaaaagatttctctctcttgtttagactctctctctctctctcctaactttacactatcacgatttcactcaaacaattactatctaaatctcatcaattacaaagattgatagctatttatagatttgaattgttgcctaaaataactctaaaactattgtggcatatttacaccgccttaaatgttccactcatcaccagcaata

SEQ ID NO: 321398 - DNA, 537 bp, Cannabis indica
agatcctggtaaaataattcccaacaattgcaaggaatgaaattcaaatcaagaagattggaagtaaagagaatcctgcagacatgctcaccaaatatgttcctcaagccaagttcagactttgtctgaacttactaagcattctcactacctgagaatgctcaagtctagaacagctacaatcaatttattgctactgtacatttgatatatgtccaaggtggataattgttaaagtggttggccaaacactactacaaaaaggggtatcggttttcaagtgactaataaagattttgcgtcagtttaaaaaactgacgtataagccgtagacgcaaattgtaatttatttgcgtcggttataaaatgacataaaaaactattttcgtcattttataaccgacgcaaaaaaaaaaaaaaaaacaatagccgcaaatttgaagtgacacaacaagatatgcatcaatctttaaccgacacaacaagtagtttttgcgtcgattataaattgacacttatgtgtacacagaacatttt

SEQ ID NO: 321399 - DNA, 892 bp, Cannabis indica
aagaacttatatactcaaaatataatgaactttaatgttatattatttgtgtcaactttgtgaatcaaaggtacaaaatagttaaacaagcatatgaatgattcttaaagcatttacttctttaccattgattacacactttatttattttcttttaatatttattactaaaataaaaaatttcaaacttattaggttatttatttgttgctttttattaaatttttttgtttattttttgtactaacgcttttgtctaaaattatcttctcgtggaatcgaccgcctgatctatactacaactaccgctaataaaaatcacatttgagcgtcaaacaatgataataagaagaacaccaatgtcaattacaatgaaatagtacaactactttaacaattaatttaatataaaatagtacgatagaaacttcaaattagtaggtttccaagacaaatgctaaaatatacgagtaatgtctagcactattttatgtatcattatcactattagtttacataagtatcagatcctatatagtttaatgtaataatttttagaaaatattattagctaagcacatattatgtctaaagatactaaacaccactaatgaccatataccaatactcttccacaaaaatcagtatccttgctttcacggtgtcatttaccaaccgtaggatgaatatatatatacttttatctaccaatccaagagctaaaatcaattgagaatctctcatttcaaaacttgtggtgatggacttcataattagcgttacttataatttaaatttaaactccatattataattatttattattaaaatatatctaaaatttaattggtctttatttatttaattatgttataaatattaataattatgt

SEQ ID NO: 321400 - DNA, 1482 bp, Cannabis indica
tattttattatgttgtttactaaactgtgagaaaaaaaaaatcaaaattattttgtttggtttacataacttagaacagtgcttaaatttgactaaattatcattgttaaaaaatgtacttatttttcatttatagtttttaggacgtatttgtcttttaattttgtaattaataaaactaaaatagaaataaagtaagttagcaaaaagaaagttatttcttttaaaaattagaggagaatctttttctttttttgttctctaattttagtaggctccagtaacttatctcattgcaaagtttagtaaacaaatgaatgagaatcaataccaaattatcatttcgtttaagtaaacattaaaatattgaaatattattctaatagagtgtcttttttatcattttggttaggggtgttcatccaatccaatctgcactattttttggatctaatccaatctgcacaatagctcaaatccaatctgtaaaagtgtagactggatcggttatattggattgattactttttaatattaaattatttaatactaatataaaaaaaatatttttctttcatattactagcaacaaaataaaataaattattgttattttatgtcttcaacaacataataaaataaataaaataacaaataacaaatttaaaagaagaaaaaagattgtacgtataaataaatgtttaattttgtgaatggaatatatatttgatctgttaagttttgaaatataattatattatatgtattagacttttacattactattttaaaatataattgtgaatgaaatatacatttgatttgttaatttttgaaatataattgtattatattatatgtattatatgtacacttatcagatggcttcagggcaaaagattaatttcaacaagttgtctgtttactacaacaacaacaccagcacttatcattgaaatttgccaaatgcttaatatatatgaggcgaatgagaatgacatttatttgggactcccttattcggttggtaggaataagagcgctattcttggttttctgaaagacaaaataagaaagagaattcagggatgggaatgacgaattttatctcaagcaaggaaggaagtgttgctgaagtcggttgcgcaatcaattcccagctatgctatgagtgtttttttgttacctttggatacttgtaagaatttagagtgtcttatggcaaatttttggtggcaatctgattctattcggaaacaggtgttagttggatgagctgggatcgtttgagccgtcataaacatgctagaggccttggcttctgaagcttgcgagattttaacttggctcttcttggaaagcaatgttggcgtttactagtcaatgatcgcttcttggtgagtaaagttttcaaagcaagatattatgctcatggttctttcttttcggttgagttaggagaaaacccaagcttcatatgga

SEQ ID NO: 321401 - DNA, 604 bp, Cannabis indica
taaaataattttaaaaaaatttagctcactctctttccatagctacatgtagagatgtattttattggaatttgtgcaaaaatattataggtaagctataaaaatgttgttggaagagttaaaataagttttgagctaaattttttaacttttagctattataaagacacttatgggagtgctcttattaactctaattaaaatattttattattgtttactgattttataatgaaaattcttttatctattgcatttttatttttggttttctttatttacattattaattttattcttgtatatttatatatgttattttatatttattttaaaaatataaatacaaattgattgattggtgatagtccttagtgtgttttattatgaattttgttaaaattaaaaagaaaaaatgtggacagaaagaaatagaaaaataaaaaatggagaaaacgataactaaatctttttatcatttatagtaattaaatatatatatatataattttagatagagaggcttcacatatactacatctgcttcagttatttgagatcgtttctggtcaacagttaatttcagtaagtcctctgtcttctt

SEQ ID NO: 321402 - DNA, 657 bp, Cannabis indica
gagcccatgagacatgcaaggcataaatgggatccaacaaaattctgtaaatttcacaaggacataaggcatacaatggatgaatggcgtcaatggaaagacgagatagagaaccttatctcgcgaggttacttttaacaatatgtaaaacgacaaggtaatggacaaaaccagccaaatttgcccaataactcaggcaaccaaagattacaacctccttcggtagaaggagaggacattttggtcatctcgggagggttgcatctcgctggagaaagcaataatgtccataagagatatatcaaagaagtaaaaaacgagtggtcagttttcgttccagaatcatctaagaaaatcaagactgaagaacctccaattgtgtttttagaggaagacacaaagcacgtgaggtatccataagtcgacccactcgtaatcccaatccagcttggcaacaaagtacgcagtagttgcagtcgacttctttacaaaatggacagaggccgaacctctagtttctaaaacttgcaagttcttaattttgtcatcaagaacataatctcgaggtttggaataaccattaaaatagtgtttgataacggaactcagtttgatggagagttattcactgtaatctgtgaaaggaacaaaattatt

SEQ ID NO: 321403 - DNA, 920 bp, Cannabis indica
aaaaatacatcaaaaaattgtattttctgtaaatagtatcataaaaatcgtaaaaatatttaaaattccgtacaatcgcatttttatatatttttttttactattttagtattttttttaactacactattaaaaaataccaaaaattgcatattttaaaatttttcaaaaatacgtataattaaaataatttttttaaatagatataatgcttataaacgtttttgagaaaatttatagtacacaatcttaaagagatgttttgatagactctttaactaatttgatattttgaataatttttcagtctaattttttttatgacgtatatgttgttgttatttaggctcccttgtaaattttaagaaaaattcaaatagtttacacttgctaaaaataaagttcaaacagttgtttattacgcacataagaaaaaataatcacacgcacaacaaaatatttaaacctaattttagcattattttttaaaaatttacatataatcttaaataactacaatatacacaatcataacaataatagactactatcatatataaacagataaatagtctaccgaaaaagtcccttttagagtgtcatttcgacttgcctaatcttaagttttatttaagagcattgatattaatagcattagtggtgtttagaaccttctaagggcccgtttggcacagcttttggaaaagctaaaagctgcttttcaaaaaagctgtgacaaaaaggtgtttggtaagcagttaaaaaacagcttattgaagaaattatggaaaagctacagctaaaagctaaagctggtacaacccaacttttagaaaaagctgttttgattaaaagactttataataaattatttttactaaaatttatttaattatttattatatattataaaaataaaa

SEQ ID NO: 321404 - DNA, 1429 bp, Cannabis indica
gttgcagatgcctataatggatggatttgaagcaactagggagataagaaaagtggagaaatcttatggtgttcatataccaattataggactaactgctcatgatccaaattctaaggaagctaagaagacaaaacaagttggaatggattattgtctaagtaaacccttgaagcatcatgatctgttaaaagccttggattccctatgaaccattaacaaacagttttgcttattttctctagctttcttagccattcaagaacaagggagaagttttggtacaaatacaaactcccattttagcagttttttcctagttaaggttttctaatctgttctcaatctcattttattcttcttatttaatagaatttctaaaaagaaacagggtcgtcttataataaatatttcaatgttataaatattttacatatttcagtttctgtagatgaaatttgtacaaacaatttagagataacagatttcatatactcctcaaaacctatcactgaatgtaacaaccactttgttctttctttccctgtactggaggaacctttgactcactaattttaaatccagtattactactgctactactagcttcagaaaccttggattctctactggtttctaaaaccttggactctgtactactggtactactagcttcagaaacctttaatttacccttgtcagcaataccaattttctcaggcatggtaccaatttgttcctttacatgatcttggtcatcagagtctacataagccttcttcaaagccatattgtcaagatctgtggtgggttgggaatatagctgtgacaagacaagtttcactcttggtttctctgattgcagcctcttagaaagctctttcacaacatttatattcctgtgaaggtaataaaatgaggaaatgctcaatgaaaataaacaaagaaaagacaatatccacattgtgattgtaccccaataaaaattattaaaaccaacctcgaatccaatgcagcggagaattgcttcagatcgtttatcatttcgaacacagataagcttttttcctcaaagagacaagtgttttgagccaatattgttgcagttaagaagcgaatacatttctccacattgtcctgaaacattggaaagcagtaagaaaagatcatttcatttctcactcaataaatcagtttacacaacttgtgttgaaaaacaaaaaatggctatttacaaaaatgtgggaaaataaaagtaagttttgatatatatggcataaaaacttaattacactaaatatgacattttttaaaaaaacttacaaatatgggaaaaagtcatgaggaatgccataaaaactttaaatttgtgtttctttttatttatttttatttttaaaaaaataaaatactaaaataaataaaaaat

SEQ ID NO: 321405 - DNA, 1531 bp, Cannabis indica
agcttgtcctgtttgtgaagagaaaacttgttctgaatacttgaaacactcaagaaaagtttgttacatgggacataggaagtggctgcgtagtacacataaattttgaacttggaggaaggtatttaatggcaagcaagagttggaagagccttcattacaccctttaaatggtagtgaagtacttgagaaaatgtctagaatcacgttcaagttagggaagcctaaggttggtatttgtacaaagaggaaggctcgccgaaaagccaaggttacaaaggagcccaaagattgttataaaaaaaatccatcttttttgaacttgaatattggcaaatcttacttgtacgccataatctagatgttatgcacatagaaaaaaatatatgtgatagtctgattggaactttgttgaatattcctggaaaaactaaggatggaattaaggctagacaagacttagttgtcatgggtatacgtagtcatttacatccaaaagtagagaaaggtcgaacatatttgcctcctgcttcatacaccctgaccaaagatgaaagaatgcaagtttacaactttttgggtaatataaaagttccttccgactattcttcaaatataagttcattggtagacatggaaaaatatactttaagaggtatgaaatctcatgattttcatattctaatgcaacatgtgctaccagtggcgattcgatctgtcttaccagttaagcttcgagaaataatcacaagattatgcttatttttaagtcaatatgttgtaaggtggttgatccactaaaaatatctgacttaaaagaggaaattgttgaagtgttatgtgagatggagaaatacttcccacctgcattttttgatataatgatccatctaacaattcacttagttagagagctaaaattttgtggtcccgtatatttaaaatggatgtatccatttgagcgatatatgaagattcttaagggatatgttagaaatagaagtcggccagaaggatgcatcgtggaatgttatattgtagaagaggcaattgaattttattctgaatacacgtcgggtgtacatccttttggggttaatgaagtgaacaatgttgagattcattatagaagaggtagtgttgtatgtacagtaagacgggatgaactagatgaagcacatcgtcttgtattacaaaatactattgaaattgagccttatattgagtaagtttatttattagttgtgaatttaataaaaatttacataattatttcactaacaatggttgtatggatatatgtgaagggaacattttacttggatcaagtctcaatatccatccaagtcaaaaaactctaaatggttacatgatgaacattatcatactttttgtaattggataaacactaaggtagatttgatgttgacttatctagtttgtatatagtaatatttttttagtaggttgtttgatagttacaattaaattttttataggttttgaatgaattgaaatatgcccaaaataa

SEQ ID NO: 321406 - DNA, 677 bp, Cannabis indica
aaaaaaagtctcatattattatttattgttgggtacctaaccttgaatcttataacatgtcatgttatatggcagttttaaaaaattatggtcaaccaaattaaaatggtaaatttgactttctttttccattaaaatttacttaacaaatttctctctttatctcatcttttttattattaaagtttaatcctttttttttagagtagtttgcatcataaatacttaagtttaattttcagttacaaataaatagctagtaataataattaagttataatttattgacacgtggcaattctgattggtccaagtcattaaatttttattaatttaaaaaaatttgttcaaatataccaataagataatgacacgtaaataatggcttaacatttaacggttaaatacatacagaattttaaaaatataacttggatattattaccgcaaaaaattaaacttaagtatttataccataaattactcaattttttattgaatacaagtggataaaacaagaaccaaaattcaaataagcgcatatatattactattttaggtgtgcctcaaaaaggaataattatatgaaatactatttttataaaaaaaattccatttttacgtttaaagaattttttttttatagttttttataaaaataacacgaaaaaaaatta

SEQ ID NO: 321407 - DNA, 2893 bp, Cannabis indica
atagtttggtactttcattgagagcgtgaatatcgtatctgatcaaatgccttggttaatacaagaagaaccccaatcgcacaattttcatctttaggtctcccttaatacccatagactgcagatctgaatgctcaggttccaaccacaattggaatcttgatgaacaccgtaaatgtgacaaatcttgtcaccaccaaaggcactacaagcctgaccactacagctggcaaaaatgatacaaacatcctggtggatctgaatcgcaagcccttgcgatcaagggaagacccaccattgatgccctaggaacaacaactggatctcgtctctggtattacgcaagagagataggactaggattttatgagcgtgcgattcgtgagccccatttggactttggagaggatcttgagtaagccagactcagagaagttgtaggccaagccgacctaactgaagaaccaaacactgttgattgcgatatatttgctaggtagagacgcgaattcctaagatggatggatgaccaggagtacatccttcgatctcaccaagtagagttggatcatcacaatagagaggctagtgaactgataaggtggttcaacttgagaatcgatggaagaggccaggatctcatcagagatatcagagatccacttcacggaagactcgttgacagatcagggagggcctaacgacatggtgacaaacttggttccttaggtaataggatagatcttctcctgccagaggaaccgcgacaacacccaaatcccgacaaccgttggcatggggtgccaactagggatctctagctcaatagcatcccctatcattcatcctttcgctcgccagccacttgcatgagaatccttggccagctagaggacaacacttcctccccaaggggagcgaggtggccagaggtcaattttcaaccgataaggaccgggagtaggtggaaacacctaaaaagctgatttgcaaagtgaaattgatcactttaaacacctaggtccaccaaactccaccaattggtgcgatctacctcctattaatgcacaaccaacatcagtcaacaagagagtcgtagctggcaagagattgccctttgtaggtttggccagcatggaagcattatgggaggctagaccttgccctttgcaggtctggctagccattaaagagtaatgggtagccagaccctgcccaatgcaggtgtggccggccaaggacaacagacatgtgtaggcctggctggctaaagccaacacctgtacttgggaatggctggccagggtctgcaattcaacacgagtctggccaaccttaaccatactcaatctcagagtatggccgaccatccctatctctttaaaatctgcaacccctccaaggagggccagttagacaacatgattcaaggcataggtggtctgaagccttcagaccttgaactctatcggtcaacgtgataactattcttgacatacataaatgccttgcccttgcccaagtttagtgttggtatggaagatgtatactaggcaagaggacccgttggcacacatcaaatacttcaagatgcaactcgatctgtagaaggttactggtgatgtgcgatgtcgcatattctcatccactttatttgaaatagctaaacaatggttcatcaaactcaccccaagaagattcaactttcggttgagttctcttgtgaattttacacacaattctcatcttttaggcttgtaccatcgtacctagaagaccttgttgaagtcaaacaatgacaaggagaacctttgaaggattacatccagatgttcatagtcgaggctaccaaagtcaaaggccttatttatgaaggccgatatacggccatactggggggcatactcccattgactgacctttggacaaacatctagaggatctctaccaacaacataaaggatttccttaatagagcttatggctttatcaaactcaaagaagtcataagacaggcctagttggggcatgtcaacaacaggcagtcgcgagacatcttgcagtctcatgacctacgaggcgcacttccagacaccaacaactctacccagagctctagtggcaaaaacattagaaataagtgtaacaccaataactctaggagtaacagtagcaaaaacggaagtataacacttctcccatgccactaaagaataaggaagagaagtacgtctgctttatctctttgacgaacaaacctattaggccatcttaatggccactcaagcaaaagtcccctacggaaaaccttttcctatcaaaagggagatgagcaagaaggacatgtttaagttctggagatatcacaacgactttggtgatgacacaaatgagtataagaatctaaagagggagattgaatacctcataaggtgaaacaatccccacctgtatcattatgtgcagaacgaccaaactcagaaacatggtgccaagaacagggatctaatgccaccaccagtggcagaacacctaggggtcatcattggtggaacccacattattggcgagaccagcaaagctagggagcgctatgctcggacactcggtcacaagcctaaaagcgatatcctcgctattgaagataggggctctaagcaaccaaagcttatagagcccacgatctccttcacaaaagaagacgctgctaaggtctgtttaaattcagtttcctacacaatgaccccatggtcattactgcacaaatcggcaacattaccatagcaagatgcatggtggatgatggagcctcctccaacattcttttcaagttaacatatgaaaagatggggctccaactcaccgacctagcgccctgcaaccaagtgatgta

SEQ ID NO: 321408 - DNA, 1915 bp, Cannabis indica
cacttgcatgcttgtaattcctttaatttattgtaactgtttattaagctgagctggacaatggatatgggaatttaatccaacagagtttttagaaatatttgcgacatatattttaagtttttggtttcataaacttaaatacaatatattttttttggatagattaaataccttaaggtacatttctgttactttcgtcactactattctattaaaacatattcaaacaaggggtatttgcaacgtacttacctgatgttttagatttcatcacttatatattacatattttttcttctagaagattaaatacctaaagttatatttacttgactttcatcactatcgatatatttaaatcttattaaaaacaaattatgttgacacttgtcaatatattagtagtttactatttatttttaataaaattaattattagataattctaaaaataaaaaatatctaaatattaataaaatttgaaaatgacaataacattttagagaagacgaagaagaaacacggagagcgtttcttgtaaataatttttttttataattcaataaatattatttagttattttttaaaattatttaataaggttgaaaaatacttaataaaaaatatgttttataattttacaaaatttaaaattatttaataggtttttttattgaaaatatgagtggaccactaatatgttgacacgtgtcaacttagtctatttcaatatgatttaatgaattagtagtgacgaaagtaatagaaatataactttaggtatttaatccgctggctgattttgaaatgtgttggctcggtatcgtacaagtttattgctgggggtcaagaagttgggtcgattgtccctacatgaggtttgaggcaaggtgatccattatcaccttatctctttatcttgtttgttgaaggtttctcggcgctgttaaaagactatgagagattgggtagaatttgtggttgtaaagttgcaagggaagctccgttggtgtctcatatgctgtttgcaaacgatagttacatttattgtcaggctacgaaggagggtgctaaaagtgtgcaagaacttttacaatgttttcaagtagcctcaggttagcaagtaaatcactagaagtctactctatttttcagtactaacactgcccatgatgtcaaaaatagaatctgctcttagatgggaatcaatgaagctggtgataacaacttttatttgggacttctgaatattttgggctgaaacaaagcaactctgctaggttttttgaaggataaaatgaggaaagaaattcagagttgggaagggagattcttatccaaagctggtaaagagtttctaattaaaaccgtggcacaatcattaccaagctatgccatgaatgtttttctcttaccaatggatacttatcaagagatggagcaactaatgtgtaaattttggtggcaagcttctgcaaaaaacaataaagggatacactggaagagttgggagagattaacaattcataaatccaagggagggatgggcttcagaaatcttagagactttaatttaagcttactcagtttgcatggctggcgtctcttaagtcagccagagtctttagtgggacgaattttcagagctcagtattataaaaatggtaattttctctcgacagacttggggggtaatccgagctttgtttggcgtagtattcttgaagctcaagaggtggtccgtgaaggggtaaggtgtcgtattggggatggctctacagtcaatattctttcggacccttggctgccagattccaaaaatttgaaggtatcctctactcatcctattttattgaatcaaactgtgagtgtgttaatgtctactagagatgttgcctgggatgtcgactt

SEQ ID NO: 321409 - DNA, 1096 bp, Cannabis indica
ataggatgtcgatattttttcgatggtttgtcgattatttttaatgatttgaaaaaaaatcaacttttacttattactaacacttattttgcatttgttttgttatacaaacattggtagtgatgaaggggctacatcctcgcccagatgaagaggtgtatgctcggaccatcacatacaatggtgctgaggtcctagttgagatgggtgttgatgaggcacaggctggagacaacacccaagaccctcaattttttgctagccaagctaagagagccgcagaacattttcaatctgctgttatttcagagactcaacctgctgctattcctgagactcaacctgctgacaaaagtgatgtgattgacaggttatataggatagaggaagatgtgaagggtctttacgcttctcagacagagttgaaggatgcatatacgcatagccacctagaagtgaaggttggccaagaccttatgatggagcagctaagatctatcattacttcactacagaatagaccagcagatctagcaccagtacctctagcaacagaacctcctgctatgggtggagatgatgaggtctttcctaacgggtatgatccctatcaggatgatccagctacccctatcgatgcatgtattatctacataggtgacattgagtcacagggagaaattttggctttagaggcagcaccacctgaggtttagtttaaaaggatgaagagaaagaggcctatttggtttgcagactacatggacaagaagaagaaacagaggccttcttcgacgtttgatcccctggctccatcggatgagtgattgatggatactttctggaagtggtgttcaagactcattcccaatcatcgactttgggatttgcacagtggtgattacggtccatcattctcttagaagctgttgacgcatcaggaatggcttacagattgcataagtaaactaatctataattttactacattttataagtcaagtaatctacaattaatatatttggttgtctaactactttctttaacctttatgtgcagcatataaatacaaccgtccatctactgaggaggcga

SEQ ID NO: 321410 - DNA, 757 bp, Cannabis indica
gcactcggatgtccataaaaaccagtgaaatgtaaagatggaccatcatgactttcgacaaaacaatcaatatgatttagagagtaattattaatagaaagagtaacatgtgacttccaaaggagcataagaccacccccttgcccctgccgtggaacctcaataccattaggaaaatgcaactgcttacgaaacttatctatattaccatactgtaatttagtttccataatgaacagaacacagggagcttgctcatgaacaagcaagcgtaaatgcctgaatgcactcgggttccccaaaccccgggcattccaacttacaaaattcatggttgagcgcggtgttgctgagcaacaaccgctgaaatttcaggcagagactcatctgaatccaaagtattggagttggaaacaggaggagccatggagaatccactcggagctgaagaatccgattgaatttgaatggcattggaacgacaacgcttaagaacatttcgaagagattccgaatcaatttgcctcttaaattgcttattaggattaaaattctcagagtcatcttcagaaatgagaatagctttgcctttcaagttttgtgaattagtctgaattggaatggaagaagtggtggacataatagtgctataactcagaggcatcgaagaggaagcaacagtggtaaaaggagtgcgaggagatggcttgacagagggagtatttggagggtaagtggctatcatgggtgaaaaagg

SEQ ID NO: 321411 - DNA, 2952 bp, Cannabis indica
taactcatcatcatatcatatatggaattggattatattattttacactatactttggatccaaataattattaataacaacctttttacgaaaacaaattattattattatgattcataggaattaatgtattatatataaattatggatgatcacgtgtcgtacacttaatatgtaaattataactatatgttacttaattaatcaaaaaccattttataaaaataattaatatgtgtaacaattttattcctttttttctcattctttgatggctttagtagggtttttggattttagtatatatatacttaaaaaccataataaatatagtaatgtatgattaattaagctagccatttaattagttataaaccaacattatatatagctatatatttattaggatccctgaacttgtcaattgttagtaaaattaaacagatcgacaaaaaaatttaaattaaataattttaataatttagaagcaaataagatatgattattaattagtacatgttaattaagtttaaggaagaaaatcttaattaattatctaattaatataaagttgctatttttataaatcaatggatcaaatttatataacacacttcgaaaagagaccaataataataataaaaaaaattaaaaattcccacaaatattattatatatataaaagtgtgtcacgtgagcaatttttgattagtttgatcaaaacattgacagctcaaagaaaaagaagaaaaaaagaagtatgtgtatacatttatgtagctggaataatcattataatatatatgtatatatttatatatatatatatgaatgtgagtagtcttattagctatggtttgatctgtttagtttttgatcacagaagaatattttggatggaagtaaaattatattgtaatgtatggaccataggagataagtttgtgatatggggtccactttagaatgatgataaatcataatttatatatatatatgtatctatataataatctaaatgagtaataatgtttttgttttgtatttttttgtttatggtagatctagtaaggtttttgggggcaataattttgatgaaaatgtggacaaaaggatatctgtcacacaacaatatatcataataatcataattattattattgtttcgatgttatatatacaagagatgactctaatggggtcatcttttgtacttgtggttttagaatcaaaacatatataataatgcacttgttcatgatcatcatcatgatcatttatgtatattcatctacttttatttatatattaaaatttaagaatattaatttgtggtgtttagatagtaaaaagtatgtatattgagtaattgtgtgataagaaacacttatatttataggtatatatatttatataagtatatgaccccactttattgagtcttattagccatcaacaattagatcaaagaaaagaaaattgacaatgttgtcaatcaattttgagtaatgatcgatgccacctcttacccacttagggttttcacttaagctcgaactaagtcgatccattttgagatttttttgggtcttagaaagaaaaaaaaaattattgaacccttgcatttttttttttgaaagagaacctcagttcatcgaattaggttaaaacagtaggattgacaggggcaattcctcctcaatacaagtcagatctctgcatatctagggataggcggcctaggcccgcgtctagggcccactcatttaagggactcaaataaaaaaaataccttttaaaaattatacatattttttttaatagtttttaaaaaataccatttatctttatagtaagagcccaaacattttttttgcttgtggcccatttcaactcaaggtcggccctgcctgcatctctttgcctaacaaagacagccaaattgttaacagagagcttatcacgattgataaatctaaagacataaaacttaagacttgaaagcaaagacaaaatagaatagaacactgcaaaaaggcgctagtcaaggggttgtttcttcactagagtcgtaatggctacaagagagccgtgttagaattttatgccctaaataatattcatttcaatataatcttatttgttatcaatagaagattagaagttattttatgtttacatgtagttttcatgttggtggtttagtttacaatttttgataaattcataacatattgtcacacattaattataatgatatcatcctagtagaaggtaattgtgattaattatatgtttcaaagtttatgtcctattcatcaatgtactggattatcactgttgtgataatcaacgataaagtttacttacaccatataagtgttatgttatttctagagcattagtaaagtatgctagtatcagatgtatggagtatacatcagactggaccgatattgaactcggtaaatatattataaaattatcattgtatctttcgaagtcaatatcacttagttgatctagatcaatatatatcttaatcctaaaatggttaggttcgatatcaactgtgttatttatgttcttagagttgttcattaaagctgataagttggatcgacccaatacttacatcttgggaatatggtaccgtattacaattgagtgagagcactaatcatagatatggaatctatagcttccatatagacatagaagtgaaatgataatttcctttcagcttgacttaatagagataaatggaagaactcttatttcagtaatattatattattttatttaaatatcatttataagaagctaagtgttttaagaataaaatacgtacattgaagggtagaacgataaatttgtccttactcgatgtaaacatctatagaggatctttgattatttagattataacaatggataattaatagtatatc

SEQ ID NO: 321412 - DNA, 1021 bp, Cannabis indica
agcgttagttgcactagggatttcaatacgattttttgttgcaatttaggttgcagcggtagttgcatatgaggttctatgtaaaatttcgcaaaaaaaaaaaaaaaaaaaaaaaaaaaccttattaagtagtaaaaaaaaagacccttaattatatggttgacttgtacctatataaatataggaagttgataggtgcaagattctaccttcctcttcctaaaaatgcgaggaatgaagaaatgtcaccaagggattccaccgggcatggaacacatgtgtcgtccaccgcagcgggtgctgtagtaggcggagcttcagacaagggtatgggtttaggcaatgggactgcgagaggtggtgcaccatcagcaaggattgccagctataaggtgtgttatagtggtggtggttgttcaacagcagctatattaaaagccatagatgatgccatcagtgatggggttgacatactctctatttcaatttcatacaattcaccctcttccaatagcttcttgaatgatccatttgccattggtgcttttcatgctgagcaaaatggtatcctctcggcttttgcagccggtaatgccggcccgactccttccacagtaagccacaccgcaccctggactgtttagtgtcgcagcttcaaccattgatagagatttcaggtccgtgattcatcttggaaactggccaaactgtcaatgtaagtttttgttatatcttataaattccatgtctagctatatatatatagagcattgttattaggaacagtagtgcttagcaccagtggcggacccagaatttaaagtgaggggggcgtaaataaatttaaaaagaaaatataaagtgtagttagtggggtttgaacctttaccctctaccctatttactaaccaccttaaccattacaccaaggttactattatgtacaataaatatcatcttttaatacatatatatgttgtaactaattaaaatacatatacatttttttctcgattttttt

SEQ ID NO: 321413 - DNA, 1370 bp, Cannabis indica
cttgatctgttgttgcttttgctggttgttggctccccgcacgttccaaacaaggaacttatccataaccaagagagggaccctcccccccccccccctcttgtgttatccattgttacaccattagccccctgtagttcaacatctccattatcatctatcatttcagctagcacttgaaagccattcgaagtgcttggtgccttgaaatcagatttttgctcttgcactttcttccctttcgatactgcctggtaaccctcttcatctacaatgacttcctcctttcttttatcttctttgataacccattcttgtttagaactattcctctttttgcattctacagctaggtgccccattccagagcaattggtacataggtcaggtttccattcatatttcactcccacagttgtattacttccatgttcatcttcaaactccagtaaattgggaaaattctggttcatgagcacttcaaccaaaatcctagggtaattcaaacgatccctttcccgagtgaccgagtcaaccatcacatgtttgccaagttgccccactattttaaagagagacctctgtccccaatatttaagctcaagtccttcaatctgaatccatatgggaaaaatcttgacatcctcctttttgaagtttgtatctgcatcccagggcttcatgatcaccggccttcgattgaaaaaaatgtaacctccattgagcacctgatcccggaattccatagaactgaatcgaatgatgaacactccataggtgagcattcgcaccttatccacctggtctttccatagtcgtttggcaaaaccttctaatatatgcagagggggatttgatcccaggacatagcatacaatagatggttgccaaaaattaacctcttcttctatgtcatctaaagaaatcttaactttgctagccttctctgattgattcaaagaatgttccagattcctattaattgaaccagatcgcaaaatagggggagtgaaaaacttacctctagctaaatcactgttacattgattattcacatgaataaactgcaacaaatcattcctcacttcatcaatgcgttgaatttccttcagcgaagatttaggagacaaaggaggttgaaacatgtcttcctgtgagttacagctccttctccctgcgattacatcatcctcatcctccgacaactccagaggagttataccaataatctcatcgatcgattttgtaagaatgacatcagagacagaatcaggacctttcttcctcactttcttagcagaaatcttagccttcccctgagtttttgacctagtttttgccatggcaccagcttcaagctgctagagcaa

SEQ ID NO: 321414 - DNA, 565 bp, Cannabis indica
ggcctaggaagagcaatgcaggtggaagatcgatgaagcatcggtcatctaatggtcatgtggtagtggaacctcgtcattgttcgatttgtgtcggtttagggcacaacagagctacatgcaaagctcgtgtttgaacctttcttgtaatagtttcttagttatctatatttattgtaatgaacatttttttagatcggatgtatgtgttgtatagttggttgctgtttaacaggattgtgtaaaccatgttaattttttaatagtagttatgtatttttttttaaaatgtttttccaatattgtgcgacattttctaggatgatgagcgactttttatgatatcaaacgtaaaaaagtaattttgtgcgacatttgcgtgactacctgataattttcacgatttataatttttgcgattgttaggctatatatgtgcgacatttgtgcaattttcttttccataatttagttgactaaatatttttcattatttataatttttttttttttgtataaatcaggacattatattgcacaaatcgtatttacaaactaaaggcac

SEQ ID NO: 321415 - DNA, 1440 bp, Cannabis indica
ttttattgttcctttgctaatctaataaaagatcacaacgtatgactttcactctcctattgagagaaacttctgaatgtgatctctttttctgaaagtgtttaccataatcataccataagaacacatgatttgaggaagagtctaaattagaatcatcatggtcaaaatgagtagcctttggcaatgcatagttgaagagaattgaaagttctgaccattcttggtttccagattgtatttacatttttaacacatcatcacgtttcaaagtggtcgcttcaaactcaacaacaatgcataaagcaaagcctaagaagctcatatcctacaatacgtgaaaaacaagtgtcatttatgtaaatattaatggtgaaaaaactatactattaaatttattctataagtaagagagatatacctttacttttctatccccatccccacatttgacaatgaacttgttgtaacttacaagtacaactacttctgcacatatacggttgatcatttgttagtagtagtcgactataagtggtttcacttgagtcttttactagcaaacatggcaaaccgttatatagcagaatttggaattttgggtattcatcaatcaccatactggaaatgttgcacatgttgaagatggtggttggaatagacttgagattcttacacccactcaagtatagcctttcaagcacaactagattctctattgatgatggcatctcttcaattcccgtgcttgttaaaagtctctttagattctgcataggctccaaaatttctggaaagcttttcaatcgcgagcaaccttcaaggcgaagtacccgaagagacttcaacttacaaatggtagttgggaggctttcaagtttcttgcaattattcatgtataagtattccaatgattctaactcacacatatcattgggaagttcccttagatgttcacacatatgtagatcaagtagaagaagattttttagagagaaaatagatgggtgtcattccttgattgctgtttttacttaaacaaataaattttatattaccaaaaatctccggaagagttgtgagattggagcacccattaagatcaagcaagttagtagataatttcctcacttggtaggatatcctttcagacatttcgtgtgcaacctcttcattatttataaattgaaccatcaaagaattatattcgtacatcacttgagattctttatcttgatcataaaaaatgttgtgaaatcttaacgagggaagattaactaaacttgtacaaccatctagatgaagcatgtgaagattcgcttgagagagatttgggagacaagtaagcttctctgactcagaaagaatgacatattttaagttgctaacatcctgcttatatagacaaaatgtagttaattaattatattgtaaattgac

SEQ ID NO: 321416 - DNA, 1543 bp, Cannabis indica
ataatattcgtaaaactgatgagagatatgctaaatcacttttccgagacaaaaagaatcaaaactaaagtttccctatcgatggataacatggtaataccctaaatattgcaaaaacatgaaaatttagggtaccctaaactggccggtaaactggttcctaaccggaaaactggttctatggggtctgcctagaaggaaccgatagaccgattctacaggaccaaactgaaccagttgatcggttcaatgcaaaaatctctaaaaacttcacaaacaactcatttcaaacccaaattgtctcaaaccttccagagtacatattcaagcctcaaagaacatatttcaagcaacaaaactagatacaaaccccagaaacaaaaactcccattaaagggcaatgtttgagctcttaggctcaaactttgtccaatcacaacaacaagcactacacccaacttaaattagctcaatcaacatcaatttaacctcagagcaaaaaattaatctcaactcgcataaacagaaccctaactcaaaattacatgaacaaacaacacctttctacttaaaaacctaaggaagaagagaagaagatcttacctcaccaaaatactataatcaaggctgctgaattcctctagaattgatccaaaatgaagaggaacactgattttccccctttggttcttggttaccaactcaagaagagagagagaaagaggttgaatttttaattatttttctaatttaatcaattaaagcctaaggaataaataactaataaacccatacatcaaacctattacacaaagaataagcttggaattacttaaaattcctagtaaatccataatagaaaagtagggtaaaatgaccaatttaccccttgcttcatctagaagtcaccttgactcctaagggcattttggtcaaatctaaaacctcaaatattccagacattcacaagtctatctaaatttcccccactatttgtaaaatactaaatcataagaaaagtgactctactggccaaacatcacgttctactgtcaccaggcataaaatatggaaaaacatgaaatctcacatataatataattagcacacctaaaattcaaatatatctccaaaatcataaaataataattaaaagttcacttatgaaactaaaccttatctatctactaattgtcatattaatgttaatcggtcattacaagtgagtctaggggtcaaggatgattggagatgtcaagatgatttgtcgtggagacttcggtctcgggacgactggggcttcattttgcattcgttgtgtgacatgtttgtaaagtttattttgaatatgaatataagttttaaaagcaggatcttgactttttttttggatatatgtatatatttataaatgtttaaggttaaacaaaaattttaaattggtcacaattttcaagaaaacctttgattaacatatgtgtgcacggtaattagaaagtcactatagcgtgcctaagcattagggcgttacaattttggtatc

SEQ ID NO: 321417 - DNA, 1209 bp, Cannabis indica
atgataaggaactaaggtccatgtctttgccttgcgaagagctcccatttcagtttgcatagctttattccaatgtggattagctaaagcttccttgagagtttttggttcagtaggcagaacagactctggtaaaggatgcttggtggccatatacgactttggtttgaaaataccatgttgtgatctggtgcgcattgggtgagttcgagtccctgtagtggtaacttgtggttcatttgtagaatgaggtagaggagatgggtgagttggtgcatttgggacagtggtgttattaggagggggttcataattgataatgggattttgtggttcagtagagggtgatgggataggtgtggaatgtaagtcaggatgtgtttggtgagatggggaaatatgtggagataatggtctggtggtagagtgagatggcagtgggttattttgagtgggtggagattgctcattaacaaatgaaccaaagttgtcaccagaaggcatatttgggtgagaaatatttgtaacagatgtaacagtaggaaaaatagcagtgggaaaagagagggcaggggaatgatgtacctgttcagttgagccacatgatgttgcaggaaataaagtttcattgaagacaacattccgagcaataaacattctgccttgtgaattttcacacaaatatcccttatgaaccgatgaatagccaaggaaaatacattgctgagatcgaaattccattttgtgtttattatatggccttaagtgaggatagcaagcgcatccaaacggtttgagtatgctgtagtcaggtatttgaccaagaaggcattctaggggagattgttgctgcaatacaggagtaggaagcctgttaatcaagaacgcagctgtatgaaatgcatgccaccaatatgaaaaatccaaacccgattgagctagtaaagtgagtcccatttctgtgatgtggcgatgtttacgttctgcccttccattttgttcactagtcttgggacaaggatgagtaaactcaattccttgatcattgaggaacctggcaaaagggcggtattccctccccaatctgcctgaacccgttttatgggaaggttaaattgcttctcagccatacttttgaacttaataaaagtatcaaaagcttgggacttgagtgtaagtggatagatccatgtaaatcgactatgatcg

SEQ ID NO: 321418 - DNA, 1435 bp, Cannabis indica
atttttgccaacgctttttatttagtgctggtaaaagttttaagaccaatattgatttgccaacacatgaagtaagtttcatttaccagcgcaataccaaatttttactagcacaaaaatgtactggcaaatgtgacatttcttgtaatgtttgttgttcatctcgctggtctcatcaatccgtatttattattcataactcgcccttatctttaaaaaggtgagttcgaatatttctactaactgtacttttcgaggcgagttgtttggacacatttagtgctttataatttgggttagtttattttccaatttctttacatgtgtcaataccaaattattgctcaaaatataggtataacaagtagtacataaattattgtgtaattaattaataaataaataaaattaaattttatatcatttaaaaataaagattgctagacatgaaaaaaaataacaataataaattattatatttcacattgctggaattttcatgtccacagatataatgtccagcgcaaaatggagaactaaaacttatcatctcatctttaatgacatagaaaagatttttcatagcatgaaatttgaatgcatatttttatcttatcaaaatcactatagagaactgacacatcaatgatattaattatatatatatatgtttacatttgaaatttgagaagcaatgttatgatatatgaaaatagaaatccaatgaaattcaacaattaatcatattcttcttaagcttcaaattaagttaccataataattttcgatcgttaatgtgcaaaacacttgaatagagcaaagtaaattaatattttgtcaagtttggacaagctaggcaaacaagtgtttaattttgtgtaacgtatgttttctgcattgtgtgtccacgtacataaagattcgaatcgatctatgaatgttaaaataataattttttaatttacatttttgttttgtttagaaatgtagtatatatctagtctgtatattgatacttattaacttttggctatgtgtgggggtgccttcaatttgtttttattaattaattacaaaaggcctagatagaagatagatgcaattgccacgtataagtgccaataggccatttgtgaggtgaggaggtagctagcttatcagttttttaaagggcatcgaccaccagacttactactgtgtctataacatggacaaaaatcaaatgtatatattttattcatggaaaaaggggagcagggggctaccagctttggctcctctgccctaaccctgagactgtgagaagtctatttacattcttagactaacagaggatatatatgccctctctttgaaaataaatattgtctaaccattttctttttattacattaatatccttattcttattatttttttttcactttgcaatttt

SEQ ID NO: 321419 - DNA, 1443 bp, Cannabis indica
aacagggccattttccatcctaatcatatcactgatttccgtgtggagaattctgtcagttattatttgcaggaatacagggatgcgcagaatcggatatccatatcatgtcacacctcccatcgtccttccccgaatttacaagttccagatgcaacgtatcaactttctgtggatgcagctctttctcaatcaactaacaagcatggatacggagcggtagtaactgattctaaggggacagtcattgcaactctcacggctacttcacattcagctctccccctatttttgctgaggccgaagccctgcaccgagcgctcctttggtgtcaagcagttcgatttccaattgctgttatcgcctccgactgccagaacttggtgcaccgtatccagaagttctctccagatcgctcagccctctcgggtctagtagccctcatcgtttcctctttgtcgtcttttccaggtgctgttgtccaccacattcacaggtctaccaacaccacagctcacgaccttgccagatcagccctcggaacggacaaagagataatttggaacaattttagttcctctccttgaagatcttagccctgctctagcttttgcttttgatcttctttttcaaaaaaaaaaaaaaaaaacaaaaaaaagtctgttggagaagtctttgaatatttgctaagctagaaatcagttgtaaatgtttctgtttgagtagataaggtctatattttttgttctgatgtagtcttgagccttcgggaaagtgtgtaacaactgtaactaatttgaatgtaatgcttgagctcaataagagaatttattcttataatgatattagtagatagtaaacagggtgtagccatgattcgtaggatatgtgcataatagaattatttaaactacatcaatatttattaatcttttgtagatttaatgtatgcatttaaattgaaagtgcataacatataattttactattcgtgacataaaaaaatattatttgacaaaatttgatgaactttttgctcaccgttagcataagcctttatatattcattaaagattgattatatatcggcatactttcataaatacttcaaaataacaaaatgtgactattaggggagttcgcggtgcggtggtgcggtttttaactatttttcaaatcaacccgcacgtgcagttttttcaatttctcaaaccgcacccgcaccgtgaaactaaaaaatcgataaaaccgcaccgcaaaaaatggtgttgtgcagtgcggtttatgcggtttttacgatttggactatcattaaataattaaactatcacaaatacaataaagtttgagcaacacttgtcaaaaataccataaggcttgaaaataaacatggaaaaaaaagtttcaagtttcaacaatacaataattagtaggcttaggttg

SEQ ID NO: 321420 - DNA, 878 bp, Cannabis indica
actcaaatcttacatattatcagttaaatttcctctaatattatattatattgggatgcattttagttgttcactaaatattcattatacaaaactaaccattgtgattgtaaatttcctttgtacagatttgtggagtataaatctgataggtctcaaagttatgagaataacttatagcctattaatagtatgtaattaacttaatagtcttatggtcttcatgagattaatagatgactatatatatgagattaatagatggctatatgagattaatagatgactatataagattgagatgagataacttatagcctattaatagtatgtaattaacttaatagtcttatggtctttatggaacatatcattgaactatatgccttgtctagacattttttattgtgtttatgtgatcttttattaacaaaggttgagtggaagaataattatgtgttcgtgtagttatttctgtgttatgctagaccttctttaaatgttcgtctagagcgtatctcatgagattgcttcatgaatgatggtgcactagctgaagttatcactttatttgaaaaaatggatgattgtaatccactagatgattcaaaccaaaaaacagaagtgacaaaaaagggagactgtcatttcagcgaatgaggcaagaaattctttacattttcatgaacaatctttaattttatgttttttaagtctattattttatttataatttctcttttacagatctttcactagttaattatatctcttgaatgtttaatctgttatataaattaacaattaacccaagatctatttgtatataacatagaacacaataataagatataataattaggtatgtgtacctgatt

SEQ ID NO: 321421 - DNA, 1115 bp, Cannabis indica
agaacaaaagactacatgttcactaattaaaaaataaaaatttttggagatcattaagatttttgattctgatctcattaaggttttagttgtgagatttttgtcacatatagctacaaaattaggaatggtattgaaaaataataaaaatatatgttgtgataataaatcaatcgggttacattttagtaacaacataggctctacaaagtcaaaggcacattgactttgaactaattgttattaaaataaaattcagagtaataaggtgtccatagagcatataaggacaaactccatattttcaaatctggatcattaaggatataccacttaaggcttttcaagagcttgttgctcataaatagatgtgatattatttaagattgtgctggtttagtgggagtttgtatttgagatgttccatcaaactgatacacatttatggtttaattttgtagataaaatgtggattgaagttttaagtactctgaatgttttctttctattgaggtttaagtacaaggttagaaagaattaatacatgattgatctcaattaaggaagaccggttggaaataagcatgctaagatcatatttgcatgtaatttctatgctacgtatccatgattgatttatgacatttagttataatgatttacgtgaccattgatgtgtttaactactttaaatgttacgaaagtcactttgatcttatattagtataatcaatggacgagattattttaaaatacctatattaattatgatagcaaaagttaagtgtttataaggttatacactgtcacaaaatatatgtagtccaagttggagattgttagattaaaatcctcaatatgggctcatatgtattggtgtattgctatttaaagtttgacccaaataatgtgatcattttagtgattgtgggtcattgggtattaagggtttatgggctaaattagaaatgtttaaaattaataacctctctatgaggttatataatagcaatggtctccaagaaataagagttaattctatcctcatcttctcccatcaagagagaaaattagaaaaccctaagtcttgttttcttggaagatcattactcaaa

SEQ ID NO: 321422 - DNA, 1219 bp, Cannabis indica
gtagaaaggtaaataaaataaggctaatttgtttattactttatttatttatttttttttctactatttctttcttttttttaccaataagttagtacacttattctcattatattttttacacatttggctcaaaatcactcactaattgataactttcatcactaaagtagaagttaggatttatgatctcctatagttaagtgttaaattttgttaaacataaaaactattttattcatataaaaatttttgttttataaaatattaattccaaatttaaaaatttaatatttgctctaattagaagtgtattaatattcacaatttagataatatagaaatttgaataagcactttttgttttattttaacatttcattatagataattttcgacgtacaaaagtaattattttaaattttaatattgaatataagtatgtactataaaatttttatttgatattaaaatttaaaatttggccacattacattcaagtcctggttccgcccctgcatataaacgaataagaatacataatttgtcttatacgattttgtctgattgttttcaaatagtgaatattagtttaattataaaatgcttttaagaaaatgaattaacattctaatatttcttaaacttgttatgggtacatatataatggacaaaacatgtggattatctaaatattatgtttattaaaatatatagtttaattgtatacgattttgtctaattatttttaaatgataaataaactaattagtttataaaatgcttttaagaaaatgaataagcgcgttctactattccttaaatggtcaataaagtaattagttttaaaaaaaattgaatgtgtgtataaatataaatatatattattataattttaaaataaatatgttagtttactttctagatattaaatacattttatatattatatggaaattctacaatgcacccccttaaaatagatatattgatggatccttatctgttttaacacccgtaaataattttttagttaaattttttctctatggtcatatacgctatagttatttaagacatcctgcaaaaattttaagaaaattgtaaaaagtttaacacgccgaaaaactacgttcaaacagtgggattgcacgcgtaactatattttatacgcatgtaaaataaatgttttaacattgttttctatattgtaaaatta

SEQ ID NO: 321423 - DNA, 1588 bp, Cannabis indica
ctctcaaccaataatcctttagttaaaaaataaaaaaagtgtcaaccaatgctatggtggagactcttaatttgattttcttgtagtaaattgagtaatgattgtcttacttttaatttacacacaaaaatgatattggagatttttataagtaggtgttttcaatatatctttgcaaaaattggtggtttaattaagaattctttaatggcatgtttactaataagtaatgggaatcaatagtaaggtaatcattcccttacatttgtttacttgcattattaaaattaggaaagggagaagttgattaaatatgggagaaaagaaagggagaacttcccccaccaattttgtaaggaatgccattaagggtaatggatttttattatttttattttattttttaatattaaatatataatgacaattttgtcctttaaaatatgtcttgcaaaataactaccatataactcaaaagggcaatttagtcaatttaagcattccgattacgtttcctaataaagtaaacaaaataaatcacaactattctatttctaaaaaattttagtaaacaacatattacaaatattgattccgattatttttcatttattccgttacatttctccattaatttattccgattctgattactgtatagtaaacgtgccataagtgtttcgataccaagagagcatttgattttattttttatgtttgtgtttatataagttgtaattatttaggtttataggtatatttttacaaaattataaatagtttataatattaaaaaaaataaatttaaataattacttactacatgtatataagaaaaaataatcacacgtacaacataatatttgaatcttattttttaactacttgaattatttttgaaaatttataagtaaccctaaataattataacgtttgtccatgctcagaaaaaaaagtcaggctgaaaactaaaaggttctcctgaatgccaaacatataaaaaatttaccgaaacacccaaattaaccctgaaattctccaagtaagaacttcgacgtcgccttttaaaaaggagacttgaaaagatttgtaaactctagctaggactcaatcatgggtcctcacaaagcccaacagcaaccaaatgtgcgagggctaaggctcacacgatcctcggcccaagtggcaccaatacgagcaagactcgtgtcttgcgggtcacctgctatcaatgagtcccgagctaggaaactctccatacgatcccaataggaccccgggctatctcacgtctacctaccttgaaccccatgtagcatgtccatcccgcaccaagtgaggctcgagccacacacctcccgcccgcatgcgaaagatcttgtatgcgagggtccttctcgcatgattctttggtgacaagtagtgctgtaaatacgagttgagattttttcacgacacgaaattggcacgagtccggaagccacgagcatggacactacaagaatcatgggcatcacaaacgacactatcattaacgccataaagtcctcactaaaagtaagagtatcaccaatgatagtgataaaaa

SEQ ID NO: 321424 - DNA, 1886 bp, Cannabis indica
agagaaaataacatgtagccatgatccatattaaataatatttcacataaaatcttcaaaattaaatcacattgcatatgagtgtaagcctatctttttctctgttctgtaattgaacacgtgccatctctccattcgaaccttctctcactctacactctacaatctttcaaattccctgcttaatttgtcctcttcctaccaaaacctgacacatgtttagctctctctcattttataataataataataataataataataataataataataataattggttttttttttttattttttttaattttacactcctaaattatttttttttttgtatttttagagaattatatttagaaacttctattgtaactagcactgtaacttaaatcgcaaacaaaaaattgtatagaaactcctgttgcaactagcgctgcaaccactttagaaacccaaaacgtaaatttgaaaaggaaaaaaattaaaaaaaacagtacataggataattccccttaaaataatttttttttttcagaaaataataataaattttgaaaactttatgatacacctatgtattttgacattttagaaaaaaaatttactacttttttttttcaataatagtatacagtgtaattagcagtaaataccattttaaatcttgtattttataaaagttaccaattagaccctttgttttgttaaatgacaaaatagaccctgtatttttcaaaatggtacaaataagacactgaactgattttttgtcaaaataaaaattaataataatccgatctaaatatgagaaaattatttatattttgtgtatctgtttgtgttagaaattgtcttcaagttgattatattaaaaaaaagttgttaaaaattaaactcagggtcctatttttactattttggaaaatacagggtcaattttgtcatttaacaaaacagatggtccaatcggtaacttttgcaaaatacagggtctaaaatggtatttgcacgtgtaattatttaaaacttgtaaattatttacttaaaaaaacatgtaaattacaaatatttttccggctctctccatttcgcaaacaaatattttctttgttggcagcggtagtttatttttggagtttttataaaaatattaaattttgagtaaaaaatttacaattttactgtcgcagagaatttttttttttttataaaaatactagttttttataaaataattgtaacagaacaattgaaacaacaatggacaactaaaaaataaccgtgaaataactgtaaaaatttaacacagtatacagtataaaacttacacaatatttttgaaaaaaatttcatcccataattaaaaaataaaaaagttaaaaattccaatatgtggtgtaaaaactcgtttatgttatatggaagaatcaaaacaatgtattttaaaatcaccaagtagatgctgtttcagaccaattttggtgctgttaagttgtaaaaagtgtttgaggaaatatatatttcagggtaattttacaatacatctccttaaaaggaatgtactgatgcactttctacttgtttcgacatctacaagaattttttagtctatttttttttcatattcatgtatgttatagttatttaaaatatattataaaattttaaaaaaattggaatagtttacaatatagaaaataatattcaaccagtctattttacacgcgtataaaagaaaatagtcacacatgcaacacactgcttgaacgcaattttgggcgtgttaaacttttctaaatttcttaaatttttacaaaatatcttaacaactatattttacatgaccataaaatttgactaaaaaattaatttcggatactaaa

SEQ ID NO: 321425 - DNA, 825 bp, Cannabis indica
tatcaatgcactttgtaccgcaattgtactagtattagtatacaaatcacataatacaacatgcatataacacacgtacaaatatatgtatacatattgtttctagatttaaatatgtcggtcaaccgaaatggatgtccacgcgctgaacagaggtcctaagtcacaattatgcaaaacgggttaacaacttgctaaaacctttttcggaatctaaactcaaaactagaagttactctatcgataaataacatggcaataatgtaaatatcgaggaaatacgaaaaacaagactatggaaaaattgcctaaataggaatttgctaataaaaaaatgtatgttattttctactgcaaaaaaatactaagtctcatttgagctcaaactaaccccaaattgataaaactctccaccacacctacatatagctcaataagcatactctaagcagtaaaaacagaaataactcaatattacaaaagttaccattgttgagccagatttgagttcttgaactcaaacttactcaataacttaactaaccaccaattccaactcaaataagcatcaatcaactcaaaattaacccacaaatccattcccaaacttgtacaactcagacagaacctatttcaaccttttgcatgcttaaatctaactaaaacttccttaggttctagcttccaattcctcttcaattcaaactaaaatccttgcgaaatgatgaagaaacatgttggattttctagttctttctagggccaaaatggagagggaaagactaagagcctgttggctatattttttaattttcagtttttaaa

SEQ ID NO: 321426 - DNA, 773 bp, Cannabis indica
atttgttgattcgtattccccaaggttgacgcatgtcatcctcttaaagtgccagccgaattttgggtataatagtatgctaactagccaagtgagtacacaaatcaaaaaacgcatcaatgagaacctaaaaaggaccaagttgcaaaaaacatcatgcctcatgcaagaaaaggaaagacaactcaattttcggtagaggatgatctcttatgggtcaaggggggtcgtttgtttgttctaaaggcaggcaatctgtggaggacgctgttgagtgagtgtcatgacacgttgtgaatgggtcatcaagggtggcataagacacatatccttttaaagcatgggtactattagccacacatgcgggaggatgtgctggactaaacaaggacccgtctcatctaccaacaagacaaaggggagaggaataagacgcgagggttgtcagagcctttgtggacccaagcagaccatgggagagtgtctcacttgatttcattactagtctatcaatgacaagagactcaaatgcgatcttggtgatcgtggatcgattttcaaaatatgcaaccttcatccaagtgtcaaagcagtgtccgacataagagacatctcaacttttctttaaacatagtgtaaagtactggggagtaccccagaatatagtgagtgactgagcctgaagattcactgggacattcgggtctaaactattcaagcttctttgatcaccaatgaacatctcctcgagctaccatccatagacagatggg

SEQ ID NO: 321427 - DNA, 940 bp, Cannabis indica
gtgtaattattaatatgcattaccgcaggcatttcatgaaaactgaaatatctcattaatgtaatcaataaaaagcctaaagcatgaagttattttaattatagtagttatgattttaaaatttaaatatatacatatatcatatcggggcgggtatctattctcctgcccctgccccgatcccgactcgagtatgaacatttaaacctatacccaccctgcccccaaaattcgactcctgtccccaccccattaagggcgggtacccgaacctgcaagtaaaattgtgatcccaatcaaaagctcccctctctccttcaaaattagggtttaaatactctattgggcctaatccacttagcaggcagcaatattgctcagtgaatgttgcagcccgtgtcttccaagtccacaatccttcgccatttttaatgtagtgggccgcgacattacttagtgaatgttgcggcccaagtaggcattttttgggcaggaaaggctcttcgcaccatgcctcaacatcggttccccaatgttaaggcatgtctatttttttttattctcaaccattctgtccattttttccacaacaacttcctgacattgaagtctaatactagggcgctactccaacatcttcagatcttcgactttaagggcctcgattgcactgaatcttctaaattattccatgaactattcctttggcgtactagcgacaaaacttcaattaaatcttgttatccatattaacaaactaaagcataaaatagaacaaaacaaaattaagactaattaaaatactccgaaaacatactcaaaaaatagtaaaatctagaacctaacacaattatgcttttaaagtcgtaaaagtttcgcaactacattaagtttagtcaaactaagttctccaacttctactatttttcaccaaaatatg

SEQ ID NO: 321428 - DNA, 1877 bp, Cannabis indica
ggcataaaacccaacattttccatccaagctcagtaaatggaacgcttggcaatagcgttgcatcgctccttggcattggcctcagcaccctcgagcttcatggtggctgcgttaagttcttcttagagttttaggcacatcttagacttgtccttagcctctttctgggctacctcaagttcagtcttgtgagccctcttcacctcctcgacctttttgtttagacgggtgatctccgattgagcctcattccactctttggaaacggcctcgcattgcccaatggttttctgaagctcgcactctaattgcttcaccctgttgagacatcgactttggggggacgaggaaaaggaaggtaggctataaaaaataaaaatgcatatgaattcttgagggttcttgaatttaaagaaaaaatgaagggaaggagaaggaaactaaccaagagactgaaggcaagacttctctcgagcatcttggctggggtgccactattgaccaaatcccagttgttgggttgaaaggatcagaaatggctccagtaggatgcagcatactgtgcacaataccctgaaccagcccagcctcgatgggcaaagcttcaggtgcctaacttgaagaagcggtggcctgatgagtttttggaactgactcctcgatgtgtgtaagggcaggaggatgagtctagacctgattctcagaaacctcgagatcttttgtctgcgaggcacacttcttatttgtagttgtcttactgggccttttgagaggctccacgttgacgtcaaaagaagtttttgaggcagctatcctctttttccccttcttgcttgaagtgtggagaagatcctctaaatccatatctgcaagataaagagatgcatttaacacttattaaataaacagaaaaggggaaaaatgggaaagaatccccacttaaagggagttaccataatcataagataatgaagaatgaggactataatattcacaaaactccctaaatcctgtgatcatgaatatgtcgtaggggtttaatggatctaaattccaatctggatgggtcgctctatccaacatagtcccatattgctcagcaatcccataataagaactagtgcaactaagttgaacgtgaaaggtgggtactaactatcaaatctatgggtgatgtaatctacgaggaaggggcccaaatgtaagaattatattgattatcgttgaaggttactaacgaagttcgactcaccctaagaacagtgggagaccatccacattgattaccttgtgatgcatcttcttcagcttttcgagggactgcattttggagataatttacccgagccggtaatcttcggtttcctcgtcagctgggactagaacatgttgccacgacgtatacttaggaaacttgtgatcacaactatactcgtttccagcgaggaggccaacaaacttcagattggctttgctcaaaagaaactcagctgatcgaagaccaaaatgaagacccagcaaaagcctgcgttgttcggccatctcaagagtggtggttggtcttttcgagaccgctattaaaagagaaaaaataagataggtcaacgaggccaaaattaaaaacatgaagtaatttaaaagcaagtatggaacaaacagttacttacgtattatgtgaaaggtagttgtgttgattggggaaaggccacttgtccagaagaagtcttccttgaaagtggtcttgtttggtaacccaacaatgatcctacgattgtttgtatgagtcccaaggtagtaaaagcctcttgcacaacgttttctcgcaaggattgccttaaccgaataaaggtagataatttccaggggagtgggacac

SEQ ID NO: 321429 - DNA, 759 bp, Cannabis indica
taattgtgtcaattattttatagtaagttatgaatttaccatcataatgcgtacaaaaggcctgctcaaatgtaaaagttgaacagacaaaaaattaaacttgtgagatgcaagtgaccaagagtcataaggctgctcggtcacttgggggcaactatacccgtacaaagcattggtaaataacaagctcaaaaaaaacataacaatttgcacatacaattactaaaataaggaaactactcatttaagaaaagatgacaaaagcatgatataaacccgggattaaaggctgcctagtcagctagttatctaaaaaaaatgaagtattaccaagtttaaagaccgcttagccattcatattgtatttaataaaggcccatgggctgaacagataaaaaagaaaaaagagattcacactgcaagagtcccaggttccttatacaaatcaacttggtccttagaggctggggtctcgatattctgattggtcggggctgtggaattggctgcctcggggttttctttggctgcttggtccacacaataactaagatatgcctatttggtattaccgaggtaatcaaagtttccttctgggttggctttccagaattcatagaaaacttccagagcggcagactccaagttctcaacctccttcagaagctcttcctcccttgtttccctggatttgacgttctcttccaagttcgtcttatctgtggttaaagtcgcgagaagagtatggagaccctccct

SEQ ID NO: 321430 - DNA, 838 bp, Cannabis indica
atgaagttttatcgttttatagttaatgtggtgctgcccattatatatttgttaatgctgtgattagtttcatttccaaccctagctaatctacttcatatttgtaaacagcatcaatactgtcaggttcaacgtctccccataaatgcaattcaaatgggaaatggactccttatttttttattattattctctcagaaaaaaaaaatcctagaaaattcatataataaataagaataaaagaatagttttttcttttctttttttttttttttttttttgctgatgaataataaaagaatagtttcttggcccttttgtgtgtttctgtttgcatttgtttttctctctttcttttttatcgttcttttcattctacttccttctttcttcaattccacgttcacattctgaccccttcttcttcctttctctctctctctgcagtaagttctggacttggtggcagcggctgacatggagacagtacagtagtcctttttattttgatggttctgagagttttgctattctcgtgattcttatttttgtttttatttttcgaccttgctaacatcaacaggtctatagtcccacagatataatatttcctattccattattcatgttacatgcacatttctgggaacattttccatgtaccttttccctataaatcaaacctatacaccactcttcaattcaaatcaacccttttttcatttccgttctaaaggcacctttcatatatattaaattcaataaccagttaaccacttggggctagctcaagtggccataagtgggtgtgtgagtgttggaggtcttgggttcgagt

SEQ ID NO: 321431 - DNA, 1115 bp, Cannabis indica
caaaatccaatatccaataaataattggattggatcggatgagtccaaatccattagatgtgatccaatgaacatccctagcgcctcacacacatcaccgtagcgccatacacacttttttgtcatttttcttatttatcgatttattcgcttcccaattttagcactttgctcaaatgtgtatagtttattctaattttatcataatttcactgttttaaacttaatactgcatactaaataacacatcaaatctatataaacttaagaaataaataataattcatctaattaatgaacaaaaataaatgtacaaatatgcactcgtcaacacagcaactctcttgaaagttgttaatataaggtttaaattaatgtagttcaatgtttcattcccttaacgaaatggatcacaattaaaaaaaaaaaaaaggtaatctttttgtgaattctattacacattcaactaacaaaacacaacacaaccataaaagtttgttttaaagggtgcggccttaatttaccatttctttcctaatccaaattatatataaactttttgtatagtaaaaaacaaacgcccattatgagagagagagagtctcgatgtacaaaacctgaaaatttgaatccatgacaaaagagaaaataactcaccatacacacatatatataataactctagaatggaatcactattaatggtaaatgcacttgtttttgagagtcaaaggtgagttcattttcttgggaatcataaccaccgaacactgaatcctcttatagaatttgggcttgaccaatcttcctaacacataagctcttgaacgaaccatgaaattaagtgtgagtggcaccggttgaagcggtactccgttcatgctcatcaagctggctcctcctccatacaatggaatgccactccctttcattgttaccttaatcgatctttgactttttcttgactggtaaaactttcttatctgcataccaacaataattattattattattacaaaactcatgaattagtcatgttgagttgagtagtagtagtagtaaagtaattgtccgtacggttccagtggcaactgtgagttgagaataggagagat

SEQ ID NO: 321432 - DNA, 549 bp, Cannabis indica
gggatttgaaaattgtaaaaattaaaaatttgggggaaaaatctcacaaaaataaaaaaaatttgggtgcatgatgcacctgcttcgcacgaggaggctgcatgcagcagggtgatttggctgagatttctgggcgtgtgcatagtttaggcgtgcagcatcgtgtctgaacaaggggcgtgacacggcttcagacagggtttcatcccctgtctgcgcgcgcatcacctccttgtctgaggcctggtgtgtgcggtgcatccactcgactccaaattcaactcaatttttcaaaactccataactttctcgtttttcatcggaatcgagttcagtgaaatctaaaattcttaatttttacaaggaatccaaataaaatattttttgaacaaaaataaaattattttcaaggaaaatttttgtaaaaacattcaatcatcaaataatacataaaccaacatgaacatatctaaataaacacacaaataatattcatcgttttaaatctatttttcatgaaagtaaatcattaccatggctctgatacta

SEQ ID NO: 321433 - DNA, 1370 bp, Cannabis indica
gggcataaaacccaacactctgccctcaattctgattgacacggatctaacccattttttgaagataatcaattctccattaggtagcagggttctgaaccccatttcaaagatataactaggccacacaactggctaagaattcttgatgctacatatgaaagtgtagccctaaagtcaaacaaaacaatataagtgaggttgttgataagaagctgacttgtaaatacagaagggctggctgcagcgtcagcttgggtgatagcaaatacccttgctagagtaggcttagctttttacttaggttcctctttgttcagctgaggacaatctttcttgaggttcccgactaatccacactaaaaataagctctccaattacatgccccaggatgatgctttttgcagcacggacactcacggtaggagtaagtctgacgtccccttttgccctaattttgacgaaacttcttactttgacccaaacttctagtagttgggaaaattcttttcttatgctcaatggtagaatcaccaccctccttaccaggaccagaaatagggagggtagtggtcccaccagcactaggggcctctcgggtctcttgtagaaactttactgcaccttctgcctgaagagccttgtcaaccatcttagcataagttgtggtatcattagctgtgataaccaaatcatgcctaattttggcattcaatcttgccaaatacttttccatcttgctgaaatccgtaggtactatcccagaagccaacttggccaaacgatcaaatttggttgtatattcagttactgacatatttttgcccttaactaaatctacaaactctttttgttttgcactatgaattgcctcattatagtacttggcgttaaatagatcctgaaattcttcccaggacatctggtgaattcccgagtgagagacaccatctcccaccacacaagggtgtgatcctgaaactgaaacgtggcacacaccaccctgtcgtttccatacggttaccaataataggttgttctgttggcaccgcgagaaccaatacagttggtagttgcagtggaggcaccacaggagcatcccactgcctaagccgaatctcttcctcttgttgagtgattcaggcttgcatctctgcaaacctatgctcccagtcaaaaggagcctgaggtagattttcttggccacctctttgagcttgaccgcgacctctgccgcgtccatgggggttttggggtttctacctcccagaccacctctagtctcagccattttaccctggcctctaacgtttcgatgggcatccataatctaggacttagtacctgcgaacccacaaggcatgtaggt

SEQ ID NO: 321434 - DNA, 1537 bp, Cannabis indica
ggttaattgtttcaccaggttggatcctaggaactggttttccgtttggggaagcagatttacaggtttgagcagttttttgagcattagttttgatgttttctcaatatttagggtattatcatgctatttatcgatagaaaaatttcttactttgagtttaggaccccgaaaagggttttagcaagttgcttacctgttttatgtgattgtgacatagggcctccaatgaacgcgtgattttctatacaggtcaaccgataaatttgaattacgaaaacaatgtaagactggcataaacaatatatatatatatatatatatatgaatatgtgtatgtgtattatatgaatgctgttattgtgatttatatgctaccaacactagtacgataacggtactgagtgtattggtacaacatatgatgttcaaagggtacaatacggtgctatcaatactagtataattaagtacgtagtgcatgtggtataacactcagtagtactcggggtacgattcaaccctaccgacactagtatagtagcgatacttagtgcatgtggtacagagatcgcacttctattaagaacgttcttgattatctatttagccttttggataggtgtatgggcgcttaaatacaagttggtaatatattatatgttatatgtttttcttactaaatctgttaactcacagatattattttcatgtgtaggtaaagaaaaagctaaggctaaacagcaatgagtctagagctcggggatgattatatttgaggtcaaaaaatatttaattcgcacaaatacggattttaaattttttaatccaatttattctacgcaagtgtatattttaaattcttcaatccaattcattccgtgcaagtgcgaatattttttttttttaaaaaaaatgagagttcattaattagtaatattagacatcatgatcattacaaaataagtctagcagaatagaagaaacattcaagctcccatattgtctgtgggtaagcttttatatagccacgttatgagcggtaaaattacaaattctggaagtacaaataaaaatgcagccatcaaaacatctagagagttccaaacaataagaagtgtagttctcaatctcctaacacgaagatgattaagagcattgatcactactctcgaatcgctttccatgatgataaacttgttactcttgagctttgccactttaagagctaaacaacacacaaccgccttaccacaacaagcatccacaaaatccaatctgaatgcattggtccaaatcaccttaccaaaattatttttagcaaccattgcaatgtaagaacttttcactcccgctttaatatcatacttaagttttagctaatcttgaggaggaggctgccactctaacttctaccgcaatgcaagtgtaaaaattcacatttacgtaattagattgaattcgatcttataaattagattacatgggagtacttgaacaacgtccctaccttttaataggaaaaaaaaacgttaat

SEQ ID NO: 321435 - DNA, 985 bp, Cannabis indica
tatattatatatattatatataccttattgcttgcctcgctaaggttaaggctaataactaataattggccaattgtttgcttgaaaaactgtccccccctcatcaaaattacaaaattgtctcattttggtttgggaaaatcaatcaatttcttttcttggtttttctgtcataaatttatattgtaagcatcacacaattaggccagcttatatatattgacaaaaaagaaaagaagaatgctattcttatcatcacattcacatcaccaaagttttttgattctatattggttatatatacgtgtgtaattaatttaaaaaaataattttaattttaaattacatacatagcgctgatgtagtaatgagataaatatccacgttattattacaggtgtgatcacaaaacttgatcaaatgatcattttacaatattgtgaataattcacggactatttttaattaatgggctgaaaattttagaggtacaatgatatataggtcgacatagttcaaaggataaaaatcttaaaatagccttttgtatatgagtattgctattgggtatcagtggtgcctagcaccttccacaagttgccccttacgatttgttagcgatattatcaaaaagctattttcttaagttatatagaattcaatacttaattacactaacaaaagtatgacacaaagtgctagacacgagtgatatctttttaacaattttctttgtatatatacttggcatttatttgttgctgctgaatctaattataggaccactatagtggggttatttatttattttagtgaatcttttatatgctacagtactcatcatcatcatatatgacattaaaatttatttgggtttcttatgcatatatatatttttataatacagagaatacagtaatgtgtgaagtagattatttaggttggtacccaaattctttacatattctcatatgttactgtcaac

SEQ ID NO: 321436 - DNA, 930 bp, Cannabis indica
gtttatgtcaaaggcccaaggtattattaaccttgaggatgcttacatacaagcctttggagtccctccagctatggcccttccgcgactgtacctagctttacacctcatgttctggctccaactttgactcttcttgggactcagttttctccaactgtgtacagacccactgcctccagtctcacacctacacatatccatttttctgggtatgaggcggcacagaccgggtgtagtgtggctctccgacaagcaaagatagaggctctagaatcaaacgtgagccatactcggaacaaaagaaagggtaaaggcaacaaccataatgattcttcaaagaagttgaggaaggagtatgaccctaaatacactgagtatacaaatttaatagacacacgagaaaatgtctacaaagcgacctacaatatggtccactatagaaagcctttgcaaatgtcgcacagaggaaggattaggcgtgactagaacaaggaatgtgagtgccatagagaaaagggccacaccactaacgagtgtgattatttgaaagatgtgatcgaaatgttggtcagagcgggacatctaggataatgagttcagattccaatcatttatcctggacagggggtggtccacgggcatatgattgttctgagacaataaaatgccataaatcctcaagagggtaggtcgttctcatgctcctggatcgtcactacttgcgctccctgctctaccagcgcaacctggggtggcgttacttgcaccaggaccaggaaccccatatcttccgagactcactccacctccagtggataacacatgtggccacagtctcagttggactgcaccttgcaggtgttgggaatattttaccaggatctagatttactaacaagtatgttgaattaacatcctaaatatgaa

SEQ ID NO: 321437 - DNA, 765 bp, Cannabis indica
gaagaagaagaagaagtggtagctctggggactaaaatagaatggtgggatctatggctgctatggctatggctgtgggagataaaggaaggtgcccagttgggagtattgggcagtgacaacgttgttggcctcaatcccatcgatgaatatctatgatgatgatgatggtgatgatgatgatgggggctggtgctgccgttgacggtggctgccgtagcagtggaagtcatttttctctgcaagagacactagaatctgtgatacgtcactacattaagattctgatgttatatatgtataaatgagattggataatgttaatctgagtggaaatgaaagaaattttatattttctggagttggagtttggaaattaagaaggtacgaatggttggaattggtgacagttgggaatggaagttggaccacacaccacacacttatacacatttggtttggttatccaacatgaaataaccaattagccacgtagagttgctctttttctcccgtttcactcgcacgtgccaactattcaacactaatttatttatttttatcttcaatagactagtattattttatgctatagtaaagcttaatttgctaagattaaattttggttttgcatgtttacttagggaattatgataaatgatatgatatttatacattgtttattaaattttggaatggaaggaagtagtgaggcctacacagggccggcccaagcattttgggggctttgtgcgaaattttaaa

SEQ ID NO: 321438 - DNA, 1056 bp, Cannabis indica
atttgctaaataaacgtttcaatgtgtataataatttgtgttcgtacaataagcatcaataacaatagaaattatacacaaactattcataaaacaccaacaattatatctttgaacttgccgccatatagcgcaatagcgagatgtgaataataactagtaataggtgagattagcaagacaacaagttattcatctcgggatgataaacagaatacatataatgaaagttattcaagatgagtaaacaaaaagcttgcaactcattgatccacatactcgtgagtaagagcttgcagctctttgatccacatactcgtgagtatgcttaagaagtggaaacaacttcaacgtttactcacctcgcttttgacgtatagaagtaactgcctcgctaatacctttcaaataacaaaggagaaccgcgagatgtattgtattttaacaacttaatatttttcctacaaagacggttaaaaaagacaacatgcaatcggcgagaactatccaatacagtcaacataattgtttatggataaagacaaagagcggttgaatggttatttaatattattccaagtgtgcaaagatgaaacatggagaatatccacatttcatgagcaattatgaatgaatagattccaaaagaataactattatctgtgcatctacaaataggtgaaaaatagataataaattgacaaaattattcacgcttttgtaataaaaaatataaaataaagttaagatagtcattttaagtaattgtaataaaaattcgtaaagtaaagtgtaagagtgtaataacttttaatataagtgatgtaataattattacaatttaatgtcattacaatagtttaaaaataaaccaaacattgaaattataatcatgatatcatattgattacaacaaaccaaacaattgtcattggataagtatgttatgtaatgaccgctctagtaatatggattagaaaaggcaattagcaccaaattttattattttattattatttgtgaattaaatttaaatgtggaccccaatatttagaa

SEQ ID NO: 321439 - DNA, 1130 bp, Cannabis indica
catctactttatattattttatattattttataacactatctatattaattgtttactgttattattgtctatattttattcttctattttatataatattgattgataaccaaaaagaaatggctagttagttattaataataatgaaagatatatataatgattggagataaaaatttcaatatatatatacaagatttgagatgcatggcgaactagcaataatgaaagatatatataatgattcccaatgaagagccgaatcaaggtacgcagctaattattaattaatggagcccaaagaagtccattaaagggttatagacaactttgttagcattgacacccataacaaaatctaaatgagcataattttctaccaactgaactaccaacttgtcttgctcgtgatctttaagcttctcaagtaaaacactcacatcatttacatcagaaagttcatcttttcctccatagctcaacagaagaggaaaattatttggaatactactcatattgtataatggaggagttggcttcccatattgcttcatgttctcgtctgcattaccataatcatacttggctattgtgccttttctaatcactactccaaaattaacatattaataaattgtgtataatatcctcgtttattttattattaaagaagatttgaggtacttactttgagcaagatggattaagttcctagtggcagttgactgaggatcaacgtctatggtcgagctattgatacaacaatttaatcctgtgtatatcaaataagttgaaaataaaagtcaaacttgatatatgtagatagattattttaaatgagtattgcccaacttcttaaaatttactataattaaaaatcaattttaaaaatattaatttttagaaatataattttaattcaatgaccgatgataataaaaaaaaattataatttttatgcttaatattactatttaattaaaaaatattttttttgcattatatcaaaaaatatatatttatatttaatattgcttttatccctctattgttaactcaaacttaattttttatttatctgtcttgacccgatagaacaacctcaactatataatgcaaaaataaagaa

SEQ ID NO: 321440 - DNA, 589 bp, Cannabis indica
aggccttcaacatcccctcagctttgcagcgaaggaggccttcaacatcccctcgactttgcagcagagaaggccttcatcatctccttagctttacagtggaggaggtatttatcatctccttgacttcatagcagaagaggtcttcataatctctttggctttacatcggaggaggtcttcttgacgattatcaacggtgtgttgtaacagtcgttggttgttctttagtcaaataagtatttgactaactcccaaattaatatgcccaagatgagggtgatttcttaccagtctagggtataccttagagtgattgtaggtgcagtctatatttcatccttggtcttaaccttagaggtcttcatcatcccttctattgtattcacaatggaagaggccttcttcgtctcattgactgtcttgatagcgaaggaggtcttccacctccccttcactgttatcacagtgaatgaggtcttcctcatcccctcgacacagttgaggaggtctttcgggataatgtcaacaatgtgttgtaacattcacattctacactttggttgccaaggagatggtcgataccagc

SEQ ID NO: 321441 - DNA, 1363 bp, Cannabis indica
tttaattttgttttagtagttttttcttctattttttataggattgggaatacaagtacacccgatcggaatactaccattccagagttataacatatggttattattctgttattaatgatattaaaactattcttattgaaacccaattaaaaatattttcaaaaattgtgtttggccattttcttcgtatgccagagtatagtatctatttccaactcatttatggtttgctgttgagggaggttcaacagccaaatgagttggaatttaggatttctttgcaaggcaaatatctgaggtttagtgttgaggagtttttgttaattactagtttggattgtcatattgattctgacattttcaagtacaagcaagatgataatatgcttgttaaacactgtttaaagggccacaaaaaattaccaagatttctattcaaattacttttgttgctaacaatcttaagaataatgatgatcttgcagtcaagttggttctgttatattttgttaagtactatttgtttggtggtcctcctaggaaagttgtttccattgaggaaatagatgttgatagtggtcgatacaatgaatatggatgggaaaaggagtgttttgatatgacaattcaatcattgaagggtaagattgattttggtcttagaaaggttatgcagaaggaagaagatggtgggtattataggttattgggtctttcgttggcgttgcaattttggtttttcgagtgttgtccatatgttattgggacacttacattgtattcaaatattggcattccaaggtttcttaattggcctaaaatacaaaagccaaaagtactccagttgaagatggataacatgaacaacctcgttttaatcggccgtggaaaaatgtatttttgttacaagttttctattgttgttttacattttttttctttagttaaatttttattcgttttcatttttatttttatttagtttttgctgtttgtctataatttgtttttttttttgttgtagttaaaactgagaaatatctctccaacatctgtggagagagtaagtttgaacctcgatgactatttcccgagtgacatgactttagactttattaaagttaaagtgaaaggcgcacgtgttctagattcaaagtttgttcccaagtcttttgttcaagctgaatttatgggtccatattcatcgaatgctcatgagcatgtcacctgtgttgagtatgaggaattgaaaaaagatatgtctgttgtcagccagcagtagattcttatgaattcttttgctgaaatgaacaagaagttggacattcttattgaggtattcattatgtttttttttttt

SEQ ID NO: 321442 - DNA, 1916 bp, Cannabis indica
tccattaagaagaggaggctctctccccctcctttgcttgacccctcttgatccatcttttgttgcccttccattcctgcagtatcatcattcagctcaagagctttaaaagtgttagacaaatgcgtatcaggcaaaaactctttattttttggtttccaaccttttatcactggttggaaatcaccaatattcttctgcaattctactcccatgtcctttgtcttactcttatctttcactaccccttcttgcttcttcccctctttccttctgcagtcgtccgatgtatgccccatcccttggcaatgcttgcaaacgatgggtttccattcatatttgactgccaccgaaacctcattaccatgctcattgtcaaaataaatcaaatcagggaaatcctgctgcattgaaacctctattagcactctaggaaatgtaagcttatccctttcttttgtaattgcatcttccataattggttttcctagctgccccactatcttaaacaaagattttccccccaatatttcaattctagatcttctagcgaaatccaaataggcactgtcctaatatcttcctttttttcgattgagatttggatcccaagccttcataatgacaggccttttattaaagaaaatgtatcccccaaccaatatctcatctctttcagcaatacttgtaaatcgaattatgaaaatgccatgtgaaatcatacctactttgtccaccttgcctttccaaattcgcctagcaaatccatccagtacctagagaggtggattggcaccaagtacgtaacatacaatagttgagctccagtaggaaatttcatcttcaatgtcatccattgtaatctggactttgtcctttttctttgaattgacaaaagaagagtctaaactcctcttcaccgagtcaggtttgagaatcggtggtgtaatcgtaacacccttcgagattgaactttggcattcttggttagccgcaagaaagaatccaaagtctgcaacaatctcatcttgcctctgcaacaatcgcaaagaagaatcaggggatagtggttgaaacagctcctggctcatatccttcaattgctcgtcatcctcttcatcatctgagaattccaggggagcgacccccagaatttcatccattgtcttcgtcttcttcacttcagccgatgaattcgaaccctttctcttagttttcttgcctgaaaccttcattttccccacattcttagccctagttttcgccatggcaccagctcgcacgggagtcgaacagagtgaagagagagggaaaaatctttgtaacgcccgtatttgaaattattatatatatttaaaaataaaaattatgtagatatttcatataattttaaattttaaatacttaaaatattcaacatatttttaatcattttttaaatttattagtttaactttgaattaaaataaaaaagaattatgtaaatattttatataaaaaaatttaaatttaaaatattataaatatttttaattatattttaaactttattattatttattttatatcttgaattaaaatagttgtaataaagaattgattactttccattttagttattgtaaatcgattcacacatcatatttttcgtaaagtttgggaataaaaaataattatatcaaatttacgaatccagtctatgtatagacacactcaaatttaattatgtgagttttgattaagaatatagttaattacaataaatgcattatcagatcagatatgttacctaattaagaaaagtttaaaaaattaaaaaatacgtttacatataatcatatccagatgacacaccaatgtggcaatagttaaattttttttttcttaaagatcaaaatctcaaaccttatttaaaa

SEQ ID NO: 321443 - DNA, 864 bp, Cannabis indica
tttatcggtttttttggttcggtttgggcgggttattcggtttaggcggtttacaaatttttttgtacagccctacttcttaggtgatgggttctctttaatacatgataaatcttcaaaatgcgacagtgttaatatcctaattgaatcaaagttttattttctcaatctatatttaataatagctatacaattacatatgtataggttcttacaccaattacaaattactaataaacctttacactaattcatatgataacaactaacaacatcaataatgtctaacactcttctcagtatcgtattattattagtgttattaagtatcgggtcccatataacttaagaaaataacttttaaggaatatcgctaaccaatcatagagcgctacttataaaaggtgcggggcactaaggttgttaaaaaaaaattacaaaccgcccaacccaaactgaataaaccgacaaaaattacaactcgaataactttatgaaaaattaaaacatccaaatgaatatattgggtgggttaaatattattctaacccgctcaaatcaatcgaataaaccgacttacatatttttttactaaaattatctattatatgatatataaattatgtttaataattaaattattttacacttaaaatttatattttatagtgtttaattttaaatttagactttattgttgatactgttgattgtatttgaatattgaagttataatttagaatttagggatatatttttttcttctattttttaaaaaaatgttgttaaatactttaatgtttatttaaattatatttgtattttttaacattaatttaaactataaccattttaatcttgaaa

SEQ ID NO: 321444 - DNA, 925 bp, Cannabis indica
atttactgtaattatttatttatgtttctaaggtttgttgagtttaaaattttgtgtagcttgcaaaaaaatacaatctagataccaatgaaaacaatccttatgcataggaaaaatttcaagacataagagatgcttatgaggtcggatattgtgcttttcattcttactattttattaagtagacatgtgttgctttctttggtttattgtaaatattaaaaatgtaattcaagtgaagcaacagaagattttatttgtatagacaatgttcgaacagaaggtatatatgtttaacaaggagttgagcacaattttatttgttgaatatatatattatatgtatacacacacattgttgtgcgcaatgtaatgatacttacattatatacaagatggaaaaaccaatattagcttattttgatgttatcctttgttattgaaaatcatttaatattaggatgtctttttctttctatgtatatatgtgtgtatatctgcaattatattggattataggttgctctttatttaagtttctaaaattaattaattgatttggtttcagagttagcgaattgaatttacccaaagcaagaattttttcatttgcaacaaagatagatttacagttcatggcttctattgttattacgaatgatgcatgacatttcccacttttttttggattgcaaaacctatttatgtgggttcatactcttttcattcttcctattgtattaagtagacatgagttgctctcttttcattcttctattttttttttttttggtttatttgtttagacaatatccaaatagaaggtatataacaaggagttgaggcgcaatttttcttgttggatatgtaagtattatatgttagacatttaattgtataaactgaaacatatatgattatgtat

SEQ ID NO: 321445 - DNA, 2409 bp, Cannabis indica
agctcaaaaaatgcatcaaaactcacccaaactcaccctaaacatgcatatatctcaaaatcatttcctccaaaatataactaacataatagagaatacacacatttaaagctcaaaatcaaagctcacatgcatcaaaatcagatttaaacaatatacaatattggcttcaaacttgagcaaaaaatcaacaaattcaagcttaaactaactatgggtcaggttgaagcctcaggtccattttcggatctcggtcttggatcccgatcttgttccagttttggtcttaggtcccaagccgagtcttaagtttgggtttggatccggattcggggttgtgtcccaatagtcaagtcctaggttccgagtccaaggttgagtcttgtgtctagagtctggggtcgagttttggttctcggtttttgggcccatttttgggtccaactccgccatctaggtttggatccttaaacttggtctacaactaggttcgagtttggggcccaggtcccccatctaggtcacagttcagttctcaggtcccaggtccgagtctcgggtcccgggtcccgatcccgatctttgatcccagtccaaatctgggttctagtcccagtacaggttagggctcggtcctagtttgggtctgggtcccagtcttgatctcgatccagctccgagtcccgggttcgagtccgagtctgagttctagtatgagtctggctctaggtctgggtctaggtctgggtctgtgtttcggtccaagtctgggtcttggtctgggtttgggtctgggtccgcgttctggtacgggtctgggttctggtgcagctcccaagtcacgggttcgggtctgggtccgggtatcaatccatgtcgaggttcgggtccgtgttcggttccacgtttagatcgggttttgggtcctggtccgattcttgttccaaggccttgattccggttcttattccgattttgggtcttgggtctgagtttgggtttgtgtgctggtatggaaattattcaaggttcgggtcttggtacgattccaagatccagacactaactaaaggtggggtccaagcctcgagtcgtgggcaagatccggatcccaatcttgggtcccggtctcgtttcgatttttatcctgggtcatggtccgtgtccgtgtccgggtcaaggatcgagaccgggattgggtcttaggtcctagtcccagtcttgggtctcaatctagttctaattttttgttttgatccccaatctaggtgttggacctgggtccatgtctaagtctccaatctcagtccaggtcctgcgtttgggtctgggtccaagttcgtgtcttggttctggttcgtatcaggagtcccgatcaaagttttaattcgggtccacgtcccggtccaggtctaggtctgagtcctagtcttattctagtttcgggaccgagatcgggtcctagtcccttggtcttgttcccgagtacaagtccgcttccggttctgcttctagtttcgggtcccgtggtatgggtcagggtttgggtctgggtttgagtctgggtatgggtccagaaccaaatatcaactatgggttaggtttaaaccctgggtccagataaggatccctgtctagtccctcttgggtcccaggtcccggtccttattcaaggtccgggtctggggtcaggtgctgggtcttcgtgccacttctgaagcctgggtccctggtccaagtcccccatccaggtctgggtccttggtctcggttcgagtctaggacccggtcggggttcaagtcctagtccgattttgggtttgggattctgatcacggtctgggtccagatatgggttcgagtctaagtttgagtctgggtcttggtccggttatatttttgggtcaaggtccaggttcggttacggttctaggtccaagtcctagttctggtcccacttcttggtcaaggtcaacttccgattgcggttccaatttcaggtcacaaggtacagtttcgggtccaggtttgggtctaggattgggttcaagtatgagttttggttcgagtgctggtgtgggttcgggtccggggctgtgtcccagatccatacaccgactatgggttcgatccaagccctggctctagatccagatctcgatctcaggtcctggtctggttccattttgggtgccatgtcatgagttgggtcataggctcaagtccatgtctagggtcgggtactaggtttcggtcctagttccgttgcccaagtccctatcctgatgctgggtccaggacccaattctggtctatgattgggtcccagtctaggtttgggcttaagtccttctcgattcgagtttgggtctttgtcttgattttatctgggtagggttcgggtttagg

SEQ ID NO: 321446 - DNA, 1113 bp, Cannabis indica
tcaacaaatcttctactaacctcggttgcagacttaggtcgaggccaatcctgaatcgcttcaatctttactgaatccaccaagatacgtttttattcaccacatgccctaaaaagcttacttggggcagctagaactcacctttcttgtatttagcataaatcttatactcccaaagaagttgtaacaccatccaaagatgtctctcgtgtgccttctctgagtcaaagaaaattaaaatatcatcgatgaagacaattacaaagtcatctaaaaagtccttgaacactcggttcaataatccatgaatgtcatcgaaacatttgttaatccgaaggacttcaccagaaattcataatgttcatactgggtacaaaaagatgtcttgggaataacctcctcccaaatcatcaactggtgataactagatcgaagatcgatcttagaaaggacagtctttccttgcaattggttaaacaggtcatctatccttagcaaaggatacttgttctttattgtcaacttatttaattctcggtaatcaatacacatatataaggttttgtccttcttcctcataaacaaaactgatgcaccccaagatgaggtactcagtctaatgaattttaaatccaacattccatgtaactaaactttcaacactgtaggtgacattcgatacgaacccttagatacatgctttacccctggtatcagatcaatttcaaaatcaatctcctgcttcagtggtaaccctcgtaacccctctggaaagacatttagaaattctcgtaccactggaacatgttccagtccagttaatgtttccttcgtagtatccaccacactggctaggaaatcgatacatccctcccatgaaaaatctcttgccttaagcgccgatattaatggtcttcgggatccttgaaccttgcttacaaacgcaaatgggtcctcaccctctagttcaaaagttgccatctttcttttacaatctatagttgcattatactttgcaagccagtctgttcccagtataaagtcaaaattctctagattcagttcaatcaaatcaactgacaattcccttccttccacaaacactggaaggga

SEQ ID NO: 321447 - DNA, 645 bp, Cannabis indica
tattaggtgagaagtaattctaagatgataatagaacaatgtaaaactttaattagttgtaaacttaacaagaatttataatattcatagcattcaaatagaaaaaataatttgatatgagagaaatcaataacaacattcattatcactaatcaagaattcatgttttatgattttaaaataacccttaactaaaaaaattactccatactaatcatcataactaaaatcataattgaaaataccgtaaggcttgtccaccagtgctcgctgttgggcaatgagtattactctctatgctgggctttagagtacgtcttgcttgctttgttgaaaatataattatttccttctcctttaagtttaaaatttacatcttagtcttgaaatagcacaaaaaccttgataacatatatcaactttcttaaagagattatcatttacaaaataaggtgtcatcagtaaactgaaggtggcttgccccaacatctcttccaacatattgtatatagacccatttctttcttttcctaacattctacaccaaaacatcaactacaacaatgaacaagaaaagggatgaaggatattaaacttttacctatatgatcgttacttttggtgatacttagttttattgatata

SEQ ID NO: 321448 - DNA, 706 bp, Cannabis indica
ttctagtgtaactctatttagttataacctcccaattaaaatataatttacttagtgccaagtgtattcttggatagatgttctactgtacctggcttgttaagttattatccatatgtcattttcatatttacactaattctttttttaaaaaaaaaaattaaaaatttaataacctagaccaatcaaggaatttacttaacatttaacagtcaagtacatacataaattttaaaattataacttaaatattattactgtaaaaaattaatttatttacaaccaaagattaaatttaagttttataccacaaattactttttttctgtttagtattctctcttgacaggaaagaaggaaatgattgagttatctttaagattattaccaatttataaactaataaattattaatttttaatatttttaatttaacttctcaataaattaaaaataaccacttaaaatatctatacaattaactcatgatattttaagacacaacattcacaatcactaaaattatcattttatgcagatagaatttcatataacaatacacaataatagatatgagctcatattaaaattttaattcaataattaaatctgattaggtgccatttttcataatctctattttattttattttacataatatcatattttttttttcttctgctttgcatatctttatatattaaa

SEQ ID NO: 321449 - DNA, 779 bp, Cannabis indica
agtagcacttgcgtagtagacagggtgttattaccttaggtctacgcaaatgagcaccgagctaatcgcataatcaaacattgcgaggtagattggaaatacttttctaggaaacagatttgagagtattgggagttgccccaggtgcatttttagagcttgaaaagcctctttgcatttgtcaattcattgagattttttattgccttttaaaatctaaaagaattctttacacttgtcaaaggaacgtgaaataaaatggtataaggcagcaacattaccagtgagactctgcacttctttaggctaagtaggagatcagatctctactaaggctttggtcttttcggggttggcttcaattcctcactgattcaccacaaagccaagaaattttcctaatcctacactaaagacgcactttagcagattggcttcaattcctcactgattcaccacaaagccaagaaattttcctaatcctacactaaagacgcactttagcggattgagtcgcatcttgtattaacacagtttttgaacatcgagtttagatgggagacatgatcagttgcatgttgagattttacgagcatatcgtcaacatatacttccatcatttttctagcagatctgcaaaaatcatattaactaatctttggtatgttgcacatgcatgtataagcctaaatggcattacttataacataaaaacatcggtctgtactaaggaggtgtgcttctggttggcgtcgtacattgggatttgattgtatccc

SEQ ID NO: 321450 - DNA, 575 bp, Cannabis indica
aagtttcagactaatacaaaagtcacaactatgaataaattccaacaagaacaacagaggaggtctttaacgagagttagtaaagcattgtaacactcacgagcagttctttgattgccaagaaagcaactgatatcagctcgtgccaggttttttacacgcaagtggtatattgacgagatggttcaaaggtcatacaaaattggccttctaagcatcacattgtatggagacatcacatccactactatgaatgtggccacgatggtagtctatcttggggcagtttgacattaagtggcagcttaatcttgccacgtggagttatcccagctcatatgaagccatacatcagctgtttgcatggctctaagtctttgagtgataaacccatcctctctagggtttatttaaacatgatgtttgaaggtactctgccatctatcatcactcttgccaccatcatatttgatatctacacctcaacaactaaaggattattgtgagggtagttgacatgatctaaatcaaattctccaaatgtgattggatcacattctgttgggttttatgcc

SEQ ID NO: 321451 - DNA, 1548 bp, Cannabis indica
tgttgtgactaaaatgtccgtgggtaaaagtattagtcacaaaaattacaatttattgtaactaaatgtatttttagtcacaatacttgttgtgactaaaattaattaaactagtgacaacttgtatttaaatactatgttttagtcacaagtaacattttgttgtgactaaaagtcacatttagtcacaaaaaattatgttgtgactaaaaagttatcactaaaagtagcagttttggtagtgtaaatcttccatcacattctctctctcttcccctctactcttaatgaaaatccactccaccaaatctgggagtggtgccatctccagccaaaccaggttcgtctcctccctccctctttctctctctccttcatctgccaaacctggtgccatctctgacgatcctcacaatttggcggatccctaaaaaagttctcgcaattgtcgcgggatagagactctgaaccaacgaccaaacacccttcttctctctcgtcccagccccaatcgtctcctccctttctctttctctctctcctccatctgccaaaccaggtgccatctccgacgatcgtcgcaatttggcagattcctaaaaacgttctcccagccccaattgcccaaacccagccctagcccaccgcaactccgacggggacaaccccagtgacacccccaagtactcccctctctctctctcatgaacttcgccgtctctcccgatcttacaccctccttctctgttcatctcatcctctatatgcttaaatattttttttgcaggtttcatcgatgacacacattttttttttttttgttatagaaaatatgcccatatcttagtttaaggtggtgtgggggagtttttttttaggagagtggatctatgtgattgttattgtgtaatatttgtttgaatcagattttttttgttgtttaaatatgagtttaaaagtttatgtaatttaattttgtgggtaagttgattctatattggtagtttgaaaaaaatatgattggtttaattttgattaattgtcctaattagatttaagaagctaattaactatatttttaagtttttataatttttttaataattattatttatttaaataatatttagatatttatttaaattaatgtagatggaccaataaaaatatgacacgtgttactttaatgaacacactcaatatttaacagaataatagtaacagaattggatagaaactaacatttggtatttaatccgctaaaaaaatatattatttaagtgtataatataaaaaacataacatatttataccgtaaatttccttaaaataattaatgaaatgcgattcgaaggagcaatctttttctattacttgtcctattttcatttctagaaagttattgaatcaagcacaggcataataaatcagtaaaataatagggaaatatgcacccccttaaaagaaatatatcgatacatctctatctgttttagtatccgaaataactttttagtcaaattttttttttcatggtcatgtaaatta

SEQ ID NO: 321452 - DNA, 649 bp, Cannabis indica
caggagctttatagtttttttctttatggtattgtactgtatcataaactgtggctctgtcgtaatgaagcctatcataacgggattcctgtggagtttaagttgctgcaaaagaatattgagacgtgtttttctgagcatgagaaggttcggactgtggagaatgagaggccggattcgggtctaggtgtggtggattacagatggggactgccaaggcctggaagagtgcggggtttcgtggattttgcctcggacagggagatgggggccatggctgtggttctctttgatgcctctggttcggttatggcttttggtgcgaagaaagtagtagttcatgatgtctttcaaggggaattggaggccttgctctttggagttacactggctcttgacatgcagatagaaagggtggactttcactcagacaactctatgctggttaaaggcttgatggaccgaaactccccgtcttggcgttctcatttctcttttgctaaactttatgatcttttactagttttgattgctctgtttcttggatttctcgtgttttaaataaggctgcgcatactcttgctagatggggtctgtctcattcttgtaatggtttattgtgtttttgggaggtgagtccccatgtgct

SEQ ID NO: 321453 - DNA, 574 bp, Cannabis indica
atacttaatttcatcacttaattgtgagcattattatgatacactaaagtatctaacacctttacgatatatcatcttctaattagttagcgattatctataatatttattaaactaaactaagtgaagatgactagtttcgttcactcttgtagtagatttgcaattaagtatatattcccagctctcatatcattattagggactagtatttttttttggtgtcgtgtcactaattaatataattaagtattagaatttaaataatttacaataaaataattaattttaaagaatattgttaattaattgtaaggtatgacttttaggtagtgctgacaaaatgggtcaaatacgataacacgactcaaaattcacacgagagttagagggttttggatttgctttaaatgggtttgggtcgtgttcggtctgacacgatcatctaacccatttaataaatatataagtcgcgtttggattgatactgctaacacgaaagtgacctgttataatgacctatttaaagttattttagtattttaacaagttataaatgagtcataaacgtgtt

SEQ ID NO: 321454 - DNA, 802 bp, Cannabis indica
tcctcacgatcaagctcgatcgtaccaattttttgtcgtggaaatcacaagttgttcccacggtcattgggcatgatcttgacgatatactattttctggtgttcctcctccgcaaaacttggttaatggtactatcaattcgaactatctgcaatggaagaaaagagatcagctccttctctcgttgctcagaccttcgatgtccgaaggtgttcttgcatcagtggcaaatcaccacacttcctctgctgtttggaaagctcttgaacagaaattttcaagccagtctcgtgcatggcttctgcaactcaaaggccaatttcctcatattcagaaaggtaacttgtcaatttctgataatgttgtcaaagttcaatctcttgcagaatctcttgctattgctggtacttctttgaacacccaagacattgttcttcaactcttaaatgatcttggacctgagtttgatgctgtggtatctggaatcacatcccgtagtgattctttgtctcttgaggaagtccaggctcttcttatgtcccacgaaagccggctcgaacatcacaacaacatgactgatcttttcgttaaaacgcaagccaatcttccatttggtgctcctaaatccaataacactcgtttttctccgccagctatttgaggaaacaactctgaatcatcctcaagattctatggtaaagggaatggtcgtgcctacattccacctcaagcccgattgatctatcaaatttggctgaagtatggccactctgcaccagtttgccattaccgttttgataa

SEQ ID NO: 321455 - DNA, 1247 bp, Cannabis indica
aaaaaaaaaactcataacctcatagtattatttatttatgccataaaaaagtaaactcttatcatgttctcatatattgtgtaatttctactttatcctatgtagagaggatgcaacttattgatttagttttattgggtatgagaaactagatgaatacttttatttttttttcttaaagtgttattaattaaagagattaaaaaatattgtaagacttttttatggggccaatgtggaaatagaagtaaaatttacttagcttcttgggattttgtttgtctccctgagaagtttggtgggttgtgttttaaagatggttctaattggaatcgaatcattcttgctaaatttttttggactatcatgaagaaatatgatgtgttatgggtgaagtgggtcaatacaatatacttaaaggggtgaatttctgggagtaccaactcccgcaagataccaattggtcttggaagaagatttgtcatcttggacatgtcttcaacatgcaaaatgtgttggatgctggtatgaaaggtaagttcaagactgctctattacataacaatcttattcaacttgatcatgagagctactttcgagttgtttggaatagacttagcttgcctaaatatatgtttattatttggcaaactatgcatgttcatcttcttactagggatctcctccctcgatttggtactgatgttgttgaaaatatttgttttgtttgtgatttgggaattgagagccattctcacttttttttcgagtgtcatttctcggttcaagtggtgattgcaatatttggttggattggctatcgagcatgacctttacacttcaatggttggctgagttctataactaatatggtagggaagttggaagctgatataatttttgctattcttgcgcagtgtataatatatagactaataggaacaagtgcatccatgaagggtactctcatacaaacctgcacttagttactgatattaaaaaatatattaagtgtcgattgtatagcttacaaaaaagaaaattaaatacttgtaattatagaatgattaataatattttggattaagtttttctttttcagctaatgttgattgggtgttttgattctgttgttgtaattaatgatttttttttgataaaaaaaatattattattaatatatatattggagaacattgtcccacatggattaaatgtaaaagcattgagccatatataagaacatg

SEQ ID NO: 321456 - DNA, 942 bp, Cannabis indica
tcaagctaatttttgactatgattcgttcactttgaggagatattatgaataaaagttctagatctctctttcaactttcccaaacatcttgaatcgtccgattccgaacagtattggaagagtataaccaaaacattatcagccatcccactagaaagcttgctgccaaaactcaagcttcaagcgccgcgacactaattttaaactacaaaaaaaatagtttttttttatatcttttttagttatataaaggttttttttcaacactttaagagaacgactttgggagtataaaatttagaagcgagaagcggctctaaaaactttcaacatatatttttatgaagagtttttctttttcctctatttgttattagatgttttcaatgattatgagtagttataccttttattaaagtgttaatagagattccctctggatcaaatatgtcccatgtgccaccaagcgactgagacaatcatccatttattggttctatgtccctttgcaagatcatgttggcagaggtcgagtttaaatatggtctcggtgtcttggacatcattttgggattggtttagtcaaatgatccttcaacactcttctatggtacaggaggaattattaatggtgatttgggcaatttggcatgcccgaaatgagctagtttggcgggagaaatcattgtcagcgacggaggttattctattggcaagagtagcccttcatcaatggagaaatgctcaacaaaggagattggggtctttatttgttccttcgggttcgaacatagacttggagcactgggtgaaaccgattatgggaaagattaaggtaaatgttgatggcgcaatctttgcaaatgacggaaagtttggagcggctggtgtggctcgagccatgatggtcggttcatagaagccttcacggccctcttgga

SEQ ID NO: 321457 - DNA, 717 bp, Cannabis indica
gaagaatccagtttcaagagaaggagattcgggctcagatcttggtgatactctgctacagacagcatacaagggttagaggtctgagtggaaggagccattattatttcgctgcaccctctgtaaggtttctgaaaccttatatgtgtttatttacattgtttaagagattcatatttaggatgttaaacaacatacatggtagtaaatctagatcctggtaaaacatattccaacagtcttgtaatggtgaagtagatgagtttcccaattaagcttcgatactaagttggattttgcagtagatctccacattcgttatttatttaatttgatgtttggttccattagagtggtgacaggtttagaatcaagacgtcctgagtcttgtaggacctacagtgtgaatggtctttaagttactataatacctttgttgcaatgagatatttttagaccaagaaagaagtgtaagttgccaagatcttttaacttgaattgtgcatcaagagtggagataaaatttggtaatgctacaacatttttagtagcaactataatatcatcgacataaatggtaaatgctaaaaaaaaacaatttgattggtgtctagtaaacaaagtataggtcatttttggactgagtaaagaccctgttgtagtaaagtggtgctgagttagcataccactatcttgtaagctgtttttaagctatac

SEQ ID NO: 321458 - DNA, 669 bp, Cannabis indica
tcttcatagtccatgagtccatcttatttgggatttgaatgcaaaaaataatgatatcagtaataataatctctttttttctctagattggctgtccattttaccctgagttttgtccatatttataaatgcacggggtgacagttatttgtttgggatctactcattcataatcgctcatgaaatgtgaacattccccacgtttcatttttatgcatatgagataatattaaataaccattcaaccactctttgtctttatccatagatggttatgctgattgtatcggatggttcttgtcgagtacatgttatctttctttaccatctttgtatgaaaaatgtaagtgtagagatataatgcttctcgcggttctcttttgtcgtttgaaaggtattagcgaggcggttacttcaacgcttaaaatgcgaggtgaacaaatgatgttatcattccttgaacacactcatgagtatgtggatcaataagtagcaagctctttgtttactcgttctgaacaactttgattgtgtattctacttattctgagatggacttgttgtcttgccaatcttacctattaatagttattatttaaatctcgctattgttggaaatattttaccaggatctagatttactatcatgtatgtttcattaacatccta

SEQ ID NO: 321459 - DNA, 1456 bp, Cannabis indica
ggatatcgaacaaaaacaagaaaatatataccgaccaggtttaatcaacaaatcaaaaaaatgaaaaatttcgtgaagggtaggttcgtaacccagaatttcaaaaatattgaattaagggctaatcttcattaaaccccgaacgggcaaagtgagaatcgaacattgcgaagttaaaagtcgaaatgtcgcaataacgaagttatatgatctattacagtcaaagttacaaagtttcaagcctagattttctactgttttcctaaaacaagtaaagaacaatcaaattttctacagtggaaacccagcaaattgaatattcgaaaataaaggggaaaaagatgagaaacttactcactgttcgaagctttgatgttgttcgaacaaagattatcggtcttttctgcttagattgcacgatgaattcaagagaaaaaaactactttttgctctgagattacttagcaagaaaaatggtaaaagtggtttatgaggattttctaccctatatttaagcgaattagtgaaagggtgtaatcgattagaatttcgaactctttgatttccccctaaaagtaaatattgggaaaataaaagcaatcaagtacctagagaagagtaaccgtcaaaagtgtgcgagtgaaaggtgcgtctcgatgtacagttcaatcatagcattaaatagctgaaaagtgaagggactcctggttagagtcacatcagatcatgaccagacgcatccaacacgtgtaatccagcttgatggatggtcgactcgagtgaagtctacgcgtgacttcagaagtcccgtgcagacttgagggcaaatgttatccccttttttgctctatgatgtggcagcacatgctggtcacacgtggacctaattccttacatctggctaaagcgatgttccgaacagagctcagcatacacctacacggataatgtcttcccagccgagcagtagacaatccgagcagcaatcagcactaaacaattccaggacttgcatcgtgaagcataaaagcaatccctataagtctgggattgtatcacagagatatggaaagctgtccaaatcccacaatctatgtattctaaatatgtaatatatgttcttacgaactatagacattgtaagcaaaaaggaaaccttccctcaagcatttagccctataaatagtgacccattctcactggtaaggtggtcaaaagaattaatttagagaaatctaagagagcatactcaaagatttcattgtgagaggttcaagagaggaaacactgtattttttgttcttgacttaatacaaatcaaggggagtaggctattaccgaactaactgggtcgaacctctttaaaatcatatgctctttattatttgatagttcatactgttggatatatttaaccaggatctagatttactaacaagtatgtttcattaacatc

SEQ ID NO: 321460 - DNA, 1131 bp, Cannabis indica
tcaagagtaattactcataacggtaatgaccgtttctaaccctcaccactcgttatccatgagctatgtatgtcactatcattgcctgatacagtgaacgataagtaagaaacctaaccgcgatttcagaagtaattactcataacggtaatgaccgtatctttctctcgattataatcgagtcataaacgataataatcgttcctcatcatcgcctcgatcacagtcgagtcaaaacaaatacatatcattaatctcgatcttaatcgaggtactaacgattataattgcttcttatttaaccacttagcggtgcataaaaacttttcttatcttagtttagaaattaggcatgcgggccgacctgagtggaataaagctcgacgatcccaggtcctatgtcacgacaataaaatttgataaacaacttatccatattccaaaaaaaaccctaattccataaccgaacaaattctaactctcccctggttcaaaataactcaaacatcattaaaatattctattctaagcactgggaaacaccccgaacagaaaccagttttgaagcttaaacttaaggtttcccctgctggcaaaatcagttgaccggtttcatagtacttgtgaaaccggttaaccggtttctctgctggcagaattgaaaactctagtttttcacaccaaaaaccaaccaaatctcctccaaacctattcaaactttccaaaacagttccataccacaaaaatattataaacaatcaatcaattcccaaaaattcatcaaagtaaagaaaacaccatgaatgagcaaacttgagttcttaagcatcaattctttcatttccaactttaacagccatgaaaatcctctaattaacaattgaacaaacctaatttatacttagaatcatactctgaacctcaacaattactcagacccgaaatcacaagattccccaacaaaaactcaatctaaaccttgaaaatcactataaactagaagagaaacttacctcaagattttagactaatgaaaattcctagcaagaactgagctgaactgagaagaaaagcttgatttccactggttttcttttaggaccagagagagagagagagagaggagaggag

SEQ ID NO: 321461 - DNA, 649 bp, Cannabis indica
attagtttattaggttttttttttcgaagggggagcatatcaaagaaggtgacatttcaattaattattttaatatcgagtcctacacatttttatttaattaataaataatataaaaaattactaatcaattttaaataggagtttttttatttttacacttcaattttacgaaattctacatagaaattactattgcaactagcgttgcaacttaaattgcaataaaaaattgtataaaaatccttattgcaactagcgctgcaaccactttagaaactaaactataaatttgaaaaaataatatataaagtaattctccttataaatatcactttaactttaacgtagagcggataccttaatatatataatgtgtcatattaattaaagaaaggactacatttaattaagagtcaatcatctgttttatattatatccatatatatatatatattttgcatggaaaggaagtacttgatgatgagtgacataaaaatgggtgcaaatttcccgagtcttgcattataaaacgaattaatgtgtatgtgtatagaatatgtattatttatgcaaaaaatatatatatatatatatatactaggtgattgttacgtgtcaagccacgtagtgttagttttatttaat

SEQ ID NO: 321462 - DNA, 2203 bp, Cannabis indica
tatattgggcgggttgataatcaacccgaactaactcaataaaaagaattatatatatatttattattaatttatatattatataatttatatacatatttataaaaataaaaaattcaaactactatatttttttttatgacgaatgatttgaactttaaatttatttcactatcacaataactaaaatataacaattgaatgtgaaaaaaaaataaacattaatgctcagtttggactggttaacttgactaaaccgacgaatttattgagcgggttgaaacttttttttttcttaattgaacggttccacttagatttttataacccggtctttacattaggttaaataaaatgtagcataaaccgaccaaactgatcgacggacacctctaatattatcatttaataatgcaatttctttgttacgggtgcatgttttaaaatcaaaaggataagccgacagatttttctaaggttaatactaattcaaatatggaaaccaaaaatgtgacgaaataatcatcgtatcatatcattttgctatgtccgtacgtaattgagaccacatatacaggataatgtttaataaattgacttaaacttcagcaattattgtatttgctaactatatataattatatactatactgtatataccaatgccataaaaaaaaactcaatttgcgttagccaccacattttctgtttgatcatcacttaattaaatatatataaaaaaaatttagttgtcggcaggcgtactattaattatataccaaaaatatgatttaaacatttactacacgctaataatttactgttttagtataatagttactgttaatgctatagtgtaaaccattatataaaaaagttatacaattttacaaatactgaaaacataaatacacctaaacttatacaaaattgacacttcacaataataattattaattattactccctaaatataatatatatatatatatatatattattagaaatttaggtagtacgtagacttttctaaaaagtagttcggggtagattttacagtattaagaaaactttattagtcaatttgttttataatcacgtaattattcatgactactttgtaaattttaaatttttttaaataatttataatgttcaaaattaaatttaaacaattatttaattaccactaatataaaaaaaataatcacgcatgtaataaaataagtaaattttattttcagtattataaattagtcacattttttttttaatttagaaataatagtacctgattataggaatcattcatttaaggggtgtactatagatttagacagaggtaggtaaaacttctaatatataaatacaagcacatacaaaatagttatcataattaataagttgcatagataggaaaagattaataatagccacatatatttatcatccaatatctaaccatgaagtactgcatgattgtagtacttttaattattctatcaccaaacccaaacgttaatggtagaaagagcaaaagtagtcatcattttgtgttggttcatggtgctggtcatggagggtggtgttggtacaaagtggctactctcttaaaatccacaggtcacaatgtcacagcaatagatctcacagcctcaggaatcaacccaatacaagtcaaccaaatcaacggttcagtggttgactacaataaaccattgatggatttcatgggtactcataatattaacaaagtgattttagtgggccatagtttaggtggtctcagcatatcccttgctatggagagttttcctcataaaatttcagctgcagtttttgtctctgcttctatgcctggtcttaacctcacttttctcaatatattccaagaggtactaatatctaataatataatcattatatatacattctaattaatataatattattatctctgtaattaattagtttaaattaacattttacagttttcaagaagatcgggttcttttttggattcaaaattcatatttgggaatggtcctaataacccagcaacagctttagtttttgggcctaattatttggcaacaaagatgtaccagctttctccaccagaggtaataataaggaaattatattgaggaaattacactctattatttttaccatttttttaaacattgtatcaattttaccc

SEQ ID NO: 321463 - DNA, 771 bp, Cannabis indica
aacattaaatgttatttctgatctatattaataagtaaatctgattatattcaaatgagttttatttagggcataaaacccaacactacgttccctgggttgcatcccagggtcttcctcatttgtacaaggaatttcctgtttggtggtttttggctgcctcccattctcatttctatgagagggttctagctgatcattagggtttttagggtaaacctcatttctatgagagagttttagctgagcattttcctatctactagtttgtgagccatgaggtctgcctcgtggtcttctcactccaaggtcaagttgattttgagtgttattctccaatgccgccctagctgcggttgcgtcacgctctaattcagtgttctgccagtttgcctcctctaagcagcgtctaagatggcagttttccatttaatgagtactcttacctctaggctgagcacctccacggctgggcccttcatttctcattccaggattttggccattcccatgttgagtcctcctcgaacgtgtagttcgtgtactgggaccaaccccaagttgggttctcctggaacgagtggtccgagtgctggggccaccctcaggttgggtcttcctagagcgggtggtccgtttgaaccgtaatttggcttagtaaaggcaattagcactaattcctgttaattttataattatttatgaatttatttatttgtcagtctcaatatttagaaatgaatattagagttataatttctcaattctgga

SEQ ID NO: 321464 - DNA, 1006 bp, Cannabis indica
aggctgttaataaaacatacttggtagtaaatctagatcctggtaaaatatttccaacaacaacagctaaagaacaagtgttgctgcgattcctcagccaaacccgcaaacagggcactctttagtatccaactcaatatgaaattgaccgagtttatcttgggtcaaaatctggatatttacaacttgccataagatgaagcgatgtttgggaatatttaaagagctccaaacgctgctgctgtaatggaatggctgttgatttatgaggctattatacagctagctagtcttgaatttcccaccagtccctgctgcttgtatgtccctgcttgagaatttgtccctcaaatgacataacttcttccaataccaactagtatcaagcttaagatcataggtccaaatggaaacattcttcaaataaagattgttgatccatttcacctaaagaatgtctcttttgtttgaaatggcccaaatgtatttagcaaggttagcttgattccatttgattccctccttaaatcccaaacccccataagcttttgggaggcaaactttttcccaagacgctacatgaatcttgcttctattgccgtttagctcccaaagaaaacctatgcatagccttttcaatgtctctaaatttttcattttttatacaattaaactaaaagaaatggggtgcttctacaatgcaccccattaatagatatgcaccaattcaccctctatctatttcgacattcaaaaaatagtttagtctattcttttgggatattggcggctaaaccacctgaactttacggtttgtaacacttaaccacaaaaactgaatttttgacggctaaactacctaaaccctggttccgttttgctctgcacacctctgtccaaaaatcacagttaagtgccacggtggactgtccacgtgtacacacttgtacacgtggcaaatttttagtggtccacgtaatattacttataaaaatattataaaaaa

SEQ ID NO: 321465 - DNA, 1308 bp, Cannabis indica
tattacaaatacaaataggttaaaattttcattttgtcgagtatacgggagataggaaatgaaaaaactacaacaaaagtaaacttaaaataataaaaataaagaacttattaatacttttctgaaattgaaggtctgaaagctctctttttatacacaacctttattttcataagcagcaattggcctaacactaggtttggatggaggaagagggacaaaagtagtgatgaattccctccaaacacaaatttcaaatcccaataaaaatgtaggattccatgaaaaagacaaaaacattacataaaatattttttctgccctttaaaaaattatatataattatattcaaaataataaaatagtaattttataatttattttaccctctattatttcaactaaacccctaacaccaaacatcacaaaggagagtaaatatgctatctccatccctcctaccaaacaaagccaagaaagcataaggctagcctagaaaggcacatgacaagccaaaaagacgcaatactagcttgagaaagtacaaaatgtaacttctgttttatgcaaaaatataagaaaaatttgcaatacaatccctctaatataagaaaaatttgcaatacaatccctcttggtagacacccaatctttttcggcatttagagagttttttagttcaattttatttttataattatgtacattataatcatttaaaaacacatgtaagttttttaaaaattttgaatccaatactgaaaataaaatccaaacaattgttcatcatgcgtataagaaaaacagttacaggccaacaaaatattaaacttccaaactcttctgaatgacaaagagtctacctaatatagattttcccaaaaacatgtaaatcaacaccatttatcacatttaaattatacttgaagtaatgcattattgtgcttttcttttcaattcagatcttcttgtaacttttgttaatccaataaggctatatatttgtgtttgtaaaaaaacatgaagaagaaaaacatctcttatcagttaaaatgttagctagttaaagtgaatttgtttaggctaaggagaaaaaagaagaaagggtattctgaaaactcaactgaaaatgaaataagcagccgtacgaatatggtgatgtatttatatattacatatgccaaaaaaaaaaaactccagataaagaataagaagaataaacataattgtactgtacttttttatacctaacaaaacaaaagaagaccaagtcaaagtacttagagagagagagagagagagagagag

SEQ ID NO: 321466 - DNA, 1916 bp, Cannabis indica
aaaattaaaatctagcatcatagtgaaaagaaaaagggtgcacaaaattaaggtcacttgattgttcattgctatgttgtgttgtgtgaagtgaaaagaactcccagcataagctacatggtacaagaccacatcaaaactttgacaaatactttactatccaacttaacccaaactgagaaacaaattacgttttcttttagcatgaatgacaaatgcttcactatccaaattaaccccaaaatgagaaacaaatttatgttttccttttgcttgaatgcagactgagataaggtgcaagagcaaacgggcaaactaagcaagtagaaaaaataatctatacggcatacagcaactcattgaagataactacatccaattatgcagtaggagacagaaaaataagaaaaacaatattaaattagttcctgaatagtggcttcattcaatatcctaaaataacaaaactgcttcacttctaaacaaacatgacatttaaatttggttgaaaaaacataaaatgcagatgcttcaaatgaccaatctctgtcatcaagaagtcctgagagaaatgagcaaacaaaaagatcaacttttagaacacatgcattgtccactaacgaaaaagaaaatctgaagtcaccaaaggctaagtagtatataatacaaaattacacgattacaatagcaaactgattcaaacttttaaaagtagtcagcatgtttcaagtttcagcttcaaagaatttataatcaagaatgagtatgaataatatataccaaacaaattaagtacaagctacagtaatgtcatttacaggcaaagaatatgaagtacaataattaaaaagttaccttatatattgctggggtacatgaacactctaactctagcacccttcaaaacgaaaaaaagtatggtcaaaatcccatcaaaagcaataaagtaattaaatagcagaaacattttccaattagcataccatagatttgggaggcaggttagaagtgaacttagcacgaacaacaccactgttaccgtgaggcctgataaccttgccccaaatgcaccgatagtgggaaccgtccttcttcaccttagccttgtagatgtacgccatgcgcttcccacagtaccatgaaacatcctcctttgtgtttactccctcaatctggaccaaagaagtgtttggatactggtttgacttggacctaattcaccacagaatccaaaaccacaaacaaaatcaatcccaaataaaaccctaaatcactatttcccatttcccctttcgtaaaacccaatcacacaaggcaatattctttcaactgaagaaatgaaacaaaaatatttgcaaaattgaaatcaattacctcttgtatccgaggactgttcctctgacgtagagtctgtgataaaatcaaagcaagaaaataagtataaatctaatgatactaattcgacgacaatgagaacaaaacaaaagaatgcgtgagagataaaaatgtggagctagtgagatggatcgcagacctgactcgctctccttggcgtcccttaaccatttttcgtcttagggtttgttctctcgtgatcttcggaagttaaccagagacgcctgcagaggagaagccctaaaaccctagtttgcgaaggtgaagaataagtatttatactgacctgcttcagtttattgatggatatttaagatctgtaaagcctatcaagctttgcattacgacatgaatatgttagggttgatttgcgggccgaagatttattaggcccgattcattctaattgggccttccccatatctattgggtttttgcaaaaatacataggaaaacttacaaagatactgtttttttactaaatgttttcaaaaatactggacacggcaaactttacattt

SEQ ID NO: 321467 - DNA, 815 bp, Cannabis indica
ccagtatttttctaagtttccctaataatatcagtttatacctaaaagtaccactgaccacaatgtcactcttaaccagcactatactcgtactgtcgactcggtactatactttgtactgctacaagagcgccaattaatactttatgaaattaaatatttgtcaaaactagcactatactcgcatggctgaatcgacactatagtttgcgttgccatgatgctaattcattcattctaaccactaccagtactatagttgtgatgcgaacccgacactataatttgcgccactatgatatcaatgcatttattctaataacataatcatgtatatcacatgcacacatagatatacacattatatattattcttacctcgtttccagattcaagggtgccaatcaccctgaatagaaatttcactcccatgccacatttacgtaaaatgggtaaacaaccaattattatgccacaacattaacgttgactgcataagagagatatacactcagaatactaaacattaagactttaatatgagaaaagataccccttatcattttagtacattgtgaacgactttaaagccaacataaaagagaacgaatataaaaagattcccatgattggtagtagggtcggccattaacccgtgcaaagagtgctaatgcacagggcccacaaattaaaaaagtccaatatgactttttaggattttttttttaattcaatcttccactaatttgatattctaaataataaaaaaaaaggtttttccttaatttcttttccttatttaatgttttttaatt

SEQ ID NO: 321468 - DNA, 1208 bp, Cannabis indica
agagctagaacttaccttgatctctagacaaaatgctctttaatccttgctgtaaatcttcaagaaattggtgaaaaataagtttggtcctttgggttctaggtgaggttggatagagagagattatggagagagaaagtgcttttggtttctaatgtttatctaatttaattcctttctttaattaataaagatcagctcaaaattacattaattcacccctctaaaaatcccactaaaaggaaaaagacaaactcaacttaaggctaaatacccaaatgcccttactttcttgttcaacaatctttaaaaattaaggataaaatagtcaaacccccttttactcgcacaatatcctgacatattaaattttcaaaagtcttgccccactaatcctaagatactaaaccgtatctaagtgactctatgaccaaatctttaaattctaatattatcggacataaaacatgaatgttaaaattcataattaacatgcatgacacacttagaatataataaaatcttcataaatgagaaagtatatggcaaatgtctactttttgataataattcttattttatactaatgcacatatataacataaataataattaaatcactaatgagtgactgatttccatgtttaaatatgtggtcattacagatccacatttatctatttcgacatttgagagaattttttagttcaatttttttcatggtcatgtacgttgcagttatttaggacattctgtaaaattttgagaaactcaaaaatatttaacacgacgaaaatagggttcaaatagtttgttgcacacatgactcttttattttaaataactaaaataatatacattactttctatattgtaaattatttcgagttttttaaaattttgcaagatattataaataactatatataatgtacatgcttatgaaaatgcttatgaaaagaaaatagattttttttttaaaagccgaaacagatagggatgcatcagtgaatcctttttagagagtgcattgtgactaaaaggtgcgtgactaaaagtattgtagttacaaaaattacaatttgttgtaactaaatgtatttttagtcacaatatttgttgtgactaaaactaaattagcgacaacttgtaacattactatgttttagtcacaagtaacttttagttgtgactaaaagtcacattta

SEQ ID NO: 321469 - DNA, 1607 bp, Cannabis indica
ctaggggaagaattccagaggaaggagtctgagaagatgcagtccaaccagacagtgaagtccaaaattagccaagtcccctccaaagaaggagtcctcctcgaagaggaaaggtggtccgcgcattgtatattatatagagttggcagtccctcgggaccatatctgcgccatcgaagaaaagaacggggtcttcaagaagcctcccccaatcaggggaaaccgcaataaaagagaccctataagaaattctataagtatcacaaagatattggtcacactactctggaatgtttgtttttgcaggacgaatccgaagaactaatcaggcggggaaagttcaacaaatacaagaaaaatgaggaaagtcatccctgagcggatgacaaagaagagaatcaaaatgcgactggtttgaggactcctcgcaatatcctgactattattggcttactccatatcgcaggagattccaggaagtcgcaggatcgatatgcgagaaaggccaaagataatccgctcaccaatgtgaacaacttgagtgaacggccggaagagttgttcaaaagggaatgtgatgatatcaccttcatggaaagtgatgcgaggtgggtccaccacccacattctgacgcgctggttatcgtcgcaaacaatgggggagataatgtccaccgcatactcgtggacaatggaagtattgtgaatctcttaaatttgcaggccttcaaacaaatggggttacatgagaaggatctgcgacttgtggtatcaagtatttatggtttcactggagacgtcatcacattaaagggaatgatcaagctcccaatcactttaggaaccacacccgtagtagctaagtcaatggctgacttcgcagtaattgaccaacactcggcatacaacgctgtgattggtcgacctatcgtgaaggagatgaagatcttgacgtccatctatcatttcaccatgaagttccctaatcctgctggagtaggatctatgcgaggagtccaatcagacttgcgagaatgctacaacacagcagtaaaacttgcagaaaagaagtcagttaatgtcatttacttgctagagggaccgcctcctcgtcaggaggtattcagaatagaagaaataacacataaagacgaaccagatttggatcctaggatcctcaactacgccacaaccgcccaggttgcggaggacactatcgaggtacctattgtaacaatagacaataataaagttttgaaaattgactctaaactaacttttcaacagcgagaaaagcttgtcacttatctcaagaaaaaccttgatgttttttcctggaaacattcagacatggtcgaaatatctacgtaggtcatgtgtcaccgattgaacattgacctcgaagtgcaaggtgtccgacaaaagcgctgcaaaatggaccccacgaggtaccaagcgctgaaggaagaagtagactgccttttggcatgcggcttcataagggagtcgttctacccaaactggtaagcaaatcctgtactcgtgcccaagcctaacggctcatggtgcacatgcgttgatttcactaatttgaataaagcttgtcc

SEQ ID NO: 321470 - DNA, 623 bp, Cannabis indica
ttggattttttctggattggcttcaactacactaagaacaatctctctcataaataactctttttggttgttccttgatgtagctttagaaatttcacaccaatctcctttgacgattaatcaaccatttatccactattatgtaattaaaagtattatttctaattactcattaatttcattaaattaatttgaacaccttatcctgtctttattaattgtaattaaataattaaatagttggatttatttaattatttaaattagaaatattttaaaatattttctaaacaattaattattaattcatttctaaaattaattattatatatactagatcacatattattaggttttaatttttttttaattaactaactaaagacaagataaatgtgcgtttaagttagtttaaaatattattacaaaatatttttgaaaataagttataacaacctataaaaagttttttaggaaaatagctaatatatttataaataattatcctatttattcaaaaaaaaaaatagaatcattggaaggagagttctacgagaaagactgaatgttaaagttgcaggaaagatacttattcagtctaaggagagttctatacattttt

SEQ ID NO: 321471 - DNA, 507 bp, Cannabis indica
cctctttctctatgttgacatatatttgaccattataagttggatttcctccaaatcctccgggaagtttatggaaaattatttagtgcagtagaaatcttaaaaggtcgttctagtagattttttattagtctcggcactgaaaaaagagacattttagttcatttttttttatgtgatcgcatatattataactatttaagaccacttgtaaatttttaaaaaattcagaataaaataaagtttaaagagttacttactacgcgtataagaaaaataattgcgcgtgttataaaatatgtaaatcttattttcgattttgtgaactatttagaattttctaaaaaatataggtggtcctaaatagctacaacgtatgcgatcatgtaaaaaattagactaggaaactcctttcaataccgaaacagatagagaatctatcgaaacacctctttaaaccctttagtatttatggaccatattgtttttgtttttcgtttacttttt

SEQ ID NO: 321472 - DNA, 1220 bp, Cannabis indica
tcaaattccaaaagtttacttttatccctatcttactaaaacaaataaaatacgccccctcactttaaatcttaagttcgctactactataaatttattttcttttttatatttacaaaacatcctatcccacaatttgagaatgtgattgacacataaagtttacagcttacagtagaaagaaaaagtgaaagcgaaaatgtaagctagttcaactctgtgtaaataaatatgttaagcgcttcaaaaagaaagaaaaattaagccctagatttacagttctcaagaaaaattttcaagtagcgtactgcttagctttacctccagcattgtcaacagtgcataatgtcttccatatatcaatgttgaagaagtatgtgccagatccaactcatgtcttaagttttgaagctttagagctgtaaccagatttatcttatgaggaatatctaattcaggtccttgataggatggatagagtccttcaaaataagaccactgttttggtcaaagtactctggaggaaaaataaggtagagaaagccacctgggtgttagagtccgacttgagggctcattatccgaagttgttaaggttagagtttgaggaaaaaattcttttaacgtgggaataattgtaatgaacacatatttagacatgaaaattagcaaacaatttgtaatttattagtaaattatttaatatttgtgattatacgtgtattagtataaaataattttattgtcagaaataggcattagtgatataatttttcaattgcggagattttttttgaattctaagtatgtcatgcatgttatttatgaattatgatattttaacagtagaattcgacgatttggtcattatagtcactttaatacaatttagaagcttagaattaacaggaaaagatttatggacagttagaatatcagggttatacaagaaaaatgggtatggccatttaacccctagtttgagaggttacttaaaagtaaagttaagtgtattacggtaatttaccacataagtttgattattattcaatttagtggataattttagtaaatggaggattttatgttgaaatttattagaagaaattagaaagaaattatgattttccgcgtttaactcttataaatattaattttatttacaagtgttaagcgcgaaaaatcataatgtcacatttttatttaatacttgaaaatgt

SEQ ID NO: 321473 - DNA, 1097 bp, Cannabis indica
tatttatatatattcccattatgctagctagctaaccgtgttgcccaacactctttatctataagcttgctttgttggaagaagactgtgtttggtggctaggttatcatctaaaatttgttattttttattcaataatttttttggtacttttttccctgttgagatttttttttcttgaggttacaaaaattttctaaaaaaaattagttaattattactaattaatatataatttctttctattttgttttgcagggtaagagcaatccgtactcaaatgacgagatgaatattctgcgtgatcagtggattgaatacattctagcacatgcagtgcaacaagggctattatgattagtttttgtttttatttatactttacactataattagttactttcatataactaaagattaattaatgttgatactttatgtttgagtatgtagtttgtatatatttcagtttttgttcatttttaatttatgtttatactttaccttaactaattagtgacaatgtataaattaataaaaataaattaatgcaggagaaaaaagcagaatttttttattttttcccctttttttgcaaccaatgacgggcaaaaactgtcgttgaaatatacgaaatttaaaatcaacctgaaaactttactataagagacggtttacaaccgtgcctataccactataggctacggtttaaaactgtggcctatagtataggccacggttttaaactgtgggctatactataggccacggttttaaaccgtcgctaatagtgttcactataggcgacagttttaaactgtggcctatactgttttcccgacagtattcaaccatcgtcttttctgcctagtattcgcgacgctcgtataggcgacggttttgtgaactgtcgggaattctttacccgactatgtaaaaccgacgggaattcaggattttttagtagtgtctggatttgactgattttgtgcatatattaaatatgtatattaaaccataaacatgtaacatacatgtaatcataaatcacttcaaatttctaaattgttaactaatcagattgtaatgagttttat

SEQ ID NO: 321474 - DNA, 1833 bp, Cannabis indica
gttaaaaaaatggcaaaattataactagtgagacccatctatatggtcggccacttagtcttatttttgttattattttatcattttttattctatataatttaaattctaatcctatgtgaaatagtataaaaagaataggacggtctcattctcatacaactcttataacctagttttcattctgtcagacaactagagttcttgagacctccttcttccttcttctatttcgaaatctccttgattattcttcaataattttgagccattagtgaatgaatgcatgcccacccatagcaagtctagtactcaatcatagtgtgtaagattgtgaagaatctaacaacttgaaggagaatcgggctcatattttgataatactttgcgacacaaaggaacaagggttagagatctaagtgggatgagtcgtattattgcaatcaatgtaaggtttcttacgaaattccattattttagaaatttatatatagaatgttaataaacatatttgttagtaaatctagatcctggtaatatatattccaaagcttctgacgtacaagctcctccaacaactgacactcctgaaaaggtagatccaaaagatcctggaactttaggctttcgcaaagacaaaggcaaaggaattgatgttgaaaaaccaaagaagacttcttccaccaaacaacctaaaaagtctaaagtttttgaccaacctaaatagaagagaaaaggaaaccacgcctcagggcacggtgaccagaccaattccagtggcagagtcacatagaaaaataagactgatgccggagtctagaagctagagtatcgaagggaaaagcctcctcctagtgattccagtaaccacgatgaggatgttgacgaagtacattaagtatcagacgacagtggcagaagcctttccacgaatgatcttcaaaaaaagattgaatgctaagaaggaaagagccaaagcaaaaaaaagcaagacctcgtgagaacgatttgagaaaccaaatcaacaattgtgttcgtggaagagaatcttcaagtgataagactccatgcctaaaacgtaaggttaaggagttaatgaaaatcacagaaaagatttctagaaaataaagtggtgtcgtatttgactttgaggaagaagatatcgagccttttatgaagagaatcattgatgcaccactactagagcatttcagaatgccacggatggagctgtatgaaggacgtacggaccccagggaccatttgtccaaatacaattgcatcatgcaagtcgccaaggctagtgatgatgaaaaatgtttatgtttttcattaacagtaagcaattttgtggaggactggtggaagaggttgtctccaggattgatccacaactagagagacctacaagtaatgttcagaaagtagattatagcaactaaggattatgatttggaagttagatctttgactagcgtcaagcaacaaccaagagaaagcttgaaaaggtttatccaacgtatgatggatgtagctgctaaaaccaaggtcaccgatgacatgaaaatggtggccctaacattaagacttaaaactggatctttattgtggggagaccttcagcgtaaaagggtagatacattgagtgagttcttaacaagagctcaagggtttataaatctggaagatgcttatgctcaagcatatggagtactcccaacaccttccactaaaataataaatgcccaaccttcgcagatgacaactccatccatttaccctccaccaactacttttactgttgggttttgtgccctaaataaaacccattac

SEQ ID NO: 321475 - DNA, 547 bp, Cannabis indica
ccttctcccttagacttcatggcgtaagggaatcattgaataactcttttttgccattattttggtcagagccattgttgttgcgcttgcctctaatactctcattgttggacaattaatagatatcgtctgtactagtcaacatgtcgaacagtacttagggcactatgatgccctgtgtttgtttaacattgacttaccctcttgtctggtcttgccggacagcttcttctaattttatgaagccatcagctcgctcaaagaactccttcatgttgctcattgagatccttctgatatctttctagaattcactaaataataagatgccttcgagtgtggttgtatattggccttcttctgtcacgcttttgaccttggtggctcagccacgaacctttaaatatagtctttccagggtttgtcttgtctttactttatctcgacaagatcctctagtcatgaaggtattagtcttaagatagagaactggatataaaactctagtcgatacaacatgaaaccatccaaataacaaataatcgtt

SEQ ID NO: 321476 - DNA, 2814 bp, Cannabis indica
tgtaaaaatgaaaaaacccctatataatatgtatatatattatttaggggtttcgctaaatatttaattataaatatatatacataaataagagcttatgatataacgcataataaataattataagcttaatataaaatatataaataaacataattataacatattatgtatataaataaactatgtgtatatattgctagatacacatataagtataaatatatatataatatgtaacacacaaatttaagtagttcgacagaatatcatttgcctacgtctacggtagcatttaagctatgattagattttattaataaaatagagatctacagattttaagaagtttattcttaacaatggtctcagctgtgtgtaaatgagtattttagtaaatagaagcgatattaacgtaaactttgcttgtgtagagagaaataagatgaagaagaaagaaaagataaaataaacaaagagtgtgcatataaacacactagtttgaagtttatctttctgaaggatttgagatggaggattcaatggagtcagatgaggttggtagcttgtatacaagcatgttgtttacaagcagcctgtgtagagaaagatgaagaaaggatagtttctttaaagattgataagacaagcttgataggactagacgccttctttttctcttcccttatctctgtatgtccctaggtaatagcttgggtgaatgtatttatagaggtagcttatcgtgcctccttgaggtgaactttatcttcgtaaaagaatcaagtggcagttgcttttatgtttatgcatacaaacctaaacccatgtatatattcatttcaagttttgtgcggctactaatcattgtttttttatacacagttatttactattttgctttcttttactgttattgttttattttattacacacaatttataattttttttactcatcaacattagcccccttttttgtatttaagaaaaaaaatgctcaatgtttttcttcacatagacaattttttactgttcaaagttgattactcacctctctatttttaattacgtggagggttggttttcctcatgtctatagatcatcatgctcttctttcacttccatgcatcacaccaatatttttactgctcaaagatgattactcattaatcttttcacttccatgcatcatactaatctttttactgttcaaagatgattactcatctcttcaactttttactacgtggaggtctgtgaaggaagctattctgcctataaattaccacacttttctttcatttctatgcatctccttcattcttcccatgaaatctcccttttgcttttttttttttgtaatatctgtcctgaggtatgtcttctggaggccacagttcatctcctcactttgcacacaacatgaatctcatgactgaactaaaagaactccctcctaatgctctttcgtaccttaacgatttgcgaaataaagtatattgtttacatcactctctttctaatttagaggatgttaatcaagaatgggctatggagtgtcatgatcatgtacgtcaactggacgacctaactgatcgtgtcgaagagctgtctttgagaacactatttctcataaacaaactactgcaggcatcgactattatttccagaaagatgtcgagatgaggcgtgtcctcatcgagcatgacaaaattatgcatatcctttgcgatcaatttaatagggatgttgagatgttaaaaactgaaatctaaatatggttctgtcaatatttggatgctagacatcttgtctcgctaatatcccccatctttaataatcggggtactccatgtgataacatgtatgaagttcacatgttctctggagattatgcagtacgagtcgagccatctcgtacactagaatgaattatacgtcccttttttatgtacttggttttctttctttaaaatatatgtaccatgcatgctttttttttttttgccatgcatgcttttttttttttgttttttaagtatatatactctgcacgtttttaatagtagcacgtagtttgctactttgtatcacttttctcttttttttttgggtttagatctttgtaatatatataatattatcctttttttcttttatgtatttgtaacatatatataatattatatacatctctattatttttagcagtgcgtggactctaagtaaaagtatactcatgtaatacataaattttgttattctatcaactcactttattctcatgtctaaggtatatatgtatatatttgttcttgcagacttgtctgctgacgtttcaattttatcagtttctcaaatattcttcttgatctactataaatagaagtttagccaggcatacttttattgtagtgatatgtcttcttctatgagttcaggaaagaaaactatgactgataatacacttgccataattctcttaacaaagattcgttcttgcccctcacatgatgctgataagaagagtatggaggagcttcgtgtcgagatcgcaaaaatatctgaagaactggcaggagccaaaggacctataatgtacttatgctccccgatgaatctttaccaaactaatgcctcggcgtggcgtagcagacttgttctctccgagaaatggagagatgatcgtgttgttgatgacttgaagaacattctcgctcattttcagggagagcatcgagaggcttaggggttgtttggtttcataacttaaaaactattttcagttttaaaaacagaaaatagttttt

SEQ ID NO: 321477 - DNA, 1515 bp, Cannabis indica
aatgacttattctttgactacatttaatgattgctaatattgaattatttttttgaataacacgagattttaatcaatcctaatttaaatatattgcattcaaaatcacggtattacaatgcaattgtcaaattagaacaaactattaaatgccctacaaataaggtatttttcaatttcctggagttagaaaatttttacatttatagatatatataaaatatataagtagtttttattttccttttcaaaaatgttgctaaatatataatacatgcaagagaataataagtggtacaagcaacaaaaacatagtggataattatttttattaattataagtagagaacttgatcttaaattctagttaaatattacatagatttgatttcaagaacatcttttcacaaccttagccatgagcccacttttcatattaagagagatagttaaactaagagatataggatcatgtccttccaccacttgaaaagaatacttagaaagtatagaaattgcagccactttcatttgaatcaaaaccatgtctttaccaatacaagtccttggaccaccattaaaaattgggtacttatgagatggtacatacacaaaacctttttcctctgtaatccatctttctggcttgaactctaaacaatccttaccccatatctcttccatcctaccagtggagtaaaatgacaacaataccctttgtttcttcctcacatggtgaccacttggaagaatgtcatccttatctgcacttctgtgattgaatggtataggtggatagagtctgaatgtctcatacaatacagcttgcaaatagataaacttgttcagttcctctgcaccaagacaagtagtgttgatattacaacgcttaatttcttcaatgattttggcctctactaatggatgagttgcaacaagccaaaaaaatcaagttagacttgaagtcaaagtgtgttagaatttgaggaataagatgaatgaggttctatcccaaaaccaattggcaatgggaggagtagcccattcatcttatatatcacaatttatttccacacattagcaatgtgggactaactcttaatacatcctcctcacgtttgggcctggaaagtgtgggtataacgaacgacctttaagagaccacaagaccgaacgtgacatttgaaagaatcccacaaggccaaatatcgggaaatttgtgggtgtacacgtcgggaaatttgtggattttgaaacaggtcaaagacccaccactggaaattggcacacattggccgaaaggtcccaaatggaggttaaaggggagacagcggaagtatctgtttggaccggggacactttgactcacaacggatcacaaacggctttttggatcaatggaaatttgggctcacaacaaatcacaagtggctctgataccatgttagaatttgaggaataagatgaatgaggttccatcccaaaaccaattggctatgggaggagtagcccatt

SEQ ID NO: 321478 - DNA, 1124 bp, Cannabis indica
aaataaacaactaattatatatttgaatacatatatatatacatagcttctaaatatatatcagttaggtcatatagtcaaaatatctttatctctgatgttgggttgagaagttgctgatgttcctcctttaccttgttatatcgttcaattatcaatttcatacttagaatgaattgataataaagagttatcaattcaaaagagaatgtagtgtagtgtagtgtacaaggtcttttactaattattatatattttttttttttcaattttgttttgcagggtaagagcaacccgtatttaaatgatgagatgaatcttctccgtgatcaatggattgaatgcgtctaaacacaaacggtgcaacaagggctattatgatgatcaaattttttttgtttatactttacactacaatcaaatacttttatataactaacaattatgtaagttagagtaagtagtgatattatataaattcataaaaattaattaatgcatggaaaaaagagtagaattatttatttttttaattttttttcctttttttggtaggaaaatgactagcaaaaagcgttgttgaaaaatattaaatttataattaaattgaaaattttactgcatgcgacggtttaaaaccgtgcctataacactataggtcgacggttttaaactgtgggctatagtataggctacggtttaaaactgtggcctatagtataggccacagttttaaaccgtagcctatagtgttcactataggcgacggttttaaaccgtggcccatactattttctcgacagttttcaaccgtcgtctattctacctagtattcgcgacgctcgtataggcgacggttttatggactgtcgggaatactttacctgacagtgtaaaaccgacgggaatttgggattttttagtagtgaataactcattccgctcagatctctaacccttgttcctttctgtcgtagtgtattattaagatttgagcctggatcactttctctccttcaggttggttattacaaccgtcttctgcactatgattgagtacttgacttgctatgtgtgggcatgacactctatcactatggacgaattcatgaagaacaatgaag

SEQ ID NO: 321479 - DNA, 1599 bp, Cannabis indica
aaagtctacactatattatctcaaatacattaatttaaatatgagagataagtcttttgttaattcggatgtacttttaaaacagtaagagagagagagagattgacggaatgaaaatgtatagatttgaaaattttcatatttgaaaacacattatattggagcaagggaagacgcattatttgaaatttttcagattcaaactaattgccgacggttaaaaaccgtggcctatagcactacaggcgacgatttgaaaccgtggcccatactgtaggccatagtttgtcggtaattctcctttaaaaaatttgtaatttttaaggcacacttaaaaattgtcgaggatacctcacgagtatttaaaattgtcggaactacccaattttctgacagttttaaacactcaattttttttgcgacgatccaaaaaaatgtttttaagaccgtcgggaatagtggttttcgtagtaatggcttttgggggtagtgggatgggacaaggaagaatgtgaagatgaaggatggtactggtcagcagcaagcctccaccaccgtgaagggtgggttacaaatcttagaagtttgtaatttttttatataatatattttttaatccttaataattatttttatcatgcgaaccaataaaattttgacatgtggtaattttaagaactacaaacgaaattgttcaattgggtacttacggattaacatgaatcttgagcttgaggatttttactgcaattttttgagattagagatttattagcatcaaattgaacttttaagggacttacaccgcaatttaatatcaacaagtgatatttttagaccaactaacaaatttgttaaaatgagaaccaacagacttacaagaatctcgagcttagggactattgccgctattttttgaaattagaaactaatctgtattaaaataaactttttacgaacttataccacaaatttctcaaattaattaataaaatgttagaatttgagataagatgaatgttagaatttatttctacattttagtaatgtgggactaactctaatacaccatcctcacattttggtctaaaagtgtgggtataacgaacgacctttaagagactacaaggccgaacgtaacatttgaaagaatcctacaaggccaaatattgggaaatttatgggtgtacacgtcagaaaatttgtggattttaaaacaagtcaaagaacccaacactttcgactcacaatggatcacaaatggctcttttatggctcacatttttggaccggccactttgggctcacaacggatcacaagcgactttgataccatgttataatttgggataagatgattgagattctatctccaaattaattgacaatgagaggagtagctcattcatcttatattatataacaatttatttctacacattagcaatgtgggactaactctaatataaaatgtatataaacttgtaaattttccaaaacatgtccttaattcataggtcatgtaaccatgttgacatttatttagggataattacataaaaatataattttttgtacaaaattacatttttacgttta

SEQ ID NO: 321480 - DNA, 1267 bp, Cannabis indica
agatcattatccatcataattatttaaaaagtgttaattacaacctcttatttaacctctgcgtttgaaatcaccgaatatttgcttttctaatttctttcatattgttttttttatagttgcaatatcatctaagtaaatttttaaaaaattccttatagtttactgttgggattaaactcacttaatcagtcaaagtcaataggtccatctatttattgatcagatgaattcgaaaaaaagttgttgttagttgtaatagttgattttaatactaacttaaaaggagaccccaccaacaactataaatacaagtgtctttactcttttaaggaagttctaatgtctaatctccaagttcatacttcaaattctaagttaagtctagagagagagtgtccaagatcatagtgagtatgtgtacacggatgtaatgtgagtatcactcttgaagtgattttccttaatgtgagacatttctttgtaattattctctgtgtttaattttattcttggacatattcaatcgtgtactattgactattcaagcaataaagatccatgattcatttattctcaagctaagttttcttgtctaatttcaattaagttatagttttaattttgtgattggtttagttttatatgtgtattcttgaatattgttactactgcaacaacctgttttgagggtgagcattcaccacaaatggtatcagagttgagggtttgaagtttaagaattacattcaaccaatcaagattcatcttgaacatttcaagaatcaaactcgaactttcaagaatcagattcaagcaattaagaacctagtttgaatggctacaacaaggtttaaggtggagaagtttactggttcgaatgatttcagcctatggagaatcaaaatgaaggcttttctaattcaccaagggatctatgaagtacttgatgctgaagccatggaattgattgaagacaggaaaaggaaacttgaaattgaagccaaggcacacaatgtcatcctcctcagtcttagtgatgaggttttgagggaagtttaagatgaagacaagtctttgttctctggaacaagttagcttcaatctacattaagaaatctattgcaaacaacttgtatctcaaaaataagttgtacacacttcgaatgaatgagtcaaaggaattgagaaagtatctagatgattataacaaaatcaatcttgatctaaataatcttggggagaaaattgatgatgaagaccaggc

SEQ ID NO: 321481 - DNA, 1381 bp, Cannabis indica
atatatatatatatattgtgtatctcttatcaaatttggaaggaaggcttgaattggtgtgggtttgtgtgattcttttacataaagctagaggaagttgtggtaaacctttctaattttttttaacttgtgtgaatttcgatattttaaggtttcatagtgatgttcttcatgttcttgagcttttggttgcatgttgatgaaaataatgttagttgtgatgattttggtgtgcttttgctattaggatcatgctagtagcttcatgttgtgtagggtgttttctaatttggttctaagtgtttaatttctggaaacctacttgaatttttgggaatttctttgaaggtttggaagcttgagtttcaagcttgtgaattttgagcaattgtgttgattgtgtaatgttgagctttgtgtatgatttatgttgggtgttttgagcatatattctgatgtattaatgcctggaaacaccttggtttagcatgaatttttgttgttgtaggtgaagttaggactgagtttaggcattttcgggccttaaaatgggatttttgggttttctggtcccactcgccgtggccagacttttggtcactacgaccaagtctggcagagagcaatcccaattttcttgattttgttttggccataacttttgactcgagactccgttttggaggttctttatatcgttggaaagctcgttttgagctctatgtgttaatatataaatcaaaataaaattatgtgtatatgtgaaagtgaatttgggattaaccctatttgtgtaaaattctaagaacgtgtgattaggattatcggcgcttgctcaggaacacccagagatttggaatatccacatacttagattaccaggtaacatagtaagttagcacatagagtttagcgcagtggcgctcatgtatgtaattttgtatacgttctgtgagaaactgagattagggttattatcctaaatttagcgattatgtgatttagagttattactctagtatttaagtgaatatgaatgcaatgttatactttatatgttgaaatggaaagaattatgcgcataaggtataattaggttagactcggttattagaatcgagataaaccattctaaggccttattataaatagaagtttgagtgtaacacgtcggtttatgtcaaatagacaatagatgcagtggcattaatatttatatcatttttttttattaaattgcatattgttatttatattgtcttgctagaccttggcaggtgctctattgtgcaggaaagggtaaatctgttgttgatcagccatgagatggagggctttacgatgtattgtacatgtttaggccaagctagaccacgagggt

SEQ ID NO: 321482 - DNA, 1783 bp, Cannabis indica
aggttggaagcacaattcgaaatgttatcagtgagttggagcaaagggctactggtactggttttccaattggcaagtatgatctcagcacatgaatcttcacataaccaaattttttcaaatcggaatcgtgatcgaaactgaggaatcgtaggctgatcaataagggtggtcacagaagcttttaaagctcgatgatcagagctgtaaaagtctaaatgtgttaatgatggcataagaaaagtagtctcccaatgaccattgataaaaccataatcgagtcgctctttgacattgccattcccttgacttttattagtccaagttgttcgatccccttgaaaaggaatttcacataaattacaatggtcaatagttgaacgaaaagcagtaatctgaacatcacctctcctagatccaccaatcttatcctcatgagaaataacctcattaaagtctcctaaaaccagccaaggagataagggagatatgtcatgacatcggcgcaatagagtccaagtgagatgcctttgagaagcacaaggatgcccataaaacccagtaaaatgcagagaaggtccattctgactttccataaaacaatcaatatggttgagagagaaattgttaatggaaagagtgatatgagatttccaaaggagcataagtccacctcctagtccaagtcgtggaacttcaatgccattttgaaaatgcaatttattacgaagtctatctatactaccattttgtaacttagtctccattataaagagaacacagggagcttgctcatgaactagcaagcgcaaatatctgaatgcactcgggttccccaaaccccgggcattccaactgacaagaatcatggttgagcgcggtgttgcggagcaacaaccgctgaaacatcagactgagactcctctgaatccaagttactagcattggaaacatacagagttgatcgattgccattcggtgctgaagagtccgattggatatgtatagcatttgatcgacatcttttaagaacattgcgaagagattctgaatcaagctgcctcttgaattgtttgttgggattaatattttcgagatcatcatctgagtctaagatggctttgcctttatcattagccgaaggagaaagcaaagttgcagaggcatgtgaggagacaatggtgctataagttgcagttgtttttggagaaatagcagtagcaaatggtgagcgagagaaggatttaactgaggatgaattgggtgggtaagtggcaatcattggtgttattggaagatagggagggaatggtattactggtacttcagatacaggcattgtgcatggaattggtgtagtcacaggtaaagtaatgggaggagtaataaatgtggtaatatgtgaagaggattgggtcgatggggatgtgagagactcttggttagtcatatttggtggcaaaggaagtggaatccgtgacaatgcagggatagcagcagtgaatgagtttttggcaagtctagtcattagaggccatgctccacctttgaagaaatcagttctgtaacgatcatagccagagtcagggagaggagagccaatcatagcaggaccatattcaagagaagggtcattgccattgtagatttgttcaaggaatttatggcatgattcaaaaggatgtccaatggtaccacattcaaagcaaaattcaggtaatcgttcataacgaaattccaaccaaaattcatcaagcgagtccttgagtttcaccattttccc

SEQ ID NO: 321483 - DNA, 601 bp, Cannabis indica
cttagataatataaattatatgctagacttaaaaaaataataaaagtatattgaacaactcacttataaaagtgggtatattttaataaaatataatatgatagcatttttttattaataaatacaaaaaagaggtattcctcaacttctaccctttcggtccattgattcaaccttggcatttggaagaatctaattttttttcatgactgtctacgttgtagttatttaagacatcctataaaattttgataaattcacaactgaaataaagattcaaataatttgtagtctttttattttataagcttgtgaaataaattacttaaacttttttttttcagagttaaatttttttaaatttctcaaaattttacaaaatgtccgaaaaatttcccaaacgccaaaacgatagagtgatcatcagtagtccccttttagagaggtgcattgcaaaacttcctataattttattcttttcatagtaaaaaaatattattgtattatttttggagggatatatgtcagttcaaatgttgaaatgaattgggtaaatagcggcataaacccaatgatttttttagtggcataaatacctaat

SEQ ID NO: 321484 - DNA, 706 bp, Cannabis indica
tctctctctctctctctcctgaactgtcggggctaagatgttcttccatcgcggacaaagcctcaccgttaaaaatggaggctattagagagataaagagggaaagtatttctttattaatctcaatgtgtattgaatgatacaataaaagagaattaatatataggtagaggatatccaaccctagaatatacactaaatccaactaggaatagccttatctttatacccaaacattaaatgtatttatgtaatacttaatagaggccaccacgggcctcctcgtctgttgcatgttaaaagaaatgaattatctaaaatagtttctcatacattgaataaaggaaagagtacagattatataggtacagacacttaatgaattgaccaaactgcccactgactataactaacataactactgtaacaaccataactgttgtaacaatacaaccgaaattcaagggacaacagggaatggacataatgcagctaaagacagaacagggcatctaagttatcctatactcttaacatcccccctcaaacttagggtagagagtgaaacaatcctaagtttgtctcgaagaagaaggaaccgtgtgttggaaagagctttggtcaatacatctgctgtttgatcataggcaggggtgtgtttgacaattagtgctttggccaggaccttttctcgaacgaagtatag

SEQ ID NO: 321485 - DNA, 2564 bp, Cannabis indica
tcatatattgttatcatgttctatattatatataaaaagatattgggtttattgttaatgttctaatagttaccacatcaaatattataaatataaaataatttataatttactcgcttgaattttaattgagaaatttacatacaatttaatttcagcaaaatttttacacttttctgtactatatatactttatttttttttatatatttttataaaaactacataaaaataacaagaaaataatatccaaacaaaatcaaaataacaaaaaattaacaacaaaacagtagcaaaagaataaaagtacaacataaaaacatcaaaatactatattctcggtaaataaaatctttaaaattatcaaaatatttaaaattccatacaatcctattttttattatttttttgttttattttttatgtttttaaaataattccaataataaaattagagaaattagataagttaaatatagataataatataaattatcataaaacaattaatagaaatataatataatttgttatataactaacttagcttagaccttaattataaaaatttaattttaaattgaaaattatgatgaaattttaacaaaatggtaactttaaaatggaaaaaataatttttaatattaataaattagaaaccataaaatgaaaaaataattgtcaattttaacaaattgaaaactctaaaattataaaataaattattaaattaagaaaatggtaaatttaaaatgaaaaagaattaatatagttgagatataagtaatgaatatttttacttagtaattaaagaaaataattatgggaaaaataattaagttttaatataaattttaactttaagactattcataattttgaaattgacaataatagtttgtaggtagtaacataaaatagtataagacattgtaaaatagcatgaaatgaaattcttatcttgactcgatctcttttgttataaactaaaaataggatagaataattgtgtttatgttatcacttagtgataattttttttacacgcgcataattttccttgtatcgattcggagatgctgagttagtaagggctcttaaatacgattctctaaattatttaggactttttttgtccacatggatagttttggcttgttatatacctatggtgtgatctattgctcattaatttgattgtttctttactataaatttcgatacgttgtctcctcacacgttcttgtaagttggcagacttactaatattttgcttacttatgagaactgtgggggatgctaccaaaatttttacaaaaaagaagtaatgttaagagaataaattatactatatgtatattacaaatctgaatgggataggttctttacccttttagtaagggagtgagaaggtggatttggacacttgcacatttttgactttgttttgaacttcctcttttatattatgtagaaatatggtgagagacaaaagatggatgactttaaatagacagtctgtagagttctgtagggttgtggatgagtttattggagttgctcgaatgtaaataaattctgctggagttactcgatgcccttgcataagatgtgtgaatgtacatatgtttatgcatggcatccaaccatcgtacacgatctggtattttcatggagagtcgttcacacaaccagctatagaaatagtagacaataatgaagaagaaatggtggatgtgatggctgatattttaagagaagatcttggttttgatgatacaagtactacactacttccttcaacgagtccccactaaatagtagtagtaagtatgacaatttgttcaaggatatggaaacttaactctacgcgggttgtaaaaaatcaggctcaatgctttggtaaagttggtgcactacaaagttttcaataagtggagtaactatttttttatttttatatgttactctccatattgattgagtcatttctagagggtaagtcccattatgaattacaaatgaagttgcgtaaccttggtttaggttgtgaatcaattgacctatgcaagtatcactgtgccttgttttggaaggaaaatgaaaaagatttttgtgttatttttggccagagtcgttggaaaaagaaaagggagacggaaaaaaatttcccaaaaatttttgcggtactttccccaacattgagactaaagaggttatatagttcaagacactcgatcaagaacatgcggtggcattactctaaaagacccaaagaggatggctacttaggcatcctgtagatgcaaaagagtggaagcggtttgacatgtgccatccatcttttgcacttaaacctagaaatgtgaggttgggtttggccacttatgggttcaatccgtttggtaacatgagcaactcttatattatgcggtccattttcttagtcatgtataacttacctccttggaagtatatgaaagtagagtcgttgatgctgtctctattgattccagggtgcaccacccctagaaaagacatggatgtttttgttgggttttatg

SEQ ID NO: 321486 - DNA, 1306 bp, Cannabis indica
ttttttgttttttttcccaaatttataccacttaaaaatacaaataaagcaagtgatttatttaattctcaaaataaaatttttagacaaaaactaaagcacaatttaataactttacaaacctaaagaaaatgtaacattttttcttttatgttagatataatattatttttctaaaaagatgtactttggtgagagttagagagggagagagagggggctaagagaaagagggaatgtatgaggagggtattttgggatttaattaattttagaatattaaattcatatacattttaatgtggcatactaaaagaccatgagcaatttttaagcatgaattatcaaattttcctataaaaaactacaataataatatcatttaatcaaaagataaaaatatctattttaaaatattattctcctttatataaataaactaataaaaatataaaaaaatatatataatttaactattatgaagaccgcgcaacgcacgattatttttcctagttatagtatatacaaactgatttcttattcctttcttctctaaatagcatgtatagtggtattgagcttttcccacacaaattaagtgaatactcaaaatagtgtgaaagactgtgtagtctttcacatttcgcagaagatcctagttcaaatttttattaatactttgcgacaaaaaagaacaatggttagagaattcaaatggaaggagtcataattttcgttgcacaattgtaaggtttctaaaacttttatttgtttaattttaattatttttaacgttccatatttaggatgttagattagtaataatcaacatacttgaatagtaaaataagatcgtagttaaatatgctcttcatcaactgatctcagagtcatggtaattttttactattcatgtaaactagatagaataattattatttgcagttttttacatgtttatgagatttggatgttaatgttaagtggattatgcattatttgaaagattgagaaattataaattttctgtagtaaataattagaattttcttctgtaattatttttctttgaaaatttaggaaaaattatgcaagttaatttcgataaaaaattgagcaagttatcattttttgaaaaattagaatcaaagatggatgcatgggtgcatgggtgcgtgctaccatgggcatggccgagaaactcagactcgatgccttgtctgtgcgcgtaaatggctaccaacagcttgtctgccctcaattttcgggcaagcggcgcgcgtggctgttggaatatgttttacca

SEQ ID NO: 321487 - DNA, 1509 bp, Cannabis indica
tttgaaaataattgccaaaataaggtggcccatcaaaatttcccttaattaaatgcctaggcctcctccttgagatgccaaatcacttttgtaacattaggtaatgggttcgaacctaggacaaataagccactaaggctagcttagtggtgagggatggatgggaaaaagggagaggtcatgggttcgaacctaggaccttgaagctattaagctattcaatgattgtaaaataccattacgctacactaaaaaaaaaatcacttttgtaacattaggtaagccattgttataatatttgtccccatacactacatataattttattgcttaaaatatgtgtaagttagaaaataactttgagctaaaaaggtaattttggagcaataaaaaaaatgatgttgtgatgtggcagaattgaatagaaacacattgttatatttaagagaaatgctaaaaggttttagtagtgtctgtaggaattttgtcaatttaacctacaccaacaaaacacttaatatcagtatccaaggtcagttttgacctttccttagtcgaagtaaatttagactagaaacggcagtgtataacccacacgacaccaaaacctgtatcgtttagacccttggcttaaagactctccaagaagagtctagaaaccctaactcacacactcagcctctcaaacctgaaaccacgaaaccctagcgatccgaggtacgaaacccagaaatttcacccaaacacacacagatttagtttagcaaatgaaaaaacaagagaaagggagagagaacaccataattattccagagttcaccccaaaaattagggctacatctctctcaagctcatctcagagattagcttgatatccactatcaacaatgtcaatttataaagttttagagttttctgtcacagtaatcgatcaggtaagacttaattctttctgtacaatttctacttttgtttcttctgatttgttctcgatctaactcagttctctgttgttctgcatgtacttcctttcttctacctcctcaccatgagaacatggtttatcatctttggatcttggagaagaagcctcaactagggtttatttcttctaactcttctctctctatttttgatctgtatttctctatctgtatatgctttgatttcatgtttatatatttgtatagagtcggttgatcacagatctaggagttatttacaataactgaaacaccctaaaatatttaggcacgctacccaataaacttatgaaaccctaatcccctaattgggattactagtagaattagcgcggaaattaaactttaattacaaatagcatgaaaaataaacttctaatactttttcacttaataaaataaaagatacaaatgtcgggatctcgaaagtactttacaaaatattattacaagtttgtttcctctagccgacctatgcggcaaaacagagtacaaaaaaaaaattcatcactggtagacccaaccc

SEQ ID NO: 321488 - DNA, 1365 bp, Cannabis indica
aattctaatcttgctctatctaattagcttccaatacatatatatataatttgtttttattttaccatgaggaactttattaatatcaaacaaaaaacatttactaaatgcagaggttttatctttttaattaacaaaaacttctctctctggctctccattctctttagttcaaggtttctaatattttcttcccttctcctctcggctaaggaactgttacgggtctaggtcgtgtgactcgcgttcctggccaaggggcggcttccgggggcgactcgtttttagtttggagacacaaaaacaaaactagtttttcattttattatttttaataattatttaaataatttttgtaatcatcatctactttgtattttatttttttttattattgtttaatagtattttacaatcaattaataatttaatatcttaataataggcttcgcccggttcgaacccatccttctttttttttttttccattccttatatatattaacttcatttatgtgacatcattcgtttttccttactttttctcattacactttttttactttctttttcaagaatttaataaaaaaattaaaaataaaaattagaaaatatatttttattttttaacatttaaaattgtatttttaatacaaaaataatatttttatattcttggtttatattttttaatttgtattttttatttatttgaaaatagacatttatatgaagaaacaagttcggccgtacatatattcatatgaagttttctggtattgaggtagcctcaacaatactaattatattatgaaagctcagctagcccattatgggcaccacaatgaaattatctatctaaaaattttagaaaagttacagctcaaaaaagactttaattagataaatagttctcttgtttttttttaggaacaaaagagctacataattcacaccactatttttaatttttcatctttttatatctaaaaatatatttttgatagaacgcatgtatctaatattaacatatagtttgcttgctatatgcccttgatctataaactaattaattaattgccaatgtataacttcacaggaaaataaggccaaagctgacttggaagattctttttcaggcatttttttgtgggttgtttgggtaagtttagtgtactcatgtattatattcatatattggggacacactttaaatgagtgtttcgatagagcttttgtttccgtatatgaaagagttttttaattaattaatatcttttcatgatggcacatggtaaagttactaaaatggcatgtgtaaatttttagaaaatttacaatagtttataataaatatatatatat

SEQ ID NO: 321489 - DNA, 716 bp, Cannabis indica
agtaatgtagtttagttttttttttgggaatgggtagtagtgattattaattaaacactattatattttatttaaaacaataaacaaatgaataaaaattcaatcacaatcaccagtttcgcaccatcgatctccgaatacaattaatggccttatctaataatcatattcacatcccatgttgagaattagaaatgtgttctcataaatggggtaaaacctatgccccacggtctaaattccctataatatatgtacttaaaatatgattctcttacttaaataattatatgtacttaatatttgagtctcctacttaaataatcattaatgtatgttgcttaacagttagaatagtctctagttacatatgtgaactaactagtgtaatcactgatcacatgctttaggtaagatagattctgctttttttatttaattattaattatattgacaatttacataagggtttgaaaggaagaataattgagagtgagagacgtgattgaatgggtggtgggaaaattagttggccacatctttcacataattgattctttcttcggtttttttaaagggccaaagatgcaaaatctccatctaataattaaggtggcgtttggtaacacttttttaatcaattttctgtttttaaaattgaaaaataaaatatttttcaaaaacatgctctataaaactatttttactttttaat

SEQ ID NO: 321490 - DNA, 2060 bp, Cannabis indica
ggcataaaacccaacagaaagtggatagccccagatagaaaaactaacctattgcttgatcctagctttgaggaaactaaggtcgtacttccaagttcattcaattcgagtgtagaccgatcaacccttatcccaaatcttacaaaagtcaaatgctttttggctagctaattaaatgggaaaatgagctaggatagtacaaaattacctaccagtcctgtacaacaataaaaggccacgccttagtagattttgtggctgaatgaacgagaaaggagatagaaaatttaaaaaaacaatgtcgagccaaaaagggaacaagaacaaaaatacccaccagaagaagaaattgaagccaaacccgtttggaagttacatgtagacgggtcatccattgattagctgtccaaagtggggattgctcttataacacttggggacaacctttgcacggagtagtcaattttggatactcacatcatccaataatgaagcagaatatgaagcatttattcctgagttaaaactttcttgggaggtatgtgctatgtatttagagatctataatggttcccaattggtagtaaatcatattttcggagaatatatgactcaagggagaaaagatgatggaatatctcaaaaaatccaaaacctactcgcacaatttaaaagaaataatgtcaagaaaattctcagataagaaaatggaattatcgatgcacttgcacgattggcaagaaagacaatcaccaataaatcaaacttggttctaatttagttccttaaggagccgaggatcacctgcacgaaagaaatttagatgctggacaacacaccaaattgggtgactcaaatagcagcttaccttaacaccggtgaacttctaaacaaaaaatatgaagctcagaaaatgacaagaagagttgtgcagtatctaatcgtggatggtttgatgtacagaagaggtttttcaatgcctttgcaaagatgtgttagaaatgaagaatctgcaccactcttgtctagagtctatgaagggttctactgttatcatgctagtgggcaaagcttgtccaagaaaatactatggcaaggttacttctggccaacaatgattaaagattctaagacttacttgaaattgtgtgacaaatgccaaaggttttctaaggtccctcttgcaccgctcaatgagttgacacaaatgcagagtttatggcctttttttatatgggaaatagacctaatcgaacaactaaccaaaggaaaatgtggagtgtagtatgaagtttttgttattaattagtttaccaagtgaacggaagttgatccactgacaactatcacctacaagaaagttttggattttgtggtagaaaacattatatgctagtatagacttccccccaaaaattatttcagacaatggaaaataatttgacagcttgatgttcactgacttttgcatggcacatggaattataaagagcttatcggcagatgcacatccctaagaaaaaaaacaagtcaaggacgtgaataacacactaaaggacactatgaaaaatgacttgaagaagcaaaggtaattggcctaaaaaattacccaaggtgctttggtcatacaaaagtattgaatggatgataatcaagaaaactccttttgctatggcttatggttatgaaacaatattgcccatcaaactagagcctccatcccattgaagattgatgtacaaccaagaaaccaaccatgtccacctagaagaatcacttgatgaaatttaagaaaagagagacttagcaaatttaaagttgcaagctcatcaacaaaaagtagctcgataatttaataagcaagtaaacacaagaaaattcttcatgggagatatggtgcttaaaagggtgttccttaatactaaagactgtgcaacaggtatgcttgaacctaattgggaaggccataccaagttactgaagtaacaaaattaagagcatattgttgggaatattttaccaagatctagatttactaacaagtatgtttcattaacatc

SEQ ID NO: 321491 - DNA, 820 bp, Cannabis indica
taggggtggcaattcgtgttcgcaggtcgtgtttgtgtcgtgtcccatgtataacaggtatatgttcgtcccgaacctgatccgtttaataatcgagttaaaaaatgaaacccaaacatgacccgtttataaacggggtgacatgacacaacgcgtgtaacccttttataagcatattttatataaacatgccaactaataaaatgtttatgaagtattcaacacatttaaaatctatttatttcatgttaaagtactaaaataattttaaataggtcattaacggatcaatatcgtgttacccgtatcaacccgaacacgacttgtttattaaacgagtttgacgagtcaacccaaacacgacccgaacccatttaaggaaaacctaaatctgctaactctcgcgtgggtttcgagtcgtgttatcgtgtctgacgtgttttgtcggccctagtttcaaccgcaattattaaattcaaaactaaaaacagcatcgcaccgcgctgttaggaagatatgcaaattgcaatcgcgccgcaaagaatttgaaactgtattttttaagcgatatggtgcggtgcaggcggtttgtacaatgtgaacggtttgatgaacacgcctaaggtttatttgtgtacaagaggtattttagtaaattaaatgaaaaaaaatggtataaagttattctatccttgtagaggtaaaattgtaattaaaattatttcttttttatttttcatgtaaatttttcaataaagaatataaaggtgacgattggtaacacttttgttttttaatttttttaatcacaaaaataaaa

SEQ ID NO: 321492 - DNA, 676 bp, Cannabis indica
ttttttgcattgatcatagcttgacataggggaagactgtaaatgttgtttttgtcaaatcagatcagttagatcacactgtatctaattaatcttgtctatacttatttcggttatgttaaccggtcttttaatttttgttatagtcacgtgagttatacgtgtttagtttgttagttttttgatctggagaatgttagtcaatttagattttttttttgtccctttcagtctttctagttacgttcttgtttttcttggagaggaagtacagaaaatttgtacagagtaaaagcttgagaaacacgtcaatggagattgttccttgaggagttgaatcaacaagcggacttgttgtgagttcatctggagggattcaagatttgtctttggatggagttcaaagaaactaaagagcacgattgctctgttcgtattatcctgaaactattttttttttttcaatttgactgaataattagatgaacgacacttcttgaataccatatagctagtttcatttgatttttctcaacacaaataaaatcaatctttagacttaatatttgactaaggaaactactgttatacattattttataatataataagtatagattaaaatgtgataaatatataattatctaaataatatatattaagtgtatggtaaata

SEQ ID NO: 321493 - DNA, 1648 bp, Cannabis indica
ttcttcttcttcttcttcatcctagaacggcaacccagagcatctacatgcatggtggtcgtctcgaatcaatggtatggaaaagcgaaccacgagatctggaagctctcaacacaaggaagctaaaaatgacaaccttttagctcattgacaaccagagaggccaaatcgaagcgaaaagcttcggatttggcaagagagaaaaattgaaaaaagggagggagaaactctgagttttgggattcaagacatagggagcatggatttgtgctccatcaacgggtgtcgtggccttgtcatcatggttgcacaaagaatgaaaagggaagagcgagagagaaagaaacgcgagaaagagggagagggaatcaaagtttatggggatgacgagggagagaaagaatgaggaagagggaactcaggggggatttttcgggttgatgtgtgttatcccaatttttgtcctcatgacgtggcatgcttatgtgggcagaacttatgccacgtggcagtacaactcactacaaggaaggcaaagtcagcatccgagaaaacgaagacccagcagttaaacggggatcaagtgacagactagctctcccttccaggagctagctagtcacccgtagtcggccaacctgggcacaacatcatggccaaccaacctggccagcacaagggcctaggcggccaaaggatgctttataggccccataagacactcttgcatgtggacaacaaagatgggctacaaattgggcctcaaaagcccaacagaaaagctaaatcatatctagaatcaagggcattttggtcttttataaatatctaactaattatacgatttctaagggatttgaattgtaaacctatgattcaaggattcctacacaaaggcattaacctctaactgaaaacctaagttgcctaagctacctctaagctagaagcctgatctcgagtgtttgataaactctctctcttcctcattctctcccacatgccaccttaaggctatccaacattctaggctatccaacactcgagtttagtcaggcattgattcattgaatgtaatcctaagggcactatagcaaataccacctaaagcgatttggatagtaattccctcggtataatacaactaaaaggggagtaggtcattaattgctatcacaagggggccaaacctctataacaaatcctattgtctattacttttcattcttatttgttcacacacgtggcaagcattggatctgcacaaccccaccgtcggttgatcacttttcaaggttaatagtttggtgctttcattgagagcgtggatatcgcgatttgatctaatgccatggtgaacacaagaagaaccccagtcgcacaatctccatctttgggtctccctcaagacctacagattactgatctagacactcaggttccagtcacccttggaatccccataaatacaacagatgtagtgaatcccgtcaccacaacaagcccaacaagtctggccaccacagttggccaacctggcatgagcatcccagtggatccaagtggaaggcccatgcctctacaagcaaattcaccattggtgcctcccactaaaggaaggacccaggggcgacagcctcctggaaca

SEQ ID NO: 321494 - DNA, 1883 bp, Cannabis indica
agttatatttttaatgtaactattaaataattaccaatatatatatatttatataaattagttaatatactgcaaaaatcttaattttattatatgaaaataaaaataaaaaatatattaatataatatagaaaatattttaatattaaagttatattatcaaagtataatattattatcattaataattttatttattaaaaataaaactccctaaaataaataaaaaaaaaaagatttttaaattttattcattataggattaattttaatgataattattcttttttctttattatttttattcttaggatataaggtggtgtcgagaaaaattagagtatctattgttattacagtatctcatttgtagttttcagctaaatgaaatgaatcttaggaccaaagattagagtattcgtatcattggcttatctcacttatagttgtcactcaaataaaattaatcctaagtagatgtatatatccatgcttgcatatctcgcttttgagatggaccatcgctgataaaggttgaatctactattgcttgttgggtcattcaagaaaacataaggatgtgcaaagcttgactgggaaggttgccgccttgagtcgattcatctctcgctcgactgacaaatgcatccgttctttaatattttgaagaaatgtcagaaattttaatggactgaagaatgcgaggaggcattcagaaaattaaaaaaaaacatggccaaaccaccaattctgtcaaagccggttcacgaagtagacttgtttttgtatttggccgcctctgagaacacagtcagtgcagccctggtccgggaggaggaaaaagtatgacacccggtatattatgttagaaaatgcaagataggagccaaaatttggtacccctggttgaaaaactagctttctgcctcttaattgcttcaagaaaactcaggccctacttttaggcccattccatcaaagtattcacgaaccacccactttgataggttctacagaagcctgaggcctcaggaaggctcctcaaatgggccatggagttaggccaatttgacatacaatatgttccacacatctcgataaaaggccaggcactggtggacttcatcgtagagtgtaacgagatggaagccaatgtcagtatgctaactcaaaaaacactagcatggaaagtatatttgatggggtgtccaatgaaaatgaagttggtgccggaatagcaatgattttgctagatgggttacaactcaaagtcgctctacggttcacgttcccagcctccaacaatgaagccaaatatgaagccttaatcgtagggctgagattggcgaaaattgtaggagctaagaaagtagaggtttacagtgactcacagctgatggtcaaccaggtatcaggagagtaccaaacccggggagagaaaatggccgcttacgtagaaattgttagggagtttctccactagtttaaagaatataaagtggagcaaattctgcgagaaaagaacgctcaggttgattgcttagccaagttggcctcgaatagaaaaatagaaaagctgggggtggtacatgtcaagcaccatgtagaacctatcatcaaaaccaaagagatggtggccaccaacgaccaaaattcgaattggacggacctcatcattaaagacataacaaaaggagagctcccccaagaaagggctatatccagaaagctacagtatcaggctcatcgatatttaatgatggaaaatgatctttatcgaagggggctcagcatgtcgtacttaaggtgtgtgtcggaccctgaagctagacggatcatgcaggagctccatggggctccaatggaaagcaatttgattgcga

SEQ ID NO: 321495 - DNA, 986 bp, Cannabis indica
agggcgtagttatgtttggcgatccggagcaattgcctctcttcgtctgcggggaccggagtgagaacaataccatgcggcacagtgtctttctcgacttcagaaggaatcctggagtcggtgctaacagccagcgtatcccttctcctgggcctcttagaagactcggcctcaatcatcttaccctttttcttatgctcaagggaagccgcaatttcgccctcctcctcctcaactttctcttcttcgtctaccaagactattgtggccgagggggcactggacgatgacctcccaggggtcaccagttgggatgaggccagaagtagagaagcgtccgggctataagcctcggcgagggtggccaagagatcatccattggcttggctgctgcaacaaagaaataaacaaagtgttagaatcgccataagaaggcatgcgcccaacaacaaagcgataaagctaatcctaccccgactctctaattcagccctagcaaagtcttgaactacagtgctggctttgtcatccccaagaaagctgtccgaggggagaaaccagctggaagacatcgacctaagaaatggcctaagtgggaaaaatagaactctttggcatgatccccccactgagtggaaggcatcctaaacttataaaggcgctcatcaaatcctatgggcctacattgggtatactctcggacagaggggacttggtgaattactaaaggagacttaccagaacctaaaatactggcatctggagtgccagtgttgggaaccgggacaaaaggcttaggccaggaagacctcctatccgtgcctgcttctaggcaaagggtcctccctcctgaagatgtattttcggtaccggtcctccgttgaggtgattattgttgggttttatgccctaaataaaactcatttcatataattagatttacttattaataaagatcagaaataacattttatgttgcatggtt

SEQ ID NO: 321496 - DNA, 1128 bp, Cannabis indica
gatgcactggcacccacccaatctcttccttgaagatttggagaccagtgggtgtgttgctttggtatagtaaagtgaggagcgaggtgtctgtgtgagcggccaagcccatggctttggtgggatcaggacagattgggtatgagtttaattgaagtgggccgtatggattcttcaaccctgttttgggcttaacttgtttcgtatcttcttgggtcaggcccaaagacccaaacatcaggtctaatagggtttcagctaatttattcatctcatttcgatacattaccatgacatcgctgcaagtaggaacaagaatagccgttaatattatataatacaaaatgtgatggaaaatcactctatttgttacacaaaagtatcataagaaactatgtaaattatatataagaaaaaatgtatgtatcataacattatataacacgtaagtgtgttaaaaaaaatagaaattacacattttattgggcatcatttttgcccctaaccataagccatggatatatattttgtttgtgttgacaaaaattctaaataatttatggtgtcagaaataaaatttaatagagtcaattacatattgtataaataaacgaaaaattatttcatatactatttttttttaaatttacgatttagattgttttggtaatttttatgtggattttaattacaatttaaattactttattagttgcaatgtaaaatttcgtaaaaaaaaaatacgtaaaaataaaaaaattcctaaaataaaataagccattatttgaatgtaatttgtataggtgccaaaaaaataaaaaatactcatacaataaagactaaagacaaaagtgatgacatcccctaatagaagcggagacgggacggggaatccactaataaaaaaataaattcttaacggcatgaggacgagaaacactcccggccaattccccattctgtgtgtgcatcccctactgctagtagtgcaatttcatattgaatttatcttaaaacgtcacatcggtatagtattaggaacgatgcaagataaaagaccctcaagcacaacaatacttgtcctcttggactaaaatattattttgaaaaaaaaaaattagtcacacc

SEQ ID NO: 321497 - DNA, 459 bp, Cannabis indica
tggtaattcctaattggtccaagtcattaaatttttaggtacagtgttaagtaaattgtcacgtcgtaatcctggtacatgtcattaaatttttaggtacctatcgattaaatgttaagtaaatagccatgtggcaatttctggttggtccatgtcactaaatttttatttaaaaaaaataatttaatatatcaataaaaaaaatgagagacttcacatttacttacagaagttccataaatataatttagatattattactgtaaaaaattaaattttttacgccgtaaattattctaatttttaattttataaaacaaaataatttaattttaatttacagtaatttacagtatatacatataatatatatattacaaaggaaaaaagaaacagtgtccatattaatataatagaacactagtgtactgtaatttaatttatttaaatatttatttt

SEQ ID NO: 321498 - DNA, 971 bp, Cannabis indica
ctaatgttgatatactattaattagaaagaatatataattttaaagacataataattagaggatgatttcaataatgtacatggcattttggcacatcaatataaacaggatcttattgcttgctttttggcaaagtagcttttagatagatcagtaattagtagtgtcttttttaatatataaatactattgtttatccaatctccaaacttaatttaaatctaattgttatgtattctgtttgtgtgattggtgatattactttttagatacatttctaccaagattattagtgaagtttagagaaaatgagattcgaggactggtttaaaagttgtgaaggaaagaaaaggatcagcatgtgaaagtaataacaacaatattgacctacttcaaatcatcctcgaaggtgccaacaactccaatgggaatgctatagaatgattgataatatatattcatcttttaataaataattgtctcatttgatttatcatttataagtgtttttttttaaaaaacttttaagggtatttggacaaaaatataaaaattattttttgaaaaaaattaggatatgtagctttttctaaaagacttttaaaaaattatttttagaaaagttatttttaaaattaaaataatttatataaatttcaatttactttacaagtaaaattagaaacttaactaaacttggagtaaaaaaattgtaaagtattgatgtttaataataacatccttgttatcttctctttttttattttttaattattattttaaatgatgtgaagattattgatattcttaaaaaaaataatactattgacacggtttatagtctttgagaattttaagaaaaaatattgttattgagcaacagtgtatttattcaatagcatcacaattgattaacaatatttactaaaagttatttttaaaattatataagattcaaattgcatcaata

SEQ ID NO: 321499 - DNA, 1729 bp, Cannabis indica
ttaaatttagttaaatgacccactaattaaaaaattggaaatgttttactttttttagatcaaaggagagaaattctcattaatcaacaaacaaagttacaagaaagctccagtaggagccaaaccagcaaacaaaataacacaactcaagccaacaatcggctaatcaatctataattactagtatcatgttttttattgtgatgtttaattgatatttaaccactctctgaatttctttgactatgtgtgaaaccgtataagaacaattatcattaatgcacttgtttctattcatccatatgtaatacatcgtagcagcaagcactacatacacaattttttaacttttcacaagttttgttgtgactaaaagtaaaaaaatttgtagtgctccctagatttgtagtccatctcgtcgtgcaatttatatcaaaattgtaagatttaatccacttataagctccaatttgttacaacagatcacaacaaaagtattataattgtgctcgacgacttaaaaactaacaaactcgtaactaattacagttacaaataacataatcatgaaagactctaactatagttctatgaactactggaagcttataaaaaccccagattcaaagctaaagagactatctacaacattcctcttctttgtgagttaagcttagagcgagagattagagagaagctctttcgagctccattgtaatcgagagacgtaaaacaaaaataaagagagttagtgtgagactgagaagaaaaatctgtgagaaaatcaaagaatggaacacaaagattatcaactataaagttttgtggttcgaatataaagaaagcttgcaatttacctattgtgataatgaaagatcaagctactctgaggtgaacttgacagagacgtagcccttttttttgaggttataaactttgggattaatcatgtgtctctgatctagctctgtttgattaatctctctattttatttgtgtgtaaatctactcttggatctatgtatgagattgtttaatttcgtgtttgaaacctatgtttcactctctatgaaagagaaagagtttcagattggaacttgaacattctgagtgtgttactcatagggtactagggtttggttttttgtgcttgggctgggcaaaaactttgttaaactctatttgcaaaatgctctacattattaccataattaattgtggatgtacaattaatttttaataataccataatttgtgccactgtgttttaattgtgtatcttaagtgttggaaattgtagattctaaaaaaaatattaagataaaaagtttcaaccaattagattgatgagataagtactcacattagtgtgtacaaagtattttaataattgtgtacatattattattttaaaattgaatatgtatattttttgtgtcgagcgaattccatgcaccttgctgttgggattttatgccctaaataaaactcatttccatctagtctgatttgttatcaatgaaagattagaagtcatttatgtttacatgttgttttcatgtttatggtttaatatatacaaaatttgtaagtcctgaacatatagtcattcacaattacagtgatgtcaacacagtggaatgtgattgtgattatatgcttcaaaagacaaagtccctgattcattagtgcactggatttacactaatgtgataatcagcgatgaagt

SEQ ID NO: 321500 - DNA, 2545 bp, Cannabis indica
gctaatatagatgcaaagtccttagcctttttccatatggggaatagatctgatcggacaatttcccaaaggctagggcagagtgcaataagtagtggtcgcagtgaattattttacaaagtggacagaggccgagcttttagcaacgatcacatctaaaaaagtattagactttgtggtgaaaaacataatatgtcagatcagactttcacacaagattttttaagacaatggcaaacagttcgatagccaaatgtttacaaatttctgtgtgacacatggaatcataacaagtttctccgaagtagcacacccttaatcaaatggtcaggtcgaggaagtcaacaagacactcaaagacaccatgaaaaattgacttgaagaagctaaaggaaactggtcggaggaattactagaagtattgtggtcataccaaacaacagagaaaacagtaacagggaaaacaccatttcctatggtctatggttctgaagccatgctgcccgtggaattatcacctctatcccacaagagattaacctacgatcaacaaactaaccatgccctcctggcagaatcacttgatgagattgaagaaaaacaaaccttagcaaacctaaagctagtggctcatcagcaaaaggtagctcggtacttcaacaagcaagtgagggaaagacaactctttgtgggagatatggtctttagaagagtattcctaaacacaaaagatggcacaactggcatgctcggacctaactgggaaggaccacatcaggtggttgaagtcacagattctgaagcatataagatgggacggtatgacaaaaatatggagctcgttctagtaccaaggtatcaatggggaacatttgagaaaatactactagtaagtgtacaaggtctgatgaccatcttaagtacacaatgctagaacatttactcttaagtaaatggccttctaggcggatttcgcttaaaggttcagacaaaagtactcaggtcggatgaccatctttaaagtacagttcaaaaatgcaattgttttatgatttaattagttaaagatcagttagatcatgtaatagctttcataattcaataaatgtaagttactacagtaacaaatttattccgaccaataaatgaataaagatattaattatcattctaattgtgtaaataatttttataacaagttatgaatttgctgttaaaatacaaagggtttgcaaatgatcaagagtcataaatctactcagtcagttggggggcaactatacccgtacaacacatagttaaataacaagctcgatttccaaaataagggaaaatactcattaaaagataataaagcacgatataagtctgggattaaaggctgcctgtccatctcgttgtcttaaaacaaaatgaaatataagcaagtttaaaggccgcttggtcagccatattgtatagaaaaaaggcccatgggtcaagaaaaaaataaaaaacaaaaaaaagttcacacggcaggagtcctgggttctttgtacgggtcagcttggtcattggaggctagggtctcattgttttggtcagtcgaagctgaggagttagccgccttaaggttttctttgtctttctggccagcataataactaagatacgcctctttggtttcaccaaggtaatcaaagttcccctcggggttggccttctagaattcgtagaaaacctccagagcgaccgactccaaactttcgacctccttttgaagtgcttcctcccttgtctgcctagatttgacatcctcttccaaatttgacttatcttatgttaaagtggcaagaagagttcggagaccctccctatcgtccttcagaccattgatctccttggatagagcctcgacatctacctcaaattaggtggtagatggcatctcctgaatctccttcttcaggtcttgaactcggttattggtagccagaagttgtttgttcacctcgcccaactttgccctcatgtcctcaacctcctttttggttgcacccaccttcttctacagattattggtggtggttattgttttaaaggcattggacttggctcgggagtaggtgtaggccatattcatgttaagctgcacaggaaaaggttaaaacttgcacggataaaagaatgagataaaaaccaagggaaaaatacttactcaggttgcctccgtcaggagccagcccatcagaagctccacggacatctcattagctccaaccagctgatcattcacctcaggaagtagtgttgaagcatctccttgtcctttttggtcacagggttcagcacaataggagtatttgagggcctgggcaaaccagacccatctatgctacctcccttggcacccttagacttgaaggctttcttggttggtagctccacctctaacaccacctcctaagagacgtcgctaagtgactcaatcgggctcttctccttgggcgctatgtcatcaccttttaattgtttgggcagaggggtctgttgggttttgtgccct

SEQ ID NO: 321501 - DNA, 843 bp, Cannabis indica
atcaaataatatcataaacacaacataatcaatgcattaaaacaccacaattcatccatgtattcaaaattgtatatccaagtgaaataaaactcataaaatatcattcaactcatcccaagctaagcagcccttacatccaaccaattcaaacctagacaagcttgaaaccaagcctaaaaatagattttaaactcaacttatatcccagccccgaaatccttacaaccctagcaaaaacctaacctaatattcaagacattcaaggggaaaaatatcaagaactaaccttaatattaaacaaacttctgtcctttgccaattcaactcaaacatggagaatcaaaccaaaaaaaatccctggttgcagctcctcttaggggtcgggtaagaatgaaaagagaaatggaggtgatgactactatcctatctccttctatctatctatctttactagctttatttataaaaaaattaaataaactttaattaatataacttatccagccaataaaataagtaaaacaaaactatttctatcacccaaaaagactatattaccccttgttatcccaatttttgtactctgacgtggcatcacatgatggtgacacgtggaatcaactccgagtatctgctcgaagaatatagtccgaacaggatgcctcgtatgcatgctcgaagcaaagcgatcaacaatccgtgcagagcaaccaatacttagcgaatttagctttcacatagtgagtcatcaaagaaatcccaataacttggggatcagattgcagagatatgacaagttgtccaaatcccatgatcagtgtattcagtatttactatgca

SEQ ID NO: 321502 - DNA, 2417 bp, Cannabis indica
tttcccttctgaggttggattaaggttatttatcttgaattaagtaggttttatgtgtttctttgatggtagagaaaggtttgagtttatgaactcatgctttgctctacaatggtggtttgtgattctggttgtgtttaggtgttttattgcatggaatatgttcattatggtttaataagcaggtctagaaggtttggtgtgatatggggtcaatttgaggttgtgggatgattttgtgtgattcctgcactgaaccggaattccgattcaggggggcctgtaggaaccggtcgactagtcggtccctaggaaaccaagtagaactggaattctagttggggaaccggtctaccggttgtggcattttagggaaccctagtttttccctttttgtaatattatccatcgatagagaaactcttagtttcaattttaagtccccaaaaagtgatttagcgtgtcacttaccaattttatgaataatgtgatttaggggtctgtaaatcgtcgaggagctattccactcaggttggcaagcacacctgaattcggtaatgaggtaagactagtataatgatatatgtatgcttttacatgtttagcatgcatgtttgttaaacctgttagattacattataatagtagtatcaatatatttagtattatattggatatcgataaatgtatgttggcttaagtgctacttgacagtatcacatcagtatgactagagtatgactagcgtactaagtataggctgatattatggtcaatagtactatcgtacgaacgttcttgactcaggaccatgttggacacgggattagggttatagttgggtgtatgggtgcctcattataatctgagcttaaagaccgcttaactttaatttggaaattagcagttaaatatggtttaattatgaaacttgcatattagttatgaattatcagtttacggagatttatttgaatttacaatgtatgttatatatcatatataaaatttcatatttttgcatgttttgtgcccgacaacattggaacgcggtgtttgggtattagaatcacatcttagtatttttaatatagcgagccaatatagttagacattagaaatgtcgggattagtcgagattttagaaatgaccatattatcatgtggtggttttatgactttttgcctaagtggagggcaaaagggtatttttcttaagtgactttttgtcctttagtggactttaattggatttttattctgattttcagctgaatataattagataaaaccaagtgttatttcctcattttattaaaaataaaaaattagaaaagatacttttctctctctccaagttctctctctttcgaaccctatagaacccagctacagtttgttgttttgctgcttaattcaaggaattccagcaattgttttgtgattccaagctcaaggtaagttcctagcaccttctctttgttaattcttatgttttaagcaaggtttatgcatgatttcgggattaaggttactattcttgtggtttgttttcaatgaggtattctgaagttagatttatgtttatttagctgatttgaagttaattggtaggttgttttagttgttagacaaagtttgagttttagaactcaaactttggtctttaatggtgaattttgattttgagcatgctatgtaattttgttaattggattatgtttattggggtaaggaaagtttggtttgatttaggttacgaattggtcaagttttgaaaatgtttgggttaccttgtgtaaaatcggttaaccagttttacaggccctgtaaaactgattaaccggatcagaaactagtttcctgaactttttgtgttgtcgattgggttagttttacagctttggttggttatttccttgacagtttagggtattgccatattagcttttagtaggaaagttttttatttaaaacctaagtccccggagtgatttagcgtgtcacttacccgtgttatgaacgatgtgatttagaggactgtaattcaccgagcaattgttccactcaggttgcccggcacacctaaatttggaaacaaggtaaaattagtatgatatgcatatgtgattacttgtttagcatacatggtagttgccgtcagaataacatatcagggtatcagtaaggtgtacatagagttgtaccgagatactaacagatatatgttaggcaaatctatagcaatcagattagcatatcagggcatcggtgaggtgtacatagagttgcaccgagatgccaacagatatatgctacgctattagatagtatgagttatctgctaccacatcagtccgactagagtactgagtataggctagattcgcagttagtcatactttgtcgagaacgtt

SEQ ID NO: 321503 - DNA, 1539 bp, Cannabis indica
aatccgatctaaaagtgctatgacaaaattgtttatattttttgtacctgttcgtattaagcattgtcttcaagttggttgtattaaaaaaaaaagttgtcaaaaattaagctcagagtcctatttttactattttagaaaatacagggtccaatctataacttttgcaaaacatagggtccaaaatagtatttaccattatatttattttgttgcataatcccaaaaggcataataacctctacggttgtctacgtggccataattgacgttcaaggatgaatctcaaccataggattaaatgaccatgatgtcactaagtttttcctttttggttcaaaaagtcatgaacttttattaatatattcacacactaataattaattcattcattgtttaataatagaataataataataataataataataatagcacaagtttagggatgacatcattcccactccactcaatcttaaatctcaatcctttgatttaaaatttattttattataattttcataaatgtttttgttttatcttgaagcttagcttaattttttcacacaaacgacagaacaagactgcataaaggggtttgataacaccaagtggacctcacaaattattattatattttcaaaatattgattatttcattctattttaccttacaaaacttaaaataatatactatattttttttatataaaaatggtttactaaagaataggatttttttatctatttcgatatttaaaaaatttattaatttaattttttttatgattgcgcacattgtagctgcttaagatcacttgcaaatttttaaaaaattcagaatagtttaccgtgacaaaaataagatttaaacagttacttacctcgcggaaaaaataatcgctgtgtataataaaatatgtaaattttatttttagtattgtaaactactcgaaattttttataaatttagaggcagtctaaaataactataatatacacgatcatgaaaaaaaaaatagactaaaaaatatttttaaatgataaaatagttaaggagttactgaaacattccaataaatgtattgtaaacttacccaatgatttatacaattctatgtgtcctttggatcttcgattttaaacaataataaataaataaataatactttttttagaacataaataagtaataccttacctctcaacaatttaactcatcttttgtatgtatttagtttttttttagtgttattattgaccaattttaagtttgagaatacaaattttttggggggctaatttgtaaaacataaagtatttattgtaattgtttaaaaataaaggtataaaggatattgaaagaaatttgagacgaaaaataatgtaatttttataaaactactatataataatagaaaaaaagtatactttcaaagaaaaaataataataatagaaaagggttaagttgaaaaatgcctcttttattaatcaattaactaaatttgtctctaattttatatttatttgaaacatac

SEQ ID NO: 321504 - DNA, 906 bp, Cannabis indica
catgatctaattatatgtcacccctattaaacatcaaacaaaaattgctacattttttttagtaccaaacttaacctctaataagaaaactaaactccttcccctatcttttctctttaattcttgtgtccctctctctacaaagtcacacatacacacaccttttgtcggagtctatcaactttgcttgacaaccaagtgtgtactcaaactccctaccgatataattcttgaaaaaaataatagatatgtaatttatttagtaattattattagatttagttgcatttagattgatatgaatagatctatacatatcatcttttatttttgttgtcttgttcttgaaactcgagctgctcagatttcacattttctgatttgttttctgagtttaatttagcgatgtttagcaatactgttggtgatagctagcgacattagagtaggctaaaggttagagatgaattttaacgacatgtagcaacatgtagcgattaaatttacgatattggccaatttttgttttttacttacgacttttacgatatctatcaacattatttgcgatatgtgtcgatgttcttagaaaatattttggtaaagcagtagagaaggatatttatcgacttgtggcaattctttgcgatgtagttatcgacatggttaacgacatgttgcgacaacacttgcaatatctctcgatatatttttcctaaactaatttttgccatttttgtttgcagatttaattgtatttatagttgtactatatgatgggacttggacaaataaaggtttgaactagatattcatcaatattccaaaaagtaagatgttgatatttgagattgacacggctttacaaaagatacatgaaattttgtatgaagagttggatataga

SEQ ID NO: 321505 - DNA, 617 bp, Cannabis indica
aaaataatttccaacatcaaccaccgtccaggggtaggatgatggtccgcacaaaataaactatgtggaagattgctacagctgaccctcacatggcctggcacgccacgatgctgagagctgaacaagctcggcgtgctgttgaggaagaggattacgaaggggacattgaagtctaggaaatagaggatcagggagaggtccgtcctgatagttcctctgaggctgaggaggatggagttgctcagcctttgcggttcgaaggtgatgactacgtcaccgaggagtacgccgaggaagttcctcaaaggaggcaaggtgcctttaggactcggtgggtgtgtcccctatctattgtaactcaggcccagttgaggagtttagagaaggatgtatacctgggcagtgtcgaatgctttttcctttcttcaaatcatcgggcaactaatctaagggagggataatgtgcctggtcgggtgctcacaccaagcaaggtgcgatgctgcctctacattcgtactttaaaaagattgcagactattaccacctctggccgactaagctcacacccaagggcatcaaatacttatctgccctgttcatcctctatgccact

SEQ ID NO: 321506 - DNA, 1137 bp, Cannabis indica
attatattttctctaaatgactcatcaaataaattgaataatactatataaagattgcatgtgaggtggaatatttctgattcaattatgagatttggcaatcaaattacaaatattagttgtacaaagatactttaattatttaattatttagattatgatttgttttgtatataaaatgtacatatttaatatttaagttttgaaaaatatatatactatgaattagttttgtttaattacacttaaaaatacgaataatacatttataatttttaaaataaatatacataagtgttaggtattagtttgtgttatttttgagttttgtttttaagtgtttttaatgaatttagttttattttaggctttaatttgttaatgtttttttttttgaaagaaaatatgttattaatcaactcaaatcagctgttacaggagcactaataaatctaggacacacatctgtccaaacacgaacccttatagaactagtaatagacttagccagtgcgtgggccacaccattcgcatcgcgcgaaatgacataacaagaaccaccaccaacagcagctaaaagagaaaataaataatttgttaatgttttcagctttagtgaataaagaagaaaataaataagttgaaaaatggttgcaaatcaaagaattaattgcatgtccattgttagcatgtcaaaagtggaaatcatggaatatttgagaagtttgagaattcaagaagttggagtagcaccatgacattgatttggaaaaaaatagcagcaagcatgagaatttgaggttatatgcgggccatggcatggtgtgaaccatgtcgtggcattagaagggagattgcccaataatcaagcacacatgctgcgacattgtataggccatgctacggcccgccttaaggaaaatgacgtcaaaattttacattttcgacacaggccgtgacattgcataagtcatgccgcgacccgcctgctaatttttgcctagtaggttttaaaacctaattcaaatttagagaaagggggctttggattggaggctttttggaggcacgaaattggagagaaaaaggagacttataaaactacaactattgatcttcaagtgttcttttttttat

SEQ ID NO: 321507 - DNA, 1509 bp, Cannabis indica
ctgcccagccatagggcaatgattcgcctccatctgaagaacaagatagatattgaatgcatgaaaggataggggaaagaaggagagccaaaggttgtctgagcaaacattaatggtagtctcggtagagggaaaacgggggctgcattaaagaataagcaatgatgatatgcagggtataatgaaaatgcattaattagggaaagaaaagaagggaaaacgacggttgggatgtagaagtgaactagaagagaactgggagaaaactggaagaataccagaaaagaccctagaacattccagagcagggacttgattacaattattgaagctttagttattttgcgctctctttcttctttaatttttttattttttttaaattagtgttttatatattacgaaaatttaattttatagtcattacataaattatttttttggaattgccgatacctcgatcaaaccagataggttgttagtatacacccaattagtcacgttatgggcaataaaattaaaacaccaaaaatcttaacaaaatcacaacccaccaatagttaaaaaaaaaaaaagaaatgcacctactaacatagctatcaatctcccatcttagtgaacttcctctaagagcgttgatattggtaatttccgaatcactctcaataataaaaaattgtagcccaaagctactgaagcctctagagcaactaagcaagcaacaacttcaccaatgagggtatctaaaaaaagaatattgttgacagctatccacacaaatgagcccacatggtcacgagccacatttgtcatacacatggtctccctcctatttctcccgtcacaattgatcttaataaaatcattcggaaggaggtaccatcgagtctcagtgacccgaatccttttactttgtcattctctttggggttttacactagaaattacagtaaatgaccccaaatcataggactatgttagtaaatgtcttcatttcaaaacttgtaaaaaaatagtcgttttagactatttattatttatattgtcttttgctacataaaaacaaattaataatttttttagaattagaagcaaattacttaaagatcatggtatatctatattaattttgctcaattttttttttatttaaaagttctatcaatttttttcaatttcttattagttgttgtggttgttggtatattggtacctctaggtaaatcataatgtataaggctaattattagcaaagtaccatcttaagtacatttacttagacaaatagtgcgtcctaagttgtgcacttgactataatgaactcattaccaagtctaatacagagttcccaagggaaaccatgcctacaattgtatatgcctccaaaggtcgtcacaaggccgtagctaaggtcaatagaggacaaagaacgagctccccgttttgaaccttggccttggccagctaggattccccagccttagagggccggccaggtcccatgaccta

SEQ ID NO: 321508 - DNA, 1565 bp, Cannabis indica
gtggcatatatataacttgtaccacgtgttggctactgaaggagtttaattaaaaaaaagagatacataacctagatgtcactttactaggctcacacatgttattatatatatagccccactaaaagttggaatcttcacacctgagaacaattttcctttttgtcttttgtcatcaccagaacaaattgtttgaaattattgagtgtagcatagataaaatgaatagtttcggttgccttttagaaaatttgaagtttcttgttttttctccttttcacaaacttgcccatctcaaaaatttgatatgctatttatttgtattttactaccgatgttttcgactcaagttaaacccatttattgtccaagtattatatttcctcatcgttagtttcttcggttatttagttctagcttctttgaaaccaagaactgaccattccttcacccctagaaaactagacatgttctttaccagcgtgtcagccatgaccgtttcgagcatatctacggtggaaatggaggttttctcaaatacccaactcatcattttaaccattttgatgtttgttggaggagaagttttcacttccttattggaactttacatcaaacagttcatgctcaaaaaaaaccaatacaaggtcgctagctgcgatcatatcatttctccctcaaatccaaatcacgaaagaagtactcatcaattagagttagatatagttcttccacagactcagacaattaatgatttgagttgtttgaagtataaatcattaaaatatcttgggttcgtattagtaggctatctcttagtgattcatttctttggcgcaacgattgtttttatctatatgtctattatttctagtgcaaaaaatgtactgaaaaataaagggctaaacaccctcaacttctcaatcttcacaactgtgtccacttttgccaactgtggtttcgttcccactaacgaaaatatgatgattttcagcaaaaactctggccttcttctaatcctagcacctcaggttcttctggggaacactttttttccctcgtgcatacgattttccatctgggttttgggaaaacttaaagttgggaaagaaaaatcggagtacctgttaaggaataatggtgataatattgggaaccttcatttcttgcttccgggtctgcattgttggctggtgattcctacggttttggggttcatttttatacaattcgttctgtttagctctttggaatggaattcagagtctttgggtggaatgaatgggtatcaaaaaattataagttctttgttccagagtgttaatacaagatatacaggagaaactatcgtcgacgtttccataatatctccggccatcttagtcttattcctcttcatgatgttagtccctccctctctctctttaattattcattttttctaaaatttttatcatttaaattcattttgatgcttttttttggtgccgtttggtaacaattttgttttttaattttttaatcacaaaatgaaatcaaaatttttgtttttaaaaaatttattt

SEQ ID NO: 321509 - DNA, 1716 bp, Cannabis indica
ttaatacttttttttttttttggctcaatatatgaatatatattcaagatatgtattgaatattaaaagaaaaaggcttatcttttaattagtttagttttaaagtcactgctctctaaaattatgtttgtcaatttattaatatttagcaaatgtgattcatgtcccacaaccgtagtgatcaccaatctgactctccaagaaatgctttcagggttttgtccttattcatttcaaactagttatgctaagtctttttttagagtataataggtagtatttattaaagatatttaaaatctttacattatttaaaaatataatattttattttattttatttttatattttacttttaaaacagtttaataatatagtgcttttttgaaaatactgtaattataatattacatattattatttaatatattatttattttaattatatataaatattgtcacactatttatttacttttaatttttagttttttttttaagaaggagatagtatcaatatcatatggtgacatcaacataattttctatgataacactaatttatctctaatggtatagcatctttgtattttaccaaataattatttcatataaacaagcattctctaaatgttaaccatatcataattctctaaggtgataattttcttggtcttgtttaatagcgcaagcaaaagcaactacctagagaattagtataaacaaatagtattagaatttagaataagatgaataaggttccatcataaaatcaattgacaatggaaagagtagcccattcatcttacatatggttatttatttctacacattagcaatgtgagactaattctaatataccctcctcactttgggcctaaaaagtgtgggtataacgaacgatatgtaagaaaccacgtgaccgaacgtgatatttgaaaaattcccacaaggccaaatatcgggaaatttgtaggtgtacacgtcaggaaatttgtgaattttgaaacaagtcaaagatccaacactaaaaattggcatagaggttaaaggggagacatcggaagtttttaagtttgggctcacaatagatcacaaacgactctttttttgagtcgctctttgggaccgacgacactttgggctcacaacagatcataagcggctcttataccatgttaagaatcatgaagttctatcttaaaactaattggtaatgggaggagtagctcatttatcttatatatgataatttattttcacacattaacaatgtgggactaactctactaaatagtatttttgtagttggtagttgggattttgttgggcaaccacaaaactaggagttcgatcactcctaaaaaccacaattgtatatgtgtgtacatatccatactttgcataattttggtgctatggtggtagcttgttcttataatgatggtgttcagtagcgtgttcatctaatccaattcatattattttacttatagtgtattcaattcaaataagtgcgaattttatattttagtttcaatctaatttatacaatatttcaaatatatttaatccaatttgtaatagttctaggattggttattttgaattgattacttttaaaattaaattgaattatttaatattgattaaaacatgagtatatttcacataactaacaataaaataaaacaaattattgttgttttatgttt

SEQ ID NO: 321510 - DNA, 1363 bp, Cannabis indica
ttttattaaaaaaaattatttaactacactacacaatatagcacatatcaccattcaggtatatatttctctttagtactttcaaccgctttctcctctttgatctttattaatttttttatgtaaattctattattatatatatttatatgatagtttcttttagaggttgagatcataattcaaaactttgataatgcaacactatcacaatttttatacgacataataagatgattaattctctttctaatagatatttacttgaaataataatggaaatttatacatgtacactttttttttcaagtgatcattctttcaataaaaatagtgttggttgctgggtttgagaagaaggcgtagagttttggtggagcaccggtgttggtggctggtgattgagtttctaattctattatgtgttgccaaagaaatttatttggtactattttttttttacgttattaaaaagttaaaaagtgatacaattaaaaattaaaaaaatattaaaaaatattattagttattaggttgaacatcattatcctgtattcatttttaaggaaaaaaaaatatatttatgaaataataatttgttgcaacgcgagtacaagcaaaattcagaaaatatagcatttattagtaaagtattgacaatatcaacagtaaattaactgactgtatacttttttgtctactaacattaagcttttgatatttgagtggtgaactcttatttattcgcttttcaaatttttctaacactctcatcttatttttttcaactttctgtaattagagtgatgtccttaattggtgtatatagtgtagtcatttattcacctgttttcaaataaaacaatagatatacaaaataaaaaatataattaagctcatattaaaatcaatctcacctttcaatatagtgaaaggtttttaaattgattcattctcacttaataattgtgacagacctaacgaataataatattatgttacctaataacaaaataggaatccaccaaacaacattatcaaaatttattccaagtataattatataaatctattactcattgaagtctattagaaactctaaaaagctcacaatacgaaatttcacatcaaaaatctaaaaatgatcaactatgtagcaggaatgataatacaataaccaaaattgcctagtcatatacagtcttaaaacttaaaagagtggcattattcattcaagtttcgactaagtgtttctgagtttgagttataatattgtgtcctgtgtttatgtccaaatattgtgtgtgtctggctaatctagtgaagaagattgaagttttgattctcaataaatagaatgaat

SEQ ID NO: 321511 - DNA, 585 bp, Cannabis indica
atttcatataattttttatttaaatatgtttatcttaataaacaatatatgttttaatttttattttatacttttaagaatataattagaaaaatataaaaagaaaattaataaattaaaaaaaaattatgtctcttttattctgtatacaacaacacagcatgaactagtaatcaatgaagttcacaaatttttttgtttgctcgtgaatttgttgtttgaattttcaagagttttcctaatcagggccaattctagactaaatccggctaaatctacatttatggctcatccattttagggactcaaataaaaagtatattttttgaaatacatacaattttttcaaaaaattattaaaaaatactatttatttttataatcaagtctatttttttttttaaagcccatttcaactcagggtcatacaaactattaatatgattgcacataaattaattgtgattgctcatttttcaaacaaataaacaacatataacatatttgactaaataactttatgtatttcctttaaattatatagtcttttatctagggccggccctgaaaatttatgggcccaag

SEQ ID NO: 321512 - DNA, 767 bp, Cannabis indica
ttattattttatatgaatttatattaagtacgtcccctattaaaacttgcacactcaatcaagaaacttgatatcatcatgtggatgttgagaaaatttatataaaaaaacatatgtctgagagaaaaagcttaccaaaaaaagaaaagaaagagaaaatagtgggagaagatatatataatcaatacacgaaactccaactggataattgaatgtgaagggctacacctacaactatgaactgtgtcccatacaaaatcagagaaaaacaaacaaaatcaccacaaaattgggagaaatatcacttttttgctttttgagaaatattttggtaagagtagccagcctacctttattttcttaattttcactattttttaagccattattacacccttatcatcaaacagattcgaaatgtgaatgcctgagatagtaaaagagatttggcttgttattatgaagttgtcatattcatgcattgcatgtaccaatcttatgaatgcagatagttagcaatttttttaaatggggagataatgttgttcagttctactatcacacgttgcaccggctttggtgtggaacactgtaaaaataagttcttaatgtatatatactatatttttatatttttataatacactgcttcaaagaggggttcaatacaattttgatttgtatgggctcgtttgtaacgccgtattaggtcgtattttattatattatattgaattgtattttatataaaactatatgtggtatta

SEQ ID NO: 321513 - DNA, 1917 bp, Cannabis indica
aatgaccaatcggctgttgctattcaaagaacgcttgacatttatcatagggcctcgggccaggttctaaataacaacaaatcaacaatgtcattctctcccaacactccaatggctgcccaacatttttttgctcaaacacttaatatgcccatcacagaatgtcatgaacgatacttgggactcccttcttactctggaagagataaacaagagctttttagtaatattaaggaaaaagtttggaagcttctttatgcttggaatgagcaaattttctcagctgggggaaaagaggtcttgcttaaagcggtagtacaatccatctcgacctatgctatgagttgttttaaactcacaaagaaattttgcaatcaattggagagcatgatggctaacttttggtggagtactaatcaaaagggcactaaaatccattggaaaaggtggaattctctatgcaaatcaaagcatgaagggggcatgggatttaaatcttttgttcatttcaaccaagcactcttggccaaacaagcttggcgaatttttaacatgccggattctttactcagccgtttgttaaagcatagatatttttcaaccacttcctttctggatgctaatattgggcactctccatcgtatacttggcaaagcatttgttggggaagagaactcttggtgaagggtatgagattcaaggttggtaatggtcatcacatatcctgtggtacggatccttggattccaagccatacgaatttcaagccgattagttataacggtccacccaacatgtcagtctcaagccttattactgaacagagagtttggaaccttgagatgttaaatagcttctttcaaccgatcgatgtggagaagattttaaccattcctttgagtttctttgcctctaatgatcgactcatctggcatcattctacctcaggttcgtataatgttaaatctgggttccatttagcctcatccttagaggaacaagatgcatgttctgcctctgatttgaatcttgcttggtggaagttcttctggagcttgaacttacccccaaaaataagaatttttgcatggaaagttcatcataatatactacctactgctgctgcacttcacaagaggaaaattattgattcagcagcttgttccctatgcacttctagttgggaatcagttgggcatgcactttttgattgtaagcatgctagaaaaatttggcaggattcaaagtttctcactgatttcaatatggccaaaacaatgcagaatggtgattatctccagcttttatcttcagtttatactaaggaagatttcgaactgctggtttgtattatgtggggtatttggacagatcgaaacaaaatcttccatggtggtcaggcacggcccagttcctcaattgttgcttatgcaactagtttccaccaggactattgcagagcaaaatcgcactctggccgcactgctacctcaccttctaccgatcctttgccgattaacaatcaccaaaagaagcaagttccctggtctgcgcctacattaaatggctataagttaaatgttgatgcagccacgaacacagaacagaaacttcttggcataggggccattcttagggaccacaatggcatggttattgcagcactttcaaaaacagtgcaaggaactttccgctcggatgaaatggaagcgaaagccctttttcatgctctcaattgggcgtcacaacagcaactcgctataacacatattgaaactgatgcattgagagtttccacttcaattaattcatctcttgctgatttatcatgtttttcggatattatttttgatgttcagtgtcttttgtcctttttccctgatgttttcaagcagctcatgggttagctaaatttg

SEQ ID NO: 321514 - DNA, 564 bp, Cannabis indica
ggttcattctcatgacttttaaattacttagcattggaataattttaagagtaaagtggtcaaaaatgatgtgaatgaaaaaaaaaaaaaatataatattttaagataatgtagaaattgttggctatgttttaagatacttgcattggagttacttttagatctatgcaccttcaagtgagactaacgtcatagaattggcgacttccgaaaagggtgacctgtggattaggccaccgtagagaagagcatcgcggactttggcttaaaagagataagtattgctaggttcgcatagtatataactacttgaacaccctcttttcttatgctaactgtagtaagttctaccgaaatggaggtattatataccagaatgagtatatagtgcaatcctaaatcagtatggaaactgtatagcatatgaattatgaatcactcatcatccacaaattttgtatgaatggtgtacttgcaacaaaaacctgtaaccagaacgatactgcaaaaaaatagaagcaacggtatataatttggcataaataatgaaaaacataggggtgt

SEQ ID NO: 321515 - DNA, 1027 bp, Cannabis indica
tctttcttcttcttcttcttcccttaacccgatggcaacccaaaaacccccacccatgacactccaaccccgtgatcccttgagccacggaaccccacctagaaaccccaacctcatgatcccccgagccatgaacccagaaaccctaaccccgtgatcccctaagccacaaacccccacccacaaactccaacccaaaaatcatcatcttcttcttcttcttcaatctatcaacaccaccattcacaaccacggaaactaccaccaccaccactgccgaagcatattctcagatcacagacccaacaaaattaaacaaaactcaaaaaaattaaaatacaattaaactaaatcaaactaaaatcaaacccttctctcgcttcccagcacacctattttgtcacccccaaacctgaattcaaagttttcccgattttcaatttgggcgagtacaatgtattgcttaaatcctgttccctcaattgggtcttaaccattgggggtcgaccagatcgacaaggttgatagggaagactcgtgaacgatttaggctgatagtgtcaagaagggagaaaggagtacagagcaaatgattgtaaagattggagattttagtcctaaatttttagtttagggagttaatcgtaccaaatttcaaaatttaaaaaatttgaccacaaattactttaaaatatataacgtgtcactaaattataccaataataatatatatcagatatgtcctactataattttactcacgctatcaagtaaatcttagagtattcacactagattttttactatattatttaaaatatcttatcaaaattttatagtatttattttatacatttatattatgtcattaaccaattttattatattgttctcatcatgacatcatctaactattatttaaccttttcattaattagatattgggaaaaaaataataaaaaaattgattatttaaagaaagagaaaacaaaatatagaaaaattaatgtttggcatcataactaaa

SEQ ID NO: 321516 - DNA, 1749 bp, Cannabis indica
ttttttttgaatggaaatatggcaattttattaaatagaatcagccattacaatgttcgtcaactcagaaggtgagttggttacattaaagatacgtactgacgagtaacaagagctctgagcaaggaaatgcgcggccttattagcagtgcgtttaacaaaaatcaaagagacattagataattcatcaagcaaattcttacaatccgaaaccagaaatccgaagtaagaagggaggcacaccgagctatgtattgcttgaacagcaacaaggcaatccgtctctacaatcaccgaaggccaagtcttagtcttgagccaactcaaaacttctttgataccaataacttcagccacttcaggggaggcacttccgagagtaatagaagtacgggcttcaattatgataccatcacaatctctagctatgaagccaaaaccatgagaattcgaagcttgaaaaattgctccatcaacatttaccttaatcgtgttaatatccggtttagtccaacgctcatcctctactccatgagcaacatgagttagaggttccattcgcctttgttgagcgcatttccattgattaaggttagaacgtgctgaaagaacaattgtagcagcagccgaacttttttggttccatagcaaatcatttcgggcattccaaatcgcccaacaaatcattaaagcttcctccacattagatgtagagtttacttcaaaaagatgccaaaaccagtcctcaaaaaccacttcggagacagcattcaagtgcacacttgaacgattccagcaagagtgtgcaacagagcattgcacgagaatgtgataaacagtttctgcattaatattgcagaaagggcagagcatatttaccacaacatgcttcgagtgcaactgagtttttgttgggagacaacctgttaaagctctccagccgaagtgaagcactttttggggaattttgagctgccaataagatttccatctggtgttatcactgctgtctggagcttctacagcagcagtaaggtacttgtatgaacttttgactgaaaacatcccagatgcctctaacttccagctccagcagtcttccctttcaatcggactaagtgaaatctgataaataagagagctatctcttcccttttattattacgaagtttgatgaataactttttggtaataagttggttttggatagatttttttctataaagaatattgattaatgtgctatgttcaatctcataaataaataaaggaaaataaaccatataaaattttggtttgaaaaaaaaaaatgttgatcggtcaacccgttcattcacagacgggtacaagtcttatttgaaaaccagttgtgaatccgaaattcggttaccccgcctaatattcaatcctaccttttagtaagaaaaagtattaaaccactagattatgcttttgatcacaatattaaattatttaatatgtataaaaaatatatattttacacataactaacaacaaaataaaataaattattttctcaaaaaataaataaataaataaataaaataaactaattgttgttttatgtcttcaacaacaaattaaaataaataaaaataaaaaataaacaaaattcaaaagaaattaaaaaaaaatagtaatgtaataaataaatatttagtttgttttaaattattttctttataataaaatagaatatatatatttgatctactaagttttgaatta

SEQ ID NO: 321517 - DNA, 837 bp, Cannabis indica
ccgcaaagacaaaaattgagaaaatgaaaagcccggggaaccctgccaaaaccggctagccggtttttgtggcactgcaaaccggctagccggtttgcaccagtttccccaaagcccttcatttgttgctcaactctccagcaaacgcaatgaaaccttctagagtacctaataagggcatacacaacattttccaaccagaaaatcacagaacaaaccattgaactcaagttgccattaatgatcaaagctttgaactcaaagctaaaaattgcataaaacctaaaccaatcaacaataccagctgctaggatcctaaaacaactcaaattaaacataaaattcgaattccaaacaaccctaaccctaacagctcctaaaactcaaaatcacctcatgaatccaagtaaaacttgagaaaaaaccatagagcaactagggctacctcacttgcaacaactttgaatccttgctaaatcataagaaaaagagagtttgggttgagtgttccttctggttgagaggggtcgaacaccaagagagagaaagaaatggtattttctctaattttccttctttttcttatttatccaagctaataattccttcttaaattaacttaggctgaattaaaataggtgtcatcacccaaggctgctacctaaccttcattagccactttactaaaatgcccctcaagcataaaactagggtattctaaagctaggggtaaaatagtcaaatcccataatcccgctcaaccccgatattttatttcctataaaatatttcccaccaagaaataaggttataaacttacccatgtgatcaatctag

SEQ ID NO: 321518 - DNA, 555 bp, Cannabis indica
atttaagtatataaaatctgaaacattaaatatttataccgcagtttagtcaataaaattttttcttcataaaacaatgatttttttttctgacttcttttgatgctggtggtttagaaggcaacaaattacaaaaggatgtgtttggtcgtccaacctttaggcaaatggaagacaaaacttcacctcagcgaaggaagcttgactgttagagtagtattacacgtttattttatagagatgtgagggataccacttttgcttatatagttagggacatcaattaattctttgctattttaaaaaaattataattcaaatttttttatataacaatttacattataattacaattacagtaaatattttattagttttgaaaaattctaataatttacgatttggaaagcagacttcgaaaactcaattgcacctgtgtttttatttgcatgtatgaagctcaatatttgaattatcttcttttcctcactataaaatgttctaaattttctaaagtcaagtgtaatatctactataactacattatatatata

SEQ ID NO: 321519 - DNA, 2038 bp, Cannabis indica
gtaatgggttttatttagggcacaaaacccaacttagggtgcattaataactggttgtgctcccagtgctaagtcaataacaaaatatatttctctctgtggtagtaaacctggaagttcatcatgaaatacatctagaaatttttgaaccactctgacatcctctggccgaatggattcaagtcatgtggtatccaataccaataccaaaaaccctagacatccatcttgtaataattttctagctttcaatactgagaatactgaaatttgggatacctaaattgatcccacaaaaataaatgtttcctcgccctcaggttgaaagatcaccatcttctacttacaatcaatactagctaagtatttggacataacatccattccaagtatgatatcaaaatctgctaaacccaattctactaaatcaacactcaactctctatcctcaattcttatcggcatagacctaacccaccaattggagataactaattctccaccaggtagtagggttccgaaccccttatcataactatcaaatggtttacccagtttatcaaaaattctagccgccacataggaatgagtgggccaagagtcagataatatagagaagtaagagttgttgaccgagagctgacctgtaacaactgaaggattggcttctgcgtccgcctgaataagcgtaaacacccttgttggagtgggctttgctcttgccttccgttcttctttcttgagttgcggacaatccctcttatagtatctaggaaaaccacactagaaacatcatctccctctacactcacctagatgatgcttcttaaaattgggacattctgggtaagtatatcaggtttcagaaccaccttgacatttgcctcgaccctggttccctcgaaaccttttgttcttatttaagccaccaggtgtagctggtccctttctcttctggtcagcgatcgagtcactacaacccctaccataactagttgtaggaggagtagtggctccaacaacaacttgagtccctcgagactcctggatgcactcaattgcacccttagctaatagtgccttccccaccatatcaacataggttgtatcataattattggtgatcataacgtcatgtctgatttcaggattgagtccatccaggtacttttctttcttactcaagtcggttggtgaaattctcgaatccaaccctgccagcctattgaactgagttgtatattcggtagcagacatattttccttctaagtaaattggataaattcttttctctttgcacatccaactgcatcattataatactttgcattgaaaaattcctggatctcttcccagataacggtagtgacatcccgagtcaaagccaccataaaccaccataccagggcatcatcctagaattggaatatggcataagccactctatcgttgctagtgacaccaatgaagttcaagatttatgtaataactatcagccacagttcgaatttcatcacacaggacctcctagaaagacaagaggtgcctgcttgcagaacctttcatatagtggttccatctggttcatagtagcaacctctcttgcctgcacagtaggagcaggagccacctgcatctctagagtgggatttcaaaagcaccttgctgcctcaaacgcctgatctcttcgtcttattcattgattctggcttgcattgctgcaaatgtattttcccaatcctgggcaacctgcaatgggttatcatctccttgaccgcatgccctgcctcagccatgtatattcaggagaatttgaactccctaaccaccacttaatctgatagagttaccttggctcctcgtgttgcgcctggcctccattctaatagaacatcctgggaaacaaggagttagcctagtcaaattgcgaccaagaataaattagtaattataacttattttagaaattaaaacatgcgcctattcagctattaggctactaacatgtttctattggaatttattttaccaggatct

SEQ ID NO: 321520 - DNA, 944 bp, Cannabis indica
gtaaaataatttctaacaatttaaacagtaaaaatataaactagaaaaccaataacagcaagaaaaaaaatagagtaggtgaacacaatgagtgacaaggtttaaccacaagttgtaacacttggatcgaatccttgggaggatctgccttgggctttgcctttattacttgaagatgatgcttagaaaggatacaattatggacaataacagaattgaatggagtctttctcctacccaaaaaccaggttcactcgagagacatgagttatgaactctcatgctctttacagcaataatcactctcaactcacaccaagttcacccactaatgaatcaccaaaatgatctttgtatatatagaccgatacaaagagtacaagaacccaacaaacttaacagaattaactaactaattcaactaccaaaactgtccaaaaatagtcacttgcaccagtgtataaaccccacaaattccacctggtttataaatttatgcaagttaagactcgtagcaaaagaatataggcaaaaccgttccatcaataaggttttccttcaagaatgaaggatcaacaatcttcaatgttcaatagttttaggcatagcctaaacttttcaccagtaacacacttggtgaacatatcagctggattctcatgagtattgatcttctttactttgacgaacttgctggaaaatgaagtgtagcttaatgttaatatgtttggacctttcatgatacatagggttcttcataagatggaccgcactttggttgtcacagtgtatgaactaatttttagctttgatcccaatttttgatgtcaagccctttagccaaatggcttctttaacagcttctgttgcaaccatgtactatgcttctgtggaggacaagacaacaaccttttgtaagtttgctttccaactaacacaacccc

SEQ ID NO: 321521 - DNA, 1600 bp, Cannabis indica
aggcgacatcagatcttgtcaatgttaagtactgaagagcacctaacgtgcttttattacaatgtaacatcttcaaaggagctccttcgtggagggacagtttatgagctgttgaagtaggactaacacaagccttagctccttcaagatgcactttgagtaagagatcagtaatgtactttgtttgtgacatataaagaccttcaggagatcgatgcatttctacccccaaaaaaaagtgaacttgtcccaagtccttgagagaaaactgagagttcaaatcagatataagttgttggatgagagagtgattcgggccagtcacaagaatatcatcaacataaaccaaaaggataacagtgttcgaaccagtaccatacacaaagagagaagtgtcagcctgtgatgctttgaatccccagtcaaggagagtggatttcaacttgtcattccaagctctcggggcttgctttaagccattaagtgccttattaagtttgcacacatgagtgggaaattgtggatcctcaaaaccttgtggttgactcatgtaaacggtttcttgaagatgaccatttaagaaagcattggcaacatcaagctgtctaatttcccattgaaaagagatggcaagagtgagaacaagtcgcacagtaaccggcttgacaaccggactaaatgtgtcttcaaaatcaatgccaggtttttgaagataccctttagcaaccagtcgagatttcaatcgatcaagagtaccattggcattgagcttaacccgatgaacccacttatttccaatgagatgcatgtgtggttcatatggtacaagagtccaagttccttgagacataagagctttaaattctgtattcatagaggcaaaccagccaggatggttgagggcagccttaagtgatttaggttcagtcgggaaaagagactcaggaagctgatgtcgagtagctaagtaagctttgggtttatagatacccctttgagaccgagtaaccataggatgagttctcagagggatagatgagccagaagcacctgtgttaacatcagcagcaggggtaggttgtgaacaaactgtagaagaaactggttgtgtatgggaagcaacatttgacagcacgggtacagtaggaacagcagtatgcatagcagtagtagtggcaagagcatcctgagagtgttgttcaggacttgcaactggtgtaactgcagtatctgctggtgcaacaatgtctgctggtgcagcaatgtctgctggtgcagaggcagaatgacttgttgcagcaggtgcacgagttgctggtacagaaccatgttgctcaggaaacacagatgaatgaacacagtgaggaacaagattagatgctgcagtattgtgagatgtagaaaattgagcagtgggaaaattaataggtgctgaatgtacctgagatgaacttgttattctggttgcaggatagagaagttcattaaacaccacattacgagctataaacctcctgccagtgggattctcacatagatatcccttgtgtttagtgaataccccaagaaaatgcattctctgatctgtactccaatttgt

SEQ ID NO: 321522 - DNA, 1252 bp, Cannabis indica
gtggtagagctagccttaattgtggaggaggctaagcaacatgtaaataaaagaacagacagcaaaggatgctgccatagcattaaaccctcctgctagtggtaatgtctataaggggactgacggtggtaaccctcatcacaaacagaaggctgatgcttccagaacatcagagggtaatagaaagttttaaggaaacagaggtggtcgtcatggctgcgggtcttcattccgatcctatctagagtgtcccaaatgcaagaaacaccatcaaggtgaatgtagggccaagacctatttctagtgtggcatggtgggccactttatcagagattgtcctcatgccaacaaagaggagcctaagaagaatactactcagaacccgagatgactttttactatgactcaggctgcgctgatgccagtccgtcagtggtgaaaagtcagttatctataaatggttgttcctatactgtattgtttgactcgggagctactcattcttatgtgtcgagtagagtaattgaaagtttccataaaccatatgatatttatgcgtcggggtttggtaccctgttacctgcgggagaccttatagtatccactagttggattcagtctttgtctttttggattgatgattttgaattaactgcctgcaaatgtctgattttgatataatcctgggaatggattttttttttgagtatggggcaacaattgattgcaagtggaagatggtggtgtctgagcccgatagggctaatccgacagcgtttgtgggtaaagtttaggggtcacgcataccaggaataactcttctgaaagcacaagatctgatgagcagaggttgtctaggattcatagtcactgcagtggataccagccaacctgtgacatctggacctgagaagacaaaattggtgtgtgagttccttgacgtctttccataagatttactgggatttcctcctacctgagagattgaatttgtaattgagttagttccaggagcagagccaatatacaaagcactgtatcaaatggctccagcagaattgaaagaattaaagatacaattgcaagagttattgaatctggggttcattagaccgagttactctccttggggtgctctggtattatttgtgaagaagaaagatgggtcgctgcgaatgtgtattgattaccgagagttgaataagcttaccatcaaaaacaagtatcctttacctcgaattaatgatctttt

SEQ ID NO: 321523 - DNA, 750 bp, Cannabis indica
catttcttgccccccaaatcgccgaagccactatagccgaagcactcacaacgttgcaatcaaacatctcatctcagctgactgttttagaaaaattgcagtacaccagtcggcaaaggaacccccatcagcaccgattgtgcctatccccaccctctcccaaacctcctgcacaaatttgcaggtgaccaagcagtgtaaaatggtctcaggtacatcattgcaaagtggtcactgaatattaacagctactcttttcgtcactaattgagccaacgttggaagacaagcaacaccagccctccacaccagatttttgactttaggaggtatctttagtgcccataactgcttccaaaaacctgtagccgccccatcatcaccccgacctttgctctcttgcaaaatctgatatgcacttctcaccgaataaacacctgatccttctttccaccaacagagatgatcacaggaaggactaacttcaatgggaatctttagtatcaggtttttatctctatcaacaaagagatcatttaacacttacaaatcccactctttgccacccaaactaaaaagattttccacttttgcattctgaagagcagggtgatctgaaatgataaaaggattatccggatcaggtaaccacggttcccccaaaacattaattcccgaaccatcccccacacaccatctgaccccattccgaattaaaggacgagcctcccacacactacgacacacaaa

SEQ ID NO: 321524 - DNA, 558 bp, Cannabis indica
ttttttattaattaaattaatctgattatattgaaatgtattttatttagggcacaaaattcaacaagaaggaaaaagcttttggtggctttatattgcttgtatattttctgtataaagatttctcttctctttttttatatagccaaagccttaagttttagttttcatttttcaaataaaacttttattttaattaataaataaatagaaaaagtaaattgagataagaaaagcttggccgcccctcactatagttgggccaagttggttttttgtcatttattttgggaaatttacatatatactatttttggaccaaaacttttcaaaaatactgggatacggcaaaaacaacttttttactgccccagcccattttctttacttttgtactgcccaagcccaacaacttaacatttatactgtgaacagtaaaaaacacgggaaaacgacctgcttcgtgtgtggggagtcgccggagtcggacatcaccaagaaaaaaccattaaatccggcgaagattttttggtaaaaggaagcagaattgaagaacaa

SEQ ID NO: 321525 - DNA, 497 bp, Cannabis indica
cgataaaacaatagaccatttatcattagccagatcagaaatgtaaaaaacttgaactgcttggctagccatgtgaagaaatgatattttgcctattttgcctactggtttgtataggtgtgagctgtcataacagaatgatgtggtcccaaccttgtaacaaattattgttagaatattccctttgtaatgattgctttatgattgtgtaaagatcctttaggtcattcttgtattctgtacagaaaaatctataaatacaaactttagccaatgaattcattgagctgatttctcattctctctgcctatttttctattttctgcaaatactctgctttcaaacttggtatcagagctcctcttctacaccggtggtgtgtttgtgcgagtgaaatatggcagagcaaactcctatgcctgcagaacaaggatcgacagccagaagtacaaccagtggcgttgctcagatttcagctccagctcccactatcgtt

SEQ ID NO: 321526 - DNA, 1305 bp, Cannabis indica
ctctctctctctctctgtgtgtgtgtgtgtaaagaaaaaagaaagaaaaaactctccatttcctcctcaagcccgacggcttaagctcctctattccttgaggtttttgaatatttttcgacgatctgatcattctctaaatatctaaagccgtcatcatcagtgggtaagccttcaaattcaaatttctcattgatttcttgaatcttccattgatgactttaagcctttttaagctttttgaaatttttaattctcatgttgtaatgtagtccttttcatattattataattcacttgatagttttagaatatataatgtattttgataaaatggattggattttggactccatttggattcttgaatctttgagtcacgaagaacacgaagaatatttttagaaaaatagaattttaaatctcttgagcttctggctggcacacagattcgtaacttaatttgggaccctgatcagtttgtgactctggccctaaaaacctagcaagttcatgtctttgaacccaaaacctagtcggttcatggttttgtacccaaaacttgaccggttcatggttttgtacccaaaacctagtcggttcatggttttgtaccccaaaacttggccggttcatggcatgcagtttggtgtcacgagtttgaccggttcttgccagtacttagtctttgtaaagactctgtatgacttctcgagcccatttcacctttatctagtacttgattcttataggaactctgtacgacatatgttaggtagaatctatctcaggcaattagtggcctaaaactcaatgtctaattaatttttttgcacctaaatcttatactttgcctattaacagttttgtacattagggctgtctagcaaacacccttaggtttaggtcagttgacctgtgctttatctatgtctttttatttcatccggtttcttacctcccttttcttttttacacagatgaacccacactactttgagggaggtgataactgaatatatgaagacttgctcagtcttctctgcaaagaacatcgtccagtctagatagttaattcttcttttgaaggttctttgaatagttcctcaagcgatttcaaggtcaacagtggttctctagaacccgcgatctaacaccatcactattccaaacgaataggcagtgagttttacgatcaattcatctgggaattgaactaggggtggcagtagtgttggaattatatttatccaggatcttagatctactcacaagtattttgatttaacaacctaatattgaact

SEQ ID NO: 321527 - DNA, 1669 bp, Cannabis indica
gttgatggtcacgttgcaaaaaaattttttaggcttgcatttcactagaagtaccaaaaaatgtccagagaggacttttagtgaacttgaacagatggggaagtgtctgttctcgtgcaaaacaccatcaaaaaagctacaaatgtgaatctaccaatcacattcatggaaaaagatgataaacatgttcatttcctccataatgactcatttgtgatcgaggctcaggtcgccagcaaaagagtatctaggattttggtggataatgggagttcggtcaacatcctatttaaagccactttccatgccatttggttaattaacgcaaacctcatgccttgctcgatcaagcttcaaggcttcaatggagactctctactacctagagggaagatctagctccccgttacgctaaatgggggtttatccaaaagcaatacttcctctacattcaagtactatacatttgtcatggtggactattcaaccacccacaatgccattttgggactaccagtccttgtagattttagagcggtaacctctattcggcacatgtgcaagaagttctcctgtgacaatggaagtataggaacagtaacaggtgatcaaaagagcgcacaaaagttctatagtgtatcgaccagatcagtcttcatggtttgaaaagagatggaacgagccgaaatcctagagcacctaccgactagcacatggagtagtctgggaggaagacgagttagacccccgtgtgggggtggaaataatgattgaaccactagagaaatatggaagaagtccgcatcagggagaaagatcccagaaaagttattaaagtcggtcggaccctgcctccaacaataaagaacaaattgggtccacgttaaagcagaaccaaggcatcttgatgtggagcaacacatatatgatggggatcattccccatgtaattttccatgccttaaacatagatccaaatgttaatctagtcaggcaaaagcagagattacttgatctggtatgctcagaagctgtgactggggattggacggctgaccgttcagagtttgggcagtaagcccagcaggaatttcttctgagtcgcctagtgggatgctggacgcaggttgctgattagaaacttggtaggctcttcgtatcactacggtggcctgtcttgttcggtcgtcgatggctgcctgttgagcctttaacgtttccagctctctatccctccattcggtgaactggcgccttttctcttcgaatgcaaggttcactgcagcacggagctcttcgtggtcatgatgcaaggtattagtatggccttccatgagcccaagagcattacagaggttctggatctcagtgtcatctccaatggttgtctgaacatttattgctgaagggatcctagtgctgggagtacccagttcggctgctaaactggtgtttccaatctcttgcacaccgactgtgattccagccaaaggagatgtcgcaccttgatccgcagtaggtggttgcgtgtttggtttcttgggattggtgactggtgggacccttgcattccctagagtctgtagtgcgggatctaccgccagtggatccacctgatcgaccacgcctctgcgagttgttgggttttatgccctaaataaaactcttt

SEQ ID NO: 321528 - DNA, 675 bp, Cannabis indica
atttttttgttttttccctaagaataattatttattattaactataatttttatacttttagttatttagttatctgtgactaaaaggagtaagttttttttttatctatctctagtctttatataatctcaagttgtattaacttggttcatttcgcatgcgaaatacgttggctttcgaagaaagggcgactaattaataagaaagagtaagagttgcacttaaatatcaatacatatacataagtacggcgaatcgaactacgcgttattgagcaagagaaatagttagaacatcacaattatattcattttgatggtttataactgaaaatctagaatatatatggtcaaattcttagttgaatagtcaagtcaaaccaccaggcacacttactttttcattaattcaacgcgtcgagctatataacttcatccttaaatcctcagcatatatttgtctacaaactccaaaaccactaaccactaagaggattctccgccacttcttaacttatcttttaaaatatattattaaaattttattttctttattttacatcacaattttataatagagtcgcaaaaaatatttttacatagatattttttaaaaatgtatcactctcttatttaatactaatatttaattaatatttttattattattttttt

SEQ ID NO: 321529 - DNA, 901 bp, Cannabis indica
gagaatgattcattgatgtagttgcagcagagttcagtcgattcaccttttgttgagctttagaaatgtccttttcattttgccaaatttcatatagtgccaatcttgcaaatgcaaagcacactgttgtaaacatgaagtcaaaccagcagctggatcactatgattcgttttaaaccagcaattagaaataatatcagtgcactcttcatcattaagccaaattttctcaaatctaaaacgagatttcttccgaacaatagaattttgtggttgagagaatgtaacatccgcacaaagaactctatgatccgaaccaaaatagtccaagtgtgtcaaagttgggtttaacaaattatcttttcacacattattgataaaacaccaatcacgtctctcttttaaactagttggatttttcatatttttggcccaagttaagtcatatccaacagccggtaaagcattcaaaaaaattggtctaaggtttttctaaagcttgcatttgattatcatgtcaaagtggaccacaactttcatgttcagcagaaaaaatttcatttagatctccaattaaaagccacagatcaagtggagatacatcgacaagtcttctaattaagacccatgtatgttttttgtttatgacttcgggaaaaccataaatagcaaaaaaatgccaacggggaccatcatcaaacaagacataacaatcaaagagatttgtattcattgataaaagagttacatccacaccatctttccacaataacataataccacccttcaaaccaacccgaggaacttctaaaccattactaaaatttaaacaacttttaaaacgagaaagagcaccgtcacacaacttagtttccataagaaataacacctgaggagattg

SEQ ID NO: 321530 - DNA, 741 bp, Cannabis indica
cgtaaggatccaatgaaaaatgaaattagtaccatagatgatgaggaagtgattatggcatagtgcttatgttgttttgtgagatgattgtctatatattgtcatatttaaataatacttgtgaagctataaataaataaactttattttactttattgtatgtaattggtatattattttgagaatgagaattttgtgtacaataaatttacaaataattttattatttgagtatagttcatgggtgaaataattttattagaccgttttcaaccagtaaaagtgattactggtgggatcccgctggtattgacccgccgataatacttgttcggtattactaattaatagcgacagactgacacatcagccgatattatttaataatattggcggacctataacggtaggacctgctagtatttatggcatcaaatttaatatctgacacattaatagcacgggtaccccaccggtattacattttaaataaaaataaattaatattatatataattttcataaaatatataatttataataatattaataatatttaaaattatgataacagtaataattttatattaaattaaaaataaattaataataaactaattattacacgcataattaattaataattatcccacataccaaacaaataattatcatccacggataattaaaaacttaaaaaaaaaataccacatataattaaaaattaaactaataattat

SEQ ID NO: 321531 - DNA, 1057 bp, Cannabis indica
gaaaccccatcatcattattggttcctgagtagctttgaaaccccatcatcgttatggtttcctgagtagctttgaaaccccatcatcatctggaatatctttaaattcatcaccatcttcaagactggcttgtcttgtcgaactcgagctcaggtgatgcacaaacttcaccgtcatcttccagtataatctcctcgatttcttcaccgagacacccagtagttgtttcttttccagatgcagcacccacaacaccaagaaagtcatatacattgtttgtctcctcttgatttaatcccatctggaacagaagagaaaatgacagaatgattattctaaaagctagcagaaatagcataaaagcttaaaacacttatgcagtaaattatgaaatacctctcttgtgtcccagagtatatcaaacctcgagccagtaccaacagcgacatgttttgcccatgaacatgaagcaacaatgcttgtcaatgaatcagtatgacatttttcagctgcacgctcaaagcatctttttggtgtctacaacaagtaacaaaaatgtaaaatgattaagtgtagaactaaaagtgttactactatgttctattcaacgaacttgactagcaatttcaacttattaccgttagtgtcgcttcagtgaatgggacttggatattaaatgaccgagatagagccttgtagccaccagaattgaagccaatcaaatttccaggacacgtcatactgttagccaagaggatgagatgctccttgagaacacccttgctcacctttgatactgatgtcgaaaggcgctgcaaatgaagcaatattgtgattatgacaggaaaccaactcatctacaatactggtccagagctacctatctttatttaacagtatacaaagacggtatttataaatcaaaagaacaacaaggaaaccaaagttacagacaacaataagtagagagttaattcaaacaccattttttaacacttttatgaaaccttttagtgagcatgaaaaaggcaatgctacaaccaagataaatgaaat

SEQ ID NO: 321532 - DNA, 1875 bp, Cannabis indica
acttctgaagagtttaagtagttaccgttggatagtttttttgagaatatttttattaatgatcgtgcactggttaaatttgatgactgtctgatgttagttcttcatcaacgaaggtcgcttctcctaatattgagtttttgacagagacagtgaatgaaattatttgttcgcagaataaactgtctgatgactttactcttttcagagattttgttgagcttaattttaagcgtgtttggatgtaattggtgaactgaagacaagggtcactcatttttgtgacaagtatgttgaggtatgtttaatatgtcattttaagttgttattataattattttatgtcatttcttgtttctgttgttcagttgttaatgggttgttttatgattttcctatatgttaattcaggtaaaaatatcgaagagtcaaaattcgaggatgatgaagaagataatagggtaaatattattttggactctgtgttttgcaaaagttacacattagaccctttgttttattaaatgacaaattagaccatgtattttctaaaatggtacaagtaggatcctgaactgatttttttatcaaaataaaacataataataatccaactagaggtgtgaagacaaaacagattaattttcttgcatctgtttgtgttaaggattgtctttaagttggttatattaaaaatttgtcaaaaattgagctcgggatcctatttgtaccattttaaaaaataatttaacaaaatagagggtctaatctgtaacttttacaaaatacgggatccaaaatggtatttacccaagataatataggtccagatttggagaagaatgataataattctaataatgttgttgattctaatggtgatggttcttgtgaacagcgtagtagcgttaatggtaaagatgataaaaatgatgatgatgtggttcgtgataagggggtgctgatgttacagatgttggtgagaaaaaatgtgagggtgttgtagcaagtgaacgtgataagtccaaggacgttggcaatgtcaagggcaaacaagttgatttaaagggtgatgaatttctcatgggcttaagcagcttaagattgataatgatcaagttgtttggcctggtttggaggctattaaaaaagtaaaggtatggttcttattgattttttttttcagattgtggttctgagtagttatttcatagttgcaaatatgattaattcaaaaattattacaggtttattttcattccattttcgtttaaagtttaatttctgcgcttattttattagtaataccgtttaggggattagggtttcttaatcattttgggtagcatgcctaaatgttagggcgttacaccaagagaagcctacaggctggccagggtgagcctataagtctaggatatgtgcacaagctggctggccaagaagtgactctaggactaagccagattctgttcgatttgttatctttttaaaaaaaaattatctcgaatgaaattgtaaagtcgtgcctcatgtcctcactatcaggaacaatattacgtcgttccagatgttgtcgcgcctaaaagctataatttttgtagtgcaatggaagctaacctctacaaggaaacagtgtacaatattgtcctcaacttacaagaggctgacctcctcttggtagagctatagtgacatgcacgatctgttgggttttatgccctaaataaaactccatttcaatgtaatccattttattcaatatcaataaagaaacaaaagtatttttcattcatttgtatgttttggttcatgttatcaattgcttctctatttgatttataaattcatccaaaactcttttcacatacttga

SEQ ID NO: 321533 - DNA, 1984 bp, Cannabis indica
tttttaacataaccaacttgaaattaatttctagcacgaacaaatacaaaaaattataactattattgtcataacactttatgttcgattattttaatttgacaaaaattaagctccaggtctattttgtactatttcaaaaaatcgaatatttgaattgtcatttaacaaaacagaggttccacttaataatttttgcaaaatacaattgtaataccctaaacttagtaaccctaattaactttattaagaataaatgtaggattgtattatgatataatcaattatattttattatttgaaaatatttaaatttttgggtttctgccgaggtggaaatgaggactagagaacctatccgaagtgcccaaggtgcaagagacgccatcacagtgaatgtcaagctcgagcgtgcttttagtgtgggatagtaggccatttgaagagaaattatccacagttgcaaagatcagaacaaagaaagatgatactctagttcttgctcaagtatttgtttgacccaggaagaggctgatgttggtccttctaccgtgacaggtcagatttctattgatggtattatgttgactgctttaattgattctggtgctacgcatcctatgtgtcaagtagagtgattggaaaactgaataagcctagtgacgttttaccaagtggttttggtactttactgcctactggagaatggttatatccagcaggtgggttaggtcccttccagtacatgtagaaggtaaagaactgtcagtagatttaattgaattgaatctagaatatttttatgtaatattgggaataaactggctagcaaagtataatgccaccatcgattgtaagagaaagatggtaactttcgaacttgagggtgagcacccatttgtgtttgtgggaagtgttcaaggatcctgaattctaatgatctcggtgctcaaggcacacgatttgttatgagatgtatgtattgattatttagccagtgtagtggatactacgagagaagtaccaataggacctaaacatattctggtggtacgagagtttctatatgtctttcctgaggagttatcgggtttaccaccaaagcgagagattaactttgagatcgaattgatatcaggggcagagcctgtacgaaggccccatatcatatggcacctgtataattaaaagaactaaaggttcagttacaaggtatgttggatttgcgattcactagaccgagtacctcgccttggggtgcaccaattttgtttgtaaagaagaaagacggaacattaaggatgtgtactgattaccgggagttgaataaattaatagtgaagaataagtatcctttgccaaggatagacgattcgtttgatcaactataggaaaagaccgtcttctctaagatcgatcttcaatctggttatcaccagttgaggatttgagaggaggatattcccaagacaacatttcgcacacagtatgggcactatgaattcctagtgatgtcctttggattaactaatggatgaatgctctccccctgtcttttcttatacagacggaactacagttggatctacatgaatgcatgtaatttttattgccttttttatggaaattaatatttatgcattctctttttttttttgttcttttgttttgccaactcaacctcatggtcaataactttttgccttaactcaactagttctgtatagttttctacatcgtattctttgtattcctctttgtttgtatcttcagggtcattggtgtctccttctccctcagcgtccaccctaaaagctacctcttcttcttctagaccttttgggtcgttaggtggttgtggacgtgaagtgttccttattaacactattatgccacaagatattatacgacttcttttttggtaagctttctacaactctaaatgaaagcaccaaaatgttgaccgagattttcggcaactatt

SEQ ID NO: 321534 - DNA, 778 bp, Cannabis indica
ataattaataatagatacatcaatatcagctttccaaagaaacaacagaccaccccctaaacccacccgaggcacttcaatgccatttggaaagtgaaaagcattcttaaatctagaaatagaacctatacttaatttagtttccataataaacattacatcaggttttttttttgtgaaatgagcaaacgaagttgacaaaacgctctcagattgctcaagccccgagcattccaactgagcaaaatcattgtgattggtgaggctattacacagcctttgtcaaagagtctccttcattgtcctcgaccagtgagttgtttgaagaagcagagatagagtcaaggtttggagacgattcagtgatgttggtaagatcaataaagggggcatttcttgtgcaacaacgcttgagcacttggcgaacattgctacttgaggaaacaaattgtcttttggagaaagagaagccatcctatttcctgcattaggtgcaacttcagttgggtgaattacttttgctgaggcgggatccggaactgaagtaattgttgaagaaacaaatgtgttggaagcagtaggtattagcatagtcatcattgtggaaccagataagtggggatcacttaaatgtaagtaggctggaggggtagcagtagataaaaccaccgtctaatggtgtgttatagtagccgtggatgagaattttgggggtgtaaggtcagttgctgcactagagaaaagtttaccaccagatgattcaggcattgaattcatt

SEQ ID NO: 321535 - DNA, 1020 bp, Cannabis indica
atttgtgaaattaaccctattttaaatttgaaaactcatcaccatttcagacttttcagttctccccataaaagtttcttacagttcaaaaattccatatgtacaaaaatttgccatactacagcttttagttatattctgtaactaaatggtaagaatgaaatgtaaatgagaacattaatgggcccaaacaggcccatattttgacagttactggacatgtgactcacaatgtccaacgttgtgaggcccaaactattggctaaagagatatattcagacgtggcgatgagttggacatctacagtgtaccctaaacgtgttaaatgcgcaaacgttcttcaccacaaaccaataacttagtaaatttttagcgttttcttacaatacatcaccttcttattcttttgtttttctcacaataaaatttacaaaaatctcattttaagacttaaaaatataaaataaaataaaattaccataaaattgttcgcccttttaaattgaatgagatttaagattgaaaaatccattaaaaggcactaagccaaaaatgcataagctcaatacaaaataattaagtattacagacaagacggtaacaaactcgagaagagtcacaaggtaaaaccaaacatgcaaaagaatgagtcataacgttttgagttttttttacaatgagtaagagaaatagaagagaaggaaggccagaattgtaaaatatcatgaactataatattaaactcaatctgacatatatcaatcttattaatagtttggacaaggcagagacaatttgagaaaacagtaatggagttgtaccccaaacgacggcgacacaacaacccatttaagagagttgttgtctctgccacatgaggattagaggaggtcgtcgttggggcacccaaagaacacaaaaccaccccgtcacatgtcaccactgccccaagacccacacaccagtgtgttaggttatttttagtagtaattttagattaagtttagtatatttttaat

SEQ ID NO: 321536 - DNA, 1297 bp, Cannabis indica
atttccaacaaaagtgtcacctgaaagggggttgaggtagggagacccattgtctccttttttgtttttattatgtgtcgaggctttcttgagccttattcaatataaggaatagttggcaacttcaaggggttaaagttggtagaagtggaattagtgtgtctcatctcttctttgcagatgatagcttgattttctttgaagcagtggaagaggaatgtcagtgctttaagactattctgcataaatatgctgaagcttctaaacatgttattaattttcataaaactgacatgtcatttggcaagaatggtctaatggctactaggaaatcgctagctagttttttgggggttgaaattgtggataaccatggtcattacttgcgcttactgtatttgttggaaggaaaaagaaagaggtttttgagtttatcagtttggaacaaacttaaaggttggaatggatcttttttctctgcagttggcgagaaaattcttattaaagcggtggctcaagctattcccaactattgtatgacttgttttagacttaaaaaacccattaatagtctccacaatatgtttgcccggttctagtggggttcaagtgaaaaaaaaattcattggtgcagatggagttttgtttgtaagcctaaagagagaggtggtttaggtttcagtaatattgagatgttcaatcaaactctcattgcaaaacaagtttagagaattataaaaaatcagaatggcctttgttcaaaagtgctcaaagattcttacttcttgaattcttctattcttaaggcaaagaaaggttttaaggcttcgttggtttggcgtagcctcgtgtgggaaaaagagcttattcttaaaggctataggtggcgggtgggaagtggagacaatatacaagttgttgaagatactgttgggaatattttaccaggatctacatttactaacaattatattgaatcaacatcctaaatatgaatatctctaaaacaatgaaattaaaaacataagagtttagaaaaccttacattggttgcagcgaaatataatgactcattccgctcagatctctaacccttgttcattttcgtggcagagtattatcaagatttgagcctggatctttttctttccttcgggtttggttaccatcatcttactcactatgattgagtacttgactatggtgaagaacaatgaaggaggtgaaatcactatagaaggaactctctcatctactagttgtctaacagagaaaactagatttttggcaggttgaa

SEQ ID NO: 321537 - DNA, 1522 bp, Cannabis indica
tattttttaactaattaataattggtgtgtgtttttgtacgtgtaactatataagcctatttttattcaaaagaaaaaactagattcgcctatttgttgggaaaggatagttttaatttctttctttattagctcctctaaagtggcatgttaaatttacttaaaagaataagtcttacctaatgttcaacataataataaataataagttaacacttgttgtgtagtgtagtattagaaaattttttaatagctttatctcttacttgggtcaagaattagactcttaactagcatgtgatctttagaattaccttaagatctaaagaacagggatggaatctacactgcgtgattttttttttttaacaaaaaattagtaaataataagtcctacattaaaaaatttgatatggatttttcttttttattcatgaaaggtagatttattttgttggtataaataggtggtacattgacattcaatatattatgggtaaatattattttcgatgatatgttttgcaaaagttactaattagagttttgttaaatgacaaaatagatactatatttttcaaaaagataaaaataagactttaaactcaatttttaataatttttttatcataatatctctaaattggattatattattaagttttattttgacaaaaattaattcaaagttctgtctatactattttagaaaatataaaatttataagagaattaaattaataaaatataaaatttaaaataatattatttctaaaataaattatacatatacacttatgcttaacttatcttctaaaatttcactgctatatctaatgattgattggccaatgcagtgttggctaatttagttttttttactatatatattttttaatttttgaaacaaatatttaaattatttaaaatttggcaagttgggtgtttggtttgtcacattcttcttggaaatggaatagagaggtcggccttggatggattggataggaggatagtgtgtgtatgtgtgtgtcttgctttaggcctacattttatttattttttaatttacttttagtatcagaagtcattaataataatataggtcaagcaaggcaactccaatagaatagaagccttctttttaggtacttattgcacctcacaaattattttttatttaaaataaccaatcaaaaaatatatatatagggatataattttgtcccgttattgtactttcacggattgtaatccgtgatgtacgacagccgtcacatgagggagttatttgatctgacagctgagattgatgtagaaataattagggttaaaaagtaaaaacgtagcctgatactcatttaatgtaccctgagaccaggcccggccctgggcataggcgggctaggcctgtgcctagggcccacccagcccagggacccaaaatttttttttcctcttttaaaattatacatttttttaccgattttgaaaaatactatattttttctaatataagggc

SEQ ID NO: 321538 - DNA, 1975 bp, Cannabis indica
ttagtggacttagtggtttcttcaaaggggtaattctttttcttttagtcaaggttttaatttatctttcttttaagaaaaataacagataaacattagaaaaataaaagttaatcccttgtctttctctctcttacccatcgaccctagaagaaccaagataaccagcattttgctcttcaatttctagttgtttttagcaagaatttaagggacttggaagctagattcaaggtaagccctagaaacttgttctttaagtttttaaagtttttactttgggtcttagcatgcaaggtttcaattctagttctgtctgaaccagtggtctttggagtttaatttctgggttattattgagttatttgaagcttaattgggttgcttttttttttttggttttgtgtggagttgagcaagtttgaaactcaaaattggttcaacaatggaagatttttttttattatattatttatgttttttcacttggaacttgcttattgaggtatgtttaggtgatttggagcttagtttgaagtttgggtcatttttagtttatttggagactctttgcttttctccaacaaaaaacgacaggtcgtttctatggaaattatctaccgtttttactggcaggaatccttgctattgttcaggcagctttcctgctatgttattttttcatgttttctcgatatttagggcattttcatcctatttatcaatagggaaacttctagttttgagtttatgtctctaagaaggttttagcaagttgtttgcccaatttacgtgattgtgacatagggtctctgttcagcgcttgaatttttcttcaggttgaccgacacacttgaattaggaaacgagataagactagcataagacaagtatatgtaaattagatgatgtgtatgtgattcatatactaccaacactagtagagtagcggtacggagtacattggtacagtacatgatgttcaaagggtacgatccagtgttaccaacactagtacaggacgagtatgtagtgcatgtgggacaatactcagtggtactcggggtacggttcagccctaccaacactagtacttgacgagtgcttattgcatgtggtacaaaggtcgtacttttattaagcatgttcttgatgcatatgaggccttgtaaataggtgtatgggtgcctagatacaagacggtattatattatatgttttatgtttttcttactgagtatgccaactcatagattttgttttcatatgtaggtaagggaaaggctaaggatgagtactagtgagttcaaagctcggggttgacttgacatatcaggatggttagacctaaagagttcgatctcgcgacaatttgggcctttattttgtagtccctatgcaacatgtttataaagtgtattttgaatacaactgtaaattttaaagacgagatccctatttttttatgtttggatatacatatatttataaaagtttaaagtttaattaaaaagttgaattttgactacaatttttgggaagccctttgattagcaaaggcgtgcacactaaatagaaaaatcactaaagcgtgcctaagcattagggtgttacaatagccctccaagtcttctcatcttgtgatttggtgagcactctcattcttgttgggttttatgccctaaataaaactctatttcaatgtaatctctatcatttaaatatcaataaagaaacagaagtattttcatcacttattgtgtcatttggttcatgttatcatttatttgtttatttgatttataaattcatccaaatccttatcacatttatattcttgtttattgtgtcgtcagcacagtggaaagtaatcaagattatgtgattaaatatatattcctagatttatcagtacacagggtttaactgatatgataatctacaacatagtttacttgcaccttggataagtgtt

SEQ ID NO: 321539 - DNA, 1025 bp, Cannabis indica
gaagaaggacattcgggctcagatcttgattatactctgctacagaaaggatacaagggttagagatctgagtggaaggagacattaattccgctgcatcaatgtaaggttttcttaactttatatgtgtttaatttatcgttttagaaagttcatatttagggtgttaaacaacatacttgtgagtagatctaagatcctggtaaaataaattccaacagatctccattaaggaaagtattgttaatgtcaagttgaagagtatgccaattttttgataatagagatggcaagtaataatttgaatgtgagctatttttctagtagggggaaaagtgtaaaaaaaaaaaattaatccctcttgttgtgtgtatctttgggcaacaagtctcgctttgtatctttctatcgacccattactgttgaatttgattttggaaatttaacgacattcgatggatcttttattgtaaggaagtaggataatggtccaagtgcaattatcacatagagctttaagttcatgttacataacttgtaaccactgcctgtatttggcaacttgattatatactcataatgagtaaatactgcatatataaaagctttacgagatgctgaaagattggaataatataaaaatttgtagagaggatgaggtgtagataattgatcttgaattatagagtgacactcgtagtcatgaagatagcttggtggtttatttgttctactagtcctttagagcgcaattggagctgcatgaggtgaagatgatggagtaactgatgtagcagtaatgtcttctgcaatatctagtgctggtgtatcatgtaaagaagaatctaaaccagaagagcaaggagcatatgcatagggtaattgtaacaccctaactaacttaggcgtattacgtgatttttaaacgtactgtgcagcccgttgctaatcaacgaggtttatggaaaaacgtgattattaaaattttgctttttcattaaacttataaaccattttacaaaaag

SEQ ID NO: 321540 - DNA, 845 bp, Cannabis indica
gcatatgcaaacattcaaaatcttttgtcaacaaaaaatttattatatgttaatttcctcccatgttatgtatatcatttatatgtaccgatatagaatcactttaagggtttaattatgatcaaatatgttatatctaacttctcctgagagtctcctttagagtattgtttccttcacgattatcaattttgagttatcaatactttattataacatgcattaaggcaactccacgagtacctctagattgaacattttcaagacaaaccaaataaatatttattaataatttctacattatttatttatgctttaggtatttttgaactcattctaactcaaactttaaataatattaatttagagttggtatattttattttgaactatatcattcttatatatagaagctaatgcatatcatttgttataatattcattccaacaataaaccaaacatcataatcaaatttcattgcgatcattcttattccattacattactaagagttgtttggtatgaagtaatattttataagaaataataatcttttgcactcccatctttggtatgagattttttttatttaagtatgtgaatattatataatatggaaataagattacccccttaagagctaatcttaaattctttcaaaaaggtaggttctaaacattatctttagggggtgtttggtacgaggtgttcaaaataatttgattataaagaatattatgaaggagaatatgattatagggaaatgtgtaaattgtgtttggttgtgtagggtaatatgtaatcatattcctgttaattaaattaaactgtttggttgagtaca

SEQ ID NO: 321541 - DNA, 1030 bp, Cannabis indica
ttaaacaacatacttgtgagtagatctaagatcctggtaaaataaattccaacaattaaggccccaaactctggtataggcatcacccccagggggaagacctccaaaggtgaaaagcaaagttacagtagagaaaaagatgttccatcgtttcttcttcctcaccgcaaagggggcaaggcacgtcttcaatctacattcttttagcaagagctgacctgataggtaaaacattagagagaatgctccaccaaaggactttgtggcattccaagatcctagaattccacagtttccaaagagcgagagccagtggtagggggccctcgacaaggcctaagcaagatagacagatttcgtaaaaaaatgactagaaggttccttagtccagatccatttatcgctgcactgaccccccggccttccccctttgaggatattattggttgtctcctggtaaaaaagtagttgagtttggagatatcccgattcccattatcagtaagaagatccactactttctcccaactctctaatcgtccgtttttggggcggggaagaaagtcttgaccatgaatcactcacgactcatcccaaatatctgtatcttttccgtccaaaatgagcttacaggctcctttcttaagagtttctttaactttcaaaagaaaataataataataataataataataataataataatactaatattaataataattagtattttttgtccctcaaacttttgacactacctaatattgtctctttgtcgaccgaggttttcgggaaccgatttaataatatatgtaagaaagttgtaggaagtttaatgcatgagatttttacgtggttggggcattaacgagccttagttcacgagtcttttttatttatgagagtatttattacagagaatgttcttggtaggtattcctcttagttgctctctttaattcttatgaacccaaaattctcgacccccgttttagtgcgtttggggggtatttatagtatttttctggag

SEQ ID NO: 321542 - DNA, 907 bp, Cannabis indica
tttattttaaaaataattaattttatattttaattttaaatatttattacgtggactaattaaattgtgccacgtgtacattgtgtacacgtagacattccaacctgtcacttaacacccaaaaatggacggacagggctaactgctaacaaaagctgggtttaggaggttttaccaccaaaattttaaaattgggaattagttacaaatacctgaccacttaaggaggttatgccgcaaataactcgtaataaaattatataaaatatttttactctactattaattggcaatatacatgaatggaggaggagataacaattaaaataattaatgtgaatgggcataagggagcagtcaccgcgtattatccgttctatttctatcctttccttctatgagtgtcatatttaaatttataactatcatgaaaaatggtcgacaatttgcaagactattcacgtaaggaaacactttaccaacaaaagggttgtgtggtgtagtggtagggaagcttttattgatctcttctctcgcttggggtcaaaggttcgactttcactgggcccctcaacaataaggggttatgtttggtccttgaaggttgacgtggtgtgtgataagctatctttggaataggtttccttatgaggtgaaagtagtgataatccaataaaacaggatgagatataagacccctataattaatggagaagagatctgcaacacgtgatctccttatttcaaaaaagactaattattagtttttctccttgaactttgacatgtactaaatcgtgctctctgaacttttttggctatcaaaaattctccctgaactattgagattgttaaatttaatgatttttgtctaatttcattcaattttattatttcagtgattgtt

SEQ ID NO: 321543 - DNA, 702 bp, Cannabis indica
tttttttttttgtaaagagattagtaacccagaagaaagagacaatgagcactggttacaaatcaatgagagagagaacaaatattgttccgcagaaactcttcatcagttcctaaagcatctctggctagattgtgtgcaaggatgttgttggctcttggatgatacataaccaagatcttcgggaaggaagataaagagttgatgatcttccaaatgagacttgagagggctgagagatccctttgtttccttataattttaagaaccaggtcttgacagtcgatttccacaatttcaatggggaagtggactgcttgacaccactgcaaggctctgaaaagtgctttagcctctgcaaaaataggtggtaagcctaacgtggctgaagaagaaaagcaagctataacctggctgttagagtcttgaatcactgtaccatagccatgtttgttttcctggtatttcgttgttgcatcaatgcttaacttataccttcctatggacggagtcagctgtgaaaaaccgtgtttttgtaaatgtcaattatatttaagaaaatataaacctgtatgcgcctgcagaagcaaaaagtatttctgctacaggcagaatataaaatatttgcagaaaaataaataacttgacacaagagatttatacgtggtatcagtgttctcccgaacactcctagtccatggg

SEQ ID NO: 321544 - DNA, 1860 bp, Cannabis indica
gtgatattagttgatgagaattatagtaggtttacgtacttaaattaattagatgatatgtttcacatattctactttaattaagtatggttactatttttattgcttactaatcttgaaccacagatcattatctgcatatacaaggatgtgactctgatatatagttaatacttaaacaagatatgtggagtaatctatgtgtccacatactaattaattatgagagtatatatatatatatatatatatatatataacaatggtccaatatcaaaatatatagagttctatctcaaaattatatgatagtaaaataaatagttctatcgagcatcttctctctaataacaaggtaatgcttgaactagaaaatgtagtgtaagagaacttaaaacataggaaggcacgaactgatctcatatttggtgtgtaaaaatattttataattattttccattttaaattaaaattatttgaatgaaagaaataatcagaagatatgatgagaagagttattaattgctgacccagcgaagattgatgttatgcacacagatgaaccaactgctaaaccagctagctccccaacctgcggaattatatatatatatatatatatatatgcattaattaatcattggatattattaacatgtctaaaaacaatttaaagtttgtggagaataaattatcaaatttcataattattatatactatataatatatttatttaaataaaggtatgtagataaattacggctttggtatcggttgctacggcagaagtgacaaacatcataataaaagtgacaacaatttccatagctaaagattggccatctgagcctgatggtgatgttgtcccaagaagttttatgggatgtaacacttctcgtagtgtaaatgaagctgcaatagctcctgtaaattgagctatagcatacaatggaacctgcatacatacaattaattaattaattaattgcataatatttatcaactcatcatcattcgaaatcatgatatagtacactaaaaaaagagttatgtttaatgataataaataatgccttttttttataatataattccttacttttttatatttatacacaataatctatctcataaagttaaggattgaactacatgggtagtattattattaccttaccttaatttataattaatatgaatatataagtaattaggttttttgaataagattttgatagccaaaattgcatgcatggctgtatattgaatgacatgacatacgtacgtacgtacctctttcaatggaaattgtctatgaaccgcagcgaaagcaacggtaacagcgggattcatgtgtgcaccggagatgtggccaacggtgtagatcatgacggtgacaatgaggccaccggccactgatgctcccagctgcgacactttctgtgggttacttccattgattgcagccgcaccacaagtaacaaacaccaacagatacgttgctatgacctccgccaacacctaccatgtccatacgtacatttctgattatttcttttatatatatatataaatatatatatatatatattataaaaactatgaaaattctatgcactcactaaaaagactggagatgcacccttatttatttcggtatgggaaaggatttttagtcttattttttttttcaatcatatatgttatagttatttaagacattttataaacttttgagaaatttaaaaaaattaaatacattgagaatatgatttaaatgtttattgtacgattttttattttatacggtaaaaatactaatatttaaataggtataacatatataattataaaaaaaa

SEQ ID NO: 321545 - DNA, 934 bp, Cannabis indica
atggggttctatctcaaaaccaattgacaatgataggaataaccatgcatcttatacatggtggtttctttccaattagtaatgcgagactgtctaacattctctctcaagatgatagctattcgtgacactttttggctcactatcccgaatcacaaacgactctttttggctcgtctttttggaccggttcttaaatttggatcatatacttgttagagttttatttggctctaataccatgttagaatttagagttgtgtggtaaggttgatggaattcatctcaaaaccaactggcaatgagagaagcagtccatgcatcttatgtatggtattatctttctacacattaataacttgtgcctctcttataaaattaaaatacaactgaatgagcaaatttgtaagtattatatagtatgagtatattttatttatttatttagagaaaagtaatttgaaccgcacaacctcataaatttataattcaaacggtaaaaattaaggtcacccctgagtgtaagtgcttattgaattaatttactctatttagaacaaacaaaaatggtcttaaaaattcaaatattgattataaaattacgaatataaagtcttaaattttagggatatttacggcaaaactacctaaactatgcgatttgtgacacataatcacacaaatatgtttttttttttttgtggtaaaaccctccagacctccatttcatttttgttttttcactaccatccaaaatattctgttaattaccaagtggactgctgacatagacatcagcatacagatggacgaattatattggtccacacaaaattaattattgaaatattataaaaataatttttcaaaaataatcatattctcttttatttgttttactctctcctttcatattattttattttgttttctt

SEQ ID NO: 321546 - DNA, 756 bp, Cannabis indica
gtaaaataattccaacacaaacctcttaaggtcgaatcttgttgatgatgaagccattgctgtctacttcttgaattcttgaacctttgatgttcttaaagtgtcgaatttgaaagcttattctccttcctacaaaaccaaagctctgataccactgttgtaaatcaacaacacataattcgacaaaacatcacattaataatcaacagaaaacaagaaattaaagcaaagaataagaacacaatttttataggttcgaccaatttcctacttcctgctaccccctcaggtatccattgtatttattccatgatcaaggttacaaacacatagtgatgaacacaactctggagtaatacaagagaaacccaactctctcactcgagtactctaagaacacaccttggacggtactattcactctcttccactctgtttcttcactctccaaccaaattgatcttactctctcttactataaaatgagagcctaaaatgcctttatatgtaggcttatatagaaaaacaataaactagaagagtaacaaacttaactacccaagcttaagagtgtatgaacataagtgaaaactaattgtctaagaaacttagagctgattataactacctgtttctttatttgaattaccagaaaactacattaatagatgattgtccggttacgaataagatgcatctttatttgtaaaaaaaaaatgaaattatttgaatttaacaaaaaataaattaaagtaa

SEQ ID NO: 321547 - DNA, 1038 bp, Cannabis indica
aaagaatacaaatctattatgttttgaaattatgtcttagttatgtgagtgtgtgaagatatttgggtacaatactcataaaaagagctatatttgaattaaattttatttagaggtaaatttagttaatgtatacaaaaaaaggtatttttcaacatctcccaaaagtatttatgaaaggaccccattcatttatacgtgacaacaacttaaaactctttgggttcgtttggtacgccatattgtattgtgttgtgtttggattgtattgtattagtactatttaatacaatactatgttttggtatgacttgattaatagattatgtaaagttataatatttttttaatacacctgatcccaacaccaactacaggtcgggtccgagtctcgcttcgggtcccgggtctaggttcgggtccgggttcggtgtccgagtccggattcgggtccgagtctcgggtccaggtttgggtctaggtccaggtccgagtccggggtctaagtttggggtccggatccgagtttggggtctcgggtccgggtccaagtccaagttcgggttcgagtctaggtccaaaacatggtttggggtccgagtctaggtcccgggtttgggtttgtgtccgggttcaagtcccagtcctccaaatctagagttcatgtctggggttcgggttcgggtcttgggtctcgggtcaaggttcgtgtctaggtttaggtgtgggtccgagtctaggttcgaattcgggtctaagtccgggtttgggtccaagtctgagttcaggtctgagtccggggttcgagttcgggtttgggttcgaatctcaggtctaagtttgggtttggggtctaggttcggagtccgagtctcaagtttaagtctgggtctaggtctgggttcggggtccaagttcaaagtccaagtctagagtctgggtctcgggtttggattcgggtttgggtccaggttctgagtccatgtcagagattagtgttgatcccaaattttttgtaaatattataatacaaactaa

SEQ ID NO: 321548 - DNA, 1060 bp, Cannabis indica
aaaaatatatatttatataaaacataatttacgacttaataatctaatatacataataaacatattattagtccaatttaatctcataatctcataataaaaccaactaaaaaataaaatttattcaatacgtattgacaattttattagtgtttaggaagatgagaattaatatttagatcttaatttttttttaatctcatgtgttaaatgtatattaaattaattattatatatttttaaataaaatatattaaatgcataaaattattattataattggatcgatttggtcggttatctattggatcggatgtcccatccaacaacctatccgattggattggattttaaaaatttacatccgatccgatccaattatggttggatatccgattctattgaatcggttaaaattaggtcagtcggttgtaattggattggatgattttctacatacgcaaaagtgtgtcattattatgtgaaagccacatgtataatttcaaattcaaataaatatatatcttttaattaaaatcatcaattatttaaaaatattcttcactaaaaaattaattaaatataaactaatattaatattactaaaaaaattaaaattataactaaattttaaacctacaaaaaaacagaatataggatttaaggaggaaaaaaacttattaaatcaaaataacattattgacataaaattaaagcttaatttaagttgaaatgattgtaaacctaaaccttaattattgtgtccttgccacaaacccatgaataatcaaataagcaatcaaagtttagtttcttttgtcttccaaataataacagctttgttctaaaactattggcaaattttccatcatgaagctttcctagcctctgttaattagtttgaataaattaaagtttcattttggctattaaaaaagtaatacatttaatccggcgtctaattctttagtacacaaccaaattacttaagtggcttatctttcgagtgtgccatggttgtttagctttataatttaaaaactgttttcagtttttaaaa

SEQ ID NO: 321549 - DNA, 588 bp, Cannabis indica
gataatgctctgctacaaaaaggaatcaagggctagagatctgaatggaaggagtcattatattccgctgcacccaatgtaaggttttcttaaactcttatgtgtttatttcattgttttagaattcatattaggatgttaataaaacatacttggtagtaaatctagatcctggtaaaatatttccaacaaaaaactgatattgaaaggttaccgttggcgtgttggcaatggcgaatcagtgaaaattttggaagatccttggcttccacatctggttacttttaagatatatgataagcctccattgcctgcgaacctctatgtggcggatcttaaacgtgcagatggtcaatgggatgaagagttcataaggaatgtgttctctcttacaaatgctgaattgattttggccataccgtgtgctgaatgggatttagaggacaagattttatggcattacagcaagaacggggaatatactgtgaagagtggctacagaatggtcagctctttggacactgagcaacatctttcggatgatcaacttattgttgaatggtggaggtgttgggttttatgtcctaa

SEQ ID NO: 321550 - DNA, 1378 bp, Cannabis indica
gaagatatttacgaaaaatgtcattgccgtacaaattaagcatcaacatgccaccagcatgcacaacaaaatgcgccacaacttgaccaccagttggccaacttgtgggcatcacctagcttgtaacgtgccctcttggcacgcacgttacacctagcaccctccttgtatcaatatcgctattagtctaactaagtatctagtcacatatagtttaatgtaataacttttagggagtatagctaaccaatcacaaggcagcacgtctagaaggtactaagcactactattacaaaataacaatgctccaaaataaatattgttttcccactatctttatcactgtaaaaattaaacttcaaactaatagttttaaaaatattgtaaatattggctaggccttttggtacgtcacgaaatcggtacgagctcaaaaggcacgagcacacctcaatacaaaaaatatatatatacttaggcacaacacaacatgacacgaaaaaagtataggcttaagcacaacacgacacgataaatgtgggcttaaacatgacacggcacgacacgtaaacacaaatagattagatcgaaagtacgacataataaaaagtccaacaatttatcaataataataatgataatatttacttatcgattaaaatgatagtaatattcaaattctaataactttaattattttttatataactgtgtataactattgttgaaaaaagacataaaagtaattaaaacagtatttaacttatcaattgtaataaaaaaaaatacaaaaatatagagcacgaatttgagcccatataagaaaataggttgatctattaagaaaatgagtcaacctgaataaaacatgacatgaatccaaccacgacacgaaattactaaacttgtgggttatgttgggcctaccctatataattgttgaacggcacaacacgacccattttttatggttcagcatggcacgactcgtattttaagaagctcaaaaaatatgacctaggttagcacgtatttacagctaagattttaataaatataatatacttttactataattatttttttttttttgaaaaaatgaaatatcaacttcattaaaatgagcattccaattacaagatagcttgaagatcagctagaacattattctcaagaatgctacgatcagagtaaaatcgagagggtctagccacaaaatgtgccactccatttgctgatcgtttaataaaacgtaaactaatattaggtgaaaagacagtaaagttttacaatcattagtaaccaaccaaagacagaagacatttgtgttactaaagattgcttgaacagtgagtaagttgtcagtttccacctccat

SEQ ID NO: 321551 - DNA, 1096 bp, Cannabis indica
tggcttagtcttaaaaaatgttattaaccttcttaatattaatttatttatttttcattccttagcgcaaaatcagcggaaaacaatggtcactccctccataacggtcacgcctacgtggcaggataaggtgcgttaatatgggtcccacactaaaacagtaatttaaaaaaaaaaaaaaggaggcacatgagtggtcgaacgacgcacgtgcataggggagagacggttaaaattatcggttaataggaaaagaaagaaaggggtgtgtttggttgttgggttataactgaacctaaccagagtaaaagaaaagtcgaataactgtaaacgacgtcgttacgaaacaaacaaggtgtctataaaaggagccatattgtgggagcagcttcatttcattcttcttcgacttcaccattactactactctactttctctctctataatacattttcaagagagagagaaacaagattaatggcggtgtctcggagatgggtttctgtttcagttgctgtacttctcatgttctgtttgctggagtaatggcagagtagttcgtatggattcaaggtttccttacttctttgaatttttctgatttttgattttggttaaatggagttttgagtttcgtggtagctgcatttttctttctattcttttctttaataattgagaaagtagccattaatggcgttattactcttgaattatttcagtacattaaaaacttttcaaatttttcttgttttgttttagttacagagatgaagaaggaacagaggagttgcagagcttaagtaactcaacaatggcttccaggtctgtcacctaactaaaaagactcaccggcatttattaaattccttcatttattacaatttccttttcgaaaatcgatctgaaccgtcaaatcttttcacactcgtatcatcttcaccgtccaaattcttgttttcacttcagattctattctatttactactactaaaaccgtaaacgagaatcccaaccgttgagatctggatctttagatcaccaccgtttattccgttacgtttttttgtcttcggattcctctttattaacttc

SEQ ID NO: 321552 - DNA, 912 bp, Cannabis indica
ttagcagatattaggtatttatgaaacttgaataataattatgatttattattttatggtgatttatttaaatttaggatgtattatatttgccatacaaggaattttatgtttttgcatgctttgtgctcggcaatatcagaatgcggcatttggccattagaatcacattttagtatttttagtatagcgggacaatatagttagacattataaatgtcagtaatagtcgaggttttagaattgaccaaaatatccctaagtgacttggaagctttttgtttagtaaagggtaaaatagtccttttggccctaagattcttttgtctttagtgggcttattttaattatgcattctgaatatattcttttattagttggataattatgttttattttattttaacttaaaattaagaaaaaggtcacttctctctcttcactccctctctctctctctctctctctctttcgaacccttgaagaaccaacagccagttggtgttcttctaactttttttgtggattatagttggttcttggtgaatcctttgaaggtaacctttatagcacttttcctcttggttttcttaagctttaagtgatgaattttgtattgtgcattagggttctgtgttgttattggtgtttgtttatattttctaaagttgaattaaggctaattaggttaaattgagctaggtttgtaggttgttgtgatgtttgagcaagctttgagtttaagaactcaagctgtgctctttaatagtggtttttgattctgagtatcttgtgttgttttgctgcttgaaatatgtattttgtggtgtattaagcaagtctggaaggtttggtaaagtttgaggtcgaattaagggtgtagtgaatttttgagtgtttcctgcactgaac

SEQ ID NO: 321553 - DNA, 1954 bp, Cannabis indica
tggagcaatctacagatgttcttattgctctatgtggacgatattctcatcatgagcaaagataaatcctgatcaaaagtatcaaagccaagctcaaaagaaaatttgagatgaaatagcttggacaagttcaaaagacacttggtatcgaagtgtcatagaactaggaggaagggactattagcttaaagcagtttgggtacatcaagaaaattgttcaaaagttcaacatgaagaagcaaagaatacatctgttccattaggggtcattttattttactaaaggaatagtgtcataacaataagaaggaaaaagaagaaatgaatgatgtaccctacgttatggttctaggatgtttaatgtgcatgatggtgagcacaaggccagatatagctcacgctttaagcatcctaatccaggcatggaacattcgaaagcccttaaatggttattgagatatttgaagggtacttcaaattatagtctcacctacgagaaagaaaaaggagaattagaattgaaatggttcatggacgcaaactatgccttgaatagagatacgagaaaattaaccacttcctatgctttcttgacaaactgaaactgtatatgctagaaggctcaattacagtgcgtggttgctctttccaccacggaagcaaaaattatgacaactacaaaagcttttaaggaagcattatggcttcacagaatactttatgtgttggaacaaatcaaaggaggattgactgtgtattttgatagccagtcatccattcatctttgtaagaatctagtttatcatgaaaagagcaaacatatgaatataagactctactggattagagagaagatataagaaaggttggttaatttaaagaaggtcagaactgagatattcatgttgatgttgggattaaggtcttgactatatacaagctcaagcattgcttgaacttaatcaatcttaaaagttagtatactgagattcttagaacatcaaccaatgatggttgcattctttcttcatcatcattaatttgaagatagtaggtggaatttgtagtattgttcctccaaatgagaatatccccaatgtcttttcttaaacatcttttttagaaagttgttcactcgcaaatgccagtcccagaaagagttgtggaatgatagtcgagtccaaaaaggagttcctgaatgactatcatgtccacttaaggtccaatcttcatgaaatctagtctcactccaagatggagttcttgttggttagttgtccctcctagaatggtagttctgaatagtcaactctagcaggctttatcctatccagaagcacactattaaaaaactcataattcttgaaagttttacaccgtttggtaaagaattatcgacggtctataaaatcgttgcgtatacgagcattgtgaatacttggtagaataggcaacagtagaaaaatgtcaatataaagaattcccaacagttttaaaccgttgctatagtggattgccccccaaaaaaattatcatcttcgtcctcctcaaaataacttctcgcatatatgtcacatccgctcaaaaatctttacaagcttcatcttcttccactgttgttgtgctagttatcatcctcctcgaaattttcttttacaagttttggattgtttttcacttgatgatccttgaaactttcttcaattcacaagcttcagatttattttgaacactcacagatcaagatcaacaaactaaattaccgctaattaaaatttaaataacagataagagaatgttgtgcttaattttttgctgccatgagagagcgaatgagagggacatagcgagagatcagagtggaggagttggatggcgtggctcgttatcgcagaggagagagaacctaatagtgaaatgaaatttacaaatgactttgaaaacataagatatg

SEQ ID NO: 321554 - DNA, 1408 bp, Cannabis indica
acaatctcaatagttcagggaaattttttaacggacaaaaaagttcaggagtataatttagtatatgtaaaaattcggacgaaaaattactaattagcttatattatattagtaataatagagtaattatcgacatttttgtctattttaattttgagatgtatataattcaaatcaattatttaactatgtactacattttaaaaatcttatcatcaaagacaaattaaattataataattgaatagatgtgatgtgacctctttgaaatgagtgaagctttattaatttaaggtataattgttgtgtggcacagttatcatgattagaaattatattggatttatccttgagagttattgattcgatataataattaatatacataaatataaattctataatgaaaaattattatcaaaaattaagtgattatttttttttaattataatataaattttttgtgattaaatttaacttttagtcataacaaaaaattattcgtgactaaaacatagtatttagatacaagttgtcaccaattttattttagtgacactaagtattgtgactaaaaatacatttttttgaaaggtaattaaaaatacatttagtcacaacaaattgtaatttttatgacttatatttttagccacagatctttcagttacaatataaaaaaaataatttataattagatacaatttttttactttcaatcacaaattttattgtgactaaaaataaattttttgtagtgaatataattaatttatttattcacttgttttgtgtttttaatatttagatggttttaatttatttttttatttttacataacattttataccatatagttatttaagttattttgtcaattttttaaaaatttagaataatttttatcgaaaataaaatttaaacaattaaataagtgtattatttttttattttatacacatataaaataaactacttaaactccttacggtaaataaattatttaaatttttcaaaattttataaaatatctcaaataattacaattacacttatgtaacaataaatgagagattaactacagtacaaaaataatacatcagtacacttatttttaaatagtatactataaaagcactcattaaaatatctatctaaaaatattgaagtgatcacaagtaattttttttgttgtgactaagagaatttttaatggagatgcaaataagtgatgtaagtgtaaaatatagctcatgattttgttaaaagtctacttatgctaaactatgatgcacaaatctcacataatcaaaagtaatccaaatttgtatcacaatatatagtatgatgtaaaatttgcatcacaataaatactataattttatatttgttatgaaataatataa

SEQ ID NO: 321555 - DNA, 1049 bp, Cannabis indica
ttcatatgacaataaaaaaaaaaataagatgagacatttataaatttcattattttttttttgaaggaaataaatttcattattaagtttcccttaattgatcgaacaactcaaaattcaattatcttaactacatcgagcccttttaaattggacgagactctccagtttttggtcacttttttatggtaccagttgttactttattgaatttgttttattactaggttcatgatttgattttgatcgttatggactgatatgcaaatcgattcctaaacaggcaaatctaattttaacaaatactgaaaccaaaatacattattgctattagagtactgttatttactagtggtgtccagtactttttataggtagcaccttacgattggttaacgatgttcactaaaaattatttttttaagttatatgagacccgataattaattataagcggtatgagaccgatgaaggtgctaaacaccaatgattcctttagcaattatctttttattatattctctccaaatgaagtattatttgttactttatcattatttattattacgaaaattactgtatatattattttttaacattttttttaaatttacggtttaggttgctcctaatagtttttatgtgggttgctatgtggattttggttgcgatttaagttgttttgttagttgttatgtggatttctgtaaaaaagaaaaaaaaaaaactaactttagagtgttaaaatgaaaaactcctttattattacttattttaattgagaaacatattaaaaggtgctgtagcaagagaaaaatatagagtaagtgtgtatgatgtaatataaaggtgtaagatgaaattttaaagtattttaaagaatattgtagaaaagctattgtgaatgctcaaacagtagcaattaatggtgcgtttggtaaattttttttttaatcaatttttgttttttattaaaaaagtgaaaatatttttttaaacatgttctataacacattttttttttacttttcaatttttaaattgagaat

SEQ ID NO: 321556 - DNA, 1592 bp, Cannabis indica
ataaactgtaataaaaaaataaatatatatataatatatttaaattgagggttagcgggcgggttggcgggttcaatccgaaacctggtactcttaaaaactcaacctgcgaacccgccctaagggtacgaggttgaacccgacccgcccaatttttttaaaaaaaaaattgcgggttcaccagttcgggttcgggtcgaacccgctcaaaatgttcagtcctaaatttcatgttactctatcaataaataagatggaagatatttttaattttatgttattagatatgagatgagatgataagtatatagtctttcatagactaatcttctctgcgagttctcattcaattgatgaggttggaggagaagagttgttgagattagccttggggactaaacttttatgttagtatttatgtttactattagatattacacattacaaagctcataccaaataagatgtttattgtgctcatcatttaattagatcacttatttagtccaatttagaatattaactcaaataaattgtcttaatatgtaagctagcccacatattggattataaaaaataactcaacaatctcccacttaggctacaaattaattctaatgaaaattacattggataaccttatgtgcgcacaaacttgctaattattctcaaaacatcttctgtagacaatcaggtccatctcatataccaatacgaggccaaagcggccttcgttactttatcgtaactggacctatcaatgatcaccatatcaaatatatttaatgacatagatgaaatatgaatatgtacttggaaattacatgcaatgtgatcttaatcgtgctttttcccaattgatcctttattccttagtgtgatcaacaatccttagtctttcaaactttatgtgagatcacaatgaaagataacacaatcaaagaaataaatataataataaaactatcaattttattatgtagaaaactaaacctacttaaagtagtgtaatagtgtcaatcaacaaagtaactactattgaaaataaactctcactaaacaatacacatcatcaaataaaataacacccatgtaaccaatatactcatgaaagaccttaaatgtcaaaactttagttagtgggtgtgctagcaatgagtttgttcctatatactcaatatacactatctttactttgaactatatcttgaacaaatagaaacttcatgtttatgtgtttagactttgctaagcttctattgatatctgaatatagaactgctcatacattgtcacaatatacctttagcggtctttcaattccttacacaaccgacaaccaagtgatacaattttacagtcatgttgcattattggttgcctcataacaagttatgaattctgttgccatgataagatgagttatgagtgtctgcgtagcacttttgcatgatatagctcctttagacaacaagtagacatagtcagaagtggatctcttattttatttgcaatccacaacatcatagtcagaatacctgattatctccaaatttttagacttttgacaagtgagcatataatcatttgtt

SEQ ID NO: 321557 - DNA, 996 bp, Cannabis indica
tcccaggaagcgtgcgagtgaggaaaaagcatgctagaaatacttgtgttggtctgtagggtcagtcatcattccacgatgcagccagagtggcgtactcatgtataagagccattattctatgggtgtaagggcccaatgtaggcttgaagtggaggcgttacaaagtctgttataaaaaaaatagattaaaacactcacttgagaaagtgggataaaatctcccccaagctccataaattttcctcgagcagaatgaaatgactcattgtgttgttgggcgaaattcataaggtattgaacttgatataacatttggatttaccttgtaggtcaaacacattcagtaaaaattagtaaattttaaaaaaagaagaaaccaaattagaataaaattcaactatatttatattaactaaaatagttcccgataacagcgctaaaaaccttttttgataaatacaatacgcaagtatacatattgttttaacaagtaatactcatgtaagagaacgttcccacgaagtctatagctagttaccaataaattgaatttttgtttctatttggcgatcaaataaaataattttcaaactaaataatccccttttgttagatgagagagagaatgaaagagagccagagagatagctttatgtctatctaattaataaaagaaataaagcttaaaataaaatccccttttgttaaacttagcttcaacccaaggttctctagaaatccactaaaacaaaatactaaaaacaaacttaactaagcctaagtgaagaaaatgactattttactctttacttagcttctaagtaaactctaaggctatgtttggtaggaaggaaggagagtaggtggacggagagtgtagaaaggatgtgaagtaggagggatgaagatgatatttgttctccttaatgttgtttgctcttaggagtatatgtggaaggatggagagtaaaataaatattaaaattactattt

SEQ ID NO: 321558 - DNA, 817 bp, Cannabis indica
aagtaaagtgtgtgatagtgcaaaatagtttcactcatatatgggatatgcattttgttagatataatatgctatattgggatttgggtttgattttgtgtgcacatgggttaggactcacacattagaccaccacacacgcgtgttgtggtcgtccgaccatgtcgagttgacgggcatattggtgtggtgtcacctaattttttacaaaaaattatttcataaaataaatatttttatatatttatttagattagtcaatgatctgtttttattattagagaacattgtcccacatggatcatgtaaaagtattgagctatatataagaacatagactacttcactcatcaccaattggttttgagatagaaccacatgtttctcaagatggtatcagagaatatatctttttctacacttaaaaaagttctcttaaaaacttgcaatttttttaggggaaattatcctatatactatatattttatttttttttttcaaatttacggtttggattgctacggtagtttttccgctagtttctatgtgggttgctatgtgaattttgattgcgatttaggttgttacgttagttgctatgtgagtttctataggtagattttcgtaaaaatgtgaaacattattttgaagtgtaaaaatgaaaaaaaccctattttagggtgtttttatgtggtttaggcttaagactgcattatgctatattccacatagatctggcccgagcccagtggaccaacactcaaatttaggggtgttcatcaaaccgcccaaaccgctcaaaccgcccgcaccgca

SEQ ID NO: 321559 - DNA, 780 bp, Cannabis indica
tatcatataaaattactgaaatattattaactttttatgtgataataatgaaggctttaataataatttaataactttataaaatagtgatatatacacatttattaagagacattaataccttttaatttaagttaataataaatataaatcttgatattcggtattaaaagttgaagatttcaaaattaatcgttaaaaaaaaagaataaaaaagatacgattttattgtaattaagttacaaaagtagtactagaatgaagtttttctttaattttatgcatttaataatgtttctttgaatttcgttaagcggcaaataaagctgcttattgtgttgctagagagtcttgttttatgtcagattgtatttttactgagcttaatacttcggctgctcttaattctattgtacttgccgaaagttaatgaatgatctatttttttttttagaatgaatgatctattttcttggttcaaaaaaaaattatacatttattatgaaaactatactaaatataaaatggataccaaaataaataatttattaaccaaataaattttaaaacaataaaaccaataaacaaaagtattttgtcaaataaacttaccaaaaaaaatatttcatattttaccatttcttcataatatttaagtgggatgagaagtatctgtcttctttttttttttttttcttttttcttttttttggtcaatgtccatggtatgaaagtattattaattgggaaaaaaaacaaaaaataacaaaaaggaaaaaa

SEQ ID NO: 321560 - DNA, 780 bp, Cannabis indica
taaaatattattacgctacactcgttaaaacaaaacaccatcttaattatatctgttcaacgcattaaccacgaatagctcgattaccgactttgctggccaagctttcacttcttcaatcatgacccatttccactgtgaaaaataaaatagttcgagtatagtgagttcctcaaactcaaatgtccattctaaaattaatgttgttggagagagtaaaaacaaataaattatatagtacactttagttgttagtctatatttataccatttaaatagtgggtgtttaatttaaaccttctacaaaataatttcttatcaatatttttatatatataatatttgcttggtttacctttgagtaatcataaaaaaattgaaaataatggcaaaaagaaagttatttactatttatattggaaaaaatagttccacgtatataacaaaatattttaattttattttcagtaatataaattattcaaattttcaaaaaaattaataaataatcctaataaataaatacaatgtagcgatcatgaaaaattgactaaaaaatttaaattaatgccgaaacagataaaaaatataagaaatcgacccttttaagagtgcactataatattatccatatacacatagattaaaaaattttacacattgaaagagagggtcttttggtaaagattgaggttcaaacataaaattaattggtactagtgagtaactcaaccctaatattaagttataatgtttctcaagccactaaggctagcttag

SEQ ID NO: 321561 - DNA, 1454 bp, Cannabis indica
tagaacctaaaagatctgaaaagagttaggttcattcataatctgtcattcacattgagaaaaggatagcaattaggtattaacattggtaacttaacaataggattcacctccctaatctctcatcttgattaatcttcatttattcttttaattttctgaattgttttctttaaattgcaaaaagtattgtttttaccaaatagaatcataagtataatttagtagtacttagtccgattccctgtggttcgacctcacttgcgtgagatactacttgattgcgtatacttgcgtagtaaccataattttcgtaacatcaagtacttcatgctattcccactacagtatctgatgaaatgaacttctcactgctgcgtccttttactgacaaagacgtgttggatgcccttcgctcaatgagtccggataaaagcccgggaagtgacagtatgtctgcaatgttttatcaatattattgggatcatataagctcgaatgtcactacagtagttcttggagtattgaatgaaggccatgatatgagtagattaaataaatcaatcattactctaataccaaaagtcaagaagccgaaagcaatgggggattatagaccaattagtctttgtaatgtgatctacaagttgatctctaaagtgttactactacggtttaaagatgttctacctttggtgatatttgaaaatcagagtgcttttcttccaaaccgtttgatcactgacaacgttcttactgcttttgagttggttcatcatctcaaacacaagacacaaggtaataaaggttactcaacactcaagcttgacatgagcaaagctttttgatagagttaaatgggattatctgtctgcggtaatggaaaagatgggctttgctcaacaatggatctctctcattatgcgatgtttatcgtccaatagcttctcatttcaactgaatggagaaattgtggataatgtttggccaacagaggacttcggcaaggcgagccgttgtcaccatatctctttttaatttgttcagaaggactatcaaggctacttcaccatgaagagcagctgggtaatttgttgggactgaagctcacaaggcgtgcccgtcgatatcccatgtcatgcaaataatagttatgctttagccatcaaaagaatattggaggtctaccatcaagcttcaagacagttacttaataccgacaagtcaatcatgtctttctcctccaacacttcaaatgatgtaaggaattttttcagccaaagtttgggaatgccaatctgtgaatgtcatgagacttacctaggtcttcctacatattcaagtcataacaaaaaggagttatttatcaatgtaaaggaaagaatttggaaactcctacatgcttggaatgaaaaactgttttctattggaggaaaagaagttcttttgaaagc

SEQ ID NO: 321562 - DNA, 596 bp, Cannabis indica
gctccctctgggttggttggcatagctcaggtgccacattaagcatggggcagtgttactgcttcatcagtattttttggacattgcttcctacttttggatgtgttcgactcagctcacgctgaaaagcatcaagtatctttcaacgatgttcatcttatatagagagcttggttggccttagcctaccctctaagagatcggttactactttgatctgaagtttgcgctgaactagaataggactagatatttttatttcagtcaaatcagtcaccaatggttgggtggcactaattgcacatccatatcgaaggtcggtgggtacgccaagaagtaatttattgcctatggcctccgtaggatcgggcctccgtaggatcgggcactacgaattttggcctgtgccattcttcagatgctctatccctactttgtagataagggatatggtaaaccacatcccgtctctctgggcagagtagaggaatataatccggttgaccagtgtggccaatttccagaagtatggcttgtatcctcctgctcctagagttgcaggagcagtagctacagatggggcatgcctagagatg

SEQ ID NO: 321563 - DNA, 1658 bp, Cannabis indica
ttaaggctagctgctcaagtggttctgcggggtgggtgtcggtatggctggggaaacattctaaattacctacaaataaaagtaaataaaattctaatttatagaggttatctgtcttatttgattctatattcttcatacatatctatcaattagaatcacccagtaaatagggtggctagcaaaatttcactgaacctgaacaatatgcatttctatatatattttatttttatgtatatatatgtatgtgtatattaacatcttttccagtaattcgatcctttgtctttgcttctatatatatgagtgtatgtggggtatttaattaggagaaattatgctgtctagacttttcatgtaatcattcaatatcttggttatcatccaagctaggacatcagcagatcaatagctgagtagttaatgccttgattagtttatattgctgtagtagtatttcatttttgttgagcttctgtttctgtattaattatttagtttacctgagctcattgactttccatttcaattgttaacggttaaagaagttgatacaatttgaattgttgatacagtattacttcgacactctctttccgcgaattcctgttccagtaatgcgccaggttactgctaatcttgataagatgaatcttccatccaagcattcaggcgtgacaggagataccactcggcatggatctgatgatactgctcgacgtcctccatctgtgaaagctgctctttccgtctcatttggtcagcgtgctcctcatcgtgcgtcaactagagattcctcacctgttcgtcgcactcttccaccacctcctccttatgacagatccagcactgatgatgtacgaagccgacgcagccagagtcgtgaatatttggacagagagcatcatcgtgacagggacaatgaaagggaccgcaatagagacagagacagggagcgtgatcgtgacagggaccgagataggtacaaggagagggagcgtgatcgtaacaaggaaagagacagggaaagggatagagaaagatacagagatagggatagggatagggatagggatagagacagggtcagggacagagaacgggaaggggttagagaatccagttatgattatgatcgtaggtctagatatggagaaagagaaggccgaaaggactatgagaaaagcgaccgtgatggtagcagacgttatcgcagtcgaagccggagccgcagtcgaagccggagtagaagtcatagcttgcaagctgcagctgtgccttattcaagcccacagagagatgcgagcaaggaaaggacatcagcatctagcaacctagcaaagcttaggaatatgtacggtgatttaggtagtcaaaaaggagatgatagtacagacagggctactggaagcagcaatggtggcgaagaggttattagacttggtggttcttcttggaagtaattgaaagaatttctacaccaatttctattatcattatgtgttatcatagtcttcatttagaatcaagatagctaatgaattctttcttgattctcattgccccctcatattttctcttcaaaagttgtcgaagaacaaaaaaggaaaaaatagaaagacaatgatatttaggggatgagtgatgtaccaaaa

SEQ ID NO: 321564 - DNA, 1132 bp, Cannabis indica
aattgagttttatttagggaataaaacccaacatattgggggtagaattgagatatatacctcttgagaaacttgcactgtgcctaattcatgcatctcgcaaactaaggccttacttccaggcacatccgataaaggtgttaactgatcagcccctgagacaagttttgtcaaaaccagatgcttctggaagattgataaaattctcaattgaactggggcagtttgacataacttataacccacgaacatccatcaagggccaagctttggcaaatttcctaatagaagggataaatccagatgaaaatccacttgttcagcgagacgcgaacacttggaagttgtacgtggatggagcatccaatgaacatggctcgggtgcaggggtgatactaattttgccagaaggctttaagtttcattatgccttaaaatttcagtttgacacttcaaataacgaggccgagtatgaagccttgatagctattttgagaatagatgaagtgttacagcgactcgcagttaatcgtgaatcaaattttaggcaaataccaggcaaagggattaaaaatggcaaaataactagagaaggttcggaaaaacttggaaaagtttgattatttcaaaatcaaacaaattccaagagaacaaaactctaatgccgacaccttggcaaaactggcctcgtagagcagacttgatgtattgaatttggtaccggtggaaatgttaaatgaaccgagtacacgtgaaaaggaaaaagttgagatgattgatagctcgtctacttggatgacacccataattaactatctactcaacggaaaacttcgagctgataaaaataaggcacgaaaactctagtattcaatgtctcgctacacattagtagagggaaaattatatcgaaggggttattcaatgcctctcctacagtgtgttctccccgtagaagcaaacgagattatcagagaaattcacaagggcttttgtggagatcttgcatgttggcaaagcttgtcaaagaaaatgattcgacagggatattattggccaactataaataaggacacatacgagtttgtcaaaaaatgtgataaatgtctgaggttctcacatatacctcgcg

SEQ ID NO: 321565 - DNA, 954 bp, Cannabis indica
ttatgatttttaggtttattcaaaataaagacgttatgttgccgaattttttagaaaataaaaagaatatgttcttttattattcttattgttttcctattttggttatactgatgagagctattttgatcatgttcggtgcatattgttgcttcacgacctagtctctatgtcatcataggtagattaggtgtgcactcacctataggtgaaagacctagaatctgtacagagagtgagttaaatttgagcccttatattagagtggttatcaggtgcgactacggtttaggatgtcattttctattattggtattaagagcttggggtctagtggatggtgtaatataaatttgatgcttgtttttttgtggttatttgtggcatctctactttgtttatacattttgataaaagtgatgacatgtgttatttttttaaaaaaaggtaaccatgcaggaatttttattaaaccaagggtcctttgatattagttattttgttactgcctttataagctcacccgctattttctcaccttccagaaattcaatttgatgctagtggatgaggatggtaccgatgaggaagaaaatcattattttttatataagtaagaaaaacatcattagttttgtctttacttattaaactttcaatgtaactgattttgtagttaagctaaaatagatactctggatgacttaaattagctatatactagttggataagaggaatgatagatgctagatattaattagtattttattgacctattaaatatatctattcagtgactacataactatgggaatattgttgttcttttatataaatgagtggtcctaattttgttactaatattttttatcgatataggagttaatccattatttttagataagtattttgtgatataaattcaaggaacatttataagtgttatctttcta

SEQ ID NO: 321566 - DNA, 1733 bp, Cannabis indica
caaattatgtctcccaaacttttaaagtcagtaaaaataccacctgaactattgaaattgttaaatttaagggcttttgtctaattttattcaattttactatttcagtaattgtttatgtactaaatcatattccttagattttgaaatctacgaaattatactccttgaactttgacatgtactaaattatgtcccatgaaatttcatccatgttagacttttttactaaaattggacaaaagtccttaaatctaacaatctcaatagttcaggaggcatttttaacgaccttaaaagttaaaagggcatgatttggtacatgtcaaagtttaaggggcaaaaatcctaattagccaattatatatggttataaatttatacatactaatttaatttagtaggcttgttattaattagttaatcatgttataattatatcatgattttattatattattaatgtattaatcttagtcattgttaataataattttttactaaatttattttattaaattttatgatattattgtgataacaaatattaatagtttattttttatttctttaatttaaataaaattacatataaactttttttaataaatcataataaaatgaataataaatatttaatgtttaagaaaacatttattaggtttagttttgtaaaaaattattctgaccatttaattaattttatgaattttttttatttatttttaaatagacatgtgatattaaaaataataaagatatatgttggcaaaagaaaagtattgttagcacagattttcgttaacaaaaaataattaacctttacgtaataaatatatcacagaaataatgagaaataataaatgtataagtgacaccagacatttttacgtagtttttatagttaaatctgcatactccacgagtctatattatttaagatattttctaaatacaagatacaatatacaattgattgtaatctttttctctctaaaattctccgtccctttttctgtataatatgccatttataggaatataggttggcagttattgacatgaatctatttgaaatataaccattcatgaaacgtggacactttccacgtttcatttaaatacatgtgggataatattagataactgcttaactgcttgtaattcttatcctttttcgatggtcaatgctgatttggacaatggtatttcgctaaacctgagttaattccttctctattacaatgtggaaaaaagtactaaatgttagcaaatgattcgcctcgttaagttttcttagaatagcgaggtgtgtgtcttgctattcgtaagccgaggtcgctttgcataactgtattcactcctttgaataaatgaattatcttcctgggcttgtgtactctgaggcaggtatgtatctcctcaatataggtttcaacagtcttctattgttgtcttgcttacgactatatagtcagcgtgttatgaatattttctatttatcttttatttaacgagttactcttttttcgtcgtattaaatgatataattccattatatcaagtggttcatattccactgcaagacacatgtcactttctaaaatgtagccaaattttgggtataataattgccccttaaaaagttctctttttaataaaaagagatttttagatgattacaagggtatttttgtcttaatctaattttgaaaaattgcatgctttgagtt

SEQ ID NO: 321567 - DNA, 768 bp, Cannabis indica
aatctttgtttcaaaaaaaaaattaagcattcaatattatacaatatacaaatttagttagttaaacgtgtcattgtccatcccacttgaaataagagttgtgtaaaataaaataaattatagatataatttatgtcattttccttattctattaccatataataattagtttaagttgttttactaacataacaatttttaactttccattctcatgtgagcatagagacataagtcattttatatttataaagtattagagagacagagagtagtagaagattagaagattgataggtatgtattggaaagagagatatatggggtaagattcattgaaggtagaaggaattgtatcaaattaatcatataatatatattatttatttatatatatatagatatatggatattctcttacacatgatcatcatagatacaaaggccatatcatctaatcgtatctaattatcttctggcttgatttctattttcattactttataaattcacaaaaaaatacaatagaaaagatatgcccttttagaaagtagggctccatgcattgaactagttaggtcatgtacatataatataaaataaaataagagaaaaaaccaatttggggccattcatagctaaaatatattctgagattgatgatatctgcagttgtgagtcaacaaaaacaataagaaagccaaaaggccagcattcttggatttttgagagcatcttttacttcatcactatatatatatatatat

SEQ ID NO: 321568 - DNA, 1142 bp, Cannabis indica
cggcatattaataattcaaaatcataaaccgcaccgctacagtttaggaaaaattcaaaccgcgaccgcaccataaaaaatttcaaaccacattttttttttgtagtgttgtgcggtgcgggcagtttgataaacacccctacaatctaagtttacacataataatattctccttcataatattccctttaatcaaattatttaacgccgccttaatacaaactgaatagtaagtattaaataatacaatccaaaacaatacaatacaaataattaagtcttatttatttgtcttttcctcttcaattaattatatttattcattaattaatattatcaaatttaaccaaagagagagagagtgagagaagaagcgacaagagtagtaacacaagaagcaaacaaagcaacacaaaaatctttccatttcccaatcaaacgcctcatctcatctcatctcatctcatctcttctcttctcttttttcactaacaaacacttttctgccttacttttcttcttcaattcatccaagaactacaatcacaaaccacgaatctcccaataatctctgcacaatctggtttcaccatatatatatatataatcaaattatcttacctgaatcgttattattgtttattatatatttgtacagactttatgtggttctttgcgtccactaccgccataacaatatcctcactgctttttcttcgttcggtaattcaatttcattttatatctattacgattgtttttttttttaatttttatggataattaataagagtgtaaacttttgttgttgtagagcagggattttgagtggttatcttgacagaattattaagagttaataagagaatgaatcactgcgtacccgatttcgaaatggatgatgattactcaactcatcccaattcttccggacactctcgtcctcccagaaaatcttttctgtaagttcttaattactttttttttgttgttgttgtttatggtgagatttgaagcaaaatttgatctgaacagagaacgattttgtgaaatgttttagtccagaggacgatattatggagcttctatggcagaacggtcaggtagtcacacaaagccagaaccagagatcatcatcggcg

SEQ ID NO: 321569 - DNA, 2466 bp, Cannabis indica
ccatcaacgagcaattgagtacgaaaatatggagagccgacccccgcgtcctggtaacggtggtgcaactaccattaatgatgtttcccaaactactgatggtcgaggaccactagccaaacttccacagctgggcagacaacggttgggcgtaccaccaatgccacaaccactggaggcaacgttactgacggcgccactagaaagggcaatactggaaactccgtcccacctaattattgcatgggccaaactcaaactggtcatggccttggtgtctttagaccacggaatgaaccccatgtggatatcgaaggaattgacccagagatggatcaattgcgagacatgataggccaaatgcaaggacagttccaaactgtacaccaagagcaaactcaaactcgagcggccctaactgaaagtctccctaaccaaaggagagagttccaatcttggttggaagatcatgctcgagaaatgaggaggcgccaagatgacgatcgtcacactcaagaagctgtcgacttaattcaaagctatttcaaccaaaacactcacccaacaaatatctcaagaccactaaacctatccacgaaaagtccataccccgaataaccaatgagagagggtggtctacggacctgaagaacgcctaatgaaccaagagagggctaagagtcacccctccaacaaggttcgccacaacaacaatcgaccgctcccttagatgaacaagtcctacccgatcattatatgggacgagatgactcccataatgttcatctaagacatagcggtaggggaaactccagaaacaataatggtgaccgcggtagaaacgttgaaaggatagcccaacacagggagtggcagccccgcgaccaaccacgagggggaaatgatcacctgagaaacagtaggcttaggggagaagggaagaccccgaggtcaatagtgattatcgtcctaacaaccccgacaaccatggtgatgacgaagttgaaagtcagaccaatgatcaaccaaagcctgggctggggggttaccaagtcggagggccgtatgcccctaataggcaacattaaccaaaaaatccgctcctaaggggtagagatggccaaatacctccccccgtcaatggaagggctgacaatcaaaatgcaagaggaaggccaagatccaggtcagtctttgaacgtgtaggcccctaggggctggagaccttcgggatgccctcaataggaataaggacaaccgtggttcaaacatagcaaatccacccgagccagctcaaggaagcccagctgatacaggcattaatgttgtccaaccccaagcagccacagatctggcgatctaggctaggttggatgagttaacccttttggtcaaggatcaaactgccctgaaattcactgacttagaactacaaaggaggagggggtctgctttctcacaaacgatcaatgacctctccattccagcaaaattcaaaatgcctacttgcaagtacatggataatgaagaccccttgactcatgttcaaaacttcaaaatccaaatggaccttcaagggatcaaagacgatctcagatgtcgaatcttccctgcaatcctcacggacacgacacaacaatggctcaccaaactaccctcagggaggaacacctcttgggatgagtttgaagggttattccatacctaattcttttaagcccgacaactgccgacagagctgtgcgacttagttgtcattaagcaaaggcccaacgagtcactaaaagactatatccaacgcttcatgcatgaagccaccaaggtaaagaacctaagtgacaacggaaagcgagtcgccaatcaccataatggagggcatcacaatgggaggtcggcaagcgagctgccataatagaaaagaattcaccaacaatatcaagcatttcaaaaatatcagttctcaaaaaatacttaagtgcatataactaatgtttatttttatttatgtttgttctttttcattttataattatgttgttttattttatttagtattaatatttttttttgttattttgtattttttaatatgttagtattttaaattaattattttgtaataaattttaacttgaggattaaaatgtaagtttattttttaaaataaaataaaataaggatattagaatatgaagaatttttttttacaccaaattggtatagattcaaaattcaatatcattaatggtgtagaatttagtgtccaccaatttagtgcataatttggtatgtcattagagtaaaatagtgtgaagattccacaccaatttagtgtaataatgtaccattagggattctctaataataaactgagggcccacaataccttcaatctaatttaaacttaaataagttttccaacgccactactagagtccgtttggcacacttttgaaaaaactaaaa

SEQ ID NO: 321570 - DNA, 1018 bp, Cannabis indica
ttttacatgatatgttagatacctacaacatacacgaaatatcgaaacaaataggagtttagcgattgtattgtaaaattttgtataaatctataaatatatataggacacttttatagtaggaaaaccttttctatctctatgataagaacacttaattgtacattgattaatgatctaacagtgtggcaaaaaatagaagagtgtgatagtgaatatagagtttactcgtacatagttcttcaattttttaataatagtttaatatttttttttgtttgtttattttcttgacaaaaattatatttactttatgcaaatttttttatcaaatttttatttttttcaattagcaaaaagaaaaattagaaaaattaattaatttttctttttcttcaaaaataaatttttctatattaaatttttgtgatcaagctgttatcttttactctatatgtctgtaaattttagaattgtttaagaaaatatggaggttactcctaataattctatttattcttgatcttgatgataacggaaagcatttaatagagctttattttgtttttattaatatttatggactaaaactctggtatccttttaatattagtaaaattaatattggtatacaatatagagaaatactaaaataagaaaaaacaatatcaaactattgatataattaatatctcatatatttttattttataaatatatcgttaactatttgtaagacgatattttataataatattaaatattatcaacacctaaggtggcgtttggttggaggtaatgaaatggaatagaatggaaaggaaataattttcattccattcttttgtttggttgcattttaaagtattggaatggcattccaatggaatgctctttccaccattttggtggaatggctattccattttaaaaaagaaggaatgaccattccaatgtaacaataaaaaaattaaatatttttttatcaatttttttatccattttaaattttattcca

SEQ ID NO: 321571 - DNA, 1222 bp, Cannabis indica
tgattcatattccttttatagtacacatgttagcttctcataaatagccaaatttcgagtataacacccatctatagtgatctggatagtattaaccctcgagtttaatataactaaaaggggagtaggtctttacctgctatcacaagggggtcaaacctctataaaaaatctatgtgtttactacttttcggtcttatttgtgcaacacgtggcaagcatcaaatctatacgaacttgttgtcggttgatcacttcatgaggtcaacaggttggtgttttgattgaaagcgtggatatcgtatctaatcaaatgccatggttaacacaagaagaacccctgtcgcacaatctgcatcttcacatcttcctcaagacacacaaactacaggtacagacgctcaggttctagtcacaacttgaatccccatcaataaggtagatgtggtgtatcctatcaccacaacaatcgccaacaatctggccattacaagtggccaaactgatacaggcatccctgtggatccaagtgggaggcccctgcctctaagagaacacccaccattggcacctcctactaaaggaaggacccaaaggcaacaacccttggaaaaacaaatggatcttgtctctagttctatgctagaaagataggcccaagagttggcgagcctgcgattggcaagccccatctggacttaggagaagatcttgagttagccaaactcaaagaagctgtaggccgtgtaggcctaactaaagaaccacgtgctactgattgtgatgtttttgctcagtagagacatgaattcttaagatggatggatgacctggaataaattctttgatctcatgaagcagagttagattgccacaacttagaggccaacgatctgataagacggttcaaccaaagaactgatagacgaggctaggatctctagaccgatccacttcaaggaagacatcaacccagttgctcaggaactagaatagatcttcccttactagagggaggacatacctttcctcaaaggtcagatgacaaaaatagccaaatctcgacaaccaacagcgtggggggccgtccagggatctctagctcagcaacagcccccattgtgcaaccaaccagagtacatgttggaaattatttaaccaggatcttagatctactcacaagtatgtggattaacacaataaatatgaactttctaaaacg

SEQ ID NO: 321572 - DNA, 1957 bp, Cannabis indica
gggcataaaacccaacacgcacttcctcccgaaatgagtctttgacaaatcttcttccaaagatatgtcctcacttcctcctaaaatgagacataggaaagtcttctcccaaagacccaaacttgttaaaaccttctcttcaacttattatatgaacaataagagatcattacaagaaaactaaaaccttgttgaatctctatgtttttataaaagaaataatgttcttacaaaaggaagctataaaaatatgaaactttaagagattgaaaacatttagctgctctctaggtcctatttatagaacataaaaactctagagacaaccataaacacgttttcccaactatagaaagctttcctaaaaaaagctttgattttcagcatcaagttcagactctgctgcagcagatctagaccagacaagaaactttctagagaggaccgagatcatgattttgtcttcaatacctaccaaataaaaattatttgatttgctatatacatagcaaagctaaaattaacatttagaaaaagagaaagtcaattttttcaaaaatggaaaacttttcataaagagaattccatctcttgtaagataagtttcctaaacaaaaaacaccaattgtaaataaaaatttttcttaaaagaaaagagcaactaaagccacgaaattaacacaagaaaataatttaattacacaaagaaatacacattaattagaaaatattttttctaaagaaattgtaaaaaggactttacaatttcccctttgttactttagataataaaaatatttttaattaacaagcacctacaaaacaaagttagcaaaatcaaagacataaacttcccctgaaaagcacaacattaaaccaaaataaaatgctaactttaaccaaagtttaacacaaacactaacctcagctcttaaaaccattactccctcttttcgtttatctataagggcaaaagaaaaaaataaaagaaagcaagttcaacaaaacataaatagtgaagtaacaaaagagaatacaaatcttgagcttgataaagctagaccaaagtggacaattgtttagacatctcttgttgaaccccctccatagcagccaagccactgttcaacaaagccacttcctgcttgacttcttgcacttctataagagaaaaactggaacttgcagcagcagagggacctgctccaacaaaaggttttaggcatttggggaaagcaccatcaaagtattctgatggttgaaagattataccagtaagaagagagaggtcggggtagatgatgagtgattttcagaattaaagaacacgaactaatataaataagtagtggaaaagaaagaaagaaagaaaaacaattaaaattgaaaaaggaaactaagataaacaaccaaccttttccctcttacaaaagaaaagcaccattttattattttgcacacgaaaaaaatgcaacaaaagagcaattaatgtaagatttcctaatgtaacaaaatacaacaaataagaaatcaattttaagagaaactcatcaaaaatttaccaactaaagcacatgttgatacttagcaaaagaaaaacgtaaaaaccaaattttcttagcccataaaccaagtgagccgacttcccccttttttatgaattttgaaattagaaaaaaatacaaaggaactaaaatatttttatacaaaaatcaagttaatcttaagcacacatctttcctttttttcatagagggacaaataaccatgttatgctttcaaagatgataagaatctagtatctcaaatacaaacccatacttaccagatgttgagaaaaaatagttaagttactgttaatgcagattttcgttaacttaatttgagcctgagtgataaacttgcacagaaaaataaaaacagtaaagagataaaagaaatgatgaacacaaaggtt

SEQ ID NO: 321573 - DNA, 1335 bp, Cannabis indica
tttattagatgattttcttaatttttttttttatttcattttcaaagaaaaagtaaaaaaaatcagaaagtttaatggaggtaggtttaatacctttttttcatagttttttttaaaaattagtttttagctttttctaccaaacaggccctacatctgtcttttgctttaataaagtgtagagaaggataaacatgatttttgacctaaaactataacacacataccattgataccacacgtttcatatcctcttccaatttcacaattaaaattcaatcaatggattggatccactccttcttcaacattgcatttcctcccataattatatttctacactttttaatcctaccaatatacattccattcaagtttctacaatttataaaaacatccataaccactcaacaaaacctggctagaaaagtagttctaattactggagcagcccaaggcattggagaggtataaatatatgtatatatatatgtatatatatatactaattatctatatatgtgactttggttttaaccattatatatatttttattttgttgaagcaacttgcttatgagtatagtagaagaggagcttttttggccttagttgacattaaagaaaattttgaagatgttagaagaagagctcttaaattaggatccccagatgttatatctattgttgcagatgttactaaggtggaagactgtaagaaatttatagatgaagcagttcatcactttggccaatgtaattaatcataataattagtttgtgtgtgtgtattttcttaatctatatataaaatctcacttacaattaatttaattatctgaattttaatgtgatgatgagtagtggatcatctggtgaacaatgctgggacagtaatactgagcaagtttgaggatattgaccacatttctgatcacaaatcgattatggtaaactgcattaaaatcactacaaatatatatttgatatatattgtcacatctggcttctttttttctcatctaatataatatgtaagtgtaacattattcataatttctagtataggatgttaatttctggggtacagttaatagcattcactttggaattccacacttgaaaagaaccaaagggaagatagtagtgatctcctcaatcagtggatggtgccctgttccactagtatccatctatagtgtaaggaaaattaaattcataatttgttaagaaaaaaagtgaccttccttttataatatatattcaacttaaaattctattatatatcatatatcaaactcttttctatattctctttctctatgtgaaaactat

SEQ ID NO: 321574 - DNA, 938 bp, Cannabis indica
taaactttttttatgtattataaattttattttatttcattcttatttacattcttatttttatgttttcatttttctcaactaaacgttaacttagtgtttgaaagcattcttaataatttttttactctattcattaaaatacatcactaaaattatatttttttcttatttagaacacaattttatattatatcgtacactaattttttaaaatatcactaaaatagaagttttttttatatatattttatttaattcaaatgtataatattaatatatatacatatgatatccacatacacacataattattataacttaaaataattaataaaatatatttagaataataaataatattctataaatataaataatgaatagtaaattttaaagaaatagtttaaagtatttactgtaacatatttttagtacggttttaaattttttagagaaatagtgggtgctttaatgaaatgatctttcattatttatttatatgtatagtgaatggaataatgactattgactaaggaggtgaaatactagctatcctaattcttgtttgtttttgttttgagaatgattcagaggggtgtgcagaaagtcatccgatccaattctaaccgaccgatccaatcctaaccgatccaatagaatcggatatccaatcataattggatcggatcggatgcaaattttaaaaatccaattggatcggatcggatattggatgagacatccgatccaatggataaccgatccaattcaatccaatatcatccaatgtccatccaatcatatttaatatttataattttatatattactttattatttattaggttttaaattatgttttttcatatatatatatttttttaatgaaattagcttaaatagtggttaaaatggattggattcatccatgggat

SEQ ID NO: 321575 - DNA, 732 bp, Cannabis indica
agtctaacattttttttatgcattttaaattttattccattccattcctatttctattctcattcccatttatatttttatatttttattcctcccaaccaaatatcaccttagtgtaaatcaaatgcgagcaaaatagtacaaattagattggacaaacacaccaacatcgtattagcgtttctggatggagaaacacaatttcacaataataatatagaaggagaacaaaatcttatttattctatctatgtaatacacacgaaggggctgttaataaatgtgaaccatctgtattgttgggtcaagtttaattttgcactgatgctgctaatttagagtaagcaaagattgttaaagtaaactaagaatatataaaattataattttcattttgattcttttttaccctaaaaatgaacatacaaattttgtgtttgaaaactatataattttgttttcttttgttttaaaaataaaaaaaaaataccttttgtaactttcttattttatttagatttttttattgcctaagaaacctttacaatatacaacttagtttagaatactcctcaaacacaattataaaatctctacttattttctctcttttaaaatgaaaaactctatcacaaatctctttctttattttatgtacaactagagaactaagtcgcgcttcgcgcggtgttgttcaacttttataattttttattatataaatatattata

SEQ ID NO: 321576 - DNA, 1133 bp, Cannabis indica
ttagagtttttattcctatttttgtaaaggatatcatttgtctattttgttgattatttttgagtgatatatcatcatagactatatttccatctttctttaaaaatatatatattcctaactaaaatgacataataattatattattaaatttatgtttgatgtgatcaggcctatctcaagttaattaggagttttgggtcaaaaattttgattaggccttttttatatatatatattttttaatatatagtgataaaaatctaaaatatattttaaaaatataattaggtattttaacttaataaaaaattagatgtagtatcttaaaaaataaattaaatattttttttagaaaataattattttttttaataaatagtagttaaatataaaatagggaaatttacatagtatactaattacttttgctattttttttacaaaaatattgttatgcggtattttatacttttttactgtattttttataagtttcatactgcatatactgtgttaagttttcactgttgttctactagtgcttttaagttgttctactgttgttttaagttgttctgttttgtgttctactggtgttttataaaaacataatattttttaaaagatttctgtgtaacagtatttttataaaagttaacccaaattctaatatttttgtaagtttccctataaaatatgatattttatagaaataaatttaaaatttttttgttaaagaattttttagacttggatgagggctttaaacgtgagcctttgctgcctcactttatggtcggcccttagtgtgattaaatttacgggaaaagttaaagaatatcttttttttagaagaaattagatgttatacctcttttaagttgttgtgcttgattttaacctccttttttttttttatatatatatttttcatttctatcttttttttcaacaactctactaattatgcccctatcatctaacgatactccgactctccatttaactctaacttgtgtagctgtgagggtataattggtaatggagttataaaagtgggcacatttcaattgaatttaaattaaagctatttttggttaactaataaaaaaaaaaggtatattttcaac

SEQ ID NO: 321577 - DNA, 1457 bp, Cannabis indica
taattaacattctgtgtaatttccaataatagcttcaggttagtgcttccgattatctcgttattatctttttcgttttttgatttagcaacgattctatagaaatataatttaaggttgtttatattaaagcacttttagaaatataattatatctctgataatatttatttcttgagtgttttattaatcataataatttataataatatggcaaacataagcccataaaaaagctaaaataaacaaaaatctataaaaaaataggcagttcaatctaccatatttaagtaaaaagttttgcaatctcatattaagtgtaatttcatctttgtaaaagttactggttggactcttcgtttaaataaatgacaaatcgatattatattttcaaaatggttcaaaatggtaatttggagctcaatttttatcaaaattgtatttacccttgattataagtaattaatttaaaatattactgatcggtttcttcgtttggataaaaaataggcagttcaatctaccatatttaagtaaaaagttttgcatctcatattaagtgtaatttcatctttgtaaaagttactggttggactcttcgtttaaataaatgacaaatcgatattatattttcaaaatggttcaaaatggtaatttggagctcaatttttatcaaaattgtatttacccttgattataagtaattaatttaaaatattactgatcggtttcttcgtttgaataaatgataaatcaaattctgtatttttttaaaatagtacaaaatagtatttcgagttcaatttttgtcgaaatggtatttaccttggattataagtgattaatttcgaaaacaaataaaccaataccgaaatctgtcaaagaagaaaaaaagaataaacctatactattttctatgataattttttctttgtttttcgtaattgttttatttgtaagtcacaaatttatgctcgttactatctgtttaagagaaaaaaaaaaattgcaaagcaaggatatttttgttttaatctgatgcaggcaatcatatatgatatgatcagttgaatatataaaccttaagtcaacaatattaataacttaataagaatgtgttcagactaagcacgcgttcctaaataattaagataatagctccaattgttatacatttttcattacatagatttaaataattaagactgagaaatgaaaattgctgcaatttcaagcaaagtggggttctttattaatatgattcaacgtaaagaggataaaaggcctcacatttaacaccaaagttcctatttttttatttattttttaatgtggctctcatacatattaggtatgatgagtttatagcatataatttgtttggtgtaaatttctgataaataaattgactaggtagccacatataagtcacattttaaaaatatttgttaggtaat

SEQ ID NO: 321578 - DNA, 1697 bp, Cannabis indica
aaaaccgcctctaaatgtcaatttcgaatctggtgggtgttctcacaccctttagcttccctttttataaaatgggttaaaaaaagggaagctaaaggcccatattgtagtagtgtggtctaataaatttttatccaaacccaagaaaaaaaaaaaaacaagaatgcctcttattcttcccttgcagccgcacattcctcgcattagagaaatgaatccaacctgggatcgaaggagcttaacaaagatgaatcaacgccgatagatgaagaaatcccattaattccgataaaattacatgagaaggggaaaattatcaaacttaaaattaatcattaccgattgatgaaggattctacagaaaaaaaagctagtttggaatatacaaattcataatatgtagacttataagaaatagatctagagtttatatataattcaaaaaaatatgtatcactacaatagctaatattctaattgttgcattaacattgtttttcagaatttcaatctcgatcggatagtttattcaaatccaatcgcgaaaaataaattaaattcgcattaatctcgcatcatggatatggccacgttttttttttttttggaatttttgtctctatgttgttgcatgatagttgattgtcaattttattgatgcttcgataattgatgaattaataattacacactgatcatgctacactatttttagtcttatttgcttgtatttcataaagacaatccaatataaagctctcataacaataattttaatatggtaagattgttaatattttaatattgatggagttgacgttgatttacattatttttacaattgtttcttcctaaagtattctcaaactacaagtcgttgttcatcagtccaataatactttcttaagtttttttaatatccaagcacattgtccatatatagttgtgactatgttgtttatgtgttgcccaatagtggtgttactaaaatcttattatgtataaaattagggattaaaattagagttgaagtgtagaggaataatattcgtaaaataaaagagtgtttcaatttatatagggttaattgttcatatctaatgtatgtaatatattgtaagatgattttatatatatatatatattaaaatcttaatacgataatgagaattagtaatgctaataatttctaatcattggaaaaaaatatataatattattaatcaaaaatacaaaaattataaacttgttaaatattttcttcatgtaatatatataattatcctattttttgttatatgatgattaataattttattttatttttgttgtctgattaagaaaaaacaaaacaaaataaaataaaaccaacaaatataataaatacaaaatatttgatgagtaaaactttaatattttttgtaaagatataattttaaaattgatttataggatgttgcgtgaagcgcgacttaattatatattaatttaaaatatttaaaatttgattatttttttggacgcggtgatcaaaatcacacatgattaacaaagcggcaattcatattccgcggcgacacctccacgaaccaggatagctcatcgtctaaccgaagggcatgctttgccaaaccatgagctgcataatttcatatcgcaagccacatgggacaaaactgccccccgaaaatttagac

SEQ ID NO: 321579 - DNA, 798 bp, Cannabis indica
tattgatgttgaataaaatagattacattgaaatggagttttatttagtgcataaaacctaacaggaacctgattggaggagggttccaaacacgatctcttcctccctcattagcacaaatgtccctaggagcagacgataattgagaaggtgggactgcattattgcgtgttgtgccccattcctcacgggagtctctttgtggaggatgtggaacgttgttttgaagggcaatagattcttgcacgtccctctaagtctgatgttgcataagaggaggtgcatcattccttttattctcatgacttggggttgttacttgaaggtgttgttgcggagaaggacgtacattctccctctgttcattctcatgaaatggttgttgtggagtcgtgttttgagtggtgtcatgactttgggtcctttatgacctagacctcccttggctttcaaccgggtaatgagtcgagtgactcccacaaggttgtcccctttttactgtatcggggtgcctcttggcacgggctccacgttgtggtggtctcgcgacttcttaggaatcttgactctctttccactctctattgaatctgagagtcttttctaggtgttgcgtaacatctcgttctccatgaacacctcatggaaattaacaatttgtcacacaccatgggatggtgatgacgaatttccaaaatcacagactcgaccctcatcgtcaaacatgggttattttcttggatgttgtgaggtccctttgttggaaattattttaccagaatcttagatctactcac

SEQ ID NO: 321580 - DNA, 822 bp, Cannabis indica
gctaacttgtgattatatttattaatgaagtaatatgacaaactcaggttcaggctcaaattcatatttggacccaatagtagagtgtcctagggtgatacctaagcatggtagaagtgagatgaacgaaattagtaagttaattgaccaaggaaaaagagttactctccttgtcaacaataaaggacaatattatggaaaaaactatagtaagctaatatcgcctttaggagttaaatgtcgtatgacaattgggttgtcctataaaaattagaagcaagtcaaccctgaacattaaagttaaatttgtaaagatatataggtaagcagttactttttaaaatttttatttgtgtttgattaattcagatgttaactctaataatgtttatttaccttataagtagacgagttttatagtttgagatgattttaaacatgactacatggtcattatcgggaagttagtgaaagatttcaagaataaaatgaataaggacatcaaaactcccacattagaagaaaataatttgcaatagttagcccacatccctgaaaagcttcctgaaatcgacaaaaatgactggttgaaatttgttgcaagtttcctaactcgtgaattttaggtactaattatatatgttaagataaacttttaaatacaagtactagtagctaacatattattttttttatggtaggaaatgagtaaagtaaaaagggaacgattaacaaaaaaccaatctaaacatcaaagtggtcgaagcagaatggtgaacgataagagaagatgttgtaagtaattaatataatgaatttcta

SEQ ID NO: 321581 - DNA, 792 bp, Cannabis indica
aatttgagatgttggtgtcctcaacttgctcacttggggtcaatccaaccttagcatatcggcatattagagaatacaatgcaaacgttcctcctacaaacattacaacaattattttatatatgacataaaatcaaatgcctattaaaaaagtaaaagaaaaagaattaatctccattttagaaagtaaatctactaatactgcaacttaattaatttactttcaacactcaaaacaatagaaacactaaagtcatgttttgttggagataatgaaatgaaatgtaatagaaatgattcaattttcattcatccatttgattggttgccttaatttaaagtattagattatcactccacattattttccattatttcagtatatagttattctattttaaagttaaaagaaagaccattctgaatttttattagtttcccactattcttattcctatttttattcttaatattattcttgtttttattctttccaaccaagcatactaattatacacatactcatcaatcatattattttcatggtaaattaattaatttctgattttcctacacaatcagatctgatatgtaattcagatacatataagaatatataatatcgaaactaataaggtaaatattttattaacatgtacagttagggttagagaaaattaatgaataaagaaaataaagaatataaatatacgtaccatcaccattgtcagttgccctcaatacgatgaatacatatttaaccaaagtacttaatgtgattgtataaaagat

SEQ ID NO: 321582 - DNA, 1581 bp, Cannabis indica
aaatattaataaaataatacaaacaatatgataaaatattgtaggctgatcttagccattgatggtggtctaatggttaaattggctctagatgatgatcgtcaatttttggagctcgaatcgtgtctgtttaattttttttaagctttttgtaaagaaaattgcacttgacttggggacaaattttcaacttgaaatcttcaaaattgagatatgagtgtgagagatgcgtagaaagatcttgaaaagagctttcacacgcaactttaatcacatcaatcaaagatgagtgagttatggtcgttatactgaaggttatttagcaatcaatgcccagttgacatccagcatccaggttgacatcgagcgcctagattgacgtcttgatgtcaacttgaacactatatgaatggaaaaatttgctggacttgtattttttgatgcctaagtgatattctgatatcactttgtcaactttatagttcaggtgaagtcattcaccaactcttagagatgttttttttgcaaaattaggtagactcaaaacttctcgatttgcgactagtttgtcaatattccactttatcgaaaggtgaaatatcaaagtttgaatttgacttttcacaagtcatagatcttgcttactataaaaatagccagatgctcgagacagaattggaattggttaagcagaacctagtgcacgaggtcacatgtcaacctgggtgttgggtgctcattgatgagcttcttgagacttattttggtacttctatggcttttgagattgcgaacgaggtctcctaccctattttggaccaagataagaagaaagtccagagcataatttgaatttgagcagcaagaacatgcgacccaggttgactgccaacctaggcgcaggacccaacacccatgtcaacttgggtgttgggtccctatttcggccctcaaatggccatgtttacttcccaagaacacttatatctttattattgatgaaaatagacaaaatgtctaggagacttcctaagaaaaatgcttggatttggcttaggttgacaaaatgttaacgtgcgcgctaagaccctagcaccaggtcaacatagttgatgggtccttattttgaccatcagatagctccgtttatttcctgaaaatacttgtatcttaattgttgatgaagaaagaatattcctgaaagacttcataagcattgtcattggaaatggcccaggttgacaacatgtcaacctgggtgttagtgaccaggcctagtgtcaacctacgcgctgggtcacttgtttggcctctaggttaatatgtttctccctgaaagcacttgtttcctcattttggatgaaaacaaagaaaaatctcgagaaacatcttcaaaaaagtagttagaagctccccaggtttacaacatgtcaacctaggtgttgggtggatcatcaggtcaacaagggcgtcgagtgcccaggtgttggaaattattttaccaggatcctagatctactcacaagtatgttgattaacaccctaaatatgaactttcaaaaatgatgaaataaacacata

SEQ ID NO: 321583 - DNA, 1008 bp, Cannabis indica
ttaatagtaatatatggagaaacaaccgttaataaaatgtttatacaattgtaatgcaactattatgaaacattaaaaatcagagttgtgtttctaagtacgtaactctatctacatatttattcgtgatttaatatgaacaaattaattatttgaaatctacaaaataacaaaaatgcactgggataaacatttaactatagtattgatgtaaatttttttggattatacttgagttgtttgtttgggacttcagttcaacttttggagatctacattcatggatctaaaaattgaagttaagacattagttttatgcgagttaaaccaaatttttggttgaattttaaatttgtagtagtttttctgcactttttttatgaatatgaaacagtccctattttgattgattctagtcatctttccaaatgaagtcgcagaattaatagtggttctctttctggatgggtttcgtttcagttttgttggatcgctaggtttgtcgatcgaggattgtgtgcgtgagattgtttgttttgttctgtacagctaaagtagtagaaaaagtagtatttttgtaatatttagtttatatgttgtattaatgttcatagggtcgaccttaactatttttgtaatttaattgccttttctgtatatacttgaaaaaatccttaataaaaaataaaattatttatatgaaaaagtaaaataaaaatgaaagattaaatcatattaaataattaatattattttttggtatgtaagtatacctaatttttatggtataagttgaagaatacttattttttgtattcattaattataaatactctcatattatattttattaaaaactacgcacttttgtgagtggattacccattatacccttaccctctacttagtttagcacataatttacattaacctaagaggtataatggagacatcatctataaaagtagatatatcttaaagaataaaaaaataaaggaaaaaattaaa

SEQ ID NO: 321584 - DNA, 1030 bp, Cannabis indica
attgcctaattagacaatcgacagtcatgaaacttgttatgccatgttgtacattatacttttcttacctcaagttttagttcaggtatgttggccgaccttcttggagaacgatcgataatcccgagccctatatcataattatggtaaaccaataattgtcaatcctaaaatactgcttaatattcgcataagacaatctaggattttttaccaaataccgcagtataaatacactaaaataaaacttacattttggctctaaagtatacactatattatagagctcattgtaagcttcaaaacggtatatagaacatccaaaacaagcactcgagtaaaaagttatgataaaaatacaatttatgatcttcttaaaatttccaaaaacggcagaccgttttggtaaaaacagccgactgttttctggcatgaaaattccaaatttcacactcttcgaaacactaccaaaaattatccatatcattctaaatttcacaagacacatatataccatatatataacaatccttatgtaagagaaattagaatcgagcccttaaacagaaaacgccattaaagcttggacttaaactttaaaatttctaaactcgattcctaactcacaatcacctcaaattcaacaagtaaatatcaaaactattcctatagctaccaaagaataattttatgaagtcagaatctccataactactttaaatcacaaagtcactgtataaaactaattattttcaaattaaaacgaaaccaacactacaataaaaaggggtttttgcatcggtcaatgcatctggtcaaacttattaaataacgcaaaagtcaacccacacttttttgcctcagttatccactgacataaataattattaattagcgtcaattatatatccaacactaaaataaaaactgaagcaaaagatgaaatataaaaaaaatatatatatatatatatacactattaccgttggtctacaaccaacgtaaaagtcattatatacactattggcat

SEQ ID NO: 321585 - DNA, 1574 bp, Cannabis indica
actggctcccttgtcggctcagttcggcgtcccgtgtccactcaccagtcggcgacggcgactattctattctccgactggctcagcccaataggacccgaacccgactacacccaacccgaaaaaacccgacccgatacccggcacacccgcacacctgaacaccgggttcggttgtgcacttccaaaacccgaagcccgaaaacccaaacccgaaaccccaaaaaaccgaaaacccgacccgtgtgcacccctattgtggaggtttagacacttattaaactagtttcctaatcaactacttgatgaagactcggttgttttgccctctctttgtacaagccaatgtaaggccttagctactactactccaaatgaggattgagaagaattgttggtcaacagaagtgagaaagagattgagggttgtacagagtttcgcgtgtttgattgtgaactctctagggtgagctgttttgtaaaggagcaaaactattgtaactagttctagtgttttaatctttctactctgatgcattgattcatgttaaacattcttgttcatttatttgctggttttcatttactggtttatacttgatagtttatgttcttagtttagttaattgtgttcttgatatgtgttcaagacacaaaagatatggggttgtgtatttgttttttagtttcataaatattagaaatgcgagtaatactttttcttttattgtatttcaaacttcttgactatgaaaagcaaaccacatttcttgtagcttctattatgtgtttattgctatatttaagatcttagaaagtagaccttagaaagttaatgaagattttttcataatcattacagtatggggatgtaatgatggtctccgatgggttgtaatatggcttgcgaatgaacctaatattcatacctctccgaatgagaagattaacaataaagaagaattctaagccttaagtaaggcccagtaccctacttgacagtatctttatcaacctctatgaggtcaccaatttcaacagcaatgaatcgagctaagtcatatgatttacacatgaatagtataccatagacttgaatctagaaaggaacataatggagattatctggagtaataggaaaagaactctcaggggcagcaaagatggtaatgctttgggcaaaatgacatggttggccctctaaaattcttccctaatcaccctcacagccaaacgttacaagaaacaaaccatttgcatgctcagtaacagatacagggaatctgcactgtgatgactaaataccacagagggttgtcagagatggtctattgtaaggtcaaatagtatggagtttgagaagaaggctaatagtggcaggagaggatgaagaagagctagcatcataagtgaaaatggtgttttcatcagaaggaaggactaaagcactagaaacattgttaataaactcttcttgtaacaccctaaataattaggcacgctacccatgttacttaagaaaccctaatcccttaaacggaagtactaatcaaaaggcgcagaatttaaacttt

SEQ ID NO: 321586 - DNA, 1073 bp, Cannabis indica
aactctggctagaggtaatttccttcttgactttagttacagcaacgttatagcattctcatgtaattctttgatttcctttgagatattccactccactttttgttgggaaaactgatgtgacaacttttaagtcatatagggccggtcggcataacatgacattgaaactcaaagggacatcaattatcagaaattgcgccattacagttatgctctttggagcttgtccaacagtaagcggtaggcaggtttgtccaaggggtgtgacactttggccgaagaaaccatgtacaagctgagtgcaagggattaagtctttaagttgtcatcttctcataagttattttaaatagaattttcgaggaagctccagtatctatcatagtctgtgccaccatcttgtttgtaatttgcacttctacgacaagggggttgttgtgtgggaagatgaggtggctagcatctgcttcagtaaatgttattgttggctcccccacatgtggccttttaggtttcctttttccatagccaagatttgttcattttgttattactacaaggctcgagcatacttttccctagttttgcctgagtctccagcaagatgtggacccctaatcatgaattgtaaatgcccgtccactggtggaggcatcaattggttctgattgttgtctacctgggtgtccctttgatcttcatcatccttgacacatttctataggtgtgggttatcctgtctaattaagaactcaatttctcacttcaaattattacattcgtttgtgtcgtggtcgtagtccgcatgaaatttgaaaaacttggttgtatctcttttgcatacatcctttttcatgtgagatggtttcttgtacaacaccatagactgagttgtcgcatagattgtctatatgtcgtttgttaggactgagaaagtaatacatttgagctaccgggatattgggagttctagacggatattcttgctgccgtggcgcgttgttgatttttcgtttgcccaacagtatccaggcaccgtacagcttcttcgagcttaataaatccatctg

SEQ ID NO: 321587 - DNA, 989 bp, Cannabis indica
aaaatacaggatccattttgtcatttaacaaaacagatggtctaattggtaactatactgataattgtttggtcatcgaaaatgataactgaaatcaatagttacattttaatttctttcaaccaataagtaatcaatagtgaagtttaaacaaaattgaataagttaaaagtattttgttaaattctaaataaatttatttttatgaaataattttgaaagctttctaaaataagtggtaaggaaattcaatagtatcttaaatatcatatagtttccattaaaaaaatcaactatactaaaattttttatagtagtttcttatactttatttagttattgaattatgtttaaaacttaaagttatatgacaaaaaaaaagttgtcataatatcttgacataaacaataacataatataatataacaactaaaatcatagttttaaagttaactattttttaagtatgaaataaataaccaaacgtgttatcaataacaataataataataaaaagtaatcaaaacacattataaaaaatcttacttttagtcacaataaaatttgtgattaaaagtaaaaaattgtgactaattataaattgtcattcttacgttgtgactatgtctgtggctaaaagtattagtcacaaaaatcactgtaaagaccgcttagtttaaatttcgaaattagcagataattagggtttaactataaaaattatttattgatattaaactaattatttatgataatttatttgaattcggaatgcattttatatgtcatacatagaaatttcatatttttgcatgttcggtgcccagcaacattggaacgcagtgtatggctcagtagaatcgcatctcggtattttagtatagcgggcggtattgttagacattggaaatatcaggattagtcgggaatttagaatttcccaaaatacccttagtatcctttaagttagttttgtgtgggcaagggca

SEQ ID NO: 321588 - DNA, 1810 bp, Cannabis indica
atagtagtgttgatggtgaagatgctaacgatgatgatgatgtggttggtgagtgaggaggtgctgatgttgcggatgtggtgagcaaaaaggtgatggtactgcagcaagtgaaggagagactccaaggacattggcaatgtcaaagaaaagatgttgatttaagggtgatgatttttaagggcttaagccagcttgagattaatgaagatgaacttgttttggctagtttaaaggcttttagaaaaaaataaggtatggctcttattgtattttatatttttagtttttttgagtatttgttgtttacaaagttagttttgttttatagttgcagtcgtagttttatccagtttttaaactgtcaatttttacttgttatttttttttcaacaggttccagattcctttccttatgaagtagttgaaaaaatagatgacaatatttctaaagaagaagaggatggcattgtttcttgtactcctcttgtggacaacagaaagtgttcctcgaaattgaaatcttcttttgttgattttgggtcgtctgatttgaaaacctctccaatggagtttttgtcttcaggttctctatatgcaagagatgagcaagatttcaagattgttacatatgtcaagggccttcatgctctcgatgattctttttttgatcccgttttttctgaacttgaggcaaagtttgacgaatagattagcaaaggattgcttaaatatcttaggtgatgttttatttattctattttcttcgtttttttatttgatttttttgacaattatttgaattaagttttgttcatattcatttgtcttgtatatagggcctttaatgtctatgaggatggtgccaagaagttttctccgggttttgggtatggactatgttgaagataaaacttggttttatgagtaatcttactgagacatgcttattaacgactcggtaatatctttaatctatttttttcagttttgatgatcttggaatgtgtgttcatgctcttacttttttttttatttctatgttgtttaagcacatgaatactattttatattatcttagcaaaaaaaggaaagcattcttctactgtaactgagaatttcgctacaacaaactgtctttatgatgattttatccagtctctacaccataaattctgcaaggtaaagtcattaaaaagcaagatgtctcacattcatattgctcacccaataggccaatatatcaaaggcttgcaaattccttattctaagccatggtatgaagccaaccatattttattcattataaatcttaagaaagagagccattgggtgttttgtcgtctgaatttgaacgagagaatcatatttctttataattccttgaggactgccaaaataaatgatgcagcaaggaacgcaatgaaggcatattctattttgctcccattattttttgatcttcttaggttttggaagaataggtccaatgttcctgatttggattgtgatttgaaagctccactaagagtggtggagatcactagccttccagttcataaaagaagtgagttgttgttattgtgttatttttgtgttgcataatagttgtttaactgatgtgtttttctatttatttttgaatagtgattgtagcacattttttgctacttttctggagttcttcatcatggcaaagatgtcactaatgactttgacattgaagtttatcgaactcgtcttgctgccctcttattttcctatggataaagagaaaatgacaaaaatattgacagtgaggatgagaagc

SEQ ID NO: 321589 - DNA, 1830 bp, Cannabis indica
attacttgttatgtggcacctaatcatattataatgtgggacctcaccagtcaccaatattgtttcttaatgttttgggctgattttgtttggtcagtttgagtaaaatttatattcaaagaggtcagcttatatgatcttacttgtctttttatatcatataaatttagtgtagtctgcacacaaaatttcataagacttgtcacataagtgtgtgtaatcttaagatgtaatttgtatgtgcgcacatatcattactcataaatttatggctaattaggatttttgtccctgaattttgacatgtactaaatcatacccctaaacttttaaggttgttaaaaatgctccctgaactattcagattgttggatttaaggacttttgtctaatttcattcaattttattatttcagtaattgtttatgtactaaacgcgtgcttcccagactatgatatctatcaaattatgcctctcgaactttgacatatactaaattatggtccctgaactttcatccatgttagacttttttactaaaattggaaaaaaatccttaaatccaacaatctcattagttcagggagcattttcaataatctaaaaagttcagggaacatgatttggtacatgtcaaagttcagggggcaaaaatcctaatttgttatatcaaaagattaggaatgatgatccatcaacattaatttttttcttcttttcaattttaagtagagaagaaaaacagaaagtgtatttgccttaatttaggaatatgaatggtcaatagttgatctttgtagcaccggccggccaccaccgaaaaacatgaacagaatagcaagaatccgctaatttcctttcgtttcctttcattttttttttatgcagaatttgtggtccaccttcttgacaaatcaattgcaaggtaatatttggctttgctaagtgacaacaagaattaatgtggcttagttaatatttttagttcttttcaaattttagtttacatttaaattgtaccttaatttataagtaaaattcaaaggagaaaacaattgagggagtgcctctatcatagattatatgaaaaaaaaaaggtttgtttcagagttgttggtgtggtgtagtcatagttcatagtaacaagggtagcaaatgaaagaggatgagtcataacaaacatgtcagtgtcgtgttcgtgccaaattttatttgagctgcttttatattttgtgtcaggcatgtcgattcgtttttgacttgtgtctaattttctcaaccctaacccaacctgtaaaaaatcgtgtcatgttagtgttgaatattattgaatatagatttaggttccttcaattgagccttgttatgtttcttgaacctgaaaacaagagttgctattaggaattggagtaagtatagtctgattcggttgttcattatgcttcagttcttttaaaggaagagagattgggaatgaaaagttgattggcgttcttgatttgaaaaacatctcatacaagaacgtcgatgctcgtggaatgatcacaggatttcagtttttacaggtgatcactctcttatattttgatttcactgagttgtaattaggcatggattggaagagaacatgcattgcagtgacacacaattgaaaacaaaacagttaggtggtgtttggttggagttaataaaatggaatggaatggaaacgaaataattttcactccattcatttgtttcggtggaatgattattgtattttgaaataaaaggaaaaactattctaatgcaaaatgagaataatttttttatgcgttttaaatttaatt

SEQ ID NO: 321590 - DNA, 1406 bp, Cannabis indica
cttgatcagaattctccaataaagattatcgatgatgaacgatctatgcttgtccctcccaatagcatcttccttacgtacatagaattcagcatctctcactcttctagcagttagagtagtttcttgatgtccttgctccaaaaagaagcttttatcattggaaaaaaaggtgcacacctgtggagttttaattcgaattcttattatgttagtttaatgacttattttcatatcatgacatgaactcattcggaccagatcccagacaaagatttgaacccgaacctagaccgccaaaccccgaacccagcccaggacctcgaacctagccccgggtctgggttcgagtatattttaatctacaaataataaattggtgttgtgtagtgtagctatgagaaatacgtacctggttggccattgggttttgaggcatgatgatttggcgcctcaaagctcgagtattgaactcgtccatcaagtcgtctactttaaaaaccacagtgctgagcctttggagccaattcttgacttggttgttgtgagactgtttcttctcagcatccaaaagcacagcttggattgttgaaatggtttctttgagatcttcaagctcatcctccacaccccaaaccagagagatctgtttcacagcttcagatccagtgattgaagagagagtttcagatgttggttacaagtaagtaaacactactgatagtgatacaactcatacatatcattgaaattctcaccttttaaattttattattatattttgtgtacgttgttaggttggcatgcatagttagctgtgcgtggtcaatgtgtgaaagcatggtctgctttttcagaatattaaacatattttcttgacaacaaaatattaaataagaatctttccatcttggagaggagaaatgagagggactagattgaagaggattttgtcacaccaattgctctgtcatcgatatgaaacttggtttcgatcagattgaaaagtagtgagtagtttgagctactaattatttttttgaaagaataaaaaagaattagttacagtgatattttagagcttggcgtgtatagttaactgtaagtaacacaaaccacactccttactaactttagacaactccacttcttttcagttttcccttacaagccaatcattttcaccacaggtacgaggtatagttcaatcatttaagcagttcagcaattgattgcttcagtgttgatccattttcaaagctgttaattgaacattaaaaaaataataatattaataagaacaaaaatatagccacaaacaagtataagatatcataaaaggaataaaattcagaagcatacctatacatatacacaaattcttagcagataggagttaagagact

SEQ ID NO: 321591 - DNA, 551 bp, Cannabis indica
ttattttatttgtattatttacttttattattatatgaaataagatggattatttactatattatcgaacctttatatatatatatatatatatagagagataaatataataaaaattaaaaattatatagaaaaaaattattggtctcttaaattaaatccaactatatatggacttgtgaaattgatatgaatatattacatttttttaagaaaatatgttacatcttttgttcttaatgaagactaaataatattaatagtgtcttttgaatttttctgtgagtattaaaaataagaacaattaattaattaattattaataatgatgatcaaaatgaataatttttttaaataaataagaaaatagataaaataaaaaataagaaacataactcatatatgacttttttatacttttctttatatattgatatattgtgattggcatggttgaggaagataagtactggccttatggcctaatttaattgaaagcatcttttaaaatatatatatatatatatgtaacaccctaactaccttaggcg

SEQ ID NO: 321592 - DNA, 1005 bp, Cannabis indica
gcagtggcaagagccctgtactcggcttcagttgagcttcgagaaatggtcgtttgcttcttggttttccagaaaacgagacaatcacctatgactatacaaaaacccgatgtagatctgcgagtggtaggacaggaggcccagtctgaatcagagaagcctcttagatgtagtgtggaagtagagctgtagaggagtccttgtcctggacatctttttagatctcgaaggagatgatgcacggcttgcatatgaggagtacgaggagaagacatgaactgacttagagtgtttacaacataggtgatgtcgggtctggacaatgtaagatataacaaacggccaataagttgtcgataagcagatggatcatcaagagtagttcctgcaatgtcatcaagctttgttttggggtccattggggttttagctggtttactccctgcaaaaccagtatctgttaacagctgaagggtgtacttcctttgagagaggaatatgccttctgatgatcttgcaatttcgaacccaagaaagtatttgagaggtcctagagcttttaatttgaaccggtgattgagggagtcctgaagctgatgcagaaggtttttattggggccagagatgatgatgtcgtctacataaaccagaagtgcaatgaaattaggtccagaacctttggtgaataatgtatagtcggcttgtgattgttggaaaccttccaaggtgagagcatccgaaagcttctggtaccattgtctagatgactgttttaaaccctaaatggatttattaagtttacatacaaggtttgagtcattactgtcattgtcaatgagggagagaccaggtggaatgaccatgtagacttcttcgtttaaatctccattaagaaacgcgttattgatatcgatttgcaatgtgtgccaattttgaatagctgaaatggcaagtagaagcttgaaagttaccatcttggcaacaggtgagaatgtgtcaaaaaaa

SEQ ID NO: 321593 - DNA, 622 bp, Cannabis indica
aataaataagcttaagaaagaaggaaattaaagtagaacaaaccaaactttttacgtggttcgaatattaatgaactctagtccatgagttaatattattgagctaaaaaatattcaaattatttcttacaaatgtttgtgccctagttgaagagccctaatactcagttcttcttccaagaattctattttccaccatttgcatgaaagggtgatgttatatttataggggataactgggtatgggcatacccggacccggtaggaattttagggatcaattatcctttgatggggtaaaatataatagttattgactttgggccacttgagtgaggcctaaattcatgaggttaggcttgtccgtacaagcatatgtatgtttggagatgccaatttttgtgcgccgctgaatccatacggagaatgttatatgaactataggctactttgtaaaaaacaaaaataaaaatttattttaatatgccaaaataaactaataggtttattggcatatatgatggtaagctatataaaaaatactattagtatgtaaatacaaacgttatagtttattttggtcagtttatcgtggtagtgatgttggtaggctataggatgg

SEQ ID NO: 321594 - DNA, 1896 bp, Cannabis indica
gggcataaaacccaacaggtggctggtgcggattgagttggaagttgaatgctcatcccagagggattgctcacggggggccctaagtgtgacagtgtcggagccaaggtaagattttggttaaatatatcctgaagtcgtggagaactgtattctgcttgtttaaggggcagtagggagtgcagctccaagaagttgtgctcctgtcgcatatcctgacactcccgttgggtaatatcctccgtaagctactatttgtgcctcgtccaggttaatgtatttctggactctcttttgaaattcttggaggctagcttctccttcctgttgtaactcgtcccataagggagttccagtacggatcccagcttggagtagggctaaatgttgtccatcgtcaacctttttggttattgaagactcctctttgaatctctttatgaaattcttcaaggtctctgttggtaattattttatattggtaagggcactcatttcaaggtttatcttcctcattgccacaaactgccgctgaaaactgacttgtaacttgttccaagagtctacaaatcatggctccaacttcttgaaccaatcttcgacggacccacctagcgtcagtggaaaccatagacgctttgcatcaattctgactctcatgacggtcattactctgttgaatccggatagatggtcattgggggtctgaatcccccgtgtacattgccattttgggcattttgaaattcttggggagttctgcctccaagatgttcttggcgcaaggctctcggtcttcgcggtcggactctgagtcatctcccttctgtctccgcgagactctagcgatgtctttgcagaggatcgccaactcagctaagattccctcattcaaggcatcttccgacaccggtatcgcctgcttcttccttttcaggtgctttctcaagtcaccgtgcttatcattaagtttttgtcttaagtcagttgggggatgcttcctacttttcctcccactttccccaggttcttgatgcactgatacgctctttcggtcccctcggtcctgagggcgaatactctctcgagggagcttgcccctctgcggacctttcgctgatcttgggcttttttgttcttttttttttcagggaatgaggtaggatttttcttagggttcccctcagaaggataccatatggggcttggttccctacacttgggcttttgggtgcttggtgaggactcttcttgtgtttcctctggtccttgaggcacaaccttaggatgcacgtggattccaaccgttttcatggccttttgcatggcgactattatttcttgcatccttctattttgctccttttgtgcggccagctcggcctcatgatcaactgctttctgccttagggccagtaactcggtatagctaccatcatcataagcgtcgtacccttctgggctttcttcgtattcctcatcgtttgattcgtctcgttcttcagaaccgacatttactcgtgaggttgcttcttcgccctctaggttctaaggatcttggtggggacgaagttggcgtgtgtggtttcgagtttccaccatcgtagcttagatcttctattgtcgtttttcggacaatgcttcccatagctctcaatgagagtttatggataattaatgcaggtagtttttacgtggttcaggcattaataagccgtagtccacgagtctctgttattaatgagaaaatatttcttacagaggatgtttttatcaggggtatttatagagattggtgggaagaagaaaatgagtaacttgtctttaagtgccaactatgggcatgcacaagttcccagaaggtacaaaataaggcatgcacaacctacgtagtag

SEQ ID NO: 321595 - DNA, 836 bp, Cannabis indica
ttactagggcatcgacatgaggatgatgtacccacctgacatcactctccatgaaagtgatgtcatcgcactcttttttgaacaacttctctggtcgttcactcaaattgtttacattagtaaggggtttttcttttgcttctttcgcatagcgctcctgtgcctttctagattctccaccgacatgtggtcctcctatgatagttataatattgcgaggtgctcgagaaccactcgcattatttgtgttgttactatcatctactcgtggatgattttctccgttctttttgtactggctaaattttcctcgcctgattaattctttaattttgtcttgaagagactagcactctagagttgtatggtcgatatctttatgatacttacaaaactttttggcattcttttgtcacgattatcccgaattagcggtggctttttgaaaatgacattatgttcctctatcacatacatatggtcacgaggagcagacaactcggtataattgaaaaaatgtggaccccctttcctcctcggggatgtctctatcttagagggagaattagcgagttttggactccgtcgcctcgatggactgcatcttctggggcttcgacctctggaaatttttcctttcgggctttgggaacgcccgggtataggagattcgcgtttctttttccctctttccaacttggccaaaaaattcttaattcttttatgcagtttggccattgcaaagaattccactaacgactcgggtcatcgcacttgtagttccttcccaaaatcggttcttggtaaaacacctataatcaacatacaaagtaata

SEQ ID NO: 321596 - DNA, 978 bp, Cannabis indica
tggtagaatgatagagatttcatgaacttgtttgtttcgtcgatgccaaatactccactaagtaacaaggatcaattcaattttgcaacgaggaagccgttgaagaaaattgaaaataaatccatagatgtcacttacaattgtagtcgaatcatcaagtttaaaatcacaaagctttcatactgaagcaagttttttacaacccaaagagtatgatgagttgtttccaagtcaacagaacaaattgggtacaaactatcattgagaagaccatattttgaagattaataatagtaagaattcaattagacgataatctctaaataaaactttttactttatgaagtaaatttaggttccataagattttccaccaagtagaactactagtagaagaagaagcgatagactgagtaacatctcgaataacttatattgatcatgcttatacagctgtagaacactaatgtagtagtgaaaaatgattgaatttaacaatttattaagtaggcttataaatatttattggagaacattgtcccacatggattaaatgtaaaagtattgagccatatataaagaacatgggctactccactcattgccaattagttttgagatggaaccccatgattctcaacatggtatacagagtcaaactaaactctaacatgtaatcgatccaaatctaaaaatcggtccaaaaaaccaaaagagccgcttgtgattcgaggacagtgaaccaagaaagagttgttgtgagccaaaagagccacttgtgatcgagtcgtgcaagattggtgagcaaaaaaaatagccaccttcttgagggggaatgttagagagtcccacattgataatgtattgaaactaaataccatatatatgatgcatgagctactcttctcattgccaattagttttgagatggaacctcatgcaccttaccatacactcacatattctactaccttaacc

SEQ ID NO: 321597 - DNA, 586 bp, Cannabis indica
tttggcgccgtctgtgggaacctcctttataattctctggaatttcttgatgctctaagagcaaaagatttgcaaaatcctaaaagctttgtattttctccgtaaaaaagaaggccaacctctctctttctctcaaaagcattcttttacagcacttctctttctctctttaagaaaagtatctttaaaaataataatctctcttcatcttcttctatttcacccatggatacaactcattagccacaggtataaatatatatatatatatatatatattatgtatatggatagatagatacatcaattatgtatatattacaattataaaatttggtttgttatgatgtttttcaattaaaaatataatccttttcatgagatttttaacattagtatctagaaaaaatggtgtgtttttatttttcttttcttctgaaaaaaaattattatatatatgtatgaatatatggtagtgaaatatatatatatataattatacatatttttgttctttataagtataattaatgaataaaatacatacatatttgttgggttttgtgccctaaataaaacccattac

SEQ ID NO: 321598 - DNA, 2614 bp, Cannabis indica
ggcttgagctgttgagttagttaactgaaccagttcttctacaacttggtatataatgtgctcatgttactttttctaactaactctcatctttagtagagtcgtcttatgattctttgctctgctagggaaaaatatttcttttgtgtttctttgttatttgtagatggtaattcattaaatcttcaagaggttgaagaaggagtttgaatctacaatgtctgaggagagttcagactaaactgcgaagcgaatttcagcttggtggaagcaaggagagcttgtcttcttggatctaagtgtgcttagatctgttgtcttgattttgttcaagaattaggtaacatcatgtaaagtcatttcagattatatagtttgatttgtaaaattagaactcgtgtatgtaattgaattgattttatagtggatgttactttactcggttcttaaggacccaagcactactcgattggaatgtatttccaatgcagaggaaacttgtaaatctgatgttcattgatttagcttcctagtcttaattcttcaagatatccatttaagtttaattacttagctttcggagatattagaactttcagccacaaccaaacccatataggatctggggagccatggtcggagaggcagaagaacaccactggcgatagcaaattcaaaccctggccggagaggaagaaacacaccactggcgatagcaaattcaaaccctggagagaaaactctcaaaacccttgacaaaattttttttaagaaagagtttcaactgatgatgttctatagttatatattctttaaaataaaaatactatatatgtgatttatatgaagagaaatttttagaggtactttttttttctgttttatttataattttacagcctaaagtttttaattataaaaatacttgttattcagctttttgcacattgacgcggcgataggatcaaatgacacatgtcatatatctctaatacctgggtggagggaaatgtccctagtagcttgcacctcactagcttactcgcgccgaggtatgctatctctaataacgagattattctgaagttgatatctctaatacctgactagtcagcatctataatagccagttatccgaccaggtagaagtgtactcgcgccgagcaacttacaagagatagcaacttcagaataatctcgttatgtccaaacacgaagatgatccctataaaggtgggattgagtcagagaaatatgccaacttgttctagttttcgatttcatattttgtaattataaaatcattgtaatttcctattttatgcattgtaagtaaaagagaaaccatccctcattcattaagcccctataaatagtgacctaacctcactatgaaaatgatagaaagaattgcctcagagcgagagtgagattctacagagaaaaaaagtgatctaagagagaaacacacacagagatcagttgtaagagctttcaagaggaagaacacttagttcttcttctgtgtcaatacaatacaagaggagtaggctattaccacactcacgggggcgaacctctttaaaatatggtgttcattttactttattgtttttctttttattatattacttaattgttttattatctgactcactgtcgttggctaaaagggaggtcaacaatactcttgtaaagttttaaaattacaaaatacactttgtttagaaaaagttaaaaaataactaaaaaataacgagaaatccaactcacaataattataaatcaaccataaataaattataaaaaacaaccctgacgactataatataactataaattaaaaacaaaaataatttattaattttaccaaaaaagtatttttataaataaaaaagttcaaaaagaaaaataatttttttatattaacatattttaatatatttttaaagtaaatttttgttatagaaatattatattaaaagaaaatatatatagataaaaattgatgtataatgtaatataaaagtttaatataaattattaaaaaaaaaaaaaaagaattttagtgagtagaaatgctgttgggaatactcatctataatcgcaatgctctcaacgtcactttctcgttataatcaattattgtcttcatccattaattgcttatttccggacaaggtatactcgattgtgatagttttggacaataaactctttcaaattatttattatatcattatatttttatatatatactgtatattgtttaaaaatatcagtactatagttggagctttaattcattcttgtggattgtggttagtgttatatgaagactttagctataaccgcattaaatattttctcgagaatcaaacagagaggtacgttgtaaaagaacaactatattaatattataattcatcagatacaattatcatagagattttctcttcctttgagaatggcggaagttaataatgaaggcgcgaagatgagaagaggatgtttgtgtggtaaaagacgattttctccctgaggaagtcgtttaagagctggggcaattacgtaaaagcactgaaagagactccgaatcggtaaaggatcgggt

SEQ ID NO: 321599 - DNA, 884 bp, Cannabis indica
taaatgaaaatattaattagtttgattgcatgttggatgtattaaatttttggacacctcatctaacatctgatccgatccgattggatattcaaaaataacatccaatccgatccgatcacaattgaatatccaacgtttggtggtcggttataattggattggtcagattttattgaatttaaacaatttatacacacccctacctaccactttccttatgatgtagagcgttgtggcttgtacttgctacctagcaatatgtgggaaagaaaatatcaaaattccaaaattttaattagttgttgaatattttatttattaatgtgatcttaattttcttataataatacaagatcacattctcaataattaatatgaatttttttgatatttacataaattattcaataataatttaacaattcaaatataataataaatcattgtatttatttattcaaagttaaaataatatatgtacttacatacttttaggacacacttttaataggggctggcaaaaagggttggatacgataacacgactcgaaactcgcacgagagttaacaagtttggatttgccttaaaataggttcagcttgtgttagggttgactcgtttaaaccgtttaataaacaggttttgtttgggttgatacggctaacacgaaattgacccgttagtgatatatttaaagttattttagtactttaacatgtcataaataggttataaacgagttaataaatattttataaacgtgttattggttgatatgtttgaacaaaatatgcttataaacgggttacacgagtcgtgtcgtgttaacccgtttacaaaatagatcgtgttcggattttattttttgacacgattatta

SEQ ID NO: 321600 - DNA, 955 bp, Cannabis indica
aagtttttagaactaaaatcactagttttttagaaatgaaattaaagtacgtagcctatctactttcgtacctttttattataagttgaatttctaaacttttgtactagtttattttttttatcttttaataataaatatttgtgtagatatatagacgaaaattttgtaatcaggtattaatttgggttaatttgtaattattgattaattataaataattttgattaactcgagagttggagggggaatattagctttaaatttctttaaaaaaacaccattttattttatcttcgtagctttgaagacaaaatacccaaaatcccgtgatctcaaaaaaaaaaaaaggatgatgatataaataattaccaaatgatagagagatgaaaaattaaatcattttcaaattgaaggagccgtacagtaaagtatacgataatcacggcgaggagttcaacatctaattagacgttgaaattaattcaacaaatccataaattacatatatgcgaaaattttgacctgttcagtcacactaattacgttaattaattttaaaattaattaattgaaatccaacttttctctccatgtgattttttttgtttgttttttagttttataaaaaaattgatctttctactttgtgaacacatacatattttctttcatgaagtcttatgattttcaatgtttgcactttcacgtacataggggtgaaggcagaatttcatgttggggccaaaatatagcaaaaagtaaaaaatatttaaaatatatcattaaattcataatttaacattaaaatacataatgtttctcttacatatacgaaagttatttataagtaaatttatattaacattttcaacaatttctcttttaatatacactcgcaaatagtcatttttaagatcttctgtcttgttgaagagtatagtttttactaaat

SEQ ID NO: 321601 - DNA, 1017 bp, Cannabis indica
tttttagtgcatgaaacatcattgggggttcgatacatcttcaacctccttctccaaacagattgacttcttgaagtctgtcacacgccaagtggtgtgtcacaccctttggtcttttaacgcaaaataatcgcttaatttttagtatgactttagcctttcttcacggaagcaaaagtcccccaaaatagaaatcaatatgattctcgcaagcacgtagttttgtcgtgaatgaaagatcactcggggttcaatacgtcttcaaccctccttctcggaagacaagaactactcgaagtgtgtcagacgcctagtgatgtttcacgctgtttggtcttttaacgcaataacatttgaagtttagtgtgaatttagcccttctccacgaaagtcaacgtcaaacgcataaaacttaacatgattcttacaggcacgtggatttttcgtgtgtgaaagatcactaggggttaaatacgttttcaaccctcttgctcggaagaggacaataacttgaagtctaccacactcccagtgatgtttcacaccctttcgtcttttcatgcgaaatcatcgcctgaatttcagtgcgactttatcctttcttcatgaaagccaaagtctaccacataaaattcaacatgattctcacaggcacatggttttttttttttttttttactgaaagatcactgggggtttgatttgtcttcagccctccttcctggaagagaaggactagttgatgtttgtcacacgcccaatgaagtttcacaccctttggtcttttaacgcgaaaacatcgcttgaattttagtgctagtatagcctttcttcacaaaagccaaagtctgccacataaaattcaaaatgattctcgcaggcacgtggtttttctgtgcgtgaaagatcattgggggttctatatgtcttcatccctactacccggtagagaaggactgcttgaagtctatcacacgcccaatgatgtttctgttggaagttattttaccaggaact

SEQ ID NO: 321602 - DNA, 1507 bp, Cannabis indica
agagaaaaaaaattcaataaggcaccccaagaaaaaaaaagcaaagaaaaaaaaagataaaaaaaaatatagatatattataattagtttaaataaatgtcatggtgaatttaagaaagtatttcctttctttgtgcagaaaatcaagtgaagaaggcaatagagtgttgaaatttcaagatgggcaaaagaaattaagtttggggtggaaaactgctacccagttgctatagcaaaggcttagcaacattatttggcagcaagaggtgttttggtactaggctgatcaaatgaattggggtttgaaaaaaatagagtgagtggtctgttaaagaaaaacatgtgactgaaatgttgtttatgatgcaatcattggatatgtctatttttgttcagataaatcatttggggtttgtacttaattttgaattgagtgagcccaagttgattgtggagatacaaggatcccattttacactagtttaatcaattttgggcccaattatttggtcaactgggccccagcaagtgttgacccgcccacttattgctcaaaccaacattcaaccctacactatcatcatcatcatcttcacttccctcttctcagccgactgccactcacgaaccttgtagcaccaacatccatctccattcagttcattagaagccctcaaccaccaaatcgcacctaaccactcaaccaccagtagcaatcactagcccgagccattcccagtcgaccatcactcacctcagtcgctccgtccaacagcactagcacccccaaagtcgcccaagcacacacatttcaaaccaaccaccgttccacctgaaattaccatttcccgagtcgaaccaccaagccgagccattttcagtcgactccgccaccaagttgagcttcaattcaaccacatcatgtcagcaaccctccttcatcacccccagttctcattctcttccacgagatccaaaatcagcaacccaactgctaactcgaaccagtttacaccagcaagcaaccacgagtcactaatagccatcacaagcttcgcaccatcactttgcccacatcgatcaacaaccgagcctccatttgactaacacacatctccaactgaaccaagggagccaactgaccacttacaatccatccagtttgtcaaaataaaattatatatataattaaattgctaaatatgttgttgttgttgattcgggtaatatcatagatgcttggaagttggtttatttggtgtgaatgatttaaattgggtacattgataatttgaaattggtggtgtagcttttcaattgttggtgtgatattggaattttgatgtggttttgaatgatgaactgcttggttgaaactatttgatttgaattagaatttggtgtagtattggaagtgttgtgacccttggacagatttttgttagaagctttgttgttgttgtttgagtagttcaacctgaaaaaaaaaagagaagtaaaagcaggg

SEQ ID NO: 321603 - DNA, 2796 bp, Cannabis indica
agggcacaaaacccaacaggtcatccaacaatgcaaaaattcttacaaagtgccgcaaggggcaacaattctctcggcctaatgaccatttttctagattaaaaaaaacataaaatgataaccaagtctacactgttagagacttggacggttcttcttcttctttttcctcggcctctgcagcctcgtgcttcttgatttgctcaaaataagccagcatcttcgcgactccttctcccaaaaagcttaaatccatgttaggatcggctaaccagacataataatagaacgattagctatttaattaactctagctatagcattctcttcggccccgtcaagtttcgtgttggcctcatcaagtttttggttcgcttcattaagattttgctttgcctcattgagttcttcattgagcttctgatgagctttgtagagatccttagcctcttttttagcaccatcaagctcggacttgtggcttttcttctgttcctcagcttcctttagtcaacaagtgacttcgccgcgagagtcagtccattgccacgcaacaacctcacgtttctcagcagttgttcgaagctcggactgaagttgtttaattctttgaaggcctctttcatgagctagctgagaaaagagagatgcctacaagataaaaataatttaggaagaaggtattaaaggaaaagaaaagaagttttgaataaacaaaatgaagattaatgcttaccgagaaagagagatttaaactcctctgacataagctctcaaaatccccattcttgacaaaatcccaatcatcttgctggtaagattggaagtgatgccagcaagaagtggcaagttgcaaacaggcctgcgagcccataatgccgacatgattcgacaaagggcaggtaggcttcaagataaccatctcgggttgagaacccgagaatttaacttggtgaatagatcctaggacatgttcatctttgttcgcaaataccgagattggagagggtatttggggattttcaggctcaatgactatttgtttcgaggagcatttcctatttgttgtagtctttttagccctcttcaatggttcagggtttgttcccgaggaagtttccaaaccaaggacgcatttcttacccttcttggaacttggagggcttgtgaaaagattttgaaaattcatatttgtgaggcaaaaagaaaatatgtcagcacttatccaagataaacaaaaagaaggtggggaatgaactcccacttaaagaaatttaccataattatcatatgagaatgaagaaaaactatggtaattactaaattccctagaaccagtaatcatatacatatcataaagatttattggagacatatcccagtccgaatctagatggcttgccctatccagattagtaccatactgttcgacaattctgaagtgagctattacaacttaatttgacatgatactggagataccagctgtcaaacctatgagccatgcgatctacacagaatcaatcccaaatatagatgttatactagctatccttaaacataactagcgaggtacgctcagtcctaagctcagtaggagaccatccacagttattacctcgggatgcttcttcttcagcttcccgaggggataatttcttcaagaaatggatgcaagccacataatatctgtattccttgtcaactggaatcgggacttgctaccacttagaatattttggattcttaaagttgcaggtagattgtttgctgccaaggagattgcaggtcttcaaattggttttgtttagtaaaagattggctgatcgcaatccaaacgagagacctagaagaatcttgtgtcatttctccatctcgagagttggaataggcctcctcgagaccgctgtcaatactacaagcaagataagaaaatgccaaccatttatatattgaaaactcgaaaccaagtttttgagaaaatgtgttacttatgtattaaacgaaatgcagttgtattgatgggagagaggtcgaatgtccagaagaagtcatccttgaagttagttttgttgggtagacttacaataatccttcgatcatttgtgtgggttccgaggtaataaaaaccacctaatcctcgcttccttgagggataggccttcacagaatagaagtataagctctcgagtggagtgggacactcccactccataatttgatataagaccttcaaattcaatatgaactcagaattaattgaaaaggggcaatttcgagataattgcaaaaatccttgcagtagtctctcagagggagtatctctagctttgatgtgcacgagggtccaggtgcctatcatagacgagccactagtgctacacccctcttcttgaattattctttcatgagggaaacaactaaattcccttggagctacacagctaacgcgacatcctttctcatatttaatgccacaggaccttaatacgtctcccacatatgctcctatggatctaactttcaatttatggagttttgcttcgaaagtgactgtgggatcttgaggagtcttggattttttagccttagaagtcataatttcaaaatttaagtcacctggtgaaaaagcaatagggactcgaggtaaaaataagggtctcgctaaaggaatagaagttaaattttggggttcatgccaagctgcatcttgcagaaaacgatgtttaacctcgattatttcttgcaaaaattatctacaacgacttgaaaacctcgtcctgattggtttttatt

SEQ ID NO: 321604 - DNA, 438 bp, Cannabis indica
tcagtaagttcttaattcctttttctttttactttgcatgttgaatttttggatttcagatatgcgttcttgaatttgctgtagaagataggtaaaaaacctaagtttaaaactttgtgatttcatttgtaatgatatgtaacacttcacggttcatgacgtcggccttttatcgcacattgtctgtccttcaccttgcttattcaaagcttcgtgaaatttttccctaaacccaaaatttcaaacttctaggttttaacttattgttgaatatttccattctttaatctgttgagtactcctggtcggcatatttgcctgtttattgttcgatatcctaacaaaacactcatcttgtgtgttgtcttttgcaggtgaaccttggtgagtttttgggaggcgaacagtgaattgaccaggacctacttcaacttttgt

SEQ ID NO: 321605 - DNA, 707 bp, Cannabis indica
actatattagcaggatagccaaaaaatgaaataagcaatgctgaaacaagagattgaaatactactaaaaaggtctacaggtattagtaaaaatgaaccatttatatatatatatatatatttacatatatatatatataaatatttggtattcaaacatgatatagatcactaatcattgtgctacattcaccatgtgatggcattaattaattcggctaatcttcaaattcatatagataatatagaaatttacaaaaataaaaaaacattagatatttcaaataattaactagtactagaatttgtataaattccccctttaagatttttttctcattacagatactatataagcttgaaaatttaatacaaacttttaaatttacactacacacaaatcaaatgacatcaattttaattactattatctcgaaataagactattgttgtagaaataactcaaaatattgaaaatgttgtcacttcaattttttcatactggttttctatgctcatatataacattatcctattcttaatataatatatgaaactgaagtggattatatatataaatatatatatatatctaatattaaatgtgacaatataacagaaaatatttgtttaatattattttacattaaagttaacggttaaaactatcacaattaaattaattaattaattattatatttttttg

SEQ ID NO: 321606 - DNA, 1100 bp, Cannabis indica
tatgtatatgtattatggagcttattaacattggttttggtttggaagattctaaaatgttggaaagttatggttgcatgtgtattagattatcacccaaggtgatttggtagggttaaccgcgagctttccgggctcggggctggtagtgagggtgtgaatcctccactaccataaaactaggaacaaatgtatgttgcgatgcaagagaccatccaatagcaaagtgatcagatcatagagcagagagtagtagcaagctcggcctgctcccaatcccaatcttaatcctccgacacctttggtagtgccacaggatatggaaaatcatctagagctgttgtatgagcggttcaggaagcgaaatctgctagtgtttgaaggtggtgctaatccagttaaggtggagcaatggatgagcatgataacatccatctttgactttatgcgtgttgaggataacaatcgggttggatgtgatatcttcatgctgtgagaagatgcccgtatttggtgaaaaatcgtgtctcagggtcatgatctaaataacatgacctgggatacctttcggaccttgttttacaaaaattattacaatgaatccatctacactgctaaggcagaagagttcatacgactaacttagggcagtattacggtgattgagtatgccaccaaatttgaccagttggcaaagtttgcctctgatgaagtggccactgaggctgttatgaaggccaagttcattcgggggttggaagagcatatcgctaatgacccactagctacgggtcctaataagaaattccaaggtaattagggtttttgacaaggtggaaacgaaaatgggagaacctatccagaatgcccgaggtgcaagagacgccatcaaggcaaatgtcaatctcgagcctgcttccagtgtggggtagtaggccatctaaaaagatattgtccacaattgcagatatcggaaaaaagaaagatgatactctggttccttctcgggtatttactttaacacaggcaaaggttgatgttggtccttctactgtgataggtcagatttctattgatggtattgttggatatattttacc

SEQ ID NO: 321607 - DNA, 1249 bp, Cannabis indica
aaaaaaaaaaaaaaaagcctctcctatgtgtcattgagttgaaaaggaaaatgaattttggtttgccaatgaagttgataatattctgtttgtatagtgtgcatttttaccaacaaattttagaatattttagttattgatggcttttaagatatcttttatgtttggcattgggattttctatctagaacaattggaaatgatagaaatagttttatcttattaaacttggatttcatagggttcttatttgagcatgtgcttttagttttggatttcatagattttatagtgtactcggatgaaacgaatgtttccgggactatgaattgaagcatacgccgaagggtcttcccagatagaaaaagtaaccgtcggaatcgactatttgagaggttctctttaaggaggaaataactaactattcagaactctttttcaaaaaaaaaaactaactttccttaagactctcgatggacacaaaggccttccaaaaaagttcttttgggagatgactaattactttcttagatgacaaaataccaaaaaataataattataattatttttaaaataagttacaagattatttttaaaattttacctctttagagagaattccttcatttaccacttaaccaaaaactaaataatattaagctaactctaaaattttgttttatctacttgaataaaggtcataggtaggtgtgtttaagtattattggcctaattcacaaaattatacaaacaataacatacatgtgatgtgtgcataaaaacttggaacttgagtttatgtctagacacaaatttagttagccttaacaagtttaaatctgcataataatattgtatgaagttgttcaaaagaaagagaactctttcattaaattttttaaagtcattttatatgtagaaaaagtttctcaatagaataatcctccaattattccacttcttgtcttactcttgcatttaaaatttaaaagagcctctaattatctcatctcattcctaatagaattaagttcgaaagctctttggaccattaatctattattattggtttgtaatatgatatatagattggatttgtgtcccaactacgtaattatataggtgtcgtttggtaacacttttattttttaattttttaatcacaaaataaaagtaaaatttttgtttttaaaaattttacttttcaaaaacaaaaatgcgttttgtaaccacttttatttttcaattt

SEQ ID NO: 321608 - DNA, 2928 bp, Cannabis indica
acaaatttgcaaaaagaaagtagcaaagcaagaaagcattcataatattcaatacaaaaacaaagcatggtgttattaactatcaaataacatcatcatcaaaagaggagctatcacagtcctgaactaaagcctttcccttgcccctagatgtaagcatggggtttgtaggtctctgagaaatctggcctctatggtcgatatgaaaggaagcatcacctactaaacccctagtggccaggtgctaccggagagtcgtctctctcctctccaaattttctacaatatgagaaaaatgtacttcatcatcatccaagttaaggccttgcccatctctagggccggcctcatctgcaactagcatccttgtagctctaagagccaggggacacaagccatacatccaaaaattatccacactcatcaaccggagaatgtttctctcttctcctgctcaaaatattcctgagcatactgcttggctccagcatcacccttcaacttagccacacacttaagttgaatgagctccttctcttgctcagctccctaggcctggcaagctatggacttcttcttctcccccttgataggcttgggtataaagtctgccggataaagcttgtacttcacaaagttgtcctctaagttcaacaaagtgatattctcagcagcatctggaagttggagaatcttttgagccctgtccctaagtgccaatgtaatgggtggatggcagtatactaagatatgtggaaattgagtataggtggtatccatgccttccacgagtagtactcgtcaacaaaacccctgatcttgctaatatccttgtccacggtgcccatcagccacttaaagtatggctgagagaagtagaagtaccccgacctgctttgcttacgggtagacttcaggtcaaaagactagttgacctcgtgtggggatggcacaccccatccttgaatggcatagaggacgaaaatggaagacaagtacttaatgctcttgggagtgaactgggtcggacaaaggcgaaaataatttgcaaccctcttgaagtacgactgcacaggcagcatcgccccttgcttagtatggcaccccaccaggcatagaaccttttctttgggttagttgcccggtcattcgaagaagggacataacactaaagtcttcccaggttcccagccttatcgaagaccctcatacgtgcatcgcttatcttggactgagggcacacccatttggctcctatagcactttgcctcctgtggggaatttcctcggtaagctcctcagtgacatagtcttccccctcgaacaagacatcaccccctgcggatactggctttccggcctcattataccctccataatttggaggttcagccacctccttcctcctcagctccggaagtgctatcaggacagacatcaacttgcttatctatctcctggacctcaatgtcccactcgtgatgctcctcctccacgataggcagatcttgctcggaacttggtaatgcgcaagctgggccgagtgagggtcagatgcattgactttctgcatcatttgctttgtgcgggacatcatccttctcttggacagatactgatgtgtgtggcgtgcaacagtaacgacaaggagaactattaggatgccgaatttaccagatccttgacggccaataggaagggtatcagcaacacctggttaaacaatatacgtctagttggacagaagataatgcctcaaacccttcttccattcccaaatgaagcgaccgtaaccttctcctgtgatctgctcggagtaagagtgttgttgcacttcatgttcaggagtaggagaacggtcactactcacttcccaatcctcaaagttcgagttagaaagtttgtcacttgaagacgacggactggcacgaagacgaggttcatcctcgtatagaagttgcagcaaatccttgtcaatttggtgtttgcctccccaaaactcacagggttcatctacaaaagacaacacacgagatgagtgtttggcttggatatcgaacaataaacagacaaatatgccgaccaggactactcaacaaattaaaaggataaaaaatgcataaagagtaagccaaaaccttggagtttgaaagtttttttaggttaaaggctaaaattcatgaagctttgaataagcaaggtgagaatcgagcattgcgagattaaaggcaaaatatcgtaagcaacgaagccgtgtgaactattatagagaaaactacaaagtttcgagcctagatcttctatgtatctcctacaacaagtcaaggacaaatgtattttctacaatggaattccagaaattaaaaatgtaaatttaaaagagaaaagtattgaaaacttacccactttttgaagactaaacgtagtccagatgaagcttctcggatgcatctgatagaagtctcatgagagacttgaagaaaattcctctttcgctgctctgggtttgcttcgtggagaaaattgtgaaagtgatttctaaagaagtttcagccttatttataggcaatctagtgaaaaggggtaatcatttcaaaaatcccgcagacgcttcgatttccctccaaaaataaattttgggaaataaaaagcaatccagtgtaaccgtcaaagcgtgcaaaggaaaccatgtttcgaggcattaatttagttagagcattaattagccaaaaaaccgaagagacacctggtcagactcacatcgaatcacgaacagacgcactcaacacgtgtcacccattcaaatgtaaaggctgcacggatgaagtctccacgcaactccagaagtcccgtgcagactttggggtcaaatgttatcctaatttttgcactctgacatggcatcacacgctagtgacacgtggaatt

SEQ ID NO: 321609 - DNA, 806 bp, Cannabis indica
tagtagattttacagcacacaccctcttaatcccattgtatatatcaaatcaaatagttgtgtttaatttagcataaattatatatttataaataaaaaaaaaaaaaaaaagtagggtcataccttttggtcctaatgatagggatttttcagtttttggcaagtaaaaagatcgtaattaagaaaattttatgtgatagtgtgcaatgtaattatttgtagcttttataatttttttgaaaattttgaataatttttattagagcgccttatatatatatacttatagttgtataatttggtattcgattttaggacccccaacacatgcactgtcgtactttttatggtcatttgagctagcctcaagtagggctgagcataaaatataaaaaattgaataaaatcgttcaaaccgacctgccgaacactattgaaatcgtaaccggcggaacggaaaactgaaaaaactgttaacagttaaaaccgtcattcaacagtcaatttttttataataaattggtcgaaaaaactaaaactggtcgttatacatatatattaatttattaattttttgctttaagtattgtagttaataatattatatataataataagggatattagcggctaaattacctaaactttacggtttgtaacagttaaccacaaaaactgaaattttgggagcaaaactacctaaactctggttccgttttgctctgtacacctccattaaaaaatcacaataaagtaccacggtggactatccacgtggcaaatttttagtggtccacataatatta

SEQ ID NO: 321610 - DNA, 1881 bp, Cannabis indica
tctaaatagtattatctcttggtatcaatacaaccaaaagtggagtacggtaattacccacatcacagagtgacaaacgctatacaactctttgtgtttattgcttttcattcttatttgtgtaatacctggcaagcattagatccatacgaccctactgtctgttgatcactttttaaggtcaacagtttggtgctttcattaagagcacatatatcgtattttatcaaacaccgcgattaacaagagaagaactcttgtcgcaccatattcatctttgggtctccctcaagacccacagattgttggtccagatactcaagttccattcacaactggaatcccgatgaacattacagatgtggtcactacagttcgccaaacagatacaagaatcccaatggatccaagtggcagacccctgactacaagggaggatcctccataagcgcctcaaccaaaaggaataatccttcggggcactccctaagagcaacgaccggccttcatccccggtactatataggagagacgagaccaggaactggcgaggcccacgtggacttgggagaagatctccagttagccagacttagagagggcgtcttccaagtcagcctaattgaagtaccacacactgctgactacgatgtatttgcttagtagagactctaattccttgaagaaccatgcgctactagttgcgatgtgctagctcaacagagatccaaattcctaagatggatggttaaccaagagtacatcaatcaatcttaccaagcagggttagatcgccgcaacaaagaggccaacgatgtgataaggcagtttaaccagaaaactgataaaagaggccaagatctcatcagagatccacttccaagaagacttgttgatggatcagggaggatctattgacatgttgatcaacctagttccttaagaactacgatagatcttccattacaagaggacggacagacctttcttcaaaggtcaaatgacaaaaactgccagatcttagcaactagcagcatgggggctggccaaggatttagggctcaacgacagcccccattattcatcctatggccggccaaccaccagcagaattccccatggctaaaaagactcctccagaagtccccatgaccggccagactcctctagaagtccctatggcttgacaaagaagagcactccctccctaaggggagcgagtcacttgaagagcaatttcaaacgaacgaggactgggagttggtggaaacacccaaaaaaccaatttgagaagtgaaattaatcactttagatagctagatccaccaagctccaacaattggtgtgatctatcctatgtcaatgcacaagctccagtagctaggtaaagaagagtggctggtgacaaggccctactcagcttagggatggccgaccatgtacaagcaccaaactgagggatggctgaccttaattatagcctctcccaaggtatggtcgtccaggctctggccaatttgaggctgcagctcaatcaaagaaggccaataaactaggcccctacagtaatagatccttctgtgcaagcacagctagatcaaatatgagacatgcttaagggcctagttgatccaaaaccttcaaaacttaagctagaaaagtcaaggggatcaccattttcagcaaacatcaataccttgcccttgtccaaattcaagatgtcagcttggaagatgtacacgagaaaagaagaccctctagtacacctaaactactttgagatcaaaatagagctcctacaagtatctggagatgtgcgatgttgaatctttatggcaactctagctgaaataacccgacaatggtatttcaagctggcca

SEQ ID NO: 321611 - DNA, 723 bp, Cannabis indica
agtgaccaaacagtgatcaaagttccaaggttgaccttctatgacccttctcatatcctcctcacaaataaattcaaccatgagcataccaaacccatacttagaaaaggtaataggtgcaccaataatccatgaattccttatagcatccttaaaccattccagcttaaaatttcttggggtaatgacacgaaggagaagaaaaaaggctttgctaggttaattatccccccaacatcatcgatgagttcatgaacaatagcttctttctcaataaggtttagggtttcagacatgttttgagctaatgcatccattgcccaaatcaggaaacacaagggtttaaacaaagttctaaaggcacaaaggaatttgaaaagatgagacaatagacatctccacaaaatccagatccttaaatataaaaaatgagaaatgtacttggatatgaagagcttgttggagaagcctatagtagaagtcctcatctgccccttcaaagatcctatgcaaatcccgtagagtataggtataatcatatcaggccaaaatggtagcaaccattaatggtaaatggatgtcaggtaagaaaaaggaatactagccaagtgaaaactgaataaatttaaaggattagagaattaaggagtaataaaggagaagatacgaggtaaaagaataataaatgagagtcaaaagaaagaagagactaaaagcacttct

SEQ ID NO: 321612 - DNA, 510 bp, Cannabis indica
gacaaaagtccttaaatttaacaatctcaatagttcggggggaatttttaacggctaaaaaagttcaggagcacgatttagtacatgtcaaagttcgggaggaaaaattactaattagcctaatttttaatattttttttgtacttgtctaacttaattgttgagaaaatgtataataatatttttatatagtctagataatttaattttattagggttaatttgtatttattcatttaatatttttatcaaatattaactaaatattttatagcattaaatgataaaaaggaacctttttcttcttaaaataatgtggattttatagcagtacaagctattcgaaatttattatgtaggtggcgtttaataacacttttttaatcagttttctgtttttaaaattggaaaagtgaaaatatttttcaaaaatatgttctataaaactgtttttatttttaattttttttaattgagaatcaaaattttaaaaacaaaaaaaaaatcact

SEQ ID NO: 321613 - DNA, 1899 bp, Cannabis indica
tttttttttttttgattaaaaacctgatattcaataaaactcagcagatacaatgttcaggtaagaatggaaggtaaagaaccattccaagtacattcactgtctaatcctaatccagccttagcaagataatgagctgaggtgttacaatctctcggaacataaattacagacagattaggattgaacaacaatgaatttctaatggcattaacaacatcacagagaacagaattattacaaaaagaactagaaatttttgtaaccacactttggcaatccgatgcaatagtcgatacagggagctggattgcttgcacctattcaagagctgcaagaatggctttggcttctgtaacttccggcgacacaacaccagagcaaggaaccataaagccagctctagcatgtcctgcactatcaaaggccacaactccaaaactatgcttcaagtttgtacaatctaaagctgcatcagtataaactatccactgaccagcagggggctggaagtctcgtctagttggccgctggatagaaggagtcgaaaccatctgtttagcattggcatctaaaaattcatgcaaatagttagctgcataatcaaaaagcggatttagaatagttttcaaagacaagataaaatgatgagtgtaatcatatttcgatgaaattgaaaatagttactgtttattggatttagagatggtttagagtagaatctccaagaaaaaaacagttatgttttgctttaaatgatgaaaaacacatgggtaggtgtttgtttaggcacaataatttgtgttcttttttgtttactttctgaccctttttcatagtttatttacttcttcagtcccacaataaattgaaatacaataacgaagtaggccacccagtcctctcttcactttctagtttctatcatcattaatagtaatacaacaaaaggtccccttaatttttagctaaattctaattttgaccatctattttaagaaattataaaaaaaaaaacccttttattaaaatggtaaaaaataatcctctctacataattttagtcatattttatttaaacaatttttcttttcttttttttttaattgagcttaaattagattttaggtgatttgaaaagttaattattaaaaatacacaatattgttgatctttttgaaagaacaaaattcaccaaaaacatgttagaggactattatttactattttaattatcaaagggtctatttattattttttaaaataaaaggtctaaaatgaaagaggggaggcactttttttgtgttatccctaattaaaagaaaaattaacatgaaatgtgagattttatataaaaaaaaaaaaaagcgaaaatatagcatttataaatttacctctaattttatttaaacatacatctttttatatatattgtacccaaattaccttgacataagagaatcacatgaagagtatcttgaagtgataagagcaaaattagtacaatgtttaaaaaacgagataaaaatgatagaatttaaaaaagaaggtcaaaataaaagaaaataatataaaaatagtataaagtgtaattttatatttttgtttctagtccaataaattttatcttaaaatatgtttttgtaatttaaaatatgataactgtatatttttttatcaatacaaaataaaaaaaaaatcaaaactaacatttcaatttattttataatttcttcataaataattaccaaaatttaaaatttaaataaaattcaataaatactaactaacttcatgttttataataaatattttatgatatcactaaaaaaactgtaagatgatattctcaataaacttattttataaaatatttttataatttttttaaaatatata

SEQ ID NO: 321614 - DNA, 1372 bp, Cannabis indica
tacataacagtcataagtggaggaggaaaatcctccaaccaagaacaatcagcatccaccgtaaaaacaaacttagccaaaacatggacataagtattagcagatcatttaacatgagcgacctgtgcttgtgggaattaatgctactaaatagttaacatctttcaaaatagtgtgaaaagcagaattacaagtaagagctgtttttaaaccctgaactaccatcaaagagtctgtttcaatgagttcagcagataggccaaggctgataagccatttcagagtttgagcaagagccaatgcctccatttcttcaggtttgaggcaccccttcattgattttgataacgcaacaatgatgaattaatccactctcaaaacagcatcaattccaattattccaagagctttgttgtaggctgcatcagtatttaatttaagtttgcccacaggaggagcggtccatggtgtaactggtggaatattagttgaggcagcagctggagtgatagaaggagcagcaagagaagtggagttcattgatggtgcatgaatagcctggtatttggcaaggtaatctgttgcaaaagccaaaatagcagcagccagtttggctaatttctcatgatattcagcattgcgtttgaaccagatactccaacaacgaactaaaaaactttcaaactcaaaagatgatgtgttagctaagacataaagcaaaaattcatctggtgtagatgtagcagccattttgagatcaaaagttaggtgagagaggcgccacacttctttggctctagtgtagaaaaaaagtgcatggtttatggtttctttgtttgctttgcataatggacaaaaaggagtgtctgcaatgtgtttacggtttagttcagcagcgacaggtaaggcattatggaaaactttccacacaaagatgcgaagcttcgaaggtatcttcaatttccaaaattttgtccattatttttgaaggttatagctactgtttgtgtcttgaaggtcaaccactgatccagcaaattggtatcctgacttcactgtataattttctgtaatggtaccattccaaatgagtacatcatcagtaggaaaaatgctgagaggaatggagagtattcgatcaatatctgcctgtccaaagttagtggaaatagccaccagatcccaatttctatgttgatcaatgagatcaacaacttggatagaaggatcaggtcctatgaaacagtaaggagtgaagtctgtgtgtctaggaagccatgagtccattgttgggttttgtgccctaaataaaacccatttcaatataattagatttacttattattaaagatcagaaataacattttatgtt

SEQ ID NO: 321615 - DNA, 731 bp, Cannabis indica
aataatggaaaacttcttaaaatgatttagttcgttcaccattctataagtctaaagttcctaccatgggaggctaacctgctaggaagtgccctggtagcttgttgtatttgtccaaataagcctttcgacacggatggaggcttccctattcgagcatagggtgctaacatgcctaccaaagcaatatcaacaactacaccaaccaaaagatcagcagcatacagctcgaattccgcccagaaatcttttcccctcttctgaacttcggcaaatgttgcacaacaagaatctatgactacctacattttaccgaaccaataagaactactcaaacactaatgaacattaaaaaaaaaaatcatattaataagaaacaattgcagtcacaaaccatttcaaatcatattcaggtgagactaaaggtccctcagctcaatgaattgaatttgtgcacaatactttaagtttaatcacccaaaacaaacctctgtcccaactttgaacaagaaggaaggatctgccagcattcgatttcgtaacatagagcagtgtttcatgagaaaacccaatggccaagttgatccctgcaaaaccatatgcttaataaaaacttaaaagaaaacaagaggctaactaagatttttatgtccagattttggcgtgtaccgaatcgtggcctctaaattttttaggtcgttaaaaatttctctcaaactattgaaattgtt

SEQ ID NO: 321616 - DNA, 779 bp, Cannabis indica
tttttatgttgttgattttttgtcatctatatgttatgttttactgttatttagatgttattttcatgttacttttatgttgttttcttgttgtttttatagaaaaccgtaaaaagtaaaaaaagaaaaaaaattctataaatgtaaaaatgtaattcttttacaacaaatggtgccttatgtaattatccctaatttaaagggttaatttgtaattttattaacttttttaaattagttaattattttaattttttattgattaaaattacatattttcacatatattttataaattttactattacataattattctattatttttatttgttattattttttattactagatttcttatttatatatatgcattgttctacataaaaaaactactggcatgttcatatagtttttttttttttaagtaataaatctgttattataaagatagagagtcatttacaataacagaaccaatggcaggagggatttcccgtaagcaattacaattattatccaacgctaaagcttgtttagtcaaggcatgagcagcttggtttgcactttgcatctctacaaacattaagaaaataggataattaatttttaacatcaaatattaaatcttgaaaagaaagaacaattttgatattaaaccatgaagagagtggataagaattaagcatcagtttccactaaatcgaaatgaaaattcattgtctagtccattgtaatccatgaaataattgttagacttttatttgggcttacatta

SEQ ID NO: 321617 - DNA, 1588 bp, Cannabis indica
gggtaatcgggcttcctcgctctctcaactctctttagatggattttgctgttatgaacagaatgagtgaggagctcggggaccgagaccctatatttataggtgagatactccatcagtatctgtgccacattaattgtcagaatattttgacaattaattcaggaaatcaaatcaggtaatgaatatagaaatctgaccatatatagaatattacgtaattgattctatccagattcaatgaatataaaatattcatttatcagaatcaataatattattttatttccttaattagaaatattctaatagtttagtcaatttgttgaattttttctattttatatatatgcacattaatatttttgttggaattatattttcactacaataaattattttatatgtaatttttattttaaaattacaactattcatatacggataaaacagaatggatatgaaaattgaaataatatataatctgttttagcaggccaacttgttataattagggtcaacaatttggtactgtgtcaagtgtcaacattaattagtttttacttttctttaaaaaaataaataaacaataaaaatatatggttctcttttagttagatatatacatgatcatatatacttggattagattaatttgttaagatgatttattcctgaagaaagcttcactaattgaatttttttaattgggaacaagcatcaataaaatattacttaattgatgaatattaatgtagtcaatttacatacatagaagtcaaaccatcaagattagaacaaggctgcttcatcaaataaattagtcattcataatttagtgtgtagcccccacaccatatcatattcatgtatatatatatatagaaatattgtgtaattaaaatatttagtctcatataatttatgtaataatttttagaaagaattactaattaattatacagtaatatatttagaagatactaagaaatactgatattcaataattgtgtctaataacaatgcttatatacatttatatatttatataagcttgatgtgagcctacaacttaaattgagaaaagagaaaaacccaatagtgtgccataataaatcatcaaaagccagttgacaaaataaaaacatttggctgcatatacatgatttcttatatatatgacaagtaaaagtttattttctttataaattaattatattatttatattatccaatattttttttttatttttattgtttaactcaaatataggtatattatttttaattgcaagaacacgttgatactatctcaaaacataatttgaggaggtggtgcttaataaggcctttccaattttgaaacaggtgttacgattttgagccttaatcgagaacgaatttcgtgttcacggttgaagggtgcaatagatgtcttgttccgttttagcctcataatttttatgcgtatgaataagaaaaatttccctaaatcacagctttttacccgcacaatcaaggtaattattatgaacatgttgtcgtactctcgataacgttgaattctctgttagacttttatttgggc

SEQ ID NO: 321618 - DNA, 1105 bp, Cannabis indica
tttcaacaaaggaaagttcagctgaaagtgcaactttccaaacaaggaaaatggcaacttataaccgaataaaagaggtaagatttcgaatattaatgcaaagcaatcttaccataaaaaggaaaaattattttgtcacctaacttgccaaaaaaggactttacactttcaatgtgaggttgtatattagtaagagaaatactgaaaggcgtatagccctaagcatcctgtaatcatattgttatttgtgtaattatgaattgagtttcacataatttatttataataataatttataaagtatcgttaaacaatcgtaatgtcctatttttaggtgatgttaagtactattattgtctaatagaaatcttctccataaatgctaaaaagacattatttgtatttaacattctcttagatgtaatatcactgttagtgtaattaagtattgaatcttatataatttaagataaatactattttggaccttgtattttgcaacagataaaaccttttgttttgttaaataataaaatagatcttgtattttttaaaatgataaaaataggacctgagcttaattttcaacaattttttttaaaaatataattaacttaaagacaattcctagtagagatacaaaaaaaaatgtaaataggtttgtcataacacattgagatcgaattattattaaattttattttgacaaaaaattatttgtaccattttaaaaaatacaagaccattttattatttaacaaaataaaaaatttaattaataagttttacaaaaataatatttacctcatcatttaaaataataatgtttaagaagtattaagcaattgtaagacgtgacactcataggaatagtaaatggtgtgatcttctatattttattatataataatgccacatcagccatcacttcagcatcaattcaattctttgacttattctcttgcctccacttatcttaaaaatcactcctattgaactgtgacaggtgtccaatcacagacgttgatgtggatatacatagctatccaccaccataatttaattatttaatgttgggtgtatatatatatataaggcaagacta

SEQ ID NO: 321619 - DNA, 1099 bp, Cannabis indica
aaatcgtaaaaatattaaaaaatattctttgaacgtaaaaatgtaaatattttacaaaaaaatagtggcttatgtaattattcctgaataaatataaattgtcactaatttagttttagtcacaataaatctcgtgactaaaaatacatttttgtgactaatacatttaactacggacattttaattacaatataagaatgataatttataattagttatatttttttttataattagttataaaaataaaattttttatattcgcggtataaacaagaatagtagtcggtctgttgacggcaagtttcaatggggctgtaaaggtctaacaataatattggaaagcttttcgtgactttcaaggcctattcgacggcaggaacagtcaagcatagatgcaacatctttgccctttctcttcaccatatatagttctacattatatttcattttaatctttatttcttaaagcctttatttttattaatctatagttcatcatgatcgtgctaataaaaactttgctagtgtattttgaattatttcatattgtgtgcaatgacatggttggatatcatttcaatgattgtcggaaggagttgagaatgagaaatgttaaagggcactagtggtgtctaataccttcctatgtgtcagtatcactattggtccaaccaagtatcgggtcccacatagtttaatataatagcttttatgaagtatcgctagccaatcgcaacgtgacatgtcgagaaggtgttaggcaccactaatgcctaacgctaatagcaatgctctaatctacaaatattttttaatgagtggatgggtgatgatcgacgttgaattaggaatcaactattttttcgactttatcaattaatatgcgtaaactatctattggtcattggtaacatgtcatgtttgtcttcaacatgtcgaaacatcttctcatattctcctcaactgcccgcttgctttaagttgctggcacaaggttgatctgattcctcttgctgattcgcaaggcactattggtcattggcttgaaagtgtgtttaataattatgatgatgatgttatttgtcgtgtggttat

SEQ ID NO: 321620 - DNA, 1265 bp, Cannabis indica
atacttagatggttataaaaaaataaaatgaattattttccatattccaggatcctggtaaaatattccatatgaatcacaaacttaagcgtgcgtgtgaccctgcttctcccatggcgaagaagaaacgggttgtccgaaagccaacatcctcgagcatggtggtcgtcgaagctgatgaggagcctccttcaatcctggaagaaattgctgaaccgacggcgggtgaagagttccacgactcagtggaaaacgtggagaacgagttagggcaggagggtggtacgaagatttcagttcgatcccccaaatctgtaagctgggtagaggaggttgagaaagccgattatcagaccaatgcgagtgagctgtggagtaaattcaagaccaatcaggtaccaatcaggatttactctggctaaattcagggatgaggttacacgagacttggtgttggcaactggagtcatccactttgacaagaaaccggttaatttgaggccttggacaacagagatggatgctactaagttgatcaattcagttcctatttggatacgattaaatggtttggggctccaatattgggggaagaagaatcttagtgccttggtcagtactataggtaagcctatcatgattgataaggttacctaagaacgatcaatggtgaagtgtaacgccttgtccaacagggacgccacgtgtgtgtgtgcaatttaataaaattgctattttatatattatataattatacaaaaatgtgggttaattaaattttgataactaaattcgatgtataaaactttttaataaaagataagtgatattaactacgccgtccccctgtttttaaaatattcataaactggtttaatagtgcttttacaacataagctttgtaatcccaaaatattttcaaaatagagcatcctgtttactgggtcgtgccactgcggttgatatgtacattgctgctacgactacaaactcatggttgctcaacctttgccttccctttacttgcaccataaagcaaccgtgagtcacagagactcatcaagaaaagtgaataaaacaataactgataatgattatcaattcaatctcatgtcagcatgcttacacaattacataatatcataaacacacaatcttggtactttataaagtacccctttttaccactcgttaaccacgagctgtgtatgtcactatcattgcccgatgaagcaaacgataagtaagaaacctaaccgcggttt

SEQ ID NO: 321621 - DNA, 1934 bp, Cannabis indica
ctgtttaataaaatttaaagaaatatgattaagacatgaaagtaaaaaacgataatcttgaaccaaccatccaaattgaattaactagcttattaattagattattattaaattttattttaataaaaaaattaactagcttaaaatattattttatatatgtttaaaaatttaagatgccaattatcatttaacaataagtataaaatagcatttacagaaatttctaaaactgcctaagattttatgaaataaaaaatttgaaaagaaaagttcataaaaatacgtatggggataattataaatatgtagtgtttatttttctctaaacaaaatttataaatttgtaacggaaactaataagtttgtaagcatatgtttcaattttgtaagtagtatttaatgaataaataaaaaactattttaatttgtgacagaataattacaaattgttatccatatatttgtaatttattacttataaattctatttttttttcttctaaaagacaaaaaaagagagtaatttttccctttacaattaaaatgtacaagggaattggattgaaattgtaatgaaagaccgcctcactagtattgtattgcttgccattcttagtcatggcccaaaaaaatatggggagcccaattaaagtttcttagaagttaagaagaaaaaaaataaaggaaagcaagagaagagaagagagaatatactagacttgttaaagggtcttgttcttatcaagcttcaaatcttaataagtctataatgaactttgattagtgctctgtaaagttctacatgattacttatctaaaggtgtgtcatattgattgattcttcgtgaaaatgacaattaaataggtccaaacagattggtcatgtattcagtaattaaataacaactttgtcttcacgcctggctagctagaaaagattgaaatccaaaaatatgtaattaatatacattaaaaaaaaaagaaaaaaatctagaaggttgttcgttgttgtcaatggaaataattaggagtgcacagtatggtggacattgtcccacatggaataaatggtaaagaattgagccatatataagtacatgagctactccattcaatgccaattagttttgaaatgaaactccataattctcaacatggtatcagatactcgttgtgttttataaatccccaagaaaatcacaaaatatcattgtaattgtaaagcacacttgtattgtgatcgatcattatttgccccaaactgatcatcattctcataatcatggataaacccaaaacatcactcaacacaaatcactaagctagtagtggtttcctccaccattcaatttgtaaataatataattaaattaaagaaagaaaaaaccaaaccttgagtacagagctaagtaaggagaaaactaaaggtccttgaaagcctctaggaggaagacgatgagcaaaacaagataaatatatcatttttcttggaacaaattagggtttgaaatcgacacaaatcattgttaatttcttcatacactaattttagttacaataaattaataattacacaaccaaagcacaggttgatatgatggtttcctaaaaggagttgatggcttatagaaatgtatgtaggttttttgtaatccaaacaaatagacaagttgtcttttatctagttccaagtttgttggaaaagttagttaattcggttatgtcactactacaaatttggcttttcccaacagttaataagagggtcaattataaaaaccgttggaaaagatgagtggaagtttttcccaacggtttagaaatgaagcacaaaaaaccgttggaaaaaattaataccaacagtggagaaccgtgggcaatactaaatagaattttttaaaagaaaacaataaatgccaacagtttataac

SEQ ID NO: 321622 - DNA, 1189 bp, Cannabis indica
ttattaccttggtttggggaacccaagcactagtcgactgagatttgttctcaatgcagatgaagcttgtaaatcattgtgtgctttactgctttatcttcaagccgattcttgaatgcataagttgaaattaaacaatctaaccatgaaccattcggtaacttgaatcttgaaaattggataagtagttctttcacatagtactcgagaaacatgtctttggtatcgctcaggtaatcaaaatttgcctgaggattagccttccagaagtcataaaaaatctcgagactagctgtctctaaggcatttaccttccctccgagcctcgccactttagttctctattgctcgaactctgacttgtacttctcaacctgagtgttaagctcctcctccttactcatcttttcttcttccaacctgcgaaagatagctcgaagaacctccctttcttcctgaaggctggttacttcctttgacaaggaggcaatagcagtttcaagttggtcggaagcctctagatctttagtcagctcggccccttcttctcggtggcaagaagtttcttgttgacctctgttagttccatccagacagccccaagctgaaccctggctttatcaacatccttcctggctaggtccacttccgcctgcataatgttggaaatggaggcattcttagaggcagctggtttagcccgggaataagcgtaagctatcttcagattagtgtgtacagagaaaagaatgtgaaaatctgaactaagtgaagaaggataaaaggaaactgtcaggaaagacttacccttgcaaactccttcagagctcctcccatcaccaactccagggaaaggtcattgtctgcctcagctagctgctcgttcgcctcagggaccgatcaagtcacatagtgaatgagcatgtctttacctcttttggtctccagatgcagtaccggaggtggggcaggtgccttgattaccttcgattgctctggcctatccaagctacctcctcgagaatcctttgacttagtcattctcgaggcaggagggtccacaacagttttctcctaggagagatcaataaccgctctggccggtgtcttctccctggacagagttgtctcaccgcccttggacctcttggcaggaggagataagcccgagctgttgggttttatgccc

SEQ ID NO: 321623 - DNA, 598 bp, Cannabis indica
caatcatagtgagtaagacggtggtactacaagaaatctattctttacctacacatttttcctctacaaatatttatttgtaagtaaatatatactttacatacgaatattttaggattctaacaatttgtaggtaaattatattgggaattattattgcattgagttatttatgattcctactgataaatttctatgtaaatagctttacctccaaaaatagggaacaaaatttaattaaaatttttggagccaaatttcccaccaaatttttataggttctacattaatttttattttttttataattaataatgccataaagcctacatggcaaaaaaatttgacaagtcactgtacacatacaatatgttatctaaccctaacattttatttgactatgttttgttcttcatcagccacctccttatcttttgaagctctttccatcaaatccaagcaccaaagttttgacccagagctttttcagttttgcttcttcgagatgtcacttggctacatctcgtgtcaaagatttaaagtgcgagttctttctctctctctctctctctctctctctactatatatatatatata

SEQ ID NO: 321624 - DNA, 1823 bp, Cannabis indica
tgatactctcatctcatccaactatttcaacctaccaaacctagttttctctatcaaacaactagtagatgagagacacctcctatagtgattcaaaccctcctttattgttcttcatacttgagccttagtgaaatagtgtcatgctcacacatagtaagtcaagtactaaatcatagtgagtaagacgatggtaaccaaacccaaatgagagaaagagattcagactcagatcttgataatactccaccacagaaaggaacaagggttagagatctgagcggaatgagtcattatattccgctgcaaccaatgtaagatattctaaactatttaatttcattgttttagtaatattcatatttaagatgttaattcaacatacttgttagtaaatctaaatcttggtaaaatattcccaataggaagatggcttccacatttcaagatatgtttgacatatgataatgattaatctagcatctggaaggaagctacaagctccttccagtcaagagtcccgttagcttggggataaattttatctgtattctttgatgcctactacgtggaaatcacggaagggtgccaccttggactatccgcaactagtaagtattttctacttaaggacactaaggagactattatatttcaaaacatagtcaatggctcccgatggtagcgagtgaggatagggctttaggaactctttctgtgcatccacgattggggaagattatattcacctagagtcacaggttttgcaaaaaggtagtgggtcagtgtgatccgggaaggacttggcttaatgatcctgaagcttattttatagtatcctattcgaagcttgaagtgacagttactcatcctctaatattgaatcagatcttgtcccctgcatcagaccatggtagtgtgcatacatgcctttgaagccccctttacttccaatagcttgtctaggcaccaacttttcaaggttaaacctttgagtgacacgtgtcctcgttaatgtgaaatcctttactgcaatcgtacaccacacaatggggaagttttttaccaaccaacggtcagatcataaagttgtagtacatgcccttgttgcatgttgagtacgaaactctaggtgagtaaatggaatatttttacccgcatgtaagcctataaatactctcatttttcatgtactaagggtgaacaatttgacactagccaaacctcagctaaaattcctactagcttttttctttgtcaagagagacaaaaggagtgcagagctcgggtttatactgtaaacatttgtattattcaaacactcggctgcaaggtcaatacaacagactcgtagactaggaattattaacgcatgaaccatgtaaaaatcatttgtttattatttactatttaatatctttcttaagctctattttattagttatcgaaaatgtcagtaaaaaggtttcaaaagtgtaaaattgttatgaaattattgtgcagatactataagttaatttataatttgttgagtaagaaaattataaatacccaaaactctacttataaataggtcgtgattttcaagaaatactagcgttcttatattctctcctttctcgtcagaaaaaaatacatgaaaaaaaatggtgtattcttgaaaattataacattttgatcaatctctaacaatagctttaggttaatatttatgcttatttgtattgattttgtttttatttaattttacaaagattctatataaatataattaaagttttttatattagcgctcgtttggaacgccgtattaggtcgtattg

SEQ ID NO: 321625 - DNA, 662 bp, Cannabis indica
agaaaaatagaaaatagcagtgttatgataattgctaagactttctaagtatctagttcaaaatacaaaaatcctattaaatgtgacatgtccttttacggtgtaattcaagaaatttgagaattagattacggtagtttttggatccctattttcctttgtgattgtgtgaggagtaataatggggttaaagatgatgaatttggattcaagttagtggacttgaattgaaatggacacatgttttatagattgataatggaatcccaagccagtcaagtttttaccatgagcgatccattagatgcacgctgctcagttgtcttgacgacacaaccaaaagattatgataatcaagagtctaacgttgatgatctcatgcttaatgaacaaattcatcaaatcactccaccacctattgatgtcaccgttggggatgatgtcatatcatctcgtgatgatggtgaaggattatgggtgaactaatctatcaatacatgagtcattgatcacgtattagtattttgtcttttaatatatttacttttagctatcaatttgcatatttttgtatattataatattataatgtatgttttcaaatttgtgtaggattatccatcatggaactaggtggggacgatgagtggagtgcttggtta

SEQ ID NO: 321626 - DNA, 1211 bp, Cannabis indica
tccattcaagtttaaatacaaaattagctttcaatgaaaagtttaataactagaataagactaaactaataacaacattattcctcaagggtaccatcctcatccactagcatcaaattgagttcttaaaatgggagaaaatagagagtgagcttataatcccaacaaaaaaacaattaatatcaaaggggatttttcatatatatgggcaaagaaattaaagtttacttttatatgacataaataaataatgcaaaaaattataagaccaaatagcaaatacgttttgaaatatgagaaaccaaacatatataaacaaaaataccataaaaatctgcataaatttctcaactaaaattttacactccacgatctcctcgattctctttgcaaatccaaaaaaaaattgcgattcatacatctccataatcgattattgcaaatcgatcaacaacttcttcttcaaatccagttggcttcgtcgtttgtcttcttcagcttcggtaggcgacggggatcattaagaaaactgttgataatcttctacaactctggtgatcatcttctctaccttcggcgacctgcaaagcaaaaaaaatatatagaattcgaaccaataatgtaacgcgctactggcttaagcgcactacagtaatttttaaattattgtgcgcgattaacaaaaactttaataataataatataataagctttactatttaaataataaaataaattacaaatctgggatcccgtaaacatttttcaaacattacaacaattatccacatttttgtaatcacgacgctaaaaagtcattagctggaccaacttcctcaattgacgctctaggaagataaaagcaccaactctgcgggatgagtttccgtgataggcagttccatgactgctagcaacacggagggtatccgtgcgccaaagtctccctcggttccaggaaccaaaaacattcattaccgcaaagagtatgggttttcctagaaaggccaaggcactttgaggatgcgtcagaccaggctacgcctttagcccacgaaggctgtgcctccatgtgtcaagctactgacctagtgattaggctttttcatgtacgatgccagaggttgtctcccgcgacatgctatcgtacagagcatgtgtgtccttgtgtacatgaccaagtgatccaacggctagggataaaggaaatt

SEQ ID NO: 321627 - DNA, 638 bp, Cannabis indica
taaaaatacagtcgtataaaatttcaaatatttttgcggtttataagtttttattacaaaaacatagatgattcattttatttttttgagttgtaatcttgttgtattttgttattttattattatttttatgttgtatttttattatttttatattgttttcatattattttataggacacgtaaaattgtaattaaaaaaataaaaatcataaaattgaacaaaaaaagattttgataaaatgtgaaaaaaattatttgattgtaaaaatattaaaattttgtggaaaaataatatttaatgtaaatttcttttaattaattaatctcaactaaaaaattaaaagtaatgtagtattaaggcctccgaacattattctcatcttagatttgctgtaataagctattttgtttttttttaaaccccccccccccctttttttttcttgtttacatttagggtttcaatttcaatatcattgaaattataagtgtcaatggtgtcttgtatttttaatccaaagttgttgttaggtctttttttggcaatttagttctcaaaatataatttaattaatgtgcattttatggagcattcaatttgtttttatcaactctggaccctttttccaagggga

SEQ ID NO: 321628 - DNA, 640 bp, Cannabis indica
aaaaaaatttgaataattacgtgttgaaaacacgtttaaaattttttaaacgtacgtgctaaattaaaatatcagatattttattttcagcgttataaactatacaaaaatttataaaaatgatactgtaactaattttaatcatatatttttattttgattgactaattttaattatttattgaacaggaaatgatatttagaggaacagatacagtggcagttttaatagagtggatacttgcgagaatggtactccaccctgatattcaatcaaaggtacaagaagagcttgatcaagtcgtgggaagatcaagaccgttggtagaatcagatattacatcattgatttacttatctgcggtgattaaggaagtattaaggctacacccaccgggcccacttttatcgtgggcccgtttagcaatcacagacactatagttgatggatttcacgtgcctggtgggaccacagccatggtcaacatgtgggccataactagagatccagatgtttggtccgacccattaaagtttgaccccagttaggtttgtgacacgtcatcaggaaatgacgtggatttctcaataatgggttcaaatctagcactggctccattcgggtcgggtcggagggaca

SEQ ID NO: 321629 - DNA, 589 bp, Cannabis indica
aaaaagtttaaccaacaataacataattccttataaggaaagggtctccttagttacttcaaaatgagaccttggtaagattctggcaactatcaaaatctagtttgattcatacaataattttcattattaataaaaattgtaatagtttttcagtgatttcaagtgcattagactttttttctcttcaatactctatcatagataatcctacaaaacaagcatgaattcagacaagagtgggaagatgccaatatggagtctcatgatgatggaagcaaaaatgaaaagaaaccatgaaaattattttgaagacaaccttgctggtgaagataaaacaatctcaactactggacagaacaaaaaacttcaaatgatattacaacccaattgaacccaataataattttatattttcttttattcaaattccatctgtctagcggacccaaaaatccacaatgaacaatacaagatgatctaaatttttcgcttcaacatgcaagcacaaatccaaataaaagctaatttgaaatattaaacccaaaactaatttgaaagattaaatctaaaaacctaataaaagcta

SEQ ID NO: 321630 - DNA, 940 bp, Cannabis indica
tgttgttgttgttgttttctttagttctctacctatttttctgcataggtttagggattatagaaatttcaacttgtaatccactctgaagtgcaatatgaacatagtatttttttgatgcctgtttatgagcataattgttactttttgaaagcaatgataaatactgtcaataggaactttgaaatttccatctttttgttctagtcatggcttttcaatgtcactcgtttttgtttgacattatttttcgttactttgactaggttggtgtgttattcaaaggaaaccttcgtggggagcctgcaaaaagttatgaaaagttaacaaagagagtggaggtagtagcctttctagttctttttcttttcccatcttttgagggttacattgatccctctccctaatttttttcttttatttgattataaaaattagagaattaatttttataatatcactccattatttgtaggataaatttggggatgagtttagaattttccttttagtcaatcccgaggatgatcgacctgttgctgttgttgttccaagaaagaccttgcaaccagagacaacaggtgaattttataacattctttcacattttatttctcatctaaaaaacttttaagctcttccattgtgtatgcttcttttgttcatttctatatacacgatttatataatgatctatacattaatgttgttgcagctgttcctgagtggtttgcagctggggcttttggacttgttaccgtgttcacgttacttcttcaaacttattaattcttcgttgaatccacgcatacaacttagaattgcactctcagtataatagaatgctctatatgttccacctatatagacacatcatcagttatccattgttataatcctaatgtgatcaatgatcctctatatgaatgatctacaacgt

SEQ ID NO: 321631 - DNA, 714 bp, Cannabis indica
tcaaaaatatatttatatacaaattcaactttcttttttaatttttttttcttcaaccaatggaacaactccaacacatatagtataaaaatgagagattttttaactagataagaaaattaagcatagaaacttaaattttcttaatactacctattcatgggtaatgcccgttaaaattttagaatatgtagttgtttcctatgttttagccaaaaatatgtaataacccttgaggaagccatgtggcagtgggacccctcactataggacccgacaaaaataaaatgtgtccccatgatataaaaggaagaaaaaagataaggacttcgggagttttagtcatctccgagaggaatctctgggactaagagtatgttggacttttctcctctgggggaagaggttccccctaaagcagtacaacctcgtggtatgacattggcacttcaccaaggattgggaactatacataattaatgcgacatgacaaaggtcaacctactctctgccagagaaagtatgtttaagggtttcaacccatagttctctgacttcataacatctcatgcatcacttgacgactgccttgtgaattgtcaagtcatcaatatgagaagaagtcttatctcaccaaacactactttgggcccaagcgctttcttatagaatatgaaatcatgccctaaggccatgcatgggaaattgtgtgaa

SEQ ID NO: 321632 - DNA, 1574 bp, Cannabis indica
attaacaaattgatatgttctagacttaaatagaattcatacattatatatacataattatgaaataaatcatgtgaaccatgcaacattaaatgttatttctgatctttattaataagtaaatctgattatagtgaaatgagttttattgagggcataaaacccaacaagaattggcatttgagtgatcgaaaccagcgcactaggttcattgtcaaccttggtgctaggcctagcaccaagtcaatttgggggctgggctatgtttccaggcctttcgatttgtggttttctcctcgagtttgcttctatctttgttatttttgataataataaaaatgtttggaacacttttttgagaaaataattggaaatggcctaagttgacaatatgtcagcctgggcactaggtctaacttcaggcctcttggaagtttcattttgtcccaaaaaatagttgaatgttaatctttgttgaaaataaagaatatgcatgccttgaaaggttctaaaaaaacggcccaagttgaaaatatatcaacctgggtgttgggctagcccgaagtgtcaacctgggctctaggcttttgttctaacacccagaaagtgttctttctcccctaaaagtacttgtttcctcgtttttaatgaagaagaacaagaagcataagacatattttttatctgatacttggaagtggcccaggctgacaaattatcaacctgggtgctatggtgctcagaaaatatgtgtgggtgatcaaaaatgaacgttctttgaatatgattctaatgcctcaaatatgtttatggtatgttaagttcatgtcccaatgtaaagtttgaaccatttgcactaagacgttcccaaaaactgaaatcgtagttggggttgtcaacttgggtgctgggtgataccctaggtgcccaggttgatttttgaggtgctgattcctgtatttttagctcctggggcctagacttggatgtttcatgtcttcatggtatagaatacttacagatagagagttggaaacaacttggcttgatctaaatgcccatttcgaagttcccaaagtctacctgggcacagggctacagacccctcccaggtcgacttgctatgattcaggattactcaactccgatatgttttctttcttgtcacgtgccaaacattgatgtccacatcattaggactacttttggtgtaaatattttcccccaagtcaactttacacttgtgtgaggttgacctaataatgcaaactaagcccatttctctcaaaactaccaagtgggcatcaattttggcattgtttggacaattgtttctgttcaatgatcattcatattgagagtaggattttgaattcttattccttcttgaccagtagaatttgaaattctaagtgtaaaacgagaaaagaaaagatagtcgtcttttcttattatttatcttttcctttccaacataaaatttgaataactctttaagtgatttccttcgatttgagtgtcgaaaatattttaccaggatctagatttactaccaagtatgtttcattaacatc

SEQ ID NO: 321633 - DNA, 883 bp, Cannabis indica
agtaacacaaattgatgatataaacagcataagaactctcttttttttccttctttattgcaaatttatctattggagttctctcatctacctaaaaaaagtgacgaaatacaaaacaaagaaactattaaaagccaagacagaaaaaaaaaaattagcaaataatggtagagacttacggttgagctgggtgaattcgtgtatcaactcgagtccttactgctattaacaacaacataaccactgtaggaagcaaaatctgccatacataaaaaatgaatattcaacattgtcaaatttctcaaaattccaagaacaactccatcaacttccaaactcaatacaacaaaacaagcaaaacgatcagtaaatcaataacaacatcatcatcatcatcacaaattgaaaattttaatctcaaaaggccgaaaatggaaagagaaagtaaaaaaaaaaaaaagagagagagagagagagagtggaaaagtacagagagtcaagaaaacggagccgacgacgtagaagaggtcgccttttttttttttgttattttgttctttttttttttttttttgtatttaagcgtttacatattacaaccatatttttacctgggactcaaacccaggacctccaaaacacacacactcatctatgaccacttaagctagcctcaagtggttaaaacaattatatgatgcgatggttgtacgaggtgtttccaggatctaatggcattgaaagaacatcgatcaggatctaattgtattttgctctcaaatgatcctaaattcccaccatcacattgtatcatttatacaccttataaattataaaaataagtctccaacaactatattataaataactacaattaatcaca

SEQ ID NO: 321634 - DNA, 1948 bp, Cannabis indica
tatatatatatatatatatagtatatatatatgtgtggctttactggtgtttgcattgctaatggaaggaatagtagtctcatcactttccagccaatttcaaacaaaagtcaggatttaatactgataatcatgatgatgggctagtagtattgattttgacttgtgcatactcgaaatttttcatttattattgtaggttttccagtttttgttagtgtttacaaatttaatttaccaatatgatatataaattaattaatgccctattgaattctcattaatcaataatatttggcatgttgaatatgaataccagtacgcaatcactagtataaaagtcacgtttggtcaagaagaaatttaataaaaatataagaatgagaatacgaataagaatgtaatagaataaaatttaaaatacgtaaaaaaattgataaaaaaattattgcgtttttttctcatgttacattggaatgatctttctttctatttcaaaatagaatagtcattctaccaaaatggtagaaaggttattctattagaatgacattctaatactttaatatacaaccaaacaaataaatagaaaaaaaattgtttcctttccatttcattttatttcattacctccaattaaacgccacctaagtacttaaaattttgaatttgtgtttgacataaatttaatgatattttttaacagaataagtatctaatttagtaatataatttttgtccaattttataaatacagatatcatcagtatcttcaataagacacgtgtaagatctttgttagaatctaaactacacaaattgagacactcaaacaaagatcaagcaatgcagaaaaaaaaaatcaaagataaataaaaatacaaacaattaatgatcaaaactaaaggcagaaaagtagagacaatgaacactaaaattactggttcggatctgatctcaatgagagatattcttactctaaaggtcggcaaggcttgagaatcaatccaataaattgttgaacaaggttacacactcaaacacagattaaaaaaatcttattttatcttactcgagcaacaactctacaattctctcaatttacaaactctcagcttagtttcataaccagctttgtacatcaattttcctaaaccctagttgattagtctatgtgagtttacataggtttctaagctggtagcaggggagagaaaagggaaggacaaaataattaactaattctgttagcttgagtcttgaatagttaaaacagttggcctagctgttttaacttcttgatgctatgtcaataattcgagggagtgtgtttgataggctgagaaatagggactaaatttcataattctccacctggttcctaatttcttcaattgtagcatttaatggatctacgcagtttccttagaggctcatattttgataccacgtaaattcagtggagcattgaacttactaaatagtatcaccttagtcaatagatctccatggtttattgttagaacttaatttatcaatatcttatttactgatcaaatatgttgattataacactataatctaatatcctaaatatgcatgtataaaatcaatgaatttaaacacaaaagatgagatttctcacataatagaatgcagccgaatataatgtctccttctgttctaacactctaacatttgattccttcattcataaagttttaaacaagtatggaacctagatctattttctcttttctctaaatttgaatctgaatataaaattgagaagaccacagtcttccacaatttcttgagtatcacattgagcaatgtgggcgaacactcaatacacaaaagtttgatctcttggttgtattgggtagaaatcaaagagatagagagagatagataaatagatagatagatagataaatagatatatata

SEQ ID NO: 321635 - DNA, 853 bp, Cannabis indica
accattccatagccatagtcttgtctaccctcaaatattgatgcatccacattaaccttgattacattagcagctggagcgcaccatcggtcattcccatccccggccagtagtccagtccgtgatgtctccaaataaggagcttgtgtcgaattccattgctcaaggtacgtagcagcgaaagcataaataaaagaggcagtagagtctttgttcttccatactttgtcgtttcttgctccccaaattgcccaacataagatacaaaacattcgacaagtttctgtgttggcattattgaagaccgagacacaccagtccaagaagcagttttcttgctgtgtaggcgtggtaatagctaccctctcccaacattgagctgcaataggacaataagcaagcacatgcattattgtttcattatgcgagttgcatacgggacataggctatcaacatcaacccttttagtaatcaattggacctttgttgggagacaattagttcctcctctccaaatcaagttcttaacctttggaggtatttttaatctccaaagttcattccaaaacttcgaagcttcaacagtattccaagctcctttcgctttctgaagcaaattaaaagcactcttcaccgagtatacgccactcaactcatggtgccaaacaagacaatcagttgtcgatggctttgtggtcaatagtttttacactacggaaacatgtttctaccaattgatttgtttcctgtgaaaacaacaacttgttacaatcaccgaaacaatctaaaccagaaatcaggtaaaattcttcgacactaaaccgtatgcaacggccagcaaccttagcccaa

SEQ ID NO: 321636 - DNA, 505 bp, Cannabis indica
tacgaataaaaattagtcaccattacattgtttatgtcatcactatctcattaatatatattctcttgtaagtgaatcattactttaacataaataatttcacttttatacataatgatattctcttttttcaagtgttttgctatatatgaaggcaagggttagtaaaaaaaattattaaatttaaaattttgatatatttagtatatttattaatatattaattatatatgtacgttctctctatataaaaattgtacaaatagattaaatgttcattttttttaagtgaaaatacttgttattataaattagaaatagcattcatttacaataacagagtaaattggtggagggatttcctcaaaccagaaacaagcctcatccacccttaatacaaactttgccaaaccgtgagcaaccatattggcagtatgtttggcatgtgagacagttacattagggagaaaggataaaagacaagagatatctacaatcaaatcat

SEQ ID NO: 321637 - DNA, 1444 bp, Cannabis indica
ttgacttaactagttcttatttaagtttacagtactaaaagtattttgttttaaacaatgagatctcatgcttggatatttttcaataaagaagtatttgtttgtctttatcttattaaattgttttatacggactatcctatgtgacatctcgggaaatcggggtgttacaaacacaaacactttgcgttattgttgactctcatgactttcataacgcgatgaaactgggataagtgatcactggggtctgagtctcctgcttataggtcagcttttaaaattctttgggagctccacttcaaggatgtttctagcacagggttcccggtcctcacaatcaaactctgaatcatctcccctttgtctctaggagactttagctatatctttttagaggatggcaagttagccaagattccctcattcagggcacttcttgagactggtatttattgtttcttccgctccaagcgatttctaagatcaccatgttttgcattgagtttctatctcaaattgacaggaggatctttatggttttccccattctctccctcggctcctagtgcacaaatatgcttttccgatctccccgatcttaagggccatcatttccctttagaaacctttccttatgcggaccttttcctttagggagatcggagtgaactttccacgaatcttaagcctttttgttcttttttatgaatggctgctgggtttgcccttagggatccttctaaagggtaccaaatagggctcatctctcgatttttgtgcctccaaatatccggtggcagcgactcatctcttgttttgtcttgcctaatgggtctggcatttggatgcacatggatgcctacagttttccattactttttacatggcgatcttgatttcttgcatcctcttgttctgctccttttgctctcccaattcagcttcatggtcagtggctttctatctccacgccataagttcagtgtaactaccatcatcatatgcctcgtactcttgattttcattgtattctatatcattgatttcatcttgttctacttctacgtccactcgcgaagccacttcctcttcgtctagccccctagggccttgaggtggacgtggttggcgtgcatggtttctagtttcaaccatctaccaagaatttatttttgatattcttcttacgtaaagctttccacaactcttaatgaaagtaccaaaatattgactaagatttttggcaactaattaatgagagttgtttaaatgattataagaaatttaatgcaaattgtttttacataattgggacattaatgagtcttagtccacaagtcagtgctatttaatatagtgttttttccttacagatgatgtttacaccatttttttaacccctttccagaatatggttggggtatttatagcttcatataga

SEQ ID NO: 321638 - DNA, 1612 bp, Cannabis indica
gaaaactaggtttaaagcctttgaagcattagttggataatgagaccatacctttccttttatactaatttcacatagggttagggttgatttatttggaataaaaaaatgataaaaatagagcaaaaatacccttaagtggtcagccatgaagtgggccctacactagttagatttttgccaatttttctcaaccatttatctattttcacaaatactactttttgcactttcaaccctataaatattaacaaataaaccctgaaatcctatttcttcacaatcaagccttatcttagtaaaaaattcacaaactagacatagtctaattttagaattataattgattaactaaaatcaattaatttagtctcagaagcagtttgtctcaactagtatggggaccatgggcctatataaccgagcttccaataagcagatctagaacttactaagtaaattctctaacttattaattcctcattgcaccactataaaatttggaatggcactctcaattatatagaacgctctatatgttccacaatatagatatgttataagattatccatttgttgttatcaattgtgcatcccgttcctcaaacatgtcgccaattacctcaatatcccaccccctttctcccaccatcatcaagttagagaccattttgttatcaagaccttgattagcagtaatgacatatggattactgtcatgtggcagccaaggctcattaataatactaacagtagagccatttccaatagatcttctcgcacttgctgaacaagaaattgagcttcctaaatactttgccaaatgaagctaggattttggcctaactcagtagtaagaaaagacaccgtaaggtagtaccaagctttatagatccttaccacaagtgactcttcctttgtaagcaatctccacccttgtttgcccaagaaagaaaggttataatgtctaagatctctgaatcccagcccaccagcatgcttgtgttgacataatctcctccaactaacccaactaacacccttattcgaagaattagactgagccttccaccaaaacttcaccatcataccttcaagattttcacatatttctttagttaagagaaacacactcattgcatagctttgtaatacctgagcaactgacttaagcaacacctcttcaccttcttttgaaagaaatttagtttcccaactaaagatcttcttcttcattttctcttttaagaagctaagaggaatttgaatttttatttttaaattaagtacttaacaaaaaatagagtaaattgcggcataactcctaatattagcaattaaccccaaaatccaaattttgacgacaaaactcctaaaaccaatattctgttagcatttagccattcccattcatttttggcagttaactgctatgttggttgtccatgtatacatatgatattatctacatgaacacaatgtacatatggcacacaatattattagttcacgtaaataaatatttaaaaacaaaataacaataaattaattaaaaattttaaaaaaacattaaataaaaaactgttataaaataatataaaatatataagaa

SEQ ID NO: 321639 - DNA, 536 bp, Cannabis indica
tcttttaattttaaccttttcatctcatttttatttgattatattacttatgtttctttaatggtgagagttttatgtaaaaaaatattagatatatcagtatattttctataaatttttatttttgcgaattctttacaaaatttttaattttcaatttttcgtttgattaaatttgacatactaaattttaacttcagtatatctttttcaaaaagaaaaaaaattattatattgcttccattatctatttttttcctttttcttctatttcctaaaaaactaaaataattaactctgaaaaataattatatcaaacaaaatatctaaccttaaaaaataattataataaaatttgttttgaatttatattgccaaatcttatgctttctatctttctatctatctatatataatataaatctatttatctatatctattctatattaagtgtgcctatataactgaattcttggtttatgagaaattcatgggtgactttttatttatatataataaaataataaaatattat

SEQ ID NO: 321640 - DNA, 739 bp, Cannabis indica
agtgacatttcttgtagtgtcttcttttttcactcttgtctatcatctaaaggacacccgaatattggtcttataatatttttaagttataggttatgttaatatttatatgaatataaatgtaatttactgcacacatatatttttgtaatttattcctaaggttttctcttgatctgtatgcactactacaagtaaagatctttgatttcaattttgattaccgagtctaacctaattatgtcttacccgcataattctttatctcaacatatacaacatagtattgcattcaaaattgtttaaatattagagtaataaccctagatcgcataaccgctcactttagggtattaaccctaatccaagtttctcacttaatcacagcatatataataccaaacataagtgccacaacacttaactgtatacgtgctgactaatgtcttacgtggtatcctaagtatgtgaagatctaaatttctgagtgttcctgagcaagcgtcggtagtccaaatcacacattcctagaatttcataaatagagttaatcccaaaatttaattttacatattcacataatttgcttttcaattacagataagcatatagagcctgaaacgagctttccaacgatatcaagaatgtcccaaacgaagtctcgaatcaaaagttatggcaaaaataaaaacccaaaaaattcaggggaaaactgttgggaattattttaccaggatct

SEQ ID NO: 321641 - DNA, 1565 bp, Cannabis indica
atcacatccaactgaagaactttcggggtcagatcttgattatactctgctactgacaggaatcaagggttagagatctgagtggaaggagacattaattccactgccatcactgtaagttattcttaacttttatgtgtttagttcatcgttttagaagttcaatattaggttgttaaatcaacatacttgtgagtagatctaagatcctagataaatatatttccaacagtatggaggtctgccaagtagctctactctcatattaggccttaatgcagcccatttattagccatccaaaaatgcaaataataattaccgcccaagccttcttattctatttgggatcctaagggtcatcctaattcatacttccatgagctcccgccaacttagatagaagcagtaagcttccaagaccccaagaggacccaactacatccttcttattttgtttcaaattttttgcatgagtattgatctcatggacacggcagatatccctagggactggactgcatccttcttaatctgtttgggaccctaagggtctcggatcataacgtgatgattacctattttattttctgtgtcactgattctgttatttgggaacgagttgttcctagatatagggtccagtgggaacccttccaagcggttattagggaggactctcctgtacccttactacttgcttcgtatttgcttcttttttattatcttactaaatcgaaaaaattcccatagacaaagctagaaagatcgtcaaggactggactaacccacgatggaacgtcaacatctgcccagtgattgcaaaagacacccgagagctgtgcacaaaatgggagatggatgacatgttagaatttactttacaaagatctaatttactatcatgtatgttggttaaaaacctaaaaatatttctaaaacaattatattaaacacataagtagtttaggatttccttacattgggaaagaactggaataaatgactccttctgtttagtactctaaccctctaatcctttttgtagcagagtatcaccaagtaatgaatccgaatcttattttcctttaataagtaacatgtaataattttttcacgatcttccacaaaggtcttggtaccatcttgaatagtgtggactgatactcaactcacaattagaacacaatttgagaatgacaatagctatagaaatttcaaaatttaaaagaaaggaagagaaaacttttctttgtcagatattgggttgaatcatgtagacttagttgacaaagctctctcatttctttctctataaagctatcatactagggttagattagatgatacatgcttaaaataaaaaataaaaaaattgggcttaaaaatcataaccatgaccaaattcactatagatgggccatgatttaattttgtcactttatttcagtcaatgggacaaatgagttttttccacttttaccacttatcacatataattatttaaataccaatttttattttaataattatcaaataaaaataaaatttaaatatatttattaat

SEQ ID NO: 321642 - DNA, 716 bp, Cannabis indica
tagggccaaggaactctcccgatacagattcagtcgcgtcaagagatgttaactaccattcttttatcttcagacttgatttcaaggattgggaggtatagtttgtatgtcttgattttaagcttttatgtactttgaaatacttaatgaaaccgattacttggttcggattcaatcaatgtgattagtcctactctgatgcaaggaagagccttagttgaattttcacaatgaaatgattgtgttgccttcatttctttcaatgaacattcaagaacacttgagcctagaactagccatctatgttgatcagtcttaatggtttcttaggtctttggaagaagttagttataactgaaaactaactaactagctcgagttattaagggagcgtttagtacgaggtttagacttggtgtgaatgagaatgtcacattaaattaataaccaaggagtttgtgtttccatgtggattttacttttttaaatttaaattgtagtaacgttaattccctccaacactcgagtttcatattccttctaagtctatttcttacaaccatgctcgaccctgggctaaggtgggctaggctcgtgcctaggacctactcaaacctagggcccaaaattttattacagtatattttttgcattgaaaaaaaaggtattttttatttttttttgtaaaaagaagcccaataatactcacattttac

SEQ ID NO: 321643 - DNA, 943 bp, Cannabis indica
gctgcttgatatcagaaagctagttaaatagcatgaatggaaatatcacagtgtgttgatgcagcaacaatagattttttttttttttgaaggacagcaacaatagattacacagggcaagtttttactttctttcaagatttaaagagaaaaagaaacaagtatgaagaaataaattaaagaacaataaacttaacagctacaagcaacctttccaacaatagtattaacctaatataagcactaataaatttcttggaaattagaaaacccactcgaataaactgcaaataaacgataaaataaaaatcttaattctttttcccaaatcttattttaatcagacaaaaccagaatattgctagtggagcctcctccctcaaaattgagaatcgcgaatttcttaactttccaaagattacctgaaaaccacgagactttgccccaagaaatcccgagcagctagctgcaccacattggcatcgaactttggcaccgccataccattcaaaattgtagttgtatgccagttcaattccaatagggatatcttgctttgcaaatattccaacccttacttcccccaagacattccacttcctcgtctcacagttaggttggctgaaaatgtaaccgaaagaaaaggaaaaccaacaaaatattggcaagatcaagtttgtgggataagatatagtacaagagagagtaaatcaatttttcaattcccctatcaatatttaacattctgttgaaatggctcaccatgagtgatttataaatctcgcgtggctacccttcctggtggcatcaatagattcagaggcatcaagagatattataaatgcatccctaacacctgcatcaaagcaacacataatggcgaaacgattagttttgattaaagataaggctaattaggatttttaccccctgaacttttaag

SEQ ID NO: 321644 - DNA, 949 bp, Cannabis indica
ttttttttttttacattatcaaaatattaatcttaaaaaatattactctcaaatgaaaaatttgaaacaaaatggatttattactaacaagcgctaaagtcaaatgagatggctcattataccaattgttaaaattacttcacaatgagcattataaaaacataatcatataaaagatttaaatataaaccgttataatgaaatcattatatttagggcattacaagataatgaacatacctctctaatgtgtattgatttcttcatgtcatttagatccttttactcgatcaatcctcttctttcaatctacacatcaaagaaaatatatgtgcaaggggtgtgtatgagcactactcttttcactctcaaaacatacatatacccacacacatccttagtcaccaataaggggcatgacccccccttttataaggattagtgggtcttttggtcttatagtccaaatagagaaaatttattatcttggcccaatggactgaccaaaaatgttttagagcgtgtccatggcatctcattatggctcgatgacaatactatgcattaccaattatatagttatcattatacgctaatatcgacacttagtgagcaacactctattatgttagtccacataaaatattctaatacaaaattattagttaaaagatattgattgtctacacgtataattcagatgttattatttttacaagtaaagaatattttatggatatgttagaaatatatgaatatatcaaaaatatccatgaatattttcatgaatatgttagactttttatttgggcttacattaagttttattggttttattaaaacttgggttgattggatagttctttgctgtgttagcccatattgttggtgatcacttgttaatgggcttagcatctgtgtgtaaagtctaggtgaagcagaagtgtgg

SEQ ID NO: 321645 - DNA, 1253 bp, Cannabis indica
ttgtggctacaacttgaattttttctaataattatgtgtggaataagtggccttatttgttagtagattacaaattattttacttcttttcttttacgatttttacaatcttaaaaaaaaatatatcattctatcttaatttataaaaacatgattaattgttatattttgtagaatatatatttatatacaggcacctataataaggttctcacacgtcctaatattgggaacatttatgtttatatgttttttatgacatgtttcgtcgacattatggttataataaatattacacatttttttcgaaatattcacaataattattacgatactgaaaatatagctctaaatagtaaactgcatgtgtattagaaagaaaaaaaaaaagcaagttgtgcaactaagaaaattatataagaaaattttagctataatctttttatatatgttttaaaataaaaatgttcctgccaataagaacaaaaatactatacgatcttattctaaatttttgcaccatatacatctcaagtaataagaaaataccctaaaaattttttacttgtgttagaagttgatatatatttttagaattttctaagaaacttatattcataaacatctagaagattttattttagactattctagctgcatatttttaaactaattaagttagaattgtctagaatatttagaaaagtaattctagaactaagaaaatagaaaattctcgaatgaattagaaagttaaaattgtaaaataaagaagaaaaatctaaaaacttgtagcaccaactttagcttcctaataaatactaagcatgcgtgggttgagtggaaatgtaaccaagaataactaaaaatcaataaaacctactaacttctcctacatatcgagcctgtcattctctactatacatagacaaccaattatctagttatcaccatactaccattatcatcatacttgtaacagataactagtttttcagtaattagtggttgagttagttgagtactgttgtcaaacggttctatgatgttgtcagtttttttgttttagcttgccttgttcttctagttattgtataaatactgatctcaattcattcaataaagtgagatgttcaattctttctttttcgtctctgtgttctttagtttatttgtactctgttttactacatcgtatcagagcaatgggattacaagcataaaccatagactgtgttgatttggttacatct

SEQ ID NO: 321646 - DNA, 1579 bp, Cannabis indica
aaaatcacgtaaacacgcctatgctagttagggtgttacatcacccttcatcttagatatattagtttgggagttgttcacatcctaaatttattgaagaatgaccaacgattgctacaacattttgttgactatcaccaagaagacctcctccactgtaaagtcgaggagatttttgaagacctcctgtactataatgctaaggagatgatgaggaccttctctactgtaaagccaagaagatgatgaaggcctcctctggtataaagtcaaggagatgatgaagacctcttctactaaaaagctaaagagatgatgaaggcctcctctgctgtgaagccgaggacatgaagaatgcctcctctgctataaagctaaggatatgagaaaaaccacctctgctataagtacagttgagggaacgataaagaaatccaaggctctaacctatgagaaaacaaagagtacatccatattacttaaacaagcaatgtgacaagaggaccaatgctaagaaaatagccaaagatcaaagttggcattgacattttcgtatcaacacgatttcacggtgtctcaaatcaaaggaaactactaatgaacacaatgagaagacaattgctaagattgttaaaattgatgcccacctagtagtttcatatcaaacagacgtagttcacattatgaagtcaatctcacacaagtgtaaattttacttggagaaaaatgtttacacaaaaagtagcctgataacatggacgtcaatgtttgacacgtggcaagaagaaaaacattcctggagtgaaggaactcgagtcatagcagtcaacatgggaatcggtccctagccttatgcctaggttgacttaaaggctttgaaatgggtattatttaatttcaccaagttgtttccaagtcaccattcatcattattctgtgtaatgaagtcaagaagaatcaaagtctaaggaccaaaagttaaaaatacacaaaacatcacctcggaagtcaacccgggcgcctagggttttacccatagcccaggttgatattctaactagggtttcagttttcgagaccttcttaataaaaatttgtactggaacatgaattatacatgtcacgaacatatttaaggcatcataatcaaattcggagttatttcatttttgagcacccgtagcactaggtgccttaggcacccaatgcccaggttgacatgttttcaacttggggcacttccaatcatcaaacaaaagaactatcccaatcactttctttgtattcattgaaaatgaacaaagaaatgcttttgagggagacatagattgacttagaggcctattatggggacctaactcccaacttgaaattttgtcaacctgggacatttcaaaggatatattattttaaaaaaattattctaggaatatatctattttaattaaaatttaagatacaagtcttttggaaatcaaactgagtcatctcgttgccaaaaactggacccaacgcttacggttcacacctggtgttgggcctaccgcccaagttgacattttgtcaatctaggccattt

SEQ ID NO: 321647 - DNA, 1482 bp, Cannabis indica
atgtgaggttgggtttggccactaatgagtgcaatctatttggcaacataagcaaaccgtgcaacatgcaatcgttaatcttagtcccatataacttactctcttggaagtgcatgaaaatggtgatcaaaattttgatacgattcaagagaacgggtttcccgaagtatcgagtgagtattgttttctactaaatttgttattaattataatttatgttaatattgattatattttaattcaatgatagattaatcaactccgagcaaacaaccctaggaagtatcagatgagttgtgcgtcatcacaaatccctctaatctcgttgtttattgttaacggtgttaaattcatagttgaggaaatagatgacaatcgtaacacccaaaacagtagtattttggtactgggtgaacgtggtcgaaatttttatgacatcctccaacaattctatgaattaacttacttgaatgattgtagtgttatcatttgtaagtgcaagtggtgggacacaaatagtaatagtatagaaaatgatggtttgttaatatttacaccccgcgtaatgtgtggaatttcccagatgaagatgatgaagacatctcgactatacaagaaagaaactatttgagaatctagttagttgtacaacttttacaactagacgatgtcgactatgtctatgatggtatcgacccaactgaggtgaccaacatggaccatgtgcatcctgactatcaagatttagatgatttcattgttcatagtgatgatgaagacactagtagttatgatgaaaataatataacccttaatggtgatgatgatgattgtaatggcttgtaaactttaaaatattgtaatattttaacccaccattgattatattaaatactagggctgcacacgggtcaggtttttgggttcgggtttttgaattttgggtcttggaaatgtacaaccgaacccaattttttggtggtcgggtatggagggttacgggtcgggtatgtgcgggttaggcgtggtcgggtttgcatgttactaggctgagcccgaatgtcatttctgggctcaaatgaattttaatttttaaaaatgccatatttttttataattttttatcacattggcttttgggttcccgagaaaaggctcagacaactaagtttcatttatcacattggctttttatttttatcacattgacttttgggttcccgagaaaagtaggtggtccctacttcgtaatgccactattaagatctgtcattatcattgttattgtagtcatgctcttcaagacatggttttattgttttgaaaaacgattcatctactgtagccacttgttttgcttggttaccttggtcaagttcaaatagtgagtattgagtaggtaggtattgaatgaacagtaaaaagtaaagtgtgataaactaaaaattaatattattaactttttaatataataaaaaaata

SEQ ID NO: 321648 - DNA, 538 bp, Cannabis indica
ttttatacctacggtttttatcaaaaaccgcttctaaatgtcgatttcgaacaaagcgggtatttttacaccctttagctttccttttatgaatggggtgaaaaagcagcctctaaaggctaacattgtagtagtgccaagacaaattagcttctaactgaccgggttcctcctccaatctctcactaatgttcgacctaggctccaaatctacgtgcactttcccaatatgcgcctcattctccccaagttcctttgcttcttcaagcactgcatccttctcactaatcgcatctgaaattagtttttgcactatcacacttccatcatcattgtcgacaatcgactccacactccctgatctgatagctggctttcagttcactttcctcttcttcgccatggaagagagagaccgagaacacgcacgcctctataattgtacaacacatatttaatatatatacatcaaccaaaactatatacattatatataaataaaaaaaatatatattttatatatacatttaaataatct

SEQ ID NO: 321649 - DNA, 668 bp, Cannabis indica
ttatatatacatttaaataatctttatatataatacacagaaatatattacacttcaaaaatatacacagataaaaaatatatatatacacatcaaaaatacatatacacataaatagaaaatcatatatatacaaattaataatcatatactatatatatatataataaataaatctgtacaccattaaataatctatatatatttattcacagagttttgtatataccaatacttaattatataaacagatctatatatacacattatatatataaatttaaaaccaaaaaataatatatttccgtaaaaattttcaactaatatataaaatcaaaaatatatatataaaaaaaaacttacatcaaatggtccgtattcagaggtggttgtggtgcattgttgtagtcccgcgtggtgcgtcgtggtggtcggggatgaggctgaagggtcggttgggggaagaggaggaataagggtctgagtttgaagagaaaaaggggaaaatggggaagacggtctgatggggtgtatataaaggcattagcgatagactattaatgtcggagagttcgccgctaattgttattaattgttttttttttatttttttttatttttttattattattagtcgatgaggtccgcagctaatacccacgctaata

SEQ ID NO: 321650 - DNA, 1633 bp, Cannabis indica
gcccatcacgaaagaactccacagttaaacatgcttgacttggagtaattttaggatgggtgatctcctggaaagttttcacaagaagcgtgcgcgagtgaggacaaagcacactggaaaccactcgtgttgatctatagggtcagttggcaatccatgaagcagccagagtgatgtactcgtgtataagagtcatttattctgtgagtgtaagggcctaataaaaacttgaagcggggacgttatatttaccgtcgtttatggatgcgaaagatacttatttgtttgctattcctctccttctagaggaatttgatatactcgagaagaaagttaggccgaaagtcttggtcaacattatttacgagttggagagagaggctttcggttctgtagtaagccaattaattttgattggaattggacctttgattccgacatcttttcttgatggaaaagatgtcacttctaataatgatgacccgtcgaaagagaagtacattgagtggcttaactcgaagcctgaaacaacagttgtttatgtgtcgtttgggagtatggcgattttgtctgagcaacaaatggaggaaatggctaaagggttgttggaatttggtcgcccgttgttgtgggtcattagggaaagtaaagatagtaataataataacgagttgagttgtagagaagagttggataagcttggaatgatagttccgtggtgttctcaaatggaggttttgagtaatgcgtcagttgagtgttttgtgactcattgtggttggaactcgacgttggagggtttaacttcgggggttcccatgatagggtttccccaatggtcagaccaagggatgaatgctaagttgattgaagatgcatatggaactggagttagagtgaaactcagtggggaaggagttgcgggaaatgaagagattaagaggtgtttggaattagtcatgggaggaaaagaaaccgtagcggtaaatattgggaaggaaagttgggtggaaaagagaagaaatgcgaagaaatggaaggatttagctcgagaagctgttaaagaaggcagatcttctgataagaatctcaaggcttttgtgagtgagatggttgaacgaggtggtaataagtaatatcttgaatcttctaattaaaatgttgtttgtatatcttaaaagatatgtttacataactatccttaaatgaagatgttagttttaaatttcgtgatatttttcaaattttgtgtggattttgtccttgaagcttctattagataccgaaagatttatattgttctttacatttgttcattaataaataatatatagatcttgaatctttctatttacagtgatctttttatatctttagatttacttccaataaaagaagtacagatatatgttatacatgcatgcattgtttagttgaaagtatagaaaattaaaaaagaaaaaaaaaaatatttaactcgagaaactactaagaaagtggatcttttagtaaaaaaatgaataataataataataaatattattttggactctctatattttacaaaagttactgactgattggagtttctattttattaaatgataaattagattttatattttctaaaata

SEQ ID NO: 321651 - DNA, 1277 bp, Cannabis indica
cctaagccaatttaccttgcttaccctctagcataagtaaacttaataggaggcctcacattcgtatcattatcacatggtttccacacacacttaacaaaacccaaattcttcaaactatatgtatcctaaataaaaaaatgttttcaattctcactgctatattcttcacttattaatttacaggacatttaattcaaacgggacaatttgcagtatcatactaaattatttcaaaatatagttatcccttaaccaaatattttcaatctgcaatatcatactaaattatttgcagtttcatactaaaaatattgtcaatctgcaataataaatcctcctacttagccatagcacatttaacattcatttaatcttaaagacctagcagtatcatactcaatgatcagaacagaaagaaactcatcacagtaagaaagcttattaacaatcaattgcttcataaagcaaaaaacacgaatacaaactatacataaatatgttttacataaatacaaacttgatacaaatataacgaaataccttggcctcaacaagctttccatacttatcaaaggcatcttttagacccctgtcagatgtggaccatgacaggccaccaataaagcagcgatactccaactcctccgacattattcaactgcaaatttcattataaacaaaagcaaattcaaataacgtcactgaacataaaaaatttaaaaacaaaaaaaaaaaaaagaaacagtaatttaaaatcataactcatcaggtttaatcattcaatactataaaagccaacaaaaaactcagatcggaaaaacgcaaaaataaaacacacatcatggcaaaacccaaaaaataagatcaaaatcagattcagaataagaacaaaaaggaatcgaaagagaatacctttgctgctgaaagagaagaagaatagataggggatctaggtttgaaagaggcggtgaagcagagaaacgcgtagagagacgaaaaaggaagcgaaaggaataaaactttcggcttaggaatgatgtatgtatagatggagatgaagaagatatttgagagagtgggtagggcataaaccgggtcaactggttgattggtttggatttgccccgttaagccgggccccgaatttggagagccaatggggcttttagttttaagcctctttaggctgtaccacatccaccctctaacgctcttacccatatgccatttttattttttagaatttttttttaaattaattaaaaaagtaaaaa

SEQ ID NO: 321652 - DNA, 896 bp, Cannabis indica
ggcacgaacttggaaggcacgagcacgactataggtacaaaaaaatataaaggtttgggtacgacatggtacgatgttacaaattggcacgacacgatataaaaaatatgtctttgagcacacaacacgagaagcacaaaagacacgacacttaaccatgactagctcgaaaaacacgacatgggacaaatccgaaaaacacaacatgacatattaaaaaattttgtaattaataataatataataattataataagatatgaatttaccaattatataataaaacttaaatataatattgaatattataattttataattaaaactattaatacatgaaaatctgagattatatattaatttatttataaggtgtgatataaaattttgagtatttataattaagtattcaaattctaatgatgttaataaattttttcgtatgattatatgtaaaatatagttacaaaattatataaatataactaaagttataaaatataaatataatttagtaattgtaaaaaaatataagaaagtatatcgcacgaatttaagctcgaatataaaaatagactggcatatttaagaaatatgagatggcatgagcaaagcactacacgaattcgagtacggcataaaaatactgggcttacaggctgtgccagacctatcatcatttaaaaatgttagcacaacacgacatgacccatattttttttgtagcacaatacggcacaacctattttttaaaaagtacagataaatatgaattgggctagcacaacacgaacttacacagtgtatgaataagcttaactatcaaagcaagtgtctctcactacaaaaaactgctacttttagtgacaactttttagttacaatataattttttt

SEQ ID NO: 321653 - DNA, 651 bp, Cannabis indica
atatttatttaaaaattaattaaactattttgttaaataatgaatacaaactaattaagaatattcttttaaataaagtatatcttgttaaaattaatagagaaaattaaaaaataatgttacattaataaatatcgttagataactattttttatatataaagataaaaaatataagaaaattcagagcatcacttttgctctcaccactaccaatgaaggcattttttgtgacattttattggtatggaatgaggtgcattttatttaatgtgtaataaaatgtgtgtttcttttagtcaacttttttttatataaaaaaagttatgtatataattttattttttttacgttatggctttttccacaaattaaaaaaataatctctcattttttttaagaaaatataaatattttcattgaattgaaaaaggcataaaaaaaaccaacaaatcatacaagtgatcaaacaaaaataagagcactaaatttgtgcacccgaatacagttctaggaaaaggaaatgatactaaaccaatttgaaaaaagaagagcaaattcttagcggtttgagtttttctattatacacaaatatatatggaaaattttacaatacaccccttaaaatagatatattgatgcaccattat

SEQ ID NO: 321654 - DNA, 1349 bp, Cannabis indica
caaaaacacggtttttcattttttttattattatattaaattattttcattgtttgttttttaaataatataaaatgagtgttaaattattgtcttgatttggtgaaagttgggatttttttgggttgagatttggaaagtaaaatatttgttttttttccatttcctttttttttaaataatataaaatgggtgtttaattgttatgttgtttggtaaaatgtgggatttttttggattgagatttggaaagtaggttttttagtgatttagattagttaaggggagttggtttcgtatttattcatgctaaagtttgatttattgttttttcttttttttttttcaaattctatttttaggagcatcatattattgttatgagacaatgaatttgattgtctcaaaaatttagaggtattcatttgtatttaatttaccacgcttattcgttgttttcccttttatttttaattgattttaacctttttttttttttttttattcttgatgcattttcatattcttaatctttaaagttgattttcatagttttaattgttagtattttcatctgtttttttattctgtttttttattttttagtattctcagtatttccaatgttttaagattctctatacaaacagctaaaaaatataaagaagcctatttcctctctcaaattctctttattaatagtagtcttaacattgaatactattaatttcgcatatcaaattaatttttaaatatacactctcctagacattattcttttctcttcttttgtttaattttgtactataggctaatttacttggcaattttttttaaaaaaaatagttgttttgttatataaattgagttctctttttgtttaaaaattatattgctgaatttgttatttatattgaaattttgatgatctcgtagggtatcatccatagagatcttaagcccaaaaatatctttattgatggagattctcacatgaaaataattgatttcggtatagcttgtaaggaagcatactgtgatgctttaattgatgatcctgggatatacagatagatggcgctagagataataaagcacaaattatatgggcaaaaagttgatgtttacagcttcggtctcgtgttgtgggaatcggtggcagggacaataccctataaagaaatgaaccctattcaagcagcttttgttgtggtgagcaaggtagttagtcttttaaatgtttgtttggtaatgtgagaaatttattagtaataatgaaaatgtgtgttttgttgtgttttagaatttgaggcatctcatccctgaaaattgttcacctgcaatgaaag

SEQ ID NO: 321655 - DNA, 1778 bp, Cannabis indica
ttaaaaaaaaatatatatatatttaaaatggatcgggccagatccgatccgtaaaaaaattaagcggggcgggtcggatctgatccaagatctaataactatccgaatgtttcggatcagtaatgatccgtcggatcggatcactgatccgatccgaatgaatggatctttttgccatacctagcgccgcagaaactagaaggcctccttgaatttacagccacaaaaaaatctaaacaacttctacttaaaagattaatgacactagtcttctgctatatatttcgagttttgagttttgaccaataaccatttctttatttatatacatatacttaattatatgtgtagtaatccaagttgaatgacattaatgagagaacattctccattccccagtaaataaagatattggttacgtaccgtcatggatatgtctgtcactctctaatctctatatatagtcccatcgatttggctacagctacaactgcattaaatttcatctctctaagtgtcttatgcttaattttatgaagaaatgctaaaaggcattagtggtgctaagcacctttctacgtgtcaatattgttattggtctaattaagtatcaggtttcatgtagtttaatatatgaaaaatgctaaaaggcaccaatggtgcctagcaccctcctatatgtcaatatctctattggtccaactaagtatcgggttccatataatttaatataataacttttagggagtatcgctagtcaatcgcaacgcgacatgttgagaaggtgctagacaccactagtacctaacagcaatgatgttaatatatagtcttaaaggtgctaggcaccacttgtacccaatagcaatgcttaattttatagagaaatgctaaaaagcaccagtggtgtcaaacaccctcctacgtgtcaatatcgttattagtctaattaagtatcgggtcccatatagtttaatataataacttttagggagtattgctagtcaatcacaagacgacacatcttaaaggtgctaagcatcactagtggccaatagcaatgctcatgatttttcttttccttgtattagatttgcttttaatttgtataattaattaccacaaaatatatatataatgattaataaaatataaaatattttctaaaaatatataatatatatatatatattgaagagttaatggaccgttacctaatttcaacaatcattaatttattatcttcagaagatatgtgacaaatgcaaatcggggaagaaaatgggaagtacacgaagacaagtagaaagtatttgatttgaggttactgatatagttataatatacagaaatttccaaatatatatactttttaccaattaatgtccttttttgagttcacatagctgatatggtctgattttgaaaaagaagagttggcaagatttggcaacctattgcactaactagtgacactactatcgatctgtctggattcttttattgccaatttctatatcctaaattaataatcttcttcttcttttaagtatttcaaagttttccgtggcattaaaaaagtaaaataaaattaaaaaataggcttacaaaaagtaaaagagagaaaaaaataataataattgctaaaaaatatcattgatggctagtaccctttttttttttttttgtaaattagcgtgatgacattaaataaaatagaaactagacctcacggtcattacataacaggttctccggtaacatagagtccgggatag

SEQ ID NO: 321656 - DNA, 1227 bp, Cannabis indica
tttttctttttatattagaatatgtgtaaatattaatattatatatttgaaatgaatagaatatattaagtaacattttagtgaagtttttaaagaaatttgtgtattgtgtaatataaaagtttaaggtaaaataataaaaaaaaaagtaaaattttagtaatgtattttaaataaagaatagagcaattgagaagagtgttctcttcatccaagaaaaattgtagctacgttttagctaagaaaaaagaaagtcagctaaacatatttaattatttactttaagaaaaaaaaattaattattctttttatatttatttatttgtttttctcattctttttacataaagttattatttttgtacttttaaagtttattatttaaatgatgctgaaaaaatataaagatgaaatagtgtttttgcaagtgctcttatagtattagtaacagaatattaactgttttttccatttttttaacaccttaaaaaccattaaaattaaaaaatttgaggaaaaaaataatataagttagtaatggaatgctgtcttatttataaaataaaacattagcaatcacctcctattttattgctggaaatatagtatctaattatcaatgaaaaaattgaagaatttttagcctttttttttttggaaattatgcttgccatctaatcttacaatatatagagggactcgaacctaaaatataatgggaataaactatatgcattgaactacccctcttggatcttgtaacttttctgttttgaaataactcttgcattgttaccttttgtaacatctttctacattttaaaaaagaaattacattcaaaatttaactcaacatcatttgtatgaataagttgattttgtttttaatctctaactgaggatattatgcaatctttatttgattaatttggagatgatgttacattcaaacattacacacatttctgtaatatatatagggaaatttgattttttattacttacatatacttaatattatttttttaaaactacataacatttaatatttgtgggatatgacacattttagaatatccctaaaatacccccatttacattaccacatccccactctcttcttctctctttgttataaaaaaaaaaaaaaaattaaaagtgggcatcgggccctacatcgggcccatcgggccagtcatctgaccatcgggccagtcctataaaatg

SEQ ID NO: 321657 - DNA, 687 bp, Cannabis indica
tacacatatatttttgtatttaactcatcaattgtaataatgcaaaaacatagagcacaaatttgagcacgaataaaaaaataagttgatcatttaagaaaaacatgtcaatttgaataaaacactacacaaatctgagcacggtacgaaattaccggacttacgggtcgtgttagatctaccctataaaattattgcacaacacgacacgactcattttttttatggcacgacacgtcacgactcatattctttatgacatggcatgacacgacccatattattttatggcacggcacgatccatatttttttatggcatggcaaggaaaaataccaataattttttatggcacagcatgggacgacccataattttttatggcacagcacatcactacctatattttttatggtccgacatgacacatgatgtattttatggcatggcatgatacgacccatattattttatagcacgacacgacccatattttttatggcacggtaaggaaaagactaataatttttatggcacgacatgggatgatccataatttttatggcacagcacgtcactacctatattttttatggtaccgacacgacacaggatgtcttttaaaaagcacgaaaatatgattgggctaacacgacatgaacgtatttacaactatgttagaaaaga

SEQ ID NO: 321658 - DNA, 725 bp, Cannabis indica
taaaataatttccaacactaacgacgataacaatccatgggggacctgaccatggtggggaagcttcattggaactagaccctcgagattgtgagtgttattttttgcacattaacgtggcgataggactgagcgacacgtgtcttatatctttgatacgtgggcagagggaagtatccctagcagtctgcacataattcatcagcatctataattgttgattacccgagcagagttgtagagaagacatctgaccaggtagaagcctgttatgccaagcaacttacaagagataataacttcaaaatgatctcgttatgcctagacacgaagacaatccctataatcgtgggattttgtaacgccctgaccctcaaggacgccacgtgtgtgcttttacaaacttatttctcgtaatctactagtttagaaaaaaaaggggaattaaataaaaacatttgattaagttaaaataaaactttcatactaaataccataatacggggatcccctgtttataaaattcttttacagtaggttacaaaattactattacaaaaataaggttacatttccaaacatagaaaataggtaaatcctgctttccgaaagcaaagacaccacggctgatatgtacactgctagaagacctctggctcatggctaaacacaacttttaacctttttacctgcacaatgaagcacctgtgagtcacaatgactca

SEQ ID NO: 321659 - DNA, 647 bp, Cannabis indica
aaaaaaaaaaaagaaacatagagaacagaagaatgagaatttctatatttcaataagtgcactaaaataagagttaaagaatcaagtaattaagactatacaataaaagaaccattttagtaattttgtttattatatggtagaacgtcccaaaatgataatatatcataactcaataccatatataagaatattcttaattggattcgagatgttacttcttatatcatatcatatactttacttatcctactttttaaatcacaattctccctctacgattagtgagaacttaatcccatttataaggagaagaatttggctttccaagtcaaggtcggggttcgaaactccccaaagcttatttgtatgaatatatatatatatatttatatttatatatattatgtataggtgcagttccagcttccattaagttactttcggataacatgcaagtcagaggtccaataatagtaccttgtgttagacaatttatatgtataaactgaaacatatgtatgtgtatataacatgcggaataaacaaacatatacactatatgaatataaggatcgaaatacctccagccattgattctttgagcattaatcccacattaagctttgatctgcaaaggaaattga

SEQ ID NO: 321660 - DNA, 591 bp, Cannabis indica
tttagtacgtggtgtaattatccctatatagtgatttttacttttattcatatattttgtaaaatatacctgcttttataaatgatatctacattataccatttaggttaatgcaaattatgtgtcagacttaagtcgagggtgagagtatattgagcaattcactcacaaaaataggaattatcaaaaaaaaaaaaaaaatcacaaaagtaggtacatttaatgaattataatttgagagtattttggattaatagataaaaaaaagtattcctcaatttatcccaatgtatatatatgtatgattattttttatatatacataaacagatgcaatattacgtaaaattctctttgaggaaattacaaatttcatcacttttagtttttataagatatgtgcaaaaatatgattattattattattattattattattattattattattattattattaaaattcttatgttgtgggttttagtttccctatgttttaatacaaaatttagtttaaaccataattttaatgtttcttgttcaaagaaaaaaagaaatattttaaaccataattttaatatttcttgttc

SEQ ID NO: 321661 - DNA, 1311 bp, Cannabis indica
atatagtattaatgattatttattgttattattattacattgatattttttggttttttaattttttttttctagtgtaactctatttagttataacctcccaattagaatataatttacttggtcctaagtgtattcttggatagaggttctactgtatatgagggtatggaccacgtagtctagtagtacggccacaatgcatgtgaatgtgatgtgcagtgcaccacccccacacatataactccaaaatacttttaatttgggtctcaatcaacaactaatatattcttcacaacatcttcatacttaataaatcaaaaacagattacccatatatcctttatatatactacaagttacatgaaaatttgaccaatttctaaaattaagattggagagagaagttgttcattagctggttaagagctttattatatttttctcaatctaaaaaaaaaattatacatagttaaaatggccaaatattactactttacttagtgtaatattaatttggtgcatatatcattattgtaaacatattttgatagtaatatttctttctttttttaagaatatttttttttaatttatcactattttttggaatacatatatatagctaactatgcatgtagaccttgtacaaaacttaaaaatggaaagtcttaattaagatgtatataactatatatatatatatttatatatgtgtcaactgtcgatttcgttttgattttgagcccttcatacatgcaatcatcttagttgtctaataacaatcaaattaaattaaataaaatcaaattgttcttcaaaatatgatatgaaattagatctcactctcaccacttatctgtaatctcaaaacaacaatatcaaaccaaacctcttttgttcttttgactttatagttttgttttttttgttttttgataaattcatttaagaatctgttgtctaatatttaactggatacctcagacctcttttaatgtctctgaccccaagataaaagaagagaagaacttttctcaatcaaattaataactcttttccttatatatatattttttattaaagttttcattattcattacctttttcctttatatctatatatatataacatttcagccataaccattgatacatacccagaaagatttaaactttcttcaagttaatccatattatatatgtatgttcattgatgttagttaagtaccatatttctgatctgggaattcattattttgtattgaaattcaaaaaagatgaagtttgggaaagagtttgcatctcaaa

SEQ ID NO: 321662 - DNA, 973 bp, Cannabis indica
ccaacaacttaagattaccgatcgctcacatcggtaaaacaacaatcacgctgagattcagctcgaaagaagtttcactctaggatgtctaccatgtacctaggatgaagaaaacttattaccaatggcacaacttacggcgttaggccactatgtcgtattcagtactcaagatgtcaagatcttaaaatttctagaacaccgatgatgaaaggacaatgtttagagtctttctatgtaatgtcagcaaaatcgacttatgtagacaaggctcaaaagaacaaaataacatatttgttgcatgcaaggctagcacattttggctatcacaaactcaaggtgatgatataaaagtctatgctgaagggtctttctcaactcaaggccaggatagaaactatatgtgttggctgccaatatggtaaggcacatcaattatcgtacgaagatttgaagttcaaagtgaaagcaccattggagttggtccattcttacgtgttcggacgagtcaagcaaccatcaatcaacagaatgcggtacatggttccattaatcgatgaattcttaaggtatgtatggattttcttaatggaagaaaaatctgaaactatttcaaaatttgaagagttcaaagaaataatgaaaggagaagtcagcaagaaaatctaatgcctcccaccaaataaaaatggcaaatatacctcagatgaattttctgaatatctttgagaatgccacatatgtcatcaattcataaatataccacaacagaatggagtagctcagaggaagaatcgccaccttgcaaagacatattgaagcatgctacacataaatgttccaggaaaattttgggcagaaggtatgaagacatcatgtgatcaatagaattctgcaagcaaagctaaggtttctttcaccctttgaataagtgttgggttgtaaacttgtagtaagtcactttcgagtattt

SEQ ID NO: 321663 - DNA, 2150 bp, Cannabis indica
tgtctctctcaccaactcaaaaatacaactttaggaagtagttctacaataagagcgataagctctctaatccgtcggtacaagttagctctttgttgttcctgctcaatgcatttgctttcaatgttcttccaattttccacgaaccagtgttgaagtcgttcgtgttgcttatcaaaagagtctcgcagttgttgttacaagttagccacagtttggctaaactaagctacctaaggatcgatatcctcatggtcttctatctccacacatggcttcccaagtaggatttggttgttgctgccagtcctaggagctgttgattgtggccttggagggtgagttgaggagctggttccgaggccccctcctgttgcctgtggcacaagggtagtccatggaacaggtccatcaactggcatgccccaagtttattggctagttgttggagtctatctgtcaacactcttaaaagatgttgcaaccatcttgacactttcttgagctgtggctctcaatgaaagcaccaaaatactaactcaaaaatctggactagacttctaagccacacctgcttgctagattggcgagcatatgaaaagttgcaaagtaattaaggagagacacaacaatttatagtatttcactccctatgtcacgatagtaatggggctacatctacttcgagtttttattttcatgagatggtgattatagcaactatttaagaattagaaacttcaagctcttgagagagaaagtctagagagataagctctgaccttatgagtagttttttgaatgtgaaagatgaactaagggagctctccttttattggtgaaagaagcgcaataaaataggagataaattaaaaataaagtaattttccaccattgatgatgatctaacggtgaataatagcttttggaaaagatattaattttggtgtttggtgggtctactgcgagatacgcagagcttatttttgtaactcccttgggggttatctttgatgatgatagcttcataatttctcctagtgtgggagatatgacatgacagagggcttaaatagcttcataactgagtttgaattgcatcaattagaaaaagattgactgagttatggctgttttattgaaggcggttaaagttcaagggcccgagttgacatctaacgtcaaataggacgtggtataagtgtgaaaatatccaaggggagtcctttgagattcctaagtgatggtttaacaccccttagtccttttatatgtttttgtgaagctggtcacttgttctcagagatgttgttattttgcggaaacagaagagtcgaaacatcctgcttctggatgagccaaaattgaagttgttaatttggttgattatacttcgttgatcatttctcttgagaaaaactagatgaatagtgaagatggcatcagattcaaataagcaaaacccagcgaactaggaaaaatattaatctgggtgcttaggccttctaacccgagctttttgattctgtttttgatactttcagaacgtccaaggcatttgaacttgaggaaggggtctctacccccattttcgaccatgctaaattcaatggtagcatcagattttgcattcaagcatttgaaggcattggcgctgggcccagtcccaagggtcaacctgttggggattattttacgtaggatctagatttactaacatgtatgttgattaacaccctaaatatgaattctataaaacaatggaattaaacacatataaatttaaggaaaccttacattggttgcaacggaacaatatgtctcctttcgctcaaatctttaacccgtgttcctttctgtcacagagtattatcaagatctgagcctgattctccttcaagtgttggattactcatagtcttacacactataattaagtacttgacttgatatgggtgggcatgtactctttcactatagggctcgaaattatgaagagaaagagagggagatttgaattctatagaaggaggttctcaagtttctagttatctgacaaagtaagaagactagaataatatgttggatgcgaatgagaaccatcttattccttatataggatttcttctaggattagatttaaattatat

SEQ ID NO: 321664 - DNA, 1112 bp, Cannabis indica
gagatccttgggcttatggtttatattggctaaaattattttttatcaaatcctcttccacttttctaactctgatatggaccataaaaactcacaatttgtatcaagagctatcttcataattatatagattaaatactatgttggttatttatgaatttatatatatattgatatattgtcaatggatgaaattattttttatgtatgaatatgaatcattaattatatggtaatattagattagaaattttacagttttttattaaaaaaattgtgcaccataattgtgctataggtttttgatgtaatatatttgtaatctttatttttaaattatgtaaattcaaaatcaacaaattcctccattgatgagtgagtttgggtttaaggtgtaaaccctggcctaatcgaggcgacattatatgaacctcgaacgacgagcaacgaaagtcaaagtgttgcggcttcaagccgtgatgctcattaggatgacccacgtatttttccatgtgtgcacgcatgacatgcatagccatgcacaactggaacacgtgaaagagaggaagagaacttgattggcttcgggttgcatggaaaaccaccgaagggactcgactggtcctgtgacagtctcacggtggttaactagtccttttgcaccactggtcgacgtcaaccatgatggtggaggaggtggacgatgaaggtcccgagccttttggctccgtcgtgcatgaaattgggtctcacgacctgtttggccccgttaggctttgttctcgctagcactggtcgtgatggcttctcaaatgctggccgactgactcttcctccctctccaactgtagtggtcatcccgactgcacacgcaagtgtacgtatcgtttacaagtaataaactcacaaagagtgagatcgatcccatagggattgtagttaagtactttaaaattaaatttttacttgaatttggttgaaaaaatagaaaggattaaaactagaaaataaataaatagttaaagaagatgcaattaaactaataaggaaattaactgttaaataattttttttttaaaacaagctatctacctacattgactcacattaag

SEQ ID NO: 321665 - DNA, 1352 bp, Cannabis indica
gagccacaatgatgaagagaagctgaagcttcgaaatcccagtcgtctgcctccatattacaatcttcaagggtgtttcgcagagggaagatttgagaaatctgcaataaatgaggagaagacaaaaaaagatgatggagaagagagagggatgacgaaaatagagaacggaagcaattaatactctgaagaggattaatgagatgggaaggaatgtaataataacccccagagcaataaatgctcgaaaaagagagagaaacagaggaaattgaacagcaaaaaggattaaaacacattaaaccaccacttaacatcaaagggtggacgagtttccccattagagggaccagattcacataagatggaaggaagaaccgcatacttgctagaaggctccagaacaagaaagacagaattttttctctgttttactttgtgagattgagattcccaaaatgggaactttgtactatagttttgttcatttacttaatttgttctatacaaagttttaggtgcattattgttggaggatttttttaggtttttctttctttctttttttcagtaacaaaaatttgattttaaacttgtttaggggttctacttttagctaaacatttaattataaaaaatagagtaatttgctgcgaaactcttttatattttaatttgtatacatttaacctctttattttttttttagtagcgaaactcccttaagtttatttttctttacaaatttgatacgccagttaaatattaccgttagtatcaattggatgatcactgtatacacctgtgtatatgtaatagtaaaccttgaagtcgatacagtagtaatccagttggtatttaacggtaatatctaactgacaccttaaatttacaaagaaagtaaatttaagggggttttgccacaaaaaaagttaaataaaggagttaagtgtataaaataaaggagttaagtgtataaaaattaaaacataaaaaaaattcaccgtaaattcctcaaaaaatataaataaaagcttatgcgtaataacatagtatatatataatataaattatataaataaacaaaattatagtataaaatacacatttatgaattataaacaaaaatatatattattggaaaatgttctcattacaaaaaaaaaaaaatatgaggattacaatcaaaatacttcaaatacaaataaaagtattaaattaagattataaaaaaagttagagaaaaagaggaagaataacacacaataagcttgatcaaggctcaaggacctttgtcctaaaaattatttcttccctcatatggacacttagggaaactctagaaatactct

SEQ ID NO: 321666 - DNA, 1790 bp, Cannabis indica
tttggatgccaattgatataccattgggtagaatggaaactagtcggctccaagaaagtgtacaaactcataaacctttacttagtttttgtgttgtgtgttaaacaatttatattgaacaagttaacaaagagaaaaaagaagaaaacatctgtttgatgctagaaaatcatagcatcgaaatgagaggggaaaatattatttataggccaaagtctttataagatttgaattctgttactaacagaattaggtaagatacgaacagaattctaactactaaccaactaactatttaactaactaatcggtaatggttatcatgccctcatgaaacgggtgtttacaactttgagtttggccttgagataatgaaacctatcgtttggaagagatttagtaagaatgtcagccatttggtctactgatggaacatatctcactaaaatttcattgtttaagatctaatccctcacaaaatgttgatctatttcaatttgcttaaaccttccagggaagacatggttagtcgctacatatgttccttgattgtccacccatatataacaggaacattaggactgagaataaaattcagaaaattaaaaaaattgttcaaaccgacctaccgaacactgttaaaactgaaaccgttttaatcgaaaatcaaaaaaaccaacaacggttgaaactgccattgaacggtcggttttatatcagtaacgaaccaaccaaaaaaaccgaaaccgaccaacgatcgtgtattataatcataaataaatttaaggttttagatatatataatatttatttacttatatacatccagtttaatattaaataacaaaaaaaaattactgcgatttagatcagtcctgaggtcatgtgtggcacccgacctatcaaacactgaggtaccaggtggccttggtgtcttacttgtttggccgataggttggcttgaaactttagttgtactaaagtgattggtatgtgaactcctcccaaagaatggtttggcaggatctgaccgtctaccgtttggttcacagtttggacctgtggccatggattggacggcaaaccgttgtgagtttgtgtggtatgcccagctgcttacccttctaatctgcctaagggaatactagatttagtagtcgattgttgattagtgacctagtaggcccttcttatcagtacggtggcctgcctagtacgatcatcaatggatgcctgtagagccttcataatctctacctctcggttcctccattttatgaattgatgcctctattcgtcaaatgcgagatttatggctgcttggaggtcttccttatcatgatgcaaagtgttaatatgacctagcatgagcctcagtgcctctcgcagattttggatttcggtgtcgtctccaactagtctttgagtattagttgtagacaaaactgcggtgctgggagtggaatgatcggctgcgaaactggtgcttccgtagtgtgatcccagccagagcggaggtcactccgtggcctagagtacgtgttggaatatattttaacaggacctagatttaataacaagtatgtttttcacatcctaaacatgaacttctaaaacgatataaaataaacacataaaaggtatgagaaaccttaaatagttgcagcggaattaaatactcattccgctcagatctctaacccttatatcctttctgtagcagagtatcaccaagatctgagcccaaaactctttcttgtaatttggattcttcacagtcttacacacta

SEQ ID NO: 321667 - DNA, 1063 bp, Cannabis indica
aaccatcaaagaactccgaggatttttggacctcactggtaattactagaggtttgtggctgggcatggcaccattactcaacctctcactgatcaattgattaaattcaacaagatgtctttctctctcgggttcgagctaatttagccaatggtactatggtccgtggtttttccttggaacatgattacttggtgtattaagggaggatggttttatttgttccttaatcccttaatcccttcctttgaaagagtatcattgttctccgactggcgatcattctggggagtctcgcacttaccaacgacttcgtgatgacattttttaggttggtatgaagcggatggtgattgagtttgcaagggagtgtgaggtgtgccaatggaataagaccataaacatgtctcctgctagtttgttgcaaccattgatgctgcccgagcaaggtaggaggatctaactatggatttcattgaagggttactcaaatctatagtgttgacaccatctttgttgtggtggatcgtttgagtaagtacgctcatttgatattgctgaaacatccatttactgctcaaacagtcgctgaagcttttctccataatgtggtaaaacttcatgggttgcctaagtctatcatatttgatagggatcgcatttttcttagtcacttctggactgaactcttccgtctccacggtactaaattgaaacataatgccacgtatgaccatcaaactgataggaaaacagaggttgttaaccactgccttgagacttatttacggtgcttcgcttctaagaaaccaagagtttgggccaagtgactatcatgggtcgagtattggtacaatactacttttcactcctccttaggatgtacccctttcaaggtattgtatggaagagatcctccttcactggtttgatattcttctggtaccactgctgccatagcaatggatcagctgttagaagagcaagattcctttctagatgacttaaaaatgcatttactcaaggatcaagaaaagatgaaatcttcagatgacgtgtctc

SEQ ID NO: 321668 - DNA, 600 bp, Cannabis indica
tccttactctccctttctcagtcacaagaaccagacggagcaaacaagaagacagagtgatgaatcagaagacaaagcgacaaactacaagcaccaacggggagggagaaggtcacctattccattatcgccatcaatctggaatacggatatgttttgacgatgtctgttcttgcctctagctggaagtggaagagtcgaatgaaaatagaaaaatcgatgaagaaaattagggaggaaaggaggcaaagtgagttgtctttctcagtcgatagtcgcaagaaaaggggaaaggggactgggctgtttacgattgacaatgaagtattttttattttttttatgcacaacgaaattagattttaagtttatatgtatataattagtttataataaaaataatataagttttgaaaaaaatatcatagattttgtaaagtattttttatgtttttttttaatgtggtatttaatctgcaccttacatgtgtctttttttaggctaacagaatagtggtaacaagaagcctaaaatacaacatttggtatttaatccgttgaaaaaaagatatgatatttaagtgtataaaattaaaacat

SEQ ID NO: 321669 - DNA, 1579 bp, Cannabis indica
tagaacactttatatactaaatacaaatatgctatgactatcccttgtttcaatctaaataatcaatgatcctttatgtatggtttacatcgagtagaaagaaatttaccattttacccttcagtgtattttatccttaaaacacatagctatttgtaaatgatattttaggaaatgaatataattactgaaatgagcactctagcatttaaactcgtttagccaagctctaagaaaactatcatttcacttctatgtatttatatatgctataaattctatatttatgattagcgcactaactcaattgtactatcgtgttcccaagatgtaagtatgggctagtcctatgggtaagcgagtgacaaacaagtcaaagaacctgaatagtacaattagggtagaacttaactatctcagaattgaggtcactaatctaagttcaaaagtgatattgacttagaaaagatattatagtaagtttatgatatattttccactgtcaatatcagtccagtccgatgtatagacaatacatccgatacaagtttactttgctaatgccttggaaaagacattctacttaagcaagtgtagtaaatcacatcgctgattatcatatcagtgtaaatctagtgcattgataaatcacaggacttaagtagtttatatcatataatcacaattactttctactttgtagacaaccctataatcacatgtaacaatataatagggctttattagaatttatatatcaaacatatgatcatgaaagcattatgtgaaccaagtaaaataccaaaagtaataaataatttatattcttttattgataaataaaatcaagattacattgaaattagattttatttagagcataatatccctataaactccaacttgcaaggtggattgaatcctaaattctgaattcctaatgtgtttttcaaacgcagtctctgcgaaagtcttggtgaatggatcaacaaggttgtcttctgtatcaaccttctcaatcaacatgtcttatctttccacatattcctggatgatgtggtacttcctctcaatgtgttttctcctcttgtggcttcaaggttttttactattggtgatgacactaatgttataaaaatgtaacattagtgggttttccatatttggaacaaccccaagttctgtgaagaactttcttagccataccatttccttagtagcctcagcggcagctatatactcgacctccatggtagggcaaatattgtggattgcttaactcttctccatattcaaactcatctaacatgcatattattccacccatcgatccagcgcagtacaatatattgcagaacctacttcactacaaatgaataattaagatattcaaattctactaagcattcataactaatttataataaaagttagtaaatatatacatcgagctaactagaaaccgatcaacaccaaataagtcggatccttgctaattggcctcacaacctacaacataaagaaatactacaaaattaccaatttctttatttagctacttactgttgggttttatgcc

SEQ ID NO: 321670 - DNA, 1037 bp, Cannabis indica
gacaatgtcgctcgctctctttaagacgttttgcggctctgcccgaagtgtccacgacagtctagcaaccacggcgtccccaggataaaacagcctctgtaaaagtacaatacgttctgcaccgaactgtaacgctctataacaccttataatttgctctgagaaaaatcgtaaggaagaaataaaagaattttaatgttggaaaagatgtattcttacgttgttctgatacgacttatatagaagttgatccaagaaaaaacggtaagaaaacggtaatgttatcgttcgtggaggagttggatcgtgggaggaaaaggcagatcattgactgatcgcgttttacctcttctgatcatgtgttaaaattaattaataaagaaataaataaaaaaataaacctttatttaattaaataatttttctttgaaaaaaaaagtgacacctcacctgcccgcgaacccaacccgcccggcgcggttcggtcggacggcggcgcgcatgtgtggtggtccagtgtgtgagtcctcacccatgcgcacaaaactgggtaccccttggggcccaaacccatatctcaagcttgcactagatatacactacaaatgtagtgtttctatcccatgtgggactcctactcacatacttcacttttctatttttacataatttcatacaaagttccaacaggatcgatacctcgcatcttgactccatcatctaatgcaccgacgttgcaagagaagggaatcgatgcccttttccgttgatcgtacgaagaggaagagatagtgagttgtaaacggcggtggagctttggtcagagctgcagtgaggggtggcagctatagttgagccgatcgaagagctgaaaggaaaaagagaaggaccctcctcattcgtttgagttttttcataaaacaaagacagaagataaatatgatatttggaagtaattataatataaatataaatatgacataataaataccataaaaataatagggtaattatgatttttgtcccccaaactttga

SEQ ID NO: 321671 - DNA, 1533 bp, Cannabis indica
ttttttaattaggtagtgtatttttttttttaaatttttgaaatagtttgatattttaatccttaagaatttttttataactattgctacattggatatcatttgaatgcaattatatatatgcttaattatatggtgtaaagcacgtttaacaatgtcaacctatctagggcatgaaaaaagtttgtcatatggtgaccacaagacagacaatcctattgtatagaagatagagaattacattttctagcaagtacttttattgtatagaagataacttttttttattttaatttaaatttaaaccaataaatttaaaaatataattaaaaatatcaataatatcttaagtattttatataaaatatttgtataatttttatttttaaatatatataataataatataaaattgataaagaatattctgttaagtaattgaatattctgttaagttaacgtagaaacccaaaaattatcgttaaaccaagaattctgttacatagccacactttttatagaatagatattacattattacggtgatacacttatctttacatttatactatctatgattatttcttcttttacttttacatatatgtatatataggtgcacttttaatgaatattacctattgatctcagatttggcaaatcgacaacggaattgtatttattactgatgcttactactttacacaataagaatagaaaagtaaaagagattatacaacttagatcacaagggttgttgaatctgaagcagctctcttaagattacaatatatgaaccaagtaatcaaatctcaagtaagagagtgagagatcctacggtgtgtatgagagaagagaagagagaattagagttccagacttagagttaagagctttagggagctagaacctttttagacttagagaaattaggattaggctaatgctctttatataaaagagcttacatcaagataataacctaacttccctaaaaaataggaactgtaaaatattatttgcataataaaataataaataataaataggttaattgtcccacaataatatgagaatatataatattttccccctatttttgtgggtttttgaagcctattatcctattttttacacattgacgtggcaagaggatcgagcgacacatgtctcacatttctgatacctgggcggaggtgaatgtccctaacagcctgcgcataattcatcagcatctataattgtctattacccgatcagaatggtagatagaacatccgaccaggtagaagtctattgtgccgagctacttacaagagataattactttagaatgatattgtaatgtctagacacgaagacaatctctataatcgtgggattgagtcaaagaaatatggcaacctgtttcagtttcttatttcgtgtattgtaattctataatccttgtaatttcttattttatgcattgtaagcaaataggaaaccatctctcatgcattaaccccctataaatagtgatctagcctcact

SEQ ID NO: 321672 - DNA, 1061 bp, Cannabis indica
atttatacgtgataaatgagttatattaatagtaatatcatttttattttatttaaaaattagtaagcaagtaggatgtatgtttgtttatagaaattatatatataaatataaatataaatataaatgatataaattagaaaaaaaaaactatatcaaaatattttaaacatgtactacgtattttaggattaatgtattttgttattaattctcaagatcaatacatactaaccattttaatggacatgattaatttatttaaaataaaagagtaattttatttatatataaatttttcgtcgttactaataaacatcctttaaaattcattttaaataaatcggttaattttaattcaccaagttatattaattaaaacttagttgtttacatgtttttagtttaaaaaataataaacacgtaaacacatagacaattctaatatatcatgtttatacaataagaatcatgataattaaactgtgtagaatttttatgtatcacatgttattcattaatgcataattatgttatcaattaattattaatgaatattcatttaaattaaacaaataaacattaatgacgaaccgaataataattgagtatttataattttacaatctttataaaaattagaaataaattatgatgcatctttttctttctccataagggcaattttataatttttttaggtatttctttaagcccttgaattaaattaaaaaaatttcaattaatatatccttaaataaaataatttaattcatggtcatcttttatttgagtgctacttatcttgaaaggtggttgatacatgtgttttattggatggggttcattggcttgggactttaatagctgaacaatttggttagctaagaggaggacaggattcattgccaccatttcatatgctttgttagcaacctgcatttatggtcttcagttgagctggaatagatatttgtttgaaggttataatagaagtgaattattcttagttaaagagattaagagagtgattttataaagattatacattgtaaaaaata

SEQ ID NO: 321673 - DNA, 1198 bp, Cannabis indica
tttttgtcattttaaaatttaatgttgtttgcttcaaatttttaatcaatattctacatgtttatttaaaaaattggcttaataacttggacactatttttgacatgtggcacgaatgaaacaacactagaggtctgcatctcaggataggatagttttaccagcacactaagagctcccaagtaagcaccaagatccaccaaagtcgtttcttagtactatcatttaacaaacaggttgccatgaccctaaatcgatgaatcatgaagttgaggatgtcatgtggacatcccattgcttaatctgggaccagcatcagtgctagacgcttaggttgacatcatgcgcgccatctcgcaccaattttggttctcaaaaacttcttatgggcaatctgcttagcaattatactaagatacatgaaagaaattctccagccaagtttcaaactttgaagataagtctacaagaaatggcactcgggcaccaagaagccctattggcgcccaggttgacatctagttgatctaggtgcatcatggctagggtttaggtttctagggacatccttgaaccccaaatcctcaaatccatcaaggaacaatgctaggacatgatatttcatcaactccaaagtgttctatcatcttattctatataaaatgatcctactgccttagttgtcttgacacaaccgatgaggataataccactaatattcctagacagaaagtcacggtaccttgtcgtagtgggagcattttaaggaactcatcttgttataacttggaagacacttgtgataaaaatccattattagtataaacaagtaattgatagtcagaataaggaactaagaagtaaagccaacagaattattgttgtgtaccaaaagtagtacgatttatatttatcaactcacaagcgcgcgaatctttattgtagtgtggagattatgaagaatgaggtcgaacccatgtgaattgcgtgagatcgaagaaaatacttatttaatctaagttatcacaactctaacttaggtccgaaaattgtgaggtttttggtaataaaataaagtaattttaaacggtaaaaatgacagttacagatatttttgtgtgatatttggggatattattaagggttcaaaatccacttaagtgtatataaaaatatttatgtttatattgattctcat

SEQ ID NO: 321674 - DNA, 547 bp, Cannabis indica
tatcaacacgtgacatttttgggagcaactaacagatctgttaaaataagaactaacagatttacaagaatctcgagcttggagactattgccgttatttttcgaaatttagaacttatttgtatcaaagtagattttttgggacttttgccacaatttacctaattaattataatatatgtgtaggttataaaaaaaatataatatatggcaaagcaaaaaagaagtcttatgtttaataggggtgtttattgaatcacatctaatgaatttagacctaacctaacgaattcaatccaactacttattagatgttaaattttttcatctgatctaatcgaatcgaattgattcattcgatccaatccaattaaatggatgtattggattgaatcagttctaaccattagatgtattagctgattttttattggattagattggatccatccaatccattttagctaccattttaagttgatttcattaaaaattaaaatatatatataaaaaaaatataatttaaaacctaataatccaacataca

SEQ ID NO: 321675 - DNA, 1790 bp, Cannabis indica
ttttttgggggttttttttttttgaattttcccccttgcggcattctaaggggcttcctatagtgaaccatgttacatgttaccttgtatacatttttatgagtttccacaagactgaagtactcaatgtatttaggatcgtactccttcttggatttctttgaagcctctccttgtttcgaatcttttcctcctctcttattttgggagttactcaggttttgctctggtgcctacactttttattatctaggagtcatcacactacacccagtctgagttgcttcgtacccaaagagatgggtttatgttgatgcgggcatggacacagaaggtccgtagatcataggggcatactgtgttcctagaacgggagcagacaaagtaatttcgagaactgaggttaccaaggttggtgccagagggaccccaaatgcctgctagtaagcatcttctaaactaatgaagccttgtacctttgccataaattcaaagagggttttggctctctttctttccatttctccccatatcagggagccagctgtgagcccaaattggaaggctacaagcttcatatcatcaattaccttagttttggcatccgcttccatcattctctaaatgaagcttcttaggatttcccttacttgttgcttgatattggtgatggaccccatctccaagtcatacactcggaccgctatgaacggattccagactatcgattgtaaatccttttaggatttagccttttccaccagtcttttacaaacctggtgaaggtcaatgagaagcacaagcatttagcatcatcgctcacactggccacctacatcatcttattgtacttggctaagtgagtcttgggatacgagcgtctatcgtacaactcaatttgtggcatttcaaagttctctgggggaagcttccatgatcctcttgatgcaaggtttcaggtcttcatcgttcgaatcgatgagggcctccccttatttttggactaactttattaaggccactattttctcttctaatcgttttgtgtcactgtttgggagatcctttccacagaccttgttttttaagtggtttctgagttcattaccatgtgacctcgcattctcactcttagctttttcatattttgcgtctaaatgccttctgaggtccagggtggaccaaatattatcagagtactattcttctgccccatcatcctagtttatcgaatcactagggcagtcattccttcccttaagtttgggtacattcgtactagtccccttcggtgccacaggaactttctgggtcgaaggaagtccaagcccaaaggcgttagctatcttctatacttgaaaggccatatcaacctaatttgcatttttgaggacgctcaggggcacaagagttttttggatcacccacttttgcttttcccttgtcctacaaaggagcagaggttctaacgccagtggggttctccttggtgtttcttccaacatattccatcgaaggatcatcattagaatctccttcgtctaaatctctgagcttactttggaggtagtccaacatttttttccatctttcgagagaatctttcctaacgagccgacttttgttaagtttcaaacaactccttggaaactcttgttacataaggatcgtgctcgcaacagtgtccgtcttcataaaacccattttgacgcaaccctcatcatcaacttcttgctcttcatggttcttaatatcttggtcattgtccaacatggtcacactattgttta

SEQ ID NO: 321676 - DNA, 850 bp, Cannabis indica
tccggttcagtgcaggaatcacttaaaaattcgtctcaaccaattcaactccaatccaatcaaaactttccagacatgtgctatacaccctagagaaatattcaaggccacaaaacatacacccaaccgcagaaacaagacttaccattaatgagccaagcttgagtttaaaactccaaagcttgctcaacaacaaaacagctcctaaaatcacttccaagcaactcaaacaaacataaaataattgcagaaacaatctttaaataacaatagcaacaacagcaacgaaaacttcaaagcatgcaaaaactttcatttcttacaacttaaggaaactaacaagagagtttcacaaggattaccttagcttggattatacttagaactgttgctaaacactgaattaaggaagcaaaatcaagaaccctagctgcacaagggtggccgaaagagagacagagagcttgagagaaaaaatgagattttctagcttttctaattttgtatcaaaatgagtaaaagaatggatttcttattttattaaattgcttcagccaaactaagcaataaaatcagatttaaaactaaatattaaaccttcactaaagacaaaactcaataggccagaaagaccataatgcccttgcctatgctaaagagtcatacaatgcacttagggtattttgggaaaactctaaattcccgacaaacctcgacattcccaatgtctaacaataccgccccgctatactaaaataccaaagatgtgattctactgagccatacactacgttccaatgttgacgggcacaaaacatgcaaaaaaaatgaaatttctatgtatgacata

SEQ ID NO: 321677 - DNA, 922 bp, Cannabis indica
ttttctttttaaatttatttacgtccccctcactttaaattctgggtccgccactgcatgacatgcatatactacaagttcgtgtatgaaaaatgtacatatgtaagtatattatatgacattaatgttgttgtacaacctaattattataagtatctttaattattattattatatatacatgggagaataatcacctggtagtgtaaaagaaatataaaaatataaataggtagcttagaatattattattaattagcaaatgccatactttagccaatgtggtttgaaatttgtttttggagaaggcaatgtatggtggctcatactttattagctaattataacaaatgacaaaatataccttatattttttaaagtgataaaaataggactttgagcttaattttcaacaattttattatttaatataactaactttaaaataatttttaacacgaacaggtataaaaaatgtaaccaattttgtcataacatctttagattatattattattaagtttttttttttgacaaaaagtcctatttgtacgattttagaaaatacaaggtctattttttcatttaacaaaatagatcgtccaattaattacttttgtaaaacacatatggtttgaaatggtatttactcaaaaaagacaaaaaaaaaaattagtaaattgttaatcatgagatgttagctaaaaacgtgattctttactatgttattttctaattattactcttacccctaatgagatacatatggggataaacacacaattcatttattagggccttgttcggtaatcattttaaaaatgattttctgtttttttaatcaaaaattcggtaatttaaaaaaaaaaaaatacgttcggcaaaatatttgtttttattttttaatttaaaatcaaattta

SEQ ID NO: 321678 - DNA, 994 bp, Cannabis indica
tgcaccattaattcatcaaccaccataggagatacacctgattgagagtttgcttctgctcttctgacgtccatacacatatcatcatcactttttcgcttcaatccaacaaaaacatagacaagagttggagctttagtcgattgagttgcttgtgacggactaggaggataactactagtactcaacataggtggtgttgatttatatcgtttccaagtcttcttatcttgggttttgacaatgcactcataagtcttctttagtagtttaccaacttccaattctgattgtccaatggccttttccttctcaaaaatttttattctatcaggcaccaatggcttagttactagatcaggagattcaaactatctttccaccacaatttggagagtggtggaaatcaaatttacctccactgcattggtaacttgcggttgtggggaattcacagctgctggcattgacaaatcagtaatgttagtttggattgaaggaaactcctttggtatgacattagctttcgagttagccaatgtattttcctaacacagttcctcatccctctccctgccttcaaatactaagcattaaaaattttccgtatatgttctttgtgctagttcgacgcattgtacagtatgggtgcccccaagtgaccatgcaaacaagtctctttgtcactttttattgaccaagtttcacaaactttgcctaggttctgtcttgtgagggtaccatagtacgcatgtggtactaaaagaaaaactttaaaaagttaatctgtgagctagtggttcatagacacaataaacagaatataaatatttttattattcattaattggtctctgttgctgtgcaacttacataaattgaatctacaagcctatattacacaaaattagcttctagatgtcaagtggctacccctgcttggctagtaaagcagagaccactattgaagaacagtgggagaccatgcccaaaa

SEQ ID NO: 321679 - DNA, 1922 bp, Cannabis indica
gggacacaaacggtaagacaaaagatggttttttcactagtgtctgtgtcccctgtgaatggtactaaaatgaaccattaatacttgcatcccaaccaaaattgatatattacattcccgacctgaagaatggatttgattagaagcttgtcaatttttacacccctggcaatgtttgggatttcttagatgaggacgatgatgagaccaggactatacaagaaagaaactctttggaaatccagttagtcgttcaacttgcatagctagacgatgtcaaatatgttcgtgatgatgttgacccaattgaagtgaccaacagggaccgtgagcagcctaaccgtgaatatttagatggttccattgtttataatgataatgaagacactagtgatagtgatagtgataataaaaataatgtacctattaatgatgatgatgattatgatgacttctagactttaaaatattataatatttaaacccactattaattaaatcaaatacgcttttttctgttaatagtttgattaattaatttttcgtagcttgtatgtataaaatagttgatgcaactgcaagcaatagtaagaaaaagggagttaagggaaagtacaaggggaaaaatattgaacagaacttgccaagcagcctgccggtcagaaattaaaatttagatttcatatggggattggggccccagtagacactatggtaataagtttaacaattatatctagtttcttgttcgaaataccatatctttgaacaactttgagttcgaggacattgaggtacagtcattcagactatatgggacagaatagtggtaacattcaaatttttattgtaatagatcaaacaaaattattatacaaaaaaataaatatatatgattttaatgtttatttttttagtactaagtttgagttcccaactaacaatcctatgtttgaggattacattcttaaatcaatgtcaaaacggttacgtagactggagaacagatacgcaaaaggcatggaaggagatatttaaaagtatggagagggtagaagcgactaagatatcacgtcagatatggtgacaccggaggtgtgggcggaagctaatcgcatactggaaagacccaaaacagcatgtattaattgaaagttgtaaaatttatatccattaacttatgattttttctcattttgataacaataagttcttagttagccacattgtgagcgggacatgatattttcagcatagtaatttgtctaaaaatttatatttttcgaataatatctttctaattttttatattgtataaaaataggctggtccccagacaaaagagctttccaatgttgtggatacttttgcaaagtttcactgcaaggacaataaatggtgcgatgagcacacacaataattgcatgtaagtaattttatacttttaataaactcgttctatattttaatttctattcaactctaacagtttgttgaaatattttgtaggccaaaatagttgaggtttctgaaactcaaccagtgccaaccaatgtcccgcggtagtacaatgtcgaccccacctaattttctgcagatatgcctgttatgacacaggtgctgggagagtggtcacgccacttgagaggaatgggccagttgccgagggtaggtccctccaggcagtccattttcactcaagaggaatatgaggccctgaagcgaagggtggaagagcaggaagcacggtacgagtggcaacaacagataaagcagactcggaattaaatcatgagtgtgtttcagcaacaaatgatgtaattagtcgtgttgttctaggatttaatatgtccctgatgtcttcgattccaccaattccactatttcaacctcttggcactgggtcctcttcacagactgcc

SEQ ID NO: 321680 - DNA, 928 bp, Cannabis indica
cgacacaaaaagtttttgtgtcattttacaactgaagcaaaaagtcatttttgtagtagtgtgtagttattactactgaggtggctttaaaggtagtaaaagtcgatgagcaatggctagcggattggatgagacaattcctagaaagcctaagcgaggctgaagaactcactattagattcaaggagatagtgcagaatgagggcgctctaagagcgagaacctccgaaaattgtgagacacctttccatataattagggctcctactctaactgatttcgggattgtcgatcaatgttgatttgatccatatttcttaagttttagatcattgtaaatatccatacattaagtgtatagataaagtagattgcatcattaggggtcccaaccacttcgttttgcctatccaccatcatttcaaagttgatgtgtttagtaaaatttacttcccaggcttcttccaacatgaaaccaacttaggtcgcgaagacatttctctttttgctaaggggaaagtcaattattctaaaattaatggtttagatcttcttgatgtcttgtatgataatttgttgtaaagatcagatctttttatatggccttggttgatggatattttgtttgttttgtgcagatcaactacctatcttacagatggggctactgaaccagttcctgggcaacatcaaatatcggtccgacaaggtttgagaagttgccaagggaggcagagataaaggcaagaagagacaggcttcctggagcgaatatcaacaaccatcatctctagctttaaatctaggggcccctattaaggcttcaagcacaaaagttgtgtttgttgggttttgtgccctaaataaaactcatttcaatataatcagattcactagttaataaagatcagaaataacattttatgtt

SEQ ID NO: 321681 - DNA, 1139 bp, Cannabis indica
ttcttacacacaatcttcaagaaaatggtgatatcgatgttcaacaaattcgatcaagcgataatcttgcagacttattcacgaagtcattaccaacatcaacttttgagaagatggttcacaagattggaatgcgtcgattaaaggatctccatgaatgccaaaatgagggggagtaatttcatactgcactcttttttccttgaccgagttttgtcccactgggttttctcggcgaggtttttaatgaggcagttattatggacatccaagggggggtgttataaatagtattaattatgtggatgtccaaatcttttatttattaccattaatgtaatcttttatttaaatgactaattatgttataaatatcaaaaacgtattaaattgttatagaaataatgtatagatacataagttatataatttataatttattgagggacccaaaactcattctaagatgagtctattaatagatagtggtccctaataaatactagtgtgtatgtattctctcctttcccatcagagaaaatacttcaaagaaatagtatatgactgtattcataactttctgtgcaatctccaaaaataacttcaggttagtattcatattcttcttctttaatttagtaaggttctatagaaatataatttaggattttttatattaaaacactttcgaaatatgattagatttctgaatatttgtatttctcgagtgttttataaagtggtattagtaacactttttagtttttactaaatggattgaaaattttattatgtaatttgagaattaggaaaattagagtttttttgatcttttgatgcctgacagtgacactatatattattaattttttgcggattatacatattgtttttaaggtttatgatatgtactgtgaagttctatgcaattgtttctcaaaaaaaaaaaaaaagttactatgcagtttagtgttattttatatttatttatttattttgagattttggcttcagttgccgtgttcttcacagttgaacatggatatttgggtgtgcatttaggatttcaaaactaccttatgttttaaaaattaaattagtggggtccacctaagaatttttgattggttgagtgtttt

SEQ ID NO: 321682 - DNA, 991 bp, Cannabis indica
ttatttaccttttaaaaaaataaatatctcatttaaatttaaattatataaaataatatataaattagtaaatatataatttaaataaattaaattaaattaaaaaactaaaattcgggtatatatggagtcgattcctacgccatatatagcgtcagctttagctaggaatcgacgccatatatccccctatggcgtcagttcctatctaataactgacaccatagggtacccaatggtgtccgttgtattcaaccctacaacgttgtcctgatcagcatcgatagcaaatttcgtcaaaatcgacgctgaaaggcttaaaaaactgtcgctgaagatggtttttgtagtagtgccagtttgtaaaaaggtgacaaattatatcttttacctcatcttctttctttctttctttttgtttttctttttctttctctcctctgaataaatataaggcatgcatagttaagtttttacaaataatacatcttacaaaaaaaattacaaatagaagaacacttcattggaatgtacttgtgctattattgcaagattttatattttgatcatccgttttgcatgatgaatgatcccaattgatattaataagctaaggcaaagtttacgttgcgaattaaagttacccatataacatatgcattatgtccatattatacgtacataaacactggtagcccatatgcatgcatgtatataattaattagttatatatatacattatttttaccaacaattagtcctggatatattcttatcatatgggtacttgctaacaattcattatcatgtatactgtatacatatattactgtatagacatatgtgttcttaattagttaagaaaagaaagtagaagccagtgaggacttttgttcaataataaacatcacatgttaacatgttagggtggtgggacagcaaagttggtgcaatatacatacatatctttatatattatatgtatatata

SEQ ID NO: 321683 - DNA, 2488 bp, Cannabis indica
aaataaattttagggtttatttgttaattaagagactttatggagtctaattaataaataaaaattttatttgataattaatttaattattaaatatatagttttggtatttatgggaattaaagtgcaaaaagtggtatttgtgaaaaatagataaatgattgaaaaaaaaagtagaaaaaatttaactagtgatggaccaacataaggggtcggccacttaaccctattttggctctattttaatcattttattattccaaataattcaatcttaaccctagtagaattagtataaaaagaagagtaaggtctcactatccaaactaatgcttctaaagctttaaacctagtttttattctgatagacttcttcttcttcttttctctattctaattcaaaattcttagtcttcttgactatcaaaatttgagccttaatgattgagtgcatgcccactcatagcaagttagtcctcaatcatagtgtgtaagactgtaaagaatccaaacaactggaggagtgtcgggctcagatcttcgttatactttgctgcaaaaaggatacaagggttggagatttgagcggaaggagtcatttaattccgctgcaactaatgtaaggtttttcataccttttctgtgtttattttatatcattttagaagttcatgtttaggatgttaaaaacatacttgttagtaaatttaggccctggtaaaacatattccaatagtgaccaccatgcgagggtcggggtgtgatgctttgacataaccgtagcgcagcttcatgggatggaggtgattgtttcttgaatacctcttggggtcttatatagtgctttcttgtgttgtttttgctatccaaacttagtaaaaaaattaagtgtgtaattttcgttgttgcttcatgccattttgttgcttggaaccattgtcgttttggcctgactatttggaggctcgaggtgtactccaaaattgagcaatctcgagatataagggcctaataaatttacgaattccaattaaaaccgtcgtctatttttttaattactattataaatcgtcgggaaaaaagttacttattttttttagcaatggtcccccaaaaaaagcatttttaagaacgtcgcaaattctgacttttgtagtagtgacattatcaaactttgtcggtaggtatgacgacctgctatagaaatacactttgcgagtacaccaaccagcctaagtcgttgttgaaaagcaacttatattggtagtacttgttgtgaaaattgttatacgcaagtgtacgcagtcaaacaagtagtaaatgataagtaagatcgtctccacggggattgcaaacaaagtatgatgtataactaactaattacaacttaaagtaagaggaaataacataaaaatgattgagcaatgattcaaaattaaaatgaaagtaattaaacttgctaaaattaatgttattgctactagaaaattgcttgaaaaaaaatataatatggtaaaaagtggcttgaatagctaatcccttctagtcaggtttttttccagttgtacagcatcggttcaacattactccagcattttgcacagagataacataaattcctctaggcttgtgagaattttccaaaactcccaaattaaggtctaccacttagctcaatatattcctatatcaaacaagcaagtagaacactattcaaacattaattcctaagttatgcaaggtaaatgaattattcctattcaacttacaaagaaaaacctaaatctaggatttctcttgctccatccaagttaaactactagatctggcctttccagaacaagatctagcttagcaaattgttattcatggccaagaaataataatcaaataaaatgaaaagctcacttgaatagaagttcacagccattcaagccttaaaagtccagctcatattcaaatcaaaaactaaaatctaagctaaaaagttatctttcatgggtgttgcccattttttacagttcaacaaagtttttaatatctaagtacaagaaacaagaaaagaagaagagaaagaaaaattttaagagagggtaaaagaaaatcaaacacaaaagcttggtccccctctctttcctttctctgttgtactttccttctacaattacttctccttcaaaaaaatggcagctgctcacgttagagagaaggtggtgtgtacttagctatcttcctttttgttgttgggtagataaggtacaaattgacaccctaaaaatagaagtccaatccttttgcaccttggccaactaggtttagtcctcttccttcacaacatccaactggtctcatttttagtgacaaaaatgctcatgctgatgtggacaactaaatttcatgtttccacatctttccacgtcattgccagaatgctgaatttgttttagcattgtttcagcaatttggcccaatttcagcttttgttccc

SEQ ID NO: 321684 - DNA, 724 bp, Cannabis indica
tcccaaccaaacgcctccttaagtttcgactttcaaactcattattattataataatgtgaatttatttgttgttaaaaagagaaaagtgaatattattatattctttctcttattagttgaaattagttgtcatatcatataggatattcttttattatttatatatctttttttaatcaatatatcccctattttttgtgtggcaacaatattatatatcctttaatttattacatggaaaatgtataatgtaatttgttatctcttttattgttatgagtcatgattgtaccttagtgtacaagctctcattaagttaaatttaatgtaactcataatttattacaaactgtcaatttaatgtttggcaagaatactagtcctactagttttgttgggtcttttaaatagtatttttaataattattttgtaaagaaaatataaaagattttttttttatttggatccctaagagcgagcagtaaagcgggcttagcccactttaacttagagtgatcggctttgtttagtactttagcttacacaagaaaaaactacatgtatagttgtatacccactagttactttacatgttttaatttttatctttatttttgcaaaaaaaaaaaaatacctttatttttatattttttgaggtgtgcccacttttatagatgatatccccattatactccttaaataaataaaaattaggtgatag

SEQ ID NO: 321685 - DNA, 1260 bp, Cannabis indica
ctccatgatatagctccaccacctaatagatatatgtagcccgaagtggatctcctactatcttggcatcccgcaaagtaagagtcagaatatccaatgatctcaaagtgatctgacctcttatatgtgagcatgtactctcttgttctcttcaaatatctcataacctttttggctgctttccagtgatcaattccttgtaaggttgttcatccaatccaatccgcacttttttgatcaaacaatatccaatccgcacttagtgcggatttcatattttggatctgatccaatccgcataacagtttaaatccaatccaatctaatctgcaatagtgcggattggatcaattattttagtacggattgcattttaatatttcattaaaataaaaaaaaatagcagtaacacaactaaaatataacaaacaaacaaatatttcttaatctctaacaacacattacactctcataaatcaaaacagtaaaaaaaacacaaccatgttccatctattttgatacttctgaggcagtcatctctccatttccatctaccatacacaacaaaccaaatatatgtaagtatatactatatctatactcatctcagatgagaaaaaataaaacaatcattacaggaaaaaaaaaactaagccttacatatatattgcaacctcatcattttcgtatttgagctgccacaaacaaccaatcaacactattacaacctacaaaaggaaaattaaactttagaatttattcatggtcacatatacaaaaatttacctaattttgtgttcgatccaaacaatatagaaaacaataaaaaaactacttaatgataaagaagaaaaaaaaacaatagaataaaatttaaagctgatgagtccatatttatcttataaatatgattaattatttattaatattcttagattgattctttaaattattgattagtgtgattttaatttgttaggttattttaaatactattcatccatttagagtcttttggagggattttaacatattttggtggaaaataatgaaagtcggcgagctcgattatacaaggcagaacttaattgtaaattcggacgaacttaaatgtagaattggacttggagctcaatatgaaagttttagatctcgttcttagctttctagaacatcttgagtcgtccaattccgagtaatattgagagagttatggccaaaatactatcagtcgtcacaacaggaaatttctaaaaaaaa

SEQ ID NO: 321686 - DNA, 992 bp, Cannabis indica
cctacacagtctcagaatcatcccacttgaccttccccaagcagtgtgggattgcacagcttacccggtatttccccttacggatcacgggactactgactgtcacaataagttggatttaccgttagtcatatttttgttgagaacattcttgacccagttataggatcgtgattaggtatatgggcgccttgttacggtctggttatatgtttacgtttatattatgcttttcttactgagtctatagactcgtagttattatgtacatgtgctagaactaaaccggaatgagtctagagttgaatgaagattgtacatatgaagacggttagacctagagtgttcaggatcttcaggacaatttaagctcactttttgatggtttttggatgacaaattttgtatataatatgatttgaatatagttgtaaacttttaacaagatcccgaaggaatataaattatatttatttattaaattttaagtttatttaagaaaattttaattaatcatgttttttcataaactctttgatgcaaaggagtgcacaataaatgagaaaatatgatagcatacctaaactaataaggcgttacataccactactgggatttgtcgactcaatccctacaccaactcaacatacacattagatcatcaaagtattaattaaccttagcattcaatcaaacaattaccaatcatgacatatacaattgctcacatacatattcgaattctaatcttttaaacccaaattgaattgaacaacttttgaagattcaatttacatacaaacagattagcatcaaccattaaaacatgaacaaacataacaattacaataaattaagaagataaacaataatgcagaaaagtaaaagagataaaacatagagattttctctcgaagttcaccctaaaacatagacttatgattagtggttaaaaatacacttatattaatttattttaaatgataaaataa

SEQ ID NO: 321687 - DNA, 918 bp, Cannabis indica
cacacagatgctaagcccattagcaattgatcaccaacaatatgggctaccacagcaaagaactatccaatcaacccaagttttaataaaaccaataaaacttaatgtaagcccaaataaaaagtctaacattgaattattatatagatgaatcaaattatgtggtctattttgaaataaaatatattatttaagaacataattattatgatttgaatatatgaatactataaaaataatttttaatttaatgtgagactaaattaaaaatagtcaataatcagtaataacggttttgtcaattattaataaataggtaatggtcattcagttatagtatgatattttttacttttgaatccctatattacagttttaaaagattggactacaaatttgaaacatcttacttttttttttttcaaagtctacatattttaataatagattattattattattattattattattattgaatttatgaaattttttttagataaaatatcaacttcattgaataaattagcattctgaatacataagatataagagttcactaaaaatagaaattcaaacaactaattatcaaatccaataataagaaaaggcttaaatataatcaaaacataatcattgaaaagaaaaataaaacaacaagtataatattgatgaacaaatacgatcaatatcaaacatcatccttcttatgaaattgtaaatttaatggagaatgaaaaataagtacaaataaattatatttaaattcttcacttttactaataaatgattaatgtgtaaatattattttgaattgagtaatttgcggcataaatacctaagttttatgccgagtaggagataaatacctaagtcgtatttttggcggtaaaaataccttccgtcactagtgtggaa

SEQ ID NO: 321688 - DNA, 1136 bp, Cannabis indica
atatataatattagatatgctagtagttgattatcttcatatatattattatagtaaacattgatacattgtgattgtctgatcaaaatataatgtacttttatatatatattaccaatactcaatataaacatgaacaataatgagccatctaccaaaacttaaataatgaaataataaaatcgtgtcaatacgtaggcacaaataggagctattgaattagtcaaactaattaaacaaaacaatcgtgtaacatgatgtacgtataaatattaagaagaagaaagaaaagaaaaaaaaaataacaaatagcgtgttttggtggctttctcattaaacaaacaaactaccaatttggttactactattacataactaggaaatatctaatagaaaatataattttcaattttgtgtttagcctagttattctatctattttgttaaataataatttgattccataattttaaatatatatatctaataacactttgaaatctattaataatatagttaagtatactactcagtattatcttagttttttattgttcgttttctttctctctcagcctactttccttctgacgacgaatagtggggtctttaaaggccaaccattaacaatgaaataaaaatcaatgcaataattgagtacattcatctatttgtgtaggttgttttcaaccgacccaaacttttaaaggtattagcatgtaaatcgcggatcatttttccagtttgttttcttttttgtttagatgtttcaaatattctatattatgtttttttaatgtatttatcaatttatattagagagtataattatctttttgttattattaattttcatgtttcaaatattctatattgtgcttttttaatgtatttatcaatttatattagagagtaaaattatccttatgttattatattttttttacaatctcatacgttctatacatggtaatatcaatattcaatatctatataactatttatctatatatataactaaagtttcaaagggtgacataacactctaaattagtttcattctaccctaatcattttctcattttttcacactttcttaagtaatattaaatatttaatttaatttgaaaaaaaaa

SEQ ID NO: 321689 - DNA, 884 bp, Cannabis indica
aaaaaaatattctttaaacgtaaaaatataaatattttttgggtacatttagggcgtttggttgcaaactagaatgataattgtaactgcaataagaataggaattgagtaagaattacaatagtcttatttgggtggcagatctacaaattatacatagtttgtcaaattagtgtatctttttttttctcggtaaattggtcctccaattttaattttttattattgttatcgtatttttttgctaaaatgttgtttcttcatcgtagtactgtaaatatatggattggattttttgacacgacactaaatcgacatgagcacgacccgacacgaaaaaatatgtgtttaggcacaacacgacataaataaatatgattttaagcatgacacgagacaatgttgtgaattgacacgacacgatacgacataaaagatataagcttaggcacaacaagcccgaaaacacaacactaaacacgaatagtcactcgaaagaatgacacattaaaaagtttgataagttgataatgataacaatgataaatatttatttatcaattaaaatgatagttgtttaccgagatttttttagaaaactaattatttaatattagagtcaaaagaaaatacaattaaaagatcgataaatgaaaaagacactcaagagtttttcacgtggttgtgacgttactaaccttaatccacgagtcagtattattatcaaataggctagcctaagggatcacaatgagtatgagtactctattctcttcttgattatgtaagttaagaatttacaaccctttgcatagaggattcaatatgtatttatgttgggttttatgccctaaataaaactctttacaatttgattagttatc

SEQ ID NO: 321690 - DNA, 737 bp, Cannabis indica
tttgatcgtgcgtagacgttttttaggggttggttatattcttgaaacactttggtcccaacgcccagtgtttttaacatttttccgttagtcttaattatctcttaatcaattcagggactacttcttggttttaccctttcgtccccagagctgtaatgctacttgacctcctgcttgggaaaaccactcgcttagagttagcttggagatagcttcctttgcagaaaggagcccttactttttcacacatcttcttcaggctttagttcttttacgaggttgagttctgggagtaatgcctgcgactgccttaggcttttaggcacttttcttactttagtccttatcagcatgacgtgttagccaattatgcaacctcatgaactaaatttctaggaaatccccagagattagttaagaaggaattcgggcaaatttttcttttcaagaattcttactgaatacacttcttatccctggatttgttcttaagtttagccgttgaggaaagaattcaagtatgtttccctggggaagacttggttgaacacttttcctgcttttagttgcatatgtacgctgtgttgggttttatgccctaaataaaactcatttcaatacaaaaggtgttgggctttgcaaaattacaaaaggtgttgggctttgcaaaattgcaaagcccaaggcccaatccttttgtatctgattttctcaaaaatgccaatttcctaatt

SEQ ID NO: 321691 - DNA, 1307 bp, Cannabis indica
tctgtcatgccacttttttgtcctttctttgtagatcttggtgtttttataggcctcgttgcgaaattagtccatctcatttagttgcaataacctcttttctcctgctgctaccaagtccatattcaaagttttcatggtccaaaatgtcttgtgctctaattccactaaaagatgacaagtatttccatacaccaacctatatggtaacataccaataggtgttttaaatgttgtcatgtaggcccatagtgcatcatctagcttctttgcccaatcttttcgtgagcgttgaacagttttctctataattaatttaatctctcggttggataattctgcttggccattactttgaggatgataagatagtgcagtcttgtgacaaaccccataccttgtagagcttcaaattgtttgttgcaaaaatatcttccttcatcactaatgattgctctaggagttccataccgagtgaaaatattattctaaagaaaatttagcactgttttgccgtcatttaagtgtgttcctgctgctactacccattttgacacataatccacagctagcaatatgtaagaattgttgtatgatgatgaaaagggtcccatgaagtcaataccccacacatcgaacagttcaacttccaatatgccagtcaaaggcatctcattccttcttgagatatttctagttctttgacaacggtcacatgcttggacaaattgatgagcatctttaaatagagtaggctagaaaaatctattttgtagtacttttgctgcagtttgatttccattaaagtgtcctctacattgtaagttatggcaatgatttaatatagagaacatctcctcttctggcacacatcttctgataatttgatcagcacaatacttatagaggataggctcttcccaatagtagtgtttgacttctgaatagaatttcttcaattattgccttatcaaatttggtggtgtaatgttggcggctaagaagttcacataatctgcaaaccaaggtactgtggaatctaagaaaaacagctgctcatcaggaaaatcttcatcaatctgaacctctcttgtattctaattttcttcaagctccaaccttgacagatgatctactaccaaattctctgtgcccttcttttcttttatttctaaatcaaattcttgtagaagaagaacccgtcgaattagtcttggttttgcatcctttttagtcatcaagtacttgattactgaatggtcagtgtacactatcactttatttccaatcaagtaaggtcagaattt

SEQ ID NO: 321692 - DNA, 1151 bp, Cannabis indica
ccagtagttctttattagcgagcgtttagccaattgatcctggtttgctttcagaaaatttatcagttgctattttagtttttcatctaaatttttcccaataaacacacatttagtaggattttctggatctataacaacttcttctagttccttgattgctttcaattggtttttttcgtcatgaattcaaagatctagatcttcttcttgcttctcacttctcctctatgaccaccattaactgatggttgacccttctattctgcagttctacacgatagcattcgcgagccaatagttgatcaccttgcactacaactacacctgccggtgtttgaaactttaaagataggtgtttgattgaactaactgcccctattccaatcagtgcagggcgacccatcagtatgttgtagactgatggtaggtcaacaactagaaaatcttgcatcaatgttgtggaaaatggtggctcgcctatggttaatgggagttcaataatgccttgactggcgacactatctctggtaaatctgcacaaattcaccatgcaaggttttaattttgcattttacgatcccatcttcctcaatgtgtccttgtaaaggatatttacggagcttttgttatccactaacaccctttttactcttttgttagcgagctgaattgtaatgacaagaggattgatgtgtggaaacctcgcgtgctttgcgtcttcctccgaaatacaattggaggttcttcagtcttaactttcttagataattccggagcaaaaactgatcgctcgtttttgatttcattgacatatctcttctgggcattactgctttctccagcgagatgcggccctcccaagatgaccaatatgtcctctccttctacaggaggaggttgtaatctttggttgcctgggttattgggaagatttggctagttttgtccattaccctgtcgtcttacgtactgttgaaaataaccgcgtgagataaggctctctgtcttgtctttcaactgacgacattcttctgttgaatgtcctatgtccttatgaaattggtaaaattttgttgaatctcttttgtgtctcgcatgtctcattggctcaggcttgagaaacgtaaccctgtgctcatttgcgagaa

SEQ ID NO: 321693 - DNA, 1880 bp, Cannabis indica
tgtgcgacctggttatgtattttttatattttggataaaagttgaaaaacgggattctagtgttggtaaatgggtatgtaaattataaagtttaatatttaatataaaagttttaattttacatgtttttcgagaaaaatctttgattggcaaagatagcactgtaattgaaaaagcattgtagcgtgccttaacattagggcattacacctatactgctataaaatcatgcctttcaccgtgaaaaacataggggccacctattaaagacttgtgaataaaattttcaaagatctcattggctgtaacatggaagtttatgtggaaaacatgttggtcaagtcaaaaaaggctaggggcatgtggaggatctaaatggatgcttcatgatcctccaagagtacaacatgaagctcaatccccatcaaatgtttgttcagggtaggcttaatcaaattccttggccttatagttaattccaagggaatagaagcaaactcggacaagattcaagcccttttggacatgaagtcgcccacaaaaataaaagaagtacaaagcctaacaagatgcattgtaacattaagtagattcgtgtcaaaatccatgaataaatgtgtccctttcttcaaaatactcagaggaaacaaaaaattttaatggacagaggagtgtgaaagagatttcctagagctaaagaaataattggcttgacctcctgtgctatcaaaactgctagacaatgaataactaggcatatattttgttgtcacaaattatgttgtgagtgcagtcctaattagagaagaagatggtatccaacatgtagcgtattacgtcagcaaaaggtttattgaggctgaaagtcaatacccactcatggagaggctgacaagagtaagaaagctaaggacgtacttccaagctcacccaatcaggctatacattgaccagctgttgcgaaaggtgttgtagaaacctgaagcatccagccgattactcgagtgggccatcaagcttagctaatttgagatcacgtacaaaccaggaatggccataaaaggccaagctcttgctgacttcctcaaaaaatgtataggcatatctcttgaaatctcttaagattcgggagaaaagcaagagccagagaagaaacaagagcaagagcacaaagatttagcctggaagttacatgttgacaaaagttgtattgagcacttgtttggtgcagggtattgcccttgttacaccttgggggcaatagctgcacgaggcaatcaagctcggtttcaaggcctcaaacaatgaagttgaataagaagatcctattgctggcctcaagctagcatacaaagtacaggctaaccacttagacatatacaacgattctcaactggtcgtaaatcaagttctaggcaagtatacagacctgggtgaaagaatgataacctatttgagaaaaatccaagacttaataagttggctcaagagctatactataaaacaaatccctagagaagagaatgcaatagttgatgcccttgcccgtcgagcaagcaaaacattaacaaataaggcaaacttggtgcctatagagttcctaaaagaacaaagcattgctattctagaaggggttaacatgttagatgacagtcctattgggctttatgccctaaataaaactctatttcaatgtaatctctatcttttaaatatcaataaagaaacagaagtattttcatcacttattgtgtcatttggttaatgttatcatttatatgtttgtttgatttataaattcatccaaatccttatcacatttatattcttgtttattttgttgacaacatagtgaaaagtaatcaagattatgtgattaa

SEQ ID NO: 321694 - DNA, 866 bp, Cannabis indica
aatataatattataaataacatatgtgagttaattttcttacgaattaattttaaaatataacaccatatcataaactcactttattatactttctcgagcattgttcttctaacaagtgtttattatccactaaaattttccttttattatcctattatatatatgtggtcaaattatattagtatacgtatcctaatcactccctccaattactttttgtttagtatttctttaaaatagaagaaaaactaatccaatacttatattcaacatgaccccatttttagtcatctaatttataattaattgaaagtcaaagataaggtggagattaagaagactagatcactcctctttcaccatcttttgttcaagaaaaaaaaaaaagagcaaaaaaattaataattaataacaaaagaaaaagtacaaaacttagggcatatatataaaaatagagtaccattttgaatcctgtgtctaaacttagggcatgtttgatagacaagataatatgttgtaaggatagaggcaaaacagatgaaaattgaaaaattaagacaaatttcgagaaatataatataatttatttttaacaaaaaaaaaaaagagaggctagggaaaggccgccctagtatgcactcgccttaatccttccaagtttaggattattttctcgagttttttgtttaggtgtttacaaaagattaaaagttgcttgaatataagattttgattaaatagtataggaatcaaagacaaaactcaaagaataatttttttttcatccatattattctaatcaagatttataattaagtatcaagaaatctccattaaaataattttaaaaaaaaaaaaaccaat

SEQ ID NO: 321695 - DNA, 1124 bp, Cannabis indica
aatctgatagcattttttatatacaatattattagcgacggactattctgctggtaataataggatttcgctgctaataataaaattgtcaaatttcttattattagcggcgggtttttgccgctaataataaaaaaagttcgctgctaaagttttgaaattatttgagtgggaaatttctcgcactttttttattctagtattagcggcggacccccaccactaatagtacatgggtccgccgctaatacattttcatacaaaaaataaataaataaataacatttaatagctgaagtccaccggtattagtcctattagtagcggcggatttgctccgctgctaataaccaaaattcttgtagtgtcaagtcttccaaaaacattttggggagaagctttgatgatagcaacctatttgataaatagaagtccttcaacagctatcaacctcatgacacctgagcataaatggacaggtaaacctcctgctttatctaatttgagagtatttggttgcatgactaatgtacaccaaagtgagggtaagctagaacctagatcaataaaaaagtatttctacgttatcctcaaggtgttaaaggttatagaatttagcttaacaatgaaagaggtttcaaaaccataaacagtagggatgtaatatttaaagaagatgtatttccttgcttgaaaactactaaccatgacaatgcaggaaataaatctaaccctgcaggtagtattgaaaactagatacaaatcaatgcaggacaaatgggagaaattggaaatgatcaaggtactgatcaagtggaaattgcagatactgaggaataaattggaaatatagatcaggtggagcttgaccaggaggatgtaacagatgcacaagactatcaactggtcagagatagagataagagggtttcaaaacctacacagagatatggattctctgcttttacagatatgttggcatatgcttatctcacagcaacataacttgtaaagactcagccaaagacctattcagaagctatttcaagtaaagaagcaaagtattggaacaaggctatggataatgagatgggatcattgagaaagaacaagacttggatagt

SEQ ID NO: 321696 - DNA, 820 bp, Cannabis indica
ttattaccagaacaaacccaagcgttaactatctcccttctgcacgaagactcccaagaccatgcctcaaagaatctaaaaggaatgaaaccttttaccgcaaacagatgagtatcaagaatgatcggtgcatgatctgagatggaaattgtcatattccgtataccagcatgctcataagacaataaccaatcaggggaacaaactgctctatctaatctttccctgatgaggcctccattaaaccttttattttgccaagtgaatttgttcccaatgaaacgaagatcaataccacctgtgtttagcaaaaaattgttcaaccattttgtatctgtatgattcactaatctacccccagccttctcttcttggtttcgaacacaattcagatcacctaagaggacccacggcagagaacaatgggaacattcctcctccaaagacctccaaaacacctccttggtactaggatagggagtgccatataccgcaaaaagtttccagtgtttttgagtttgataatcccagatagtagcttcaaagaacccatcatcaaagtagtttaccaccaaatcattattaatattccacataagacacgaaccccctgccaaaccagaggcatccgcacaaacaaccttcgagaaacctaagaaccgagccatggactccatcttacttttattaacctttgtttccatcagaaaaatacaatccaccttgtatttcttcacccaagccgcaagagcttggggtgtcgggtctcttgcgaggccccgacaattccaagataggcacttcatggggcggttggggg

SEQ ID NO: 321697 - DNA, 848 bp, Cannabis indica
tttttgtaatttaggtagaactcaataaaaattaaccaacactagtgtgcttcaacttaactactcaatcgcaatttgaattcataaaatttagaatgctacgactcataatcccaacataacaaaatgaccaaggaggattaaatatcccatggcgagcaaataaagtcaaccctatagttggaaggaaaccaaaccacattccttaccattcattttaagtggtttgttctattattcttcttacaaaagcattagggttttcgttccttatttatcttagtacttttattttaggcaggaaaaagaaactcacaacctgtatagtactacttgaactgagtttaaaagaaaatatccgttttgattattgtggcctggaattattagttccgtagtgagtactcaacccatggccaaaagtaacctcagaattacttagtttggtagtgagtattcttcataagagctatcctatgaccccaagcatccataataagatagataatgaaaagtaacttgttaccaaatttattccaagtaagttatgaaatgtcttattttggactaggtccacgaacaagccttatgggtttgatttgtaaaaatgtcatttgaaaaaaattacaaactatgaaaatatacttggtaggaaggaccatctacccgcattctcgaactcaaaatctcaataattacttagttgcaaaaatgctactttttgtaatttgtaccattaactcataccaatttagaaaataagtaaaaatttattaagaaaatttacgcaatacacctaacaatagattttttttttttactaggacttttttatttacatttttact

SEQ ID NO: 321698 - DNA, 467 bp, Cannabis indica
ttttgggattttgaaaaaatgtctagtaagggtaagagatcagcaattgaaaacattcgcttagcaataaaatcgttttgttgcttggcgaattttttgaggttgattgctcattagttgttatttcgatttttgctcacttgacgtggcattacttacgtgaacaaaattagggtcatgtggcaatacaactcaccaacaagaaggtcaaattaacatcttagcaaacggggaccctgacactcaaacaggagatcaagggacataccagcttccccaaagaagttagctgaccactcctggtcggtcctatgaccggacagcttctaaacaacagcaaggccgaccagcctgctccttattgttgtctggccggcaagggaaaggtctggcagaattttctatacaattctatccgtggactgtgagttgggataccaattgggccctaacatcccaataaaata

SEQ ID NO: 321699 - DNA, 1043 bp, Cannabis indica
gagataaaccgaatgaaagaatgtagatcgtcgatgaacagttctccaaatccacgagcaagagcaacagcaagagcaagagagagagagtgaagctttctctgttttaaattctgaaaaatgaaaacgatttatgtacggactatatctatatctatatatatatgaatgaatgaataaaaggcggtgaaattgaaaatgaaagggaagaaagttgaagttggctcaaccgatattttgggtgtggccagaaagatttgcagaaaactctctccactcacagcccaacgccactctctactacaaactatatctatacctatctctatatataacctcccgttacaatctcttagtcaacttctatgctcgaaaacacatgtcagaatatttttttttaaatttttttcacgggagtattcgttatgcttataacatcttctccgtaaatttttgaaatatttagataatttacagtaacaaaaataaattcggcttgtgatttcggacgtaaaaattgtaataggacattgtaattagcatttctgctctatttatataatgctcttcatgtattttatattatatacaccattaatattaataaattgaagggtcgttttataattggttagtagtcgatagtgactaatatattttaaatgtattacaatatattaaattatatgagacccgaggtgagtatgtgaaaaaccgctaatcactcttaacgtagtgtaatttgtattgtgttgatattatattagagagagttattattagagaggaaagaaagagaacatttttagccatgcaaaaccgaaaaatgacattgttttggaaaaataaatgaattacagaaaatgacacgtggcattaatgtattcgtggtgcattaatatggtagtgattttgttttgtgattggttggtggtgtagcagcaatgaaggtgaaacgcatgttattatttatttttatatataaaaatagttatatatatctttatatattaaaagtgcctatctaacggcatttcttggtt

SEQ ID NO: 321700 - DNA, 833 bp, Cannabis indica
tgtgtgacccttagattattgcttaatgtgaattatttgttgtactatctaagagatgcagtaattgacatgcaatttaggacctttatgatctgaaaagaatttaggttaatttataatctgtcatcctataggaggaagaagaatagttaattagtattaacaattggataatcaaagcaattgaaatcatatccctaatttcacatccattgttaaatctctttttatttgcatattttgttatttaatgttttcttagattaattaattttaaaatccatttattcgatcagtaaatagaattaggaatttaattgtttggtaattaactatagtccttgtgggatcgacctcactcttgtgagtccattacttgtgaacgatacgtatacttgcgtgttgaaaatccacaacacatgcccaagcatgaaattcctccgccaaaaaagataaaaaattatccctagaattctactagccggagtgatgatgtggatgaagttcatccaatatcagatgatagaagttgaagtctctcaacaaatgatctccgggcatgattgaatgccaagagggagaaagctagaaacgagaaagcccgacctcgtggatatgacttgagaaatcacatcaatgactgaattcgtgaaatagaatatcacgacacaactactcagtgtctggagcataagattgaagagctgacaaaactcacggagagcatctcccataagcaaaatggaactgtgtttgagttggaagatgaggccacgaaaccatgtatgataagaatcattgaagcacagttgtcggaacactttagaatgcca

SEQ ID NO: 321701 - DNA, 1235 bp, Cannabis indica
agggcacaaaacccaacaccaggctgctggttgccagagtctggctgctcccgccaccagatctgtgtggcaagacttatccacctttaggaaggggaggtctgacctggttcctacagaacttggttggactgtttgtctgtaaaccatccctgatctgttgactagtctcccttagagaggatctctgatcagattctgacctctcccgttagttctttcattggagaggatctctgttgtggcagtctagctccacctgatgagattgaaggatgtactcctggtcatccatccatctcagaaatttgtatctctgttgtgcaaattcattgcagccaacaacgcattattcttcagtttggccaacttagtagacaacctctctaagtttggccaatttgaaatcttctcccaaatccaagtgaggttcgccaatgggttgctcgccaatttctgaccctatttccctagcatagtatcggggaccaaagtcaattgtggtgcccaggggtggctccatgttggccatatcctcagtacaaggtgtcaatggcagatctaccctaggcagcagaggctggtcattgggatcatctgggttggtagtgtcaacttgaccatttgtattggtcaagtttgttttgcttgtcggtttggtagggttggccacatctgtcaaattttcggagattctagtggtggctggaacacgaacattaggtttgcagtcatagggtcttgagggagacccgatgaggaggagttgtatccgaagttctccttgttacaataattgtgatagatcagatcaattgataacgatctcaatgaaagcaccaaattattgacctgagatttgtccaaccgacagcggagttttttatataactgatatcaccacgtgtaaacaataagaacaagttgataaagagacacactaattttatagagttttggcctccttggttagcatgtaatgacctactccctttttggttgtattgataccagagataatactactcagatcacaagttttgtggattctaaagtggctctcttaaaattctaataatgagaatcaagaagcaaatgttaagtaagagagatgagagagacttagtctcttctacaatgcctgggcatgtagaagagagagagagatatacatatatatatatgtatagagagagagagagagagagagagagagagagagagtgagtacttag

SEQ ID NO: 321702 - DNA, 976 bp, Cannabis indica
tcttatagcttttcttaaatattattattatattggttgccgaaaacctcggtcaacacctggtatcctaagtgtgtggagattaaaaccttcgggtgttcttgagcaagcactggtaattttagtcacaatttcaagcatcaaatacaagctcaaagtttcaaataagaatcagaataacataattaaaagagatggagagtattaccacgatttcctcaaacttctagcaaggattcacaccaaaaccactcaaattcaagcttcaaattccaaaattggtcgaaattcaaaaaaaatgagagagagagagagagagagggtcggtcaaagccaaaaaaaaccaaaaaaaatgggttttcatttttcaaagttaatttttgttgaaaatgaaataaatggtcaaatgaccaaaatacccctaagcaattataagcgtttcaatacacttaagggtaaattagtcgttcaagttacacacacaccacattatttttagatttctcatatatcaccatatcacaacaattaaatcccgaaaatgcattttgggtctcgaattcgattcggcccaaaatacctagttgtgactatactgcgccaacttgtcagaaaatacctgcagatagatagaacaaatatactatataataatataatccacaagcacaatatatcatagaaattataattttacccttctcgggtcaaaattatgaaaatacccctggtacaccaacagagccttaaaatacaatttatcaatatagtttcatatattaaattatagggtaaataccattttggaccctgtgttttgtaaaaattacagattggaccctctattttgttaaatgacaaaatagaccctgtattttctaaaatggtaaaaataggaccttaagcttaacttttaacaactttttttaatacaaccaacttaaagacaattcctaataataacagatacaaaaaa

SEQ ID NO: 321703 - DNA, 1323 bp, Cannabis indica
ataattacgtaaacataaaatatcacaaattctaatatttaaagtagtccaacattaattcaataacaatacataatagtccaagacatcacaatacaaataaactaaaaattcatttttaacctcggtaggtgcaagtgcttctgttgtgcccattggcaccgcacttgctacaatttcgtgatttaataatcctttcactgttacaagcagttcagttgttcttaattcttccaaccttttgcttcttgggtcgccctactgcttgcttctcaacatgcactccaactgtcatgttctttatgttatcaggcaattgccaatcatcctcgtcaccaactgacataattgttccttcatacgtcctcctctaatattctgtcgtgtaatatggcgagcatagtgtgtacgcgttaatacttcgctcctgagatgcagcacatgcatgagaacaaggaaacttcatgcactggaacaagccgcaagtgcaagtatgaactgcaagtccactacgccaccggtcataatttttattttatatgattaatatcaatgttaattacatataacagataaatattttatacatatgtacatattattcataaaacattgaaaagtattgggcttaaactttcactcatatttattttttttaattataatttctaaaatttttaaaacccgcgattctctagtataataataaggtaattcacaaaaagtgtcttgagaaataaaattccaataaaaattctataaaacactccttaaaataggcgtaccgctacatttctatatgtttcgatactaaaaagaatttttacgcctaatttatttttcatgatcatatacattttagttatttaagatatcttttaaaattttaaaaaattcaaaaaatatttaactcgcccaaaataaaattcaaaacaacttgttacatgcgtaatttctttaattttatacgtgtgaaataaaatatttaaacattgtttactaaattaaaaactgtttcgaatctctcaaaatattatatatagaatatcttaaaacaaatataatatatatgactataaaaagaattagttagtgtttagttggaagtgatgaaataaaatagaatgaaaaagaaacaattttcattccattcctttgattgattgcattttaaagtattggcaatacattccaatggaacgccctttccgccatttggtaaaatgactattctattttaaaaagaaaagaaaaatcattccaatataacaagaggaaaaatttaatgatttttttaaaattttttttatgcatttcaaattt

SEQ ID NO: 321704 - DNA, 1130 bp, Cannabis indica
ctatggatttttgtgtacacatttttaggaattgagattattaggggtttaatatcatcatgatttttcttaattattgtattgtgtaatgtgtaaatcgatcaatatgggtagtttactctttcccacttgtaaatttttatattagaaagaaatatatttataaatgttcttaattattgttattaagaagttttaatttaatttatttatctttatgtagtgggagtgagagtgggagccagttaatgcaaaattggtaataataagtgaataagagaataaattaacaaagctttaattatgcttaaaccaacaaaattaagagatgtgatatattaattggttccttgatgattggagtcaaagctatgtatgtatatgagtatatattctcttatatttggtttttttttttttttttaatttttaatttattttattttattttttatttatttattttatttttattttggagatagcaccatggccgttggttgaagttcaaaggtttttaccaacaaattatgatcattgttattttatgataaagtgttgtcctataattagttaacgattttttataatatttattaaaatcaaataagtgaaacacgctattaaattgtatcaataacaagattacatattacaaaagtattaaatactatactgtcatttactatttatctatttaatgattatattatgtacacataaaattacaatgtaacatttgaaatggatagaatgatacactcttatctgtttctgtatctagaaaataaatttaatctgatttttttatgatatatacgttgcagttatttaagacatcttgttaaattttaagaaatttgacaaaatttaacacgttgaaaatagggttcaaataatctatttcacgagtgacttttttattttatatgtgtgtgaaatagacgatttgaatatttaattttatattgtaataaaattatgaaaaattaccccatatacgttttttttaaatttacggtttgagttgcactgtagtttctccaatagtttctatgtagattacaatatgaattttgattacaatttaggttgatccgttatggggtttctatatagaattctgtaaa

SEQ ID NO: 321705 - DNA, 2585 bp, Cannabis indica
attagttaagctagctagataaatttattaatttttttatttgttattatttgaattaatttttttgttcatcaaaactaaagaatccaataatttattataaataaattcttggtctatatataaggtcatttatgtattgtatgtttgtctagcttttggtgtttttattattttcttttttgtataaaaaaaaaaaggcaaagtgtacattttattgattttttttttttttgtcaaacagaaaaatattacctttaatgattacttttctgatgctgcccagtatttaataatataaattttcaataagaaaacgcttatataataaacttattaacattgtttatttaagagtttgaatgaaatggcttgaaatgccttgagagtttgatatacttctaatgggtgttactcgtgaatgagtaatattagaaattttttatttattgttacatttactcgttaacgagtaataccaagtattccaattaggtttatttatttttttttttgacaaaaggatattcattaaacgaaaaaactacaagagtttaggcaagtccgcctttataaaggcagacgcacaagagggaaattctcccaaccaaaacttgttacaatttgaagaaagagccaatttggctaaagaatgggcagccttattgttttgcctccctatatgggtcacagatttgcaatgtgagaaaataggggagtccttgatttcctctagtaaagcgctccaatctgttttgactttcttgttaccattcagaacctccgccacacgaagacaatcggtgttgattatgaacggcacggcccctgtttttaccgccagatgtatacccattcggacagctaaagttttagctgcttcaactgaaaaatcgccaatctgatgatgaatttctgctgcaataacagccccttcagagttccttatcaaagcacctaacccgattctcagctccgaatgttgtagacttgcatcactattgatgcagtagtagtccttaggaggcgcttcccagccgagaggagtagaatgactggttgtattgttggtgtccgtggtgtgattgttagacagcatgaatttggcttccaattgggcccatccgatccacttctcagttgtggggagatgcaaattgagccttttcttattccttctattccaaataagccaagacataatgaggaaaaaaagaaagtcatccttagatacctgttgctgaatgtgaattagcatgtctaaagctttgtttcggttgtgttttaggattggccacatcgtgaaattccgccaaatgtgtttagcagaggtgcaataccaaagactgtgctctatggtctcttcttccttgttacaccagcagcagaggggattaacttccattcgccgggccctcaaagtcatgttaaccgggagccaaccattgcaaactctccaaatgaaatttctcaccttcgggggagcctcaaacttccatataccacgccaccatttcttaacttcattatcatttgacgtacctgctgttagttcattgttggtgcccactttatacccactactcacggtatagcagccatcgggggtgtagtgccaaatcaaatcatcactttgggttgtcgaacaaggggttattcctaaaatcattggaacatcatccggatgaaagcactcttttattctttgggtgttccaatgtccgtcttcgtctttgatggtgttgatcgtggtcccttggggaacatgagcaggagtacgaagagagaaggtggaagggcgagggagccacttatcctcatttatgcgaacgtctcttccggccataaccctccaacgaatacctttatcaataattttccttccccataagatacttctccacatataagacccgaacccaccaactttagcttccaagaagtttgaattagtatagtagcacgcctttagcactctagcgagcattgagtgagggttattgatgatcttccacccttgcttggctaatagagattggttgaacagctctaaattcttaaaacccattccccccttttcctttggcttgcaaagcttgttccaattcccccaatggattttttgtttagtatccgaagacccccaccaaaatcgagccatcattgcatggatatccttaattagctcctttggaaggcgaaaacaactcatgatgtatgttgggatagcttgaatgatggcttttaacaaaatttccctcccggcttgagaaataaatagctttccacccttgatattttgttcttattttggtacgaatgtcttcaaaaacttcttctttttcttcccaactgaggccggtatccctagatattttgtatggcagtccacaagcttcactcccaacattgcagcaagaaaaatgccatctccttgattgatctgtttacctacacacaattcagatttgtcaaaatttattctttgacccgaaagcaaagagtattcatccaatattgatttcaagctttgacaatctgaaggagttgcatctagaaatatgaaactgtcatccgcaaagaat

SEQ ID NO: 321706 - DNA, 802 bp, Cannabis indica
cttgatcactaagtttttgttgaaaataataatagtaataatggtggtcctatcatatgcctatgggaaaacattaaatgaattaggtatttgttaacattacttaaaagagaacgaactgatccttttttcttaaaaaaattattaaattagcagtgctttctgatcacacaatataaatatacatatctggagaaaaaaaaaagaacaaataataataataaaaagggaaagactagcttatttattgttaaaatcgaaccccaagcaaatacgaaataatgaatgtatttatataaattgaaaatatgttatttttatttaagaatgaaaattaacaaacaatttaattaatttaaaattattgtaaaattatttgaataaaatctagatatgttttatcagaaattgaacttaatagattaaaataatagtaaaaaaataaaaatggcacgatagttatacgttgtatcagtaattcttccatgtaaatttggcaacaatagcaccaacattccaacccaaacaaatacctgcactaaactgttaacttgaacaacattcacagacaaaacacatgaacaacataatgcaatatgacagaatcgaacaatggagaagacaacaagatttatcctggttccggtcctaaagatcaaggttgatccctggccatactccagctgagaaacaccatctttactttcattatatggagataagagagtagaacaaacactaatactagagtaacaatgctcttctgcactcgagaaacacaccagagaaacagtcacagttt

SEQ ID NO: 321707 - DNA, 1029 bp, Cannabis indica
tccaagttctgatcttgataatgatctactaaagacaggaatccaaggttagagatctgaatgaaatgagtcatattatcctgctgccattaatgtaaggttttctataactcttatgtgtttatttattgtttttaaaatttcatatttatgatgttagattataaaattataatcaacatacatgttagtaaatttagatcctggtaaaataagtttccaataaacattcccaacacgattcatctcggaattatgatactgtgatagtgtcttgcattttcttcactctcaacatttatggaaggacacaagaagtattacttaaaatatacttaggtgttaaaaaccctcttcagagtaaagcatattgagcagattgcattacgagaagaataggcataatcagcataactccttacagataatgataaagaacagttaagcaattatttacaattatcccatgtgatgtaaatataaaatgtggagaatgtccacgtttcacaaacagttacagagataagatctcaagggaataattgtcttcctaaaactcttataaatatagggacaaaacccaaggaacaaaagatgacctatttgagaaaatagagaattataccaaatattttcttgtattttgtatacaatttattaaatctcaaaataagatagactcgtggattatgaagagttaacttcaaaatcatgttaaaaaccctcttgccatttattattattattattattattaatattatttatttaattttagagttcatttattattaaaagacttatttatcggttaccgaaaatctaagtgaacacatagtatataaaaaaagtgaaggttgctttttggaatcaattttgagcatagcacgcatacacacacccaaatatatgtagtttctaagtattatataggaataattacataaatcactattttttgtaaaatatttacatttttacgttcaaagaatgttttttttttacatttttacggttttccaaaaaata

SEQ ID NO: 321708 - DNA, 920 bp, Cannabis indica
ttgtatgccttagaccagacacctgctgttgagtgggagtaattaatccaggagaagaacattggaagacaatcaagtaaatcttaagataaagaagaggaactatattaagtattcgacccttcaggaacatatatgagcttccaaactcacagactatccggatctaccatcccaagagtgacaactagccagctggaatctcttttcaggggagggctagttatcctgaagaccgaacccggagtggacataatagtcattcgagaactcccttctagacttgactatcattccacaaaactctttccgaaactggcaaccgcgagtgaaaacttttcagaaatagtgtttgtagagacttatttatttagaaaaactataccacaaacacgtatatatatttgtagctagaatgtatatatgttccactcctagtgtatacatataaatataagtataaatattatatatttataattgtaagagatgattaatgagcaagatgagagagcttatagtactcaataaactactaaccgaaatgaagaactaacgaattgtaaataatacaaaatagtatataaaaaaccgttgtaactttattggtacaagttgaagatgcatagcatattggtctttgaataccacacatgaccaggaacaagagcccaacaatatttcttcccaattattgcttgtaatttacatatatgctattcatttaatctacaaagtttttgttttgtattttcttggggataaactagccgaaaggtaaaagtagagctcaaactttgattagatatttcttgaaagccaagcaaaactcatcataacaccaagttttatgtttttgtcttcttaatatatatactaggtgattgttacgtgtcaagccacgtagtgttagttttatt

SEQ ID NO: 321709 - DNA, 1410 bp, Cannabis indica
atttgttaagttttaaattaaaattaaaattttaattattcacgtttttaataacctcgttgattagcaacgagctggacggtacgttaaaaatcacgctaacacgcctatgctagttagggtgttacaaccctcccatcggtgtccctctcatctccgtctcatacgttggaccaccaccacctcccgtccgtctccctctctctcagagttcgttataaatacatttatttattatatatatttattttgttattgtataaatttaatgtgttttaaagttatttattattgtaataaaattaattagttattttattttaatttaggtaaaattataaaactaatgcaggaaaaaataggaaaaaatacagatttttctctctttttacattctcgaaggtttaaaattgtcttgtcgcctataacgaggtataggcgacaattttaaatcgtgtcctatactataagcgacggctgttataggcgacggttttaaaccgtcgggaagtccacattagcgatagtttttaactgtcgcctattctgtccgtttttcgacagtcatataggcgacggttatagaaaccaacatgaatattttaaacgactgtttaaaaaggtcaggaaaaactatttttgtagtagtgtttgctaacttatgagaactgtggggaggtgttgtcgaaatttttataaaaatgaaataattttaagagcttaaattgcactatatgtatacttcaaacctaaatgagatagattctttacccttttaatgatggagtgaaaagacagattaagacacttgcacattttttgctttgtttgaaatttctttgtttatattatgtagaaatatgatgagcgacagtagttggataactgcaaaccgacggtctatacagtttcataggagtgtgacaagtttattggagttgcttgaatgcaaataaattctactggagttacttgatgcccttgcatgagatgtttgaatgtgaactttcagactcctgataatggggtacatttggttgtgcatgacattcatacttgcatcctaagaaaatatgatattttacattcctgacctgaagaatggagatgattggaagcttgtcaatgcttgcaacctgcgtaatgtgtgggatttcccagacgagaatgatgaagacacctcgactatacaagaaagaaactcttcggaaatccagctagctgtacaacttccacaactagatgacgttgactatgtctgtgatgatgtctctccaactgaagtgagaagatccctgattgagaaatgagcttaactgtggtgcgtttcgtaatacttttttatttcaaaagtgaaaatatttttgaaaaacatgttatatactgcttttacttttgaatttttgaaat

SEQ ID NO: 321710 - DNA, 1445 bp, Cannabis indica
tcaaactcaaaccaggaccccggatactatacccaaagccagacccacactcgggaaccaaaaccgaaacatgaaatggaactagacctggatcttggaacgggaccgggacctggacccgcacctgtaccagaacaggaccaaaccacggaccctaacggagaccgaaactcagacccgaacctcacctcggacccaaatccagaccagattccaaactaggacccaaacataacaagaataagtaccccgtgacttgaaactagaaccgaaacgagaagtcggatcgggaccccggaccaggacctcgaccctgacccaaaactgtaaccagaccagggctccgactcagacacaaacccaccccaggattgggtcccaaacttgaatccaaaccagaatcgtgactcaggacccgaacccacacctaaactcagacccgaacatggaataggactcgggacctagaataggaatcgagacctagaactgcactccagtgtcggtcttcgacctagaccgagacccagaccgggacctgggacatgaaccgagactagactaggacacgtgattgggatccaaatcttgttctgggatatgagaactggggcttggaaaagacccatagtccgtgtcttgatttgggagtcggacaaggacccaaagctggaccaggacctggatccagaccaagacatgggactcgaaactgaaactatagctagaacgtgaccaggaccctggaataggaccgagaccgtgaccaggacctagacctggaccggtacccagaactagaccataaccaatcccaaaaactcgagctcagaccaagtctcgaacttgttcccgtacccagacaaggaatgagacacgaactcgaaccctaacccaaatccagaactcgatcttgggcccagaccaagcccttgatcgagactgggatttagacctagacttggacatgaacccaaacccgaactgaatactgacccagacccagactgggatcgaaacacgggacgatgactcagacccagatgcagacccagacctaaacctggtacccgaactaagacctgaacccagcgcgggattcaaaaaagccatacccatcacacccaaacctagacttggacccagaccagaactcaaacccagatcaggatcagaacctagtactcagactcggaactgaactcgcactctgatcgggatcgaaacatgggactcagacccgcatctagacccagacccaggaccctaacccaaactcaaagcctgatctcgacctagatcgaaatccgagcttgaaccaaaactcggaccaagacatgaacaccgacccgaactcgaacccaaactcgaactctgaatcacaactggacctggaaccaaacttggactaggactaggacaaggacctaaactcgaacccgagc

SEQ ID NO: 321711 - DNA, 920 bp, Cannabis indica
tctattgataataaatcagattacattaaaaatgggttttatgtagggcataaaatcccaacatgtttcttccttgttaagttagaaagaagggtctagagaccttccctcccatcttttaaggcattaacatctctggtcagagcctcaacatccgcttcaagctgagcagtggatgacatgtcctgaatctccttctccaatacctcaactctcttattggtagccaaaagttgttattcacctctccccgctttgcacccttatcctcgacctctttattggctttctccacctccttctagaagttggtggtggcggttataattttcaaggtcgtggactttgctcgggagtaggtgtaggtcatcttcaagttaagctgcatgaagaaaagtaaaaaactacgtgggtaaaagaatgatataaaagctaaagtgaaagtatttactcggttagccttctttagtagcccgcccataagcagctccacagacatatattttcctccagccagttaattgttcacctcgaggagtaaccggtcctggtgaaattggagcatttccttgtccttcttagtttcaggattcagcatgatagaagtaactaaagatttaggaagtctggatccattcgtgcttccccatttggtgctcttggattttgagttcttcttggctggtgggtccacttccgacaacgcctcctcaaaaacctcaattggaggaacaactaaattcttctccttaagggtgctcgagactgtgtctttgggtggaacttcatccacctttgaccgtttggctggagatattcagccagagctgtcgcccgaccccttcttcaaaacttgcagctgttggaaattattttaccaggatctatttactatcatgtatgttggattaacaacctaa

SEQ ID NO: 321712 - DNA, 1079 bp, Cannabis indica
attcaatcataaaagaataattttcccacaactcaaattctactgattttgataccaagcatatcaaaattaaacactaatttagacacctaatatgtctaaattatactttatttaagacaccaagcatgtctcaaattattactcccacagtttcacattttattatcaagataccattttataccatgatttagaatataaatgacctctttgtctcaataatttctcttaaatttaatttctttcttgaaattattttcaccaaaattttacaccaaacatatgtcaaaattttacatatgcacatagctaaaattgatttagaatttggattcaaaatcaaataaataaattaacaatatctcaacaaattttgattaaatttgtggctcacacccccatttccaccataacgtgaaattttaaattcactttaaaattgttatcccaattttttcccacctgacgtgacatgtctacttggccaacattagtgccacgtggtagtaagatcaccaacaagaaggccaagtcacctactcagcactacaaccaacgaggagtttgaatactcaagcagaatgacgaagtgacaaaccggtcacctctaaggggctagctagcaaatcttggtcggccctatggccagcataggctggcctggtcctgaacatcctatggtcgaccagcatgcatcctgcaggtgcatggccggccaaacaatggcctggtaggatttttgtgcacagcttcacacgtggacagtaagccagattgcaaattgggccttaacaacccataaaaatagagggaacgtatctattttttaggggcattttagtcatttgaattttactaatttaatatgcaaataatagtttattttacctatttctaatggatttgaagggcctaagctctactatataaagagccttaatgaaaccataaaacctgaagtcattaagtgcaagtacaaaccctagctctatgtctagtaacctctttctctctctcacgtccagttactactaatacttgagaattgccaactctgattcttacattgtaacctt

SEQ ID NO: 321713 - DNA, 2847 bp, Cannabis indica
ggtttagcttctgtccacttggtgaagcagtctactgcgactagcaaattgtacccctccttttttcgtttgggagttgaccactcaggtctatcccctataatacgaagttccaaggagactggatcatcgtgagctcgttaggtggagctcttagaattttttagaatctctaacatttttcacattttttgacacagtccattgagtcctctatcattgttggctggaagtaccactgtcggagtatcttcttggataggctttgcccctagcatggtcgccacagaagccttcatgcacttctatcattaggcgttcaagttcggatttggtgacacacttcatgtacattacctatttaggattagatacctagcaacttttcttcttagcttgtttactttattgttgccttctagaaaggctccagttttgaggtaggatgcaataagtgtcatatatgttggagcatcatccaacatgttgacttcttctgggatggtaatgctggattcctctaggaacaatattagcacaaaattcgccttgtcgataatggtgctacttgctagatgggcaagtgcatctgttgtagtgctctgctctttgggatctacctgattgtgtagcctttgagctgacttagtaagtctttgatttttctcaagtaggccaccattttttcacatcgagttatgtattcaactacaaatttattcacaactagttgagaatcgataattatgttcaggtggtcagcctgtacttcatatgccaactttaggctggatattaggcttcatattcgaccacattatttaaggctttgaagctgaattttattgctccgtgcagttgctgtcgcgcaagtgttataagggcaatgcctgcaacaaacaattagtaagtgcagcttccgccaacacgtagtttccatgttagttcctcaagtttttgctgcatctattgctctcgcttcttctctggctcttaattttctcttgagtcttaagagatctcaagagtttagttggtgcactcagccacgaagcatgcaagggcccgaccctttatggcttttcttggttggtatgtgatctccaaatggccaatttcaatggcccatttgagtaaccagcctgatgcttttggttttcgtaaaacatcacataatggttgatcggtgtacacctttatggggtgtgcttggaagtagggccttagctttttagaaaccaagagtagactgtaagttagcctctaaatgagtggataccgacattcgacatcgataagccttttgttgatgtagtggtgttgtgtatcgtcttcttctcatgtgaggacaacactcacatcatactatttgactgctatgtacacgcctagctcttcattttctaggggtttagacaacacatgagttgagcaaattatttttttagctcctagaatgcgttttcacattcctctacccactcaatttttttttccctctaagaatgttgaagaagggtacacatttctctgtagacttacagataaatctgctgaatgcagcaatgcgacctatcgggtttcgtatgtaaagaccgctaagtttaaatttggaaattagtacataattagggtttaattatgaaaattatttattaatattaaatgaattcagaatgcattttatatgtcatatagtgaaatttcatatttttgcatgatcggtgcccgacaacattggaaagcggtgtatgcctcagtagaatcacatcttagtatttttgtatagcaggaccgtttatttagacattgggaatgtcgagattagtcgagatttataatttcccaaaatacctttagtaccctttttatgtcattttaatgtgagagggcaaaaaagtcatttttcccatatgtgctttgtcttttatggattttttaataaagctattaatctgattttttctaacttagtttggctgaaacaaaataaggaaaatcatttctttatctcattttattcaaaaatttaaaaagttaggaacatcactatttctctcaaactctctttctctctttcgaaaatcctaggggttgctagggtttgatcttttgttcctcaaattctgcaagttttcatgaattctaagtgtaatccaatctaaggtaaccattgtgcaactttcttgttagtttccttgagttttaagaaagaaaattgatgcatgcttatggttttgttgctacagctactgtatgtgtttattgttgttttgttaggcttaattgtgttcagatgaatggattagaaaaggttttagtggttgttagttgattttattcaagtttggagttttaaactcaaactttggttttaatggtgaaatgttgttagcttgctgatattggtgttgtggttaaattatgttttctgtagtttaattatggttttataaggtgatttgagctagttttgatagctatttagtaggatgagcaagctttgagtttatgaactcaaggttagctcatcaatggtagtttttgtatttgtgcatgatgaagctatgttttgttgctttagaaatgttcattggggtctaattagtaggtctggaaagtttgaattggattggggttgatttggtcgagatatgaatttttttgtgttacctgcactgaaccggaattccggttcagggaggcctgtaggaaccgaaattttggttagcttccaggaatttttcccagaaccggaattccggttggggaaccggtctaccagtcggggcaaatttgggaactttagtttttcccatttttttgttatttagggtatttccatgt

SEQ ID NO: 321714 - DNA, 644 bp, Cannabis indica
aatataaaaatatctgatcttataaataaaacatatataaatattgaagaatttagcaaatttaaaaatctgaccataatttaaaaataaaataatcaatttttaaatttaaacctcaaaatattaaaattaataataatctattaaataataaatataattaatttaaaaaatgatatttaagtttaaatatattaaaaataatattttattttaattttggtgtttgaaaattgaaaaaattcgaaactgggaaaaatcccacaaaaatcgaaaattgggtgaagctggaagctaggctgcacgtgtagcctcaggagactgcaaaaaatggccttacgcgagcggaatcgggttccaacactgtctggcgtgcggcaaaccccagcgcttgcagggtgttcatgggcgaggtgcagcgtctgggcgggccagtcgtgcctgaagcctggcgtgctgtgtctgaagacacaggattgtctgagcattccacgcgtgtgtgttgtgttgtccgagtgcctggtgcaatcgatgcacccactcgacagccatggcacccaattttcaaaaattcataactctttcaatttttatcggaatcgagttccgtaaaaaataaaattgcttaatttttcacaagaaat

SEQ ID NO: 321715 - DNA, 852 bp, Cannabis indica
ggcaaaacatctttaaatcgatttgccaagaccttagaaatgatcttataaagcacattacataagcacaatattagtatgatttaactctcttggaaaagaaccaataacaaagaaattcttaacaagagtgataatatcattacctacagtgctccaacacttttgatagaaccccggggtcattccatcaggacccggagacttgtcgggatgcatttggaaaagagcacggcgaacctcctcatctgtaaccggttccaacaaccggttattgtgttcactagtgacaaccgaaggaacacaatggagaacaacatcatcatgcacggcagtagcagtgaataaagaagaaaaatagtccaccataaccgaaggaagccttccattccaatcaacccaaatgccatttgcatctttcaacttttgtatcgaatttctgcgtcttctggatgtagccgaagcatggaagtatttagaattactatccccttcacgcaaccaaagttgcttacttcgttgtttctaaaagatctcacgttgcaaaagcaccttgttcaagttggccgaagcattgttgaaattttcaatagacacagcatcacggccccgtttccaacgttgcacctccgacttacaatctttaattctcttaggaaaattccctgaataatcctttccccaaagcccaagaacctcgccacaattcttaatcttagccaatattccactcggttcatcattccaccaacaactcttcacaatctcataaaacaaaggttctttcaaccaagcgttttcaaaccgaaacacatgatttctagcaaccaccacttcattaaccaacaccaa

SEQ ID NO: 321716 - DNA, 1291 bp, Cannabis indica
aacataaaattttaagtacttagccgctatttaccattcttattattattatgaaattgcttggacatttaatacctaaagtatttactttacttaatacataagtttaagtttgatagtgcataagaattattttcaatttttttttttaataagatagtataagaaattttaaaatcaatcaagcttacatattagcacacgactccagtagcagcagtcaaaactatcaacaatcaattggcaaaagtcagtgctcaactaatatgttaagcgaaaaaaaaaccccaatagattataaatatatatatatacatatatatatatattataaatacagatacagtgatatgaaatggtttaaataatataaaaattaagtcaagttacatgttctttgattaattattaactctttattaatttgattgatgtaagttgttaagatgatacatacatccataccataaatctatacaataaataaatatatatttattatcaactaatagactatatatatttatgggctttattgatgtataatatacatatatatatagtatgctcaacattatttagcaaagtatgaatctggcagcagaagcagactggaaccaattaaagtgtgaactgtgatttaaaaagactagagagagtcgctgaacaaactactggtggtgttttcctctgacttttctatttagccatatatctttgtttgaatgttgaaaaataaaaattttgttatagcaaaaagattgaagacttattttcctaatatattaaaagtaactcatttacatatttaaatatatttttttattaaatgtatttgtaatagtaattctacctaaatttataaaattaccatagaatttctatattcaagttctagtgtttctaagacagaatttctatatttttggaaaaaaatgaaataggaatgaattaccatagaattttatttttggtcaaagttatatcttccgttgatatatatatatcttactattataaaagtgacttatttgtgtgatatttatagactattttacccttacaagtttaattttattacaattctatttttctttttgtctttatccttataattacaagtcaaacttctttcaaaactacaatactaatctttttcttcagcccttacttctataattacataaatatcctttcacgttgatattgaaaaaatattgtgcacttacaataactttataaccaagtatatcaataggattattcctttgtcttttttttttctaaaaaa

SEQ ID NO: 321717 - DNA, 4273 bp, Cannabis indica
taaccattaaaagtttttttaaaaaaacatattattatactcaagtattgtcatacgagatcccacataagtttactaaaatttatggtttaaaagaaattttaatatataattttataaccaactaatttacttaatttatttacaaaaaaagatatatttaatttaagtttatagaaaataattaaattatgaaatgcatatatttctaaaaaaaaaaaattatgtatgtccaatacatatgtgtattgtaaaaaagaaaaaacaaactaaataatattgcctaggcggttggatgaggccatggccgaccagcatgtggaggtagtggctggctagatagtggattctatggcaggccaacttgttgaggacatggttagccagccttctaaaggcccagttgatgttgtagttggatcctgtccgcattcaattagctttggcccctagcataattgtagtagagcttttgtgcacttctgtcaatagctatacatcttctttcttagaaaagccccttagtggtgttgggctaccacttatgtgttttatgctatagcggattggacaccttgtagccatcctcctcgtccctgctctctggcaagatcattgtttagaggtatgttgttgtaggtgtatccaagttggttgtctagcatgtttgttccttttgaaacaaagggacttagttctttgaagaactgagcaggtacaaagtttgccttggttgccaaggcacagctggctagtttagtgagtgcatatgctattgtgccgtctttgggggcttgccttttggtatagcctatgagctcttttagcagctctggtaggccatcatcttcttgtattgagttgtacattcacccaagacataacctacgactagctgagagttgtggtacatgtctaagtggttagcctaagcttcgtgtgctaacctggggccaacatttagagcttcatattaagcctcattgttagaagctttgtaattgaccttgttgcctcgtgcctcagttgcccccaggtgctttgggggccatgcctgcatcgggcaggtggttaatgtacctcttgggttcttactctcgcttattttctggctcatgcttttctcccaaactctaaggtgtgagcttggccttttatgttggtcgagtctcaatggttcacttgagtagtttgcctgatgctctaggtgtttgtggaacctgccgcaactgttgatcaatgtacacctttatagggtgtatttggaagtatagccttagctttctagaagccaagtgcaagttgtgggtcagcttcctcatgagtggtaaccaactttttgtgtcgatcagtctcttgctagtgtagtatacagtgtgttgtactccgctttcttctcctgtgaggacaacactcacaccattctctgtgactgctaggtgcacacctagctcttctttgtctaggaatttgggcaacacaggtggttgagccaatcgtttcttcagctcttagaatgcgatttcacattcctttctccactagaattttttgttgcttttgataatgttgaagaaggatacaaatttttctatagactttgacacaaatttgcttagtgtagcagtgcgtcctgtttggctttttacttcctttattgttgtcagcgacttcatgttcaaaagggttggatcttgtctaggtttgagcttcttcatgatgtggctgtagaggattttgaaattttctatctaggtccttcatatgccccccactccttttggacttgagaagcatgtcgtccacgaacacctccatattgcggctgataggatcattaaacatcataaagcttgtatgctcctgatttgatggatgcttcttctatttcatggcgttggacaaggccaagttgtaatagtgacgggcagattgctgttctcctctttacattttacctcatgccttgttaggaatttcaggcaaaggcggtagatggatgttgcaccttcaagttgtatagggctagttagcctatcatggcattgaaagccaagggaacgtagattacgacgaactgtgccatcaaagttctggtggttggattttctccaacaatgaggggtaatctgatatacccgatggttgtgatgccttggccaaggagaacatacataacttgattgtagggtgccaagtcagcgagttggagcctcatcttttcatgtgttgattttaaaaagaatgttgagggaggctccattgtccaccacgtatcttgctataactatattctcgattcgtacagtaacgactaagggtcattgcgcgggaaacttcttgggcatgatcttctttttaagaaagagatcttgggctctccaagctttggttgcttgaagcctcgctctttgcctgcaaggaagttcattttgggctcgtgacggagtgtctgagcatagcgctcactggctttgttggtctcgcctgtcatacggggtccgttaatgacaaccccaaagtttcttgacatcggaggtttggacagagttggtgatacctgcctatgtgcctggccaaagatggaggccagccttcgtagaaggagcccagccttcagaggtagaggtcagacttcagagatggaggccagactttggagatggaggcaaaccttccgaagcaaaggccagatttttgagatggaggccagccttctgtgatgggggctagccttctgtgattgaggccagacttcgaaggtggaggctagccttcagaggcagaagccagacttctaagatggaggtcagccttctgtgatggaggccagccttcggagatggaggttagcctttggaggtagacgccatactttggagatagagggtagccttcagagatggcggccaacctttaaaggtggaggccagccttagaagatggaggccaaccttctaattgcttattgctgactcgccctggtgggatgtctgggcaccccttgctttgggagttttgatagaagagtgaagcatacacacttctactccttcttgcttggacttcatggcataaagggatcattgaatcgttgaatttccctctttttcaactatgtttgtcagagacatcgttgttgcacttgcctctaccattctcgttgtttgataattggtagggatcgtctgcgctagttggcatgctagacagtgtttggtggaactatgaggccttgtgtttgttcgtcattatcctactctcttgtctaggctttccgtacaacttcttccaacattatgaagccatcggatcactcaagggactcctccatgttgttccttgagattctcttgatatcttcccagaagacactcaacaataggatgcctctgagtatggccgtatataagccttcttctgtcatgcctctaacttggtggcttcagccataaactattgaatgtagtccttcaagggttcatcttgtctttgctttatttcaacaagatcctcaagtcgggtaggtatttgtcttgaaatagagaattgaatacaaaactctcggagaattcttcccaagagttaaatcttcttgggataagcttgaaatactatttttgggctatttcagctagagttgccgaaaatatttggcatcgcatatctccaaatacttgtaagagatctatttggatctcaaagtacttcaagtgtactagagggtcttattttcccgtgtacatattccaagccggtatcttaaatatgcgcaagggaaaggcattgatgtatgccgagaatggtgatcccctcaccttgtctagctcgagttctgaaggttttagatcagctaggcccttgagcatgttcctatttgatccaactgtgcttgcacagaaggatctgttgctgtaggggcctagttgattggccttctttgattgagctgcaacctcagattagctagagcttggccaaccataccttgggaaacagtatactcaaggctggccagtcctgagtttggtgcttgtacatggccagtaagccctaaggtgggcaaggactggccgcccacacttctctgcctggctagtggagtttttgcattgacatggagtagatgacactagttactagagtttagtggatttaactgtctgaagtgattaatttcacttctcagattgttgtttttggtgtttccactctttcccagtccttgttagttgaaaattgatctttgggtgactcgctccccttagggagg

SEQ ID NO: 321718 - DNA, 835 bp, Cannabis indica
tcactctcaggagctggccagcccctcctggccggccccatagccggccaggccaaggacagcatcatgggcggccagccttgctagcacaaagccctggccaaccaaggattgcactgcaagtcccacaggacactcctacacgtggacatcaaaggtgggctacaaattgggctccaaaagctcaacaaaatagctgaataatatctagaatcaagggtattttggtcttttgtaaatatctaactaactatgctattttcaagggatttgaattgtaaacctagggtttaaggcttcctatataaaggccttaatctttagctgaaaacgtaagttccctaagccacctctaagccaaaaatcttaaactctctaagtgttagactctctctctttctttcttcttcattctttcacacgcttagcttaggctgtacaacaccttaggttgttcaacaccagacatcaattcatacattgtaatcataagggtactatagcagatcccacctatagagatctgaataataattctctcggtataatacagctaaaaggagagtaggtcgttacctattatcacaaggggtcgaatctctataacaagtcccgttatctattgctttgaattcttgtttgtgcacacacttggcaagcttcaaatctgtacaaccccgttattggttgatcacttttaaaaaggtcaacaatatatattaattaaattaagttatataatttttttagtatagcatattaatatattataacaaaagtgaataaatatattacattattaaatatatacaatagtatttgatatatcatatta

SEQ ID NO: 321719 - DNA, 1091 bp, Cannabis indica
ttttttgattatttttttaattaagtagttaaattaagcataaaaattcaaatttatgatttcattattcgttattagatcaaagttcgatagtttgatatttttaaaattaatatttatatttaaatttgcttagtaatcattgatgggtaatactcattaagaagtgtttcttatatgtatatatgtggaatatttatcaatgaataatacctattcataggtactaataaaaaattataaattggcaatctaatgacttgctatagcaagttattaataatatattttttataattatattattttttttataaaattggaaacaataattccaaccaataatattaaagaattagaaattatttttagaaattaacatattttgttgaaattattaccttatttttacattaataataaaaaatttattaaattgtcaagtcagtatcatcttttttaattataatgaaattaaagatttaataggtcttaaaaaatatgtaattaatttatatataattaaagagaaagattataaacttcaatttttatgcatattgacattttatattactctataaagtatagtagaattaattgaaaattgacatgaatagatcaccgtgcatgtaattttcatactgttgatcgagattttcggcaaccaatttaataatatatatgagaaagctgtaggaagtttaatgcatgagatttttacgtgattggggcattaatgagccttagtcaacgagtctttcttatttatgagagtatttattacagagaatgttcttgatagtttttccttttagttgctctctttaattcttatgaacccagaattctcgacccccatctcagtgcatttggggggtatttatagtgtttttctggggtgatccctagaactgaatcacttgtctttctgtgtagtttcagtaggggcacatattccgagcagatagaaaataggaaatacatgacctataccttaggtatcttaggggttaggtggatatagtcttttatcccttcttgattgatgtgatccctcataaagtagccgtcactaaccttattaatca

SEQ ID NO: 321720 - DNA, 1231 bp, Cannabis indica
caaacttctaaaacttgagatggcagaagcttgcagtctttcttcgaatgacttcaggaacttttgacacatggatcactttgagacattggactttttgtcttccatatcacagaatgtgaaaggttgaggactagcggggatacaacttacaatgcacatgtgtccctatcttcttggtttgtgaatttcactcatccttgaaaatcgtgttgtgcctaggatattgtaatgacagctatctaatatcaacgcatacatcaaggagaatatagatgatacaaaaatacctcgagtctagttaggtgcataaatgctacctttctggctcctcaaccgttggattgattatggtgctttcctttgattctcagttgggttgctagagggtccactgtgtggctgaccttttttgtcgtggacttctttttcttcccttgctatcagccgcagtgttgaccttctggatggcactcatcaaatcacttaacatcctggattcaagtgtatctagcaaaatgaaaacaccagcataattaaaacagtcaaagaggcaagaaataacaacttaaaccacacaacttaaaataacaagaatgtcatgtgattgcaattgtggaacgagtaattataaggttcccctcttgcaaataaagttacttcttcttagccaatgaagttatcatattccctaaagcccgagaagaacatagtaagaaaaggacccactttagtgacatttagggagaattcccagttatttgagtacttaactatattatctactctatcgaaataatccttcattggatacctacgaggatcgaaacttaggaaataatggtcaaaacccccttggtctctaagtgacatctgagataaacaaggggtacgaattacacggaagggattttacctcttccagaagtacttgttctagaaatcttcgcatctggatatgctgctaggaacctagcctgaatttcctcctcctagtgaggggatttgggtgatgactggcccatgttgcagcgaggagctcctcatctttagttgccttcgttatcaaaactgataattccaaagcggtatgctccttaaggtcgttaggggtctgtggttgacccctgccactaactccgtggatgctttggaaagtggatatcaagcgatactggcgcagtaatttggtagtcacacagtcctccctgtggggttttatgccctaaat

SEQ ID NO: 321721 - DNA, 1782 bp, Cannabis indica
tttgtactattttagaaaatacagggttcattttgtcatttaacaaaatacagggtctaatttgtaacttttgcaaaacagagggtccaaaatagtatttatccttctttaaaaataaattctaactgtcaactaataagagtgatatcattcttcagaatcttttgagtcatgtagcacatttagattggttagacaataactaaacaaatctaaagacgccaaataactcaaaaataaagcataaaaaatttaaattcaatctcgattcaagtttttatttattgaatctattccttgatgaaataattgccaaattctaataaaaacttatttatattgtcttatatacacacattcttaatttatgcaattgcatataatctccattctccaatgaaaatattatttataacttaaattacatttttacaagaataatgatatgtgtacaattatttttttaatatatcaaatagtacacacactttaaattaatgatatattgtttgtcaattttagggactaatttaaacaatcatccattataaaaatttgtcacattaataaatgtatttttatagtatttcaatgtatatgtataaaaaaaaaatcattattgttttaaaattcagacaaatatgatagataataatattgtaggagctcttatagtgaattgtctataaatgatgtgatattcataacagttattttatttcctatttataattgtagaaaaaaaatatgacaagaattaattttttagattttttttctttaattttctgatgaaggatttttctagatatttaattataggatttaaaaaatatttctatagtatttctttggtaatataaatatatattagaaaaaatctatagtaaaatatatttcttatatgacttttttttttataaaggtttttttctttctttgataaaggaaattctaagaaatttaataataggctttgaaaaatagttttatattatttctctgataatataaatatatattagaaaaaaaaatatataataaaaatatctcctatattactttttggagtaatctataataaagtatatatagaaaaaattataggaaaaaaagcacttaaaataataatagtatttattgtagatgtttatcgatatttttaaaaactaaattaataataagttaagttaaggaaaaatatttaagaaatgaagaagatagagaatttttatgtggttggggcattaataagtcttagtccacaagtcaatattattaagctatttaactatgaagtattttatataagagtgttcttgctaaatttctgtagagtttttagccaaagttcgtaaacttttgcatgaagcgataaagctctatttataggctgaaaccaagtccttaggtgaactcggatccccttagagttttttatatgaaagtaagcccattgatggggtaaatttaaaggtattcattaaaccactcaaatcgtccgcaccgcaaaaattacgatttgaaattctttgtggtgcggtcgcggtttgaatttttcttaaaccgcgtagtgtagtacagtttgcggttttaaattgttaatatgcagttcaaaccacatcgcactatacattataaaaataccaatttttatatttatttaggtctaatatatgaatgtccagccaaagtccactaattattgtattgttgaaacttattttttttttcaagttttatgatatttttgacatgtgttgttcaagctttattgtattt

SEQ ID NO: 321722 - DNA, 1793 bp, Cannabis indica
aaaaaagaaaactttattcataaacaaaaagggaagagaaacggtatttcaaaagagaatcaagaaacgaataaaaaccccacaaaaaaaaaaatcccaaatccaatattgagaaaaagaatccaaaaagtgggaatcaaaatgaaaaaaaaaaataatatatttttttttatatttagtatcaaattagagataaccccaattcaaagataacaccttttttcataaagactgaaactttaagtggtgtatgagaaattaatagagagacagaccattaagaagagaagaagaatttttcaatctttattaaatgttatttttatttttagttttttttacttttgatgaactgaatagaagagaaagataagaaaaattatgaagattggacatgaaaagtcagagaaaggcagagggtccaaaatgggaagggttagcatgtgagccagaaaaagagggaaacctactttcctctttccccttcttataattattattattattaattaatgactaatttagttcttaaatatttaaatttaatttttgtaaataatatttaaatttaatttttgaatgttttaatatttaagttatatttttgaaattttggtaggtactagtcattattttcttatggttaaatagaaattctgttcgcttaaccattcgtgttattaaaaatttctcagaacaattaaaattattggatttaaagatttttatctaatttcattcaatgttgttaatattacaattgttcgtgtactaaatcgtgtccaactttaatatgtactgaattacgtctctaacttttcatccacgtgagactttctttagtaaaattagactaaaattcttaaatccaacaatctcaataattcgagaagaaattttttgatttggtacatgtcaaagtttggagtacaaaaatctaaattaacctttttttttatgggtataactaaattaatctttaaataaaaaataaaaatattatgacctgaaccaattaaatattatcacgtgatcattgacttaacgcttaacaatcaattatttatggaagttttaaaaatacaacttaaatattattaattacttaattttggttttaagttaataactgtatttatttgatttgatttattatagtgtaattattaaaaattaattaaatattaagtttcttattattaaattgattagcattctaaacggtaattgccattgctgttgctgtctcatctcaaattttattatattttatttaaatatttatttatttataaatataataccttacaaaaatatatattaattaattaaaaaaacaaacaactgtttagagcaagatcaggttcggaaatcagaaccgccagttatgattataatttatttatttttaacttattaggttttatttttattttttgaaaaaatattaggttttatttcaattcaataaataccaacataatttagataagaaaaataaataaataccaacatttttttttttgacagagaaaatatcatgattaaatgttggtatttaagtacttttgaaaaacaaataattggtatttaatactaataattagattggaaagtatttttattgttggaaaaaaaaatataacctctgctattattttaaattgagtatatacggggtcggtcctaggcctaaaacgaattgaattttggacactcaaaaatatatataaaaaaaatatcaaaaaagagtgttatggatttgaacttatgaccttaaataatatgtcatc

SEQ ID NO: 321723 - DNA, 1102 bp, Cannabis indica
aatgtaaattgagaaaaaatagcacttttatttattttttataaaaaattaaatttaaattttttccattctcattaatctggttttacaattttttcgaactagtaagtacattttttcattcatatagtcaagtatttttattactaattagttactaattttactaaccagttactcattagtaactagttactcacaaatgatataaccagtaagtagttaaataattaaaattttttttttttttatgaatcagcaagatcttcattactccaataaaacatctttacaagtaaatagcgccttcaaagagaagacctataaaaaaaaaaaaaccactattcaagtaatctctttaatctctcttttctatcttgtcctctcttctttcttttcttttctttttacaattgaaaagaaccaatttgtatatataattattaactttttttttggccaacaacaattaattctacctttaacatcatttttgatcttattgatgatcaatggttccttagcttgacccgaattccagacaacttcgtttctagcacgccatgtttaataaaccaaggatgccattgcagccgaatatacttgcttgcgaaagctgctgcattttcttctccgtatccactgaatgagcttgctcatttgatttgtttcagccctccatgatagccataatttcacctgatgaagacaattagaagctagtgaacattgacaaaaaaagtgctctgcagattcattatgaagattgcagaaaaaacattttgcttcagcaacaatgtgaaattttagcaatatttcctttgttctcaacctattttgtattgccaaccatagtacaaaactatgtttgggtatattaaaccttccccacacttcattgctccaaaaaactttattttgattcggacaaatcagcttgtagccttgagagatactatatttcaccccagcctgttgttgaaaaccagccaagtttttaagcttgtcttttatggttatcaatcttctccaataccagcttgcatgcgatggtggcttgtatgaccaccaatgttcatctttaatatacacactatgaacc

SEQ ID NO: 321724 - DNA, 2195 bp, Cannabis indica
gggacaaatcataaccaattgctgagctgtcaaaggacagttaatatagttagccattcaaagtggttaaaacaccaacaattccaccttgttttgattactttgataaatgggagaggatgtgactcagcagtagttatgacttgaaagagataatattcagtagccattgacattcagtaagcttagacagtgtctgaactttgcctgagtgacacacttggttagcatatcagctgggttgtgtgctgtgttgattttcttcatgctcacttctttccttgcaacaacatctttgataaaatgaagctttatgtctatgtgcttggatctctcatggaacatgggatttctcattagatgcagaacactttggttgtcacagtatacagtgacatcatctgagttgaatcccaactcttttgtgagacccttgagccaaatagcctccttgacagcctcagttgctgccatatattcagcctcagttgatgagagagccacaaccttttgaaggtttgatttccagcttacacagccccccaaaactgtgaatgcataccctgtgagtgactttctggtgtcaatgctgctagcatagtctgagtttacaaacccagacacttcttgtgagtgtgagtcatttccaaaggtgagtcctatgtcaagtgagcccttgacataccttagaatccatttcaaagctgaccaatgttcttgtccgggatcaacaatgaatctactgactacacttagtgaataggccagatcaggcctactacacaccatggcatacattagactaccaaccccattagcatagggtatggtgtccatgaatgccctctcttcatcagtgttgggagactgatctttggtcaatttgaagtgtggagccaagggagtttgcacaggtttggaatcactcattccatatttttcaatcacatttttgaggtattctttttgagatagggtgattgtgtttggcctttgtctttgtatgtcaatgcctagaatctttttggcttctcctaggtctttcatgtcaaactcagcattgagttttgctttcaatttgtcgatctctgttctgtcttggccaacaataagtatgtcatcaacatacagtagcaggtacacgtgttcatttgtgttgacacagtaatcatagctgcttcttgtataccccagtttctccattgttttattgaacctcaatttccattgccttggagcttgtttcaacccatatagggatttttgcagcaagcatacttcttcagggtcattgctttcaagatatcttcgtctagactgccatggagaaaggttgttttcacatccatttgatccacctcaagatcaaattttgcagccttggccattatgattctaatggatgcttgcttcactacatgtgagaatatgtcagtgtaatcaataccctccttctgagtgaatccctttgctaccaatctggccttgaacctgacctgttcaaatccagggatgccatctttgaccctaaagatccatttgcatagcctctgtccaggtggtcttctaactattctccatgtcttcttcttgatcagtgattgtttttcctcatcaatggcctgcagccacttcttaccatccttgccattcactgcttcttgatatgatttgggcactgtgttgtcaacttgatctgtgactgacagtgcatatgctgaaaaatcagcatagctaaacttctcaggtgccctgatttctctcctagctctatccctggcaagttgatagtcatctaggttgcttgtagtctcaagctcttttctctgatttgttgtgggagtttggttcagagactcagttctttgttcaagctccacttaaacactcctaggaatagcatttgagtttgtggggatttctttagtagtttttaatggcatttcatcttctctgaaggtgacatctctgcttattatacacttcttgtacccttcctctaaacaccaaagcttgtagcctttgattccatcagggtagccaagaaataggcatttgagagcccttggttgcagcttgtcttgcctgatgtgggcataggaagtgcaaccaaacactttgagatgttcatagctaggtgctttgccagtccagaattcttgaggagttttcaagtttagggctgtagaggggca

SEQ ID NO: 321725 - DNA, 2623 bp, Cannabis indica
aaagtagttaagatatttcaaagtagttgagatattctctcaagtagttgagagatttcttcataaatatgagtaaccgaattcggttatagatatttatttatttaaataattaaatatgatttaatttataagaatttaactactataaataaaagtctaatttgagaaatcagaagaactttttacattcttattttcgaaatacataggagaaaaagaaaataattttctctctcaaattgtttttcctcatgttatgaatcaacaagaacacattatatattttatcctaataggacacactatttcttgtgtgttgtggatcgatttggaaaatactggtgtgagttcaattgcatcatcctcatcatatggaataaaggatacatcatacgagaaattttgtggataccctgatagtcatcaagaggtatatgtttaaacttatattttatgctttgatttagtgtacatacatctggagatccattgggctatggtacaaaaataatcacacatcctaatttagtaccataaaaaccaacacacttctcttggagttcctcttagtaggaccccttccttagtttggtctagtttgagtttgtgttccctggggctatttccccaatcgacgcaccgtctcttcttccatgtctggttcatcatgttgagtatcctccatgacaaggcggtctgattataatggggagatgtgttttgagtttttttacaaagactctcaatgaaagtaccaaactattaactccaaatttcgttaacaataaatgaagctttgtaaagaaaaattatatatttatcgttaataatttatatatcacaaaaaaaatttatgtgattttgtagttaaaatttacatactccacaagtcaatattatttttaaatttatctttatagtgtttattgattacaagagaatatctctggatattatcttaatttcacagtttttctttcccaaaaagatcaatcattttttccgtaggttttatccctatttataagatttttaggaatgacaattattctcttttaatcttatctaggtaaccatttataaaatatggacaatccccgcatttttttatatttacagcatgtggataaatgaaataactacttataaccgctttttgttcttatcaggaagtagtttgttcatagctgagataacatattccaaatatggcttgcattcttcattgatgatctggaatagctggtcgtatcccgcgagacactagttaagatgtttgtcctcgctattaccttttacggtaattctcggactagtctttaggaatcctgagataggttgcactttgcttatttcacttagtctttcaacatactcacgagtatgtggatcaatgggctggaagctcttaaaaaactcattatctatgtttccacttaactcatcccttcatgctataattctacctaatttatctcagtcaagtttcgagattagcttatgaccttgttattctcgcaaatcactatatttataacataacacgtggtcattacatcttttgactgtcgtctatccttaggtggaacattattattttcctcgatcttataaacctacatccacgtattatatctatatttactgctcaaaatatgagcataaatgtaactccctaacaattagacacgctacgattttcgataatcataacctaatcccgctaaaccgagattattagaaatatgagcagaatttaagctttaaatcatttagggaataaaaatttaacttgtaactatttaaagtttacaaaccattctaaaatattctacatgtttcaggatccaataaaaaaatttacaaaatattacaagtcatttttcaacatgtcgacctaagcaacaaaatcaagaatacatcaactggtagacccaactcgtgtggtctagtgtggtccgaacatgtccaattcatcgccaaaccctcgaactcatataaggtcacaaactgatttaccctaattccgctaaattgatttaccattttttgaaatattccatattatgtcttacttttgcatgaaatattttgtgagacattatattttatatattaatgtctttcataggacattacatgtgtgggatgtgaagtagaactaaattgtaatttatttatggaaaaatcatggttgttatcattatcaaaattaagtttacttttatgtataaaatacttaatattcactacattagttttatttatttatgagtcttgtttttattttctaaacaacatgaaaatccacatacataaatgatatgggactacaggaaacacacaacccatattttgtgaagagcttgaaagaccattttatgtctactgcagggcttacattgtggaacataaaatccttgatattgactacattacttttatttatttgataagcctaaacaccacgaaagtctttgtttattattttgaatactttttaaataaaatcaaaaacaatttcaaagttatagtgatattgaaacaataacatgccctcctcttacaagaaaaactgaaatctcaagccaaaatggttgagaagtaaccaagtgagagt

SEQ ID NO: 321726 - DNA, 1320 bp, Cannabis indica
attattggatgaatattttcttgttgcctcaaggcacaatcaaggaaatagacaagctttgtatgtggtttttatggggtaacaatggtgcaagaagtaagttccatcttacctctaaaactaatgtttgcttaccaaaggagcaagcaggccttggttttggtgaaggtgctaagtggaaaaaggctatgaatgcaaagtatgtttgggcaatcaatcatcatccagaagctctttgggttcgatggattaaccatgtgtatttgaaagggcaaagcttctggcagtatcaactaaaaaatgacactagttggtacttgaaaaaattatgcaatattagtgttttctcagcaagaagtggaggatgcaacttgtaaaggtaaattttgtgtcaacaagttatacaagagcctttgtcatggtgagcaatttaaacaccaacgatttgtttggaattgatttgctattccacagcaccattttatttactggcaggcagtgaaggataacttgctcactcgggatcatctttttcggattctgcatattcacaacaagctttgtccaatgtgtggctgttatgatgagaatttagctcaccttttcttctcctgcgatttttctcagcaggttttgaagggtatcaatgactggttaggggctgcttggtcggaccaaatggaggactggcagctgtggacaatgcagctgggaaacaaacaggaaaacttggttgctgcaatggttttttcaacaacaatttattatgtgtagaaaaatagaaacacttgtgttttcaatgatttttcttatagtgtccaaaagattatagagatgataaaaaaggatactaagtatatagtgagaaattttatttttaagaagttgaaagatgaagagaggatattatcgttaaaaattacctctttgtagggtgggtgcttattgtgttgtgttgtaagttggttttttgctttttgattaatgaagattatttttttcttgataaaaaaaattataaccagatcgatgccacacaaattttttcaatttcacataaaaaaatctcatatcttaaatttacaataatcttaaatttttttcagagacgggagagcaccactgcgtgttgcgacactgccaccacggcaccacggcaccaccaccgcaccacagtaccaccaccaccctaccaccgaaaatctaaaaaaaagcaatatcagattaaaaataaagagaattgaaagagggagagagagagagagagagagagagagagagagagagagagagagagagagagagagagagagagagaga

SEQ ID NO: 321727 - DNA, 706 bp, Cannabis indica
aaaaaaaaagagtatgtgaaggaggaggaggaagaagaagatttgggaaagataagagtgtggttgtgtgtgtgtgtgtgaaagagatggagagcttgatctgtgatgagctttttatagaaattttttagaaactcccactaagctcatgttcttcagtctctttgctctcaaagcgttgactccatctgtaccgcacttccaagtcgactatctttctctaacttacccttttctattactggtttaatttgttattattttattattgttctaaggttgttttaatgttgttttcttacatttctttatcatttttttccaaatattattgtgctgttctatttttaattgtaatagaaaaataataaatttgtatgtaagttattttcttcagtattctatgctccaatatatgttcagtttttcctccattgttccactattatattttagttctgcttctttcatgtttgatgtcttctcttgtatgttctctttttgtgccccaactctccttattttgctgcatttgttatgttatttcttttcccagccaacttttatcttctttttttattttatagatttcacattttcgatgggaggtaagactaatattgtccatgattctttcattccagttacctcaaacaaatattcagtggttaatttaacttgtgtaatttaaaaccaatatttgtta

SEQ ID NO: 321728 - DNA, 701 bp, Cannabis indica
ttagttatatctttttatttaaaaaatttagttatgaaaacattaaaaaaaataaaccaattatataaaaattatataagaaattaaatatgatataaacattttgttttaaactatatttatcttattatatagaaataaacctatgattataaaccatagattcatagtaattaataatctattacatccttatagacccaagtaatatattaaccctagccatataatatacacacaaatctaaaagaaacccttgatgtattcccaagtgttggaagcagcagatttagtcatggtggcagcccgtgcctgcgacggtggaaaagatgatttggtagatgaaaccattgacaacgaaaaagaacatgcttcaacaaatgacatagaaccatcaaaaaacaacacatctaactcttctacttcctcatttttatcattattttcatcatcatcaccccttagccactgccaccatttcaacattattactattttcattagtagccacattatttttcccgaccaaccattgtctcaaatcaaaactcatcttttttattatcgccaccgtcactttctctgccggtgaatgtttttctagggtttcgctcattgtgtttctctccattgtttctctatggtactaattttctataatttcaaaatatttaggtggtgtttggtaacactttttcaat

SEQ ID NO: 321729 - DNA, 536 bp, Cannabis indica
ttaaatatccctaataaatttgtccttagtttatgtttcgttagttagcttactagagttgttttgttttctctgtccaacttgtgtgttttgtctttgttttaagacctaatttttatctgctatttttaggggttattatctgacatagttattttgacattttctattccataagtgaagtttttttcttgtcaataaataaattaaatatatatttagttgtattgggtaatgggtatcatgagtgtcattggctgtgtttaagccttttcagccaaactaagtgcttaactagaggtttacaggagccttctgctctattttagttttactctatgtttggtaggggaaaaagggagtggaaagaaaagcttagaaggaaaactggagagaaaaaaaatgcttgtttagttgaaaaaaagtgagaagaagagaaaaaagataaaaaattgggagaataacataaaatacagtttttttcctaaaagaattatatttttaagttttaagatttatttttttatatttttttt

SEQ ID NO: 321730 - DNA, 885 bp, Cannabis indica
agagataggtctagagtggttggttcttttcgaattatggaccttggggataagaacaatgttcctagcattaactcccttgtgcataacgccgtccgaaagtacaacacatcttcacaaaaatactctcccacagtcctccaatagtgcgtgaagaaaagtacagacatcccatccagcctcgaggctttgttgttactcatggaaaatagggtcttacggatctcctcacgggtaggacctttaacaagctcagcctgatcaacttcaaatatcctatcctgaatgagatggtggcggttaagaatgtgaccattatccgcacacgataaaattcctttgaagaagtcaatgaatttgttaccaattaagtttcatctagacttttatatattatcttatttatgatactttcaatagtatttcttcttcctctaatagcagccgagaggaagaagaacttagagcatttatccccttccttgagccaagaaacccaggccctttatttccaaaataactcttttctttcgcagaccttattgagagatcgatggatatcacattcagcaggccaatctctatcccccactggtagattttgaatgaggtcgagtttcctttcaaaatctttaattaacgtgtcaattttcccaaattgtattctattccagtgcctaagagcgacccgagttgccctaattttcttgaagaccctgacaggagcccaagagtgaacaaccgaattccaagaagattgaaccactaacttaatcaaacgattacaaccaaagtaaagaaatatatattcgacatgaacacgactaaccgaatattctaaatacaaaaataatttaatggaagatcaatactaccataaattct

SEQ ID NO: 321731 - DNA, 568 bp, Cannabis indica
ttttttttttttgggtataattagtattcaagctctattaatataaataattactaataatcctatgttacagcttacaaaccatctcaacattatatgcaattccttttggagttggtgctgcagcaaggtacatctatacactttctattatatataggcctgtctaggtataggtagactaggcctatgcctaacgcccacctagcctagagaacaaaaaaaaaaagtttttcctttttttttgaggataaaagggaattttttttcccttttaaaaatactacatttgtttataattaaagcccctgatttttatcttttattatgatcgactaaattcagaaccgaccttatttatatgtacatataatttcaattcactttttttttaatcaattacataattgtattcatttaatatcgttttgtgcatttgatacaataattatactgtatagttaactacactatttattattaatacatcacagtacaagagttgcaaatgaactaggagccgggaacccgacaaggagctcgtattgcaacctttgctgcaatgttt

SEQ ID NO: 321732 - DNA, 1024 bp, Cannabis indica
acaaggagctcgtattgcaacctttgctgcaatgtttatagccatagtagagacgagcatagtaaccacaacactttttatgtgtcgagatgttttcggttatacttttagtaatgagaaagaagttgtgagttatgtcacagaaatggctcctttactttgtttatctgttgtactagacagcatgcaaggaaacctatcaggttagtaataaatataatagatttctcaactcattttcgatgtaaaaatgtaaaatttgtaaaataaccttactgaatttatgttaagtgacattgagaggcactcattgtaagttgatgaattaccctaacaactcacttagaaacatttcatccccacaactaagaatttgacaactcaacatctataatcataatcaattatatttaagatactaatatcaagacctaacagtatttcgctaagaacttaagacatcctataaaaatgtaaaaaaaattaaaatttggtcaatatgaccaaattcccctcattttatttcgattttgacttttcagaacacaacataagtattattcccgatagagtagcctaacttgtaatttgttaaaaaccttaaaaataaagatcttaaggtaccaaataaatataatccctatttaatgatatatatttatataaatttcaggtattgctagaggatgtggttggcaacacataggggcattcataaaccttggtgcattttatctgtgtggaattccaataggtgtcattttgggtttttgggcaaatttgagaggaaaagggctttggattggtatacaaattggttcatttgtgcaaatcattttgctttcttttgttactggttgtacaaattgggaaaaacaggtatacccttctcttcatctctattatatatagaggaaattatactctataccctttttatattgtcctcttttatttttaccttcttttttaaaatctatcatttttaccttttttttaaacattgtaccaattttgcccctgt

SEQ ID NO: 321733 - DNA, 2126 bp, Cannabis indica
tgactaaataaatatagtgtttaccaagatttttagaaaccaaatatttagagcataagaaagaaaaaaattgataaaaatatatccaagatttttacatagctcaggcattaactatccttagtccacgagtctattttattagtaatatcggcaggtggtgaacatcaccagtagttacactatggactggaactctatatttctctcgctcctcttatagaagaagaagctttattagaatttttttagagtttttataagtaaaatacagtgtttttaatttcaaagagttaccccttattcttggaatgcagaggtatttataggccattttcccttcacatgcttattgggcagatcttgctagagtaaatttgaccgttgatttggtagctggctgatttgtcacatggcttttaaagatgtcagcttgtactgttcgatcatcttatatgtgtcgcttcaaggtcttcccttttgaatttcccttatcgatagtcattaattggatcactcgggaaggtacaactgggtgcgcatgctctatactacagcataatgtgggacaaagcctggctttgtacttgaaaaagtatagatgtcatgtctgcaatctgacatgtacgggtggagctttctcatgacacttaacgagattatagttcatcttgacttctttcgtgaccttcattggcacgctctaggaagcccttagactttgcgaggcattttccttcaattcctaggactgagagagatatcatggattgtggacgttccctgtatcttctccttacgtgggagtatccttcacgaaagccctttttgagaaccctttcccagagctagggctccccccttccaggaattgtggtcaaaggcactaactggtctattatcatcttggcttcctggactagagtccacgtgtcaagcttataaaaatttggacagcatttatcccttaagcttatgggacgtctcgcggtccaggagcttgcaatgtttatttgctttctcattattggctttccacacgtggggtagcttcaagtttttcattatgtcatgcaagtagccctcaactaatgtgtcactggcagaggatatcattcttgatgtatactagcaatgctttaaatgtcgactcttgcaatttgcgctggggaaacgccaaaatctacaaatcaattaagcagacccttcttttaataagcacttttcacgatgtaggttgtgatggatgttaaatgtttggaatcgatgcaccttctcagctccccatccgtcagatgtttagataccatttggtgaatgatctaagtcgttcacttctcgtggaaggcacccctccttgtattcattaaatactcacaacattcatcaccttttaagtgtcaatttttttttctgctcttcacactagagctctagcgctttgtctcatcatctcgttcactttgcaaaactcgatccaccaaaccatcctcagttgtgcacgccaccagatatggtgtagtagagccatccctcgtaatactcttgtccgtcaatcagtgagtgaatattgctactttttacttgatgcaaagatattgaggttagaatggtgtgtactatatacaaatcactattttgagaatgttggtcccatttatacggtcttctgcaaaaaagagtgatttgatgtcttgtcttgtactgactcgcttaaccccacactaacttatgcaagtactgttgggttttgtgccctaaataaaactcatttcatgataatcagatttactaattaataatagatcataaatcattttatgttgcatggttcacatgatttatttcatgattatacttaatgtataaattctattatgtccagaacatatataaatataaatatatatatatatatttgttcatgattatagtgtcgtgagcacaatggaatataatcatgattatatgttcaaaagtttaattcctatgatttgtgagttcactagattaagactgacatgataatcggcgataaggtatacttacaccttggataagtgttatatcatttccagggcattggcaaagtttacaagtatcggatgtatggaatatacattaga

SEQ ID NO: 321734 - DNA, 447 bp, Cannabis indica
attgaactggctattgacttggatagcaaatttgttattgttgagaagaacaacgagaaacactcatgctgtgtaattgaagaaatcggagacaaccaggaacaatcgtgggttcaaagggttggtgaaaagaatgcgaatgactctcaattcgaccaggtttttctttttggggctgtggagacttgcccagaaatgtctcccatgtctccatgaggttgttagcttggaactgtcgcaggctcgggaatgtcgtggcagttcgacagttgacggcggttctacgccggtcgaatcccgatgttttaattctatccgaaactagattaactgaagaaagattttctgctcttctcaacaagcttcactttcctaatttcacttatgttccccctgttggtctttcggggggctttggagttggatggaactgttggaaatttattt

SEQ ID NO: 321735 - DNA, 638 bp, Cannabis indica
tttagggcataaaacccaaacacagatgccagaacatacaacagctaatagaaatcataattgtagaagtaacacctaccccattcctttatttttagggcatcgagcttgattttgtggtcagattcgaccaccattattgggatttggtcagattcgggtgttgggttctcagactgaatgaaggtcacggtcgtcggggttgttggactggaaaaaggtaacggtcggggttctcagaccggagggggctttggggttcgaacttgaaggggcttggggttcggattggaggggccggcttagggttctggttcgcacgagagggatagagagagcactggtagagttatgttagaaattttagggttttagttagaaagagataatttatacttaattaatttctttctttttttaattatgtttttaatataattatttatttttatggaaattagtttttttatcacatttttttattcctatagtgacgcgcgaaatgtgtttgggtatatgtgtacctactctcatagcgcgtcactatatcttaatattaaatttaattataataaatttaaaagtatgatatagtgacacgctaggcaagtggggatatgtttttccaatctctcttg

SEQ ID NO: 321736 - DNA, 811 bp, Cannabis indica
gaaagaaggaggattacttgcgtctaaaagaaagcttgatgaagaaattgaaggatggaagatgaaacttctctcttatgcaaggcgtctaactttaatcaagagtgtgacttcagccatacctatctatgctatgtctacttcaaggatccctctttctagttgccgtgaattagacgctttgatgcgaaaatattggtggttaggaaaggtagacaagaagagataccttgctctcaaggcatgggaccaaattttccaacctaagatctcgggaggtttgggggtgagaagatgtgaggacatgaatagggctttggtggctaaactcgcttggaaccttgccactcatgaggataggccttgggtgaattgtttgctcaaaaagtactgcaaccatgaaagtttctggagtgtcaagaagaaaagcaatgattctttccaatggaaatgtattctggacagtagagaaacgattcttaaaggcaccatcacagttgcggcctcaggacattccatcagcttttggcaccaaccgtggatcccttatttggaataccctgagtttgtagaattgatgaacagtctaaggggtagaggattcactataaagaccctgggagatgtttctattggcaacaagtggaatgaggaattgattgaacaggtttttggccctgaattggggattcagatcactaatattcctagaattccttccccttttcctgatcaggtctattggaagagcaatcaaagtggaaaaattctctgtcaaagatgcttatcgtgtggacaatgcatcaaggtt

SEQ ID NO: 321737 - DNA, 592 bp, Cannabis indica
tatattgaacattcattgtgtttcatctgtagtatcaatttcaaatcttcattgttggtctaactttacttgttgtttttaacgagacaacctcatagacaaactctcaaagacactctcattcaaaggggattctcttcatccaaatctgttaattctctctttacctatggatcatgcaggcaattaatcatactgcttgtatatgtggatgattttcttgtcacatgcccatatgtcaccttcatcaacatgtttatctctgacataaatcaatctttctccctaaaagaccttggaaattctcactactttttgggagttgagatatttcatgatgctattggaatgtatttgtcccaaacaaaatacatcattgacctacttgtcaagttaaaaatggatggagctaaaccaagcccgaacaccacaagtaccaacacaaaattgtttcttactcatggtgacccccttgaagataaaacattatacaaaaagtaaaattggattattgtagtatctcactctcactagctagacctgatgttgcttacatcattaacaaacttagccagttcattcatgctcccac

SEQ ID NO: 321738 - DNA, 645 bp, Cannabis indica
tggtttgctactaattgacttattataagtttatttgtgtacttaggttgcttttttgaatcatgtaaaggaagtgtcattgaggatggttttcataaaaggtttctaaggagcatgtataagtgtcattgagttttctgatcttgaacatgcatgttttgccatgttttgatgctaggaagtaccatttagtcatttacagttgttatcgacacatattaggctgcagtccttagatgatgacttttttactttgtattgttcattcatttttatggcataaaggcttatggcaagttttattgtatcttcgtctttgtaaagttgtccaacttgtatactatcaacttggatatacaattatgtttaatgtgttggttgctttctcaacttggtctgtaatatattctgcaattatttgtgcaagttgagttgttgtaggtaactcttcagttttttgtacaaatggttcaacattgctagctatttgagttgtgctaggaatgcatgataattgttggtcagatagactttggttggggtctgaagacactcaaaagtagggttgtacaaaaaaattcataaaccgtccaaaccgaataacccgcccaaaccaaaccgaaaaaaccgataaaaattacaaac

SEQ ID NO: 321739 - DNA, 4003 bp, Cannabis indica
gataactaatcagattgtaaagagttttatttagggaaatgcgcgggaggtagtgtaagtcaaactggctcaattccatggcccatttaaggagtcttcctgaggcttcaggcttcttcaagacttgccgaagcggatgatttgtaagtaccttaatgggatgggcctagaagtagggtctcaatttccttgaagccatttggaggaaaaaaaaactaatttatcgattaagggatactgcgtctcggctcctatcatgcgcttgttgacatagtacactggatgctggaccttatcctcttctcggaccagggtcgcactaacaacattctcagagacgggcaagtataataacaagtcctctccatgaacttgttttgacagtaccggtggtttggccatgtgctcttttagttttttgaattcctcctcgcattcttcagtccactcgaatttttgacatttcttcaaaatattgaagaataggatgcacttgtcagttgaccgggaaatgaatcggcttagggcggcaacctttccaatcaagctttgcacatctttgtgtttcttgggggatggaatgcttagtaaggcttggatttttttagggtttgcctctattcctcgttggctgacgataaatcccagaaactttcctcatttgacgccaaaggtacacttctttggattaagcttcatcccatacctccggaccacttcgaagcattttgtgaggtcgtctgcatagcccatgcatgtcttagatttaactagcatgtcgtctacgtatacctccatatttcttccaaggaggcctttaaacattcggttagccattctttgataagttgcaccgacgttttttaattcaaagggcataaccaggtaacagtatacccccttgtcgatcctgaagctagtacattcttgattcgcgacatgcatcttgatctagttgtatctgaagttggcgtccatgaaggacagcagcttgaatcctgaggtggcgtccaccatttgatcaattcgaggcaaagggaaataatctttcgggtagactttgttgagatcagtgaagtctatacaaacacgccacgtcccatttggtttgggtaccaacaccggattagccagctatttcgggtagtatacatccaggattaggccattggttaacagcttatccacctctttctctaaggcgtctgctattaccggatcaagaggacgttgcttttgttgtaccgcaggcatgtctgggttaacatttaagacatgggtgatcacatgggggcttatgccggtcataatcccttggcaccacacgaaaacatctgtggcagcctttaatgtttcgataatcttacttctttactccggctctaggttttttcctagacggataaccttggtggagttgaggtcacacacacttactccctccgtgtcctccataggttctacagttgtttcggatctcacgcggtgatccaactcgtcatgttccatccatcttggctcctcacccctgtgcaccaccaacaccgaaaagtgcattgcgacattgtagcattgccttgcttccccttggtttcccttcaccgttcccactttggcttctcgggtaaggaattcaaggcataagtgtcggatggaggtgattgctctaaagacgaccaaggccggccggccaaggatggtattgtacgctgtcaggcaatctactaccatgaaggtgcagtatctaaaagtgctttatgggggtgtctgggcacagggtgacaggaagctgcactttccccattggtataagcgttgttccgttaaatcctataagttgggagccgctgggcgatagatccctgtctgtgagtcctttgtctgttatctactactattcttgccacaactttattggcgatgggagtctctataactagaggatcgtggtgagggaaacacacctattttgcatcgccttttgtgaaagtgatgggttggtccatgagccggggcctttgtgctgggagttgagtgactttgcatacttcatcgtattttatggccccagcgtaacgctgtagctcgtttttggtggttccttcgatatgaggcccaccgaagatgatggccactctcccatttggccatggtggcaatctaggtgcctgttgagggagtgctcctccggggggtacgaccaggtacttgttctctaggcataccccctggtcctccctgaggtaaagggcctcctgctggagctgggtttagatggagtaatcagttcttgatccattcatacaaatgatctaattagattaggttctcaattttgtctttcaggttcttgcattcattggtgctgtggccaatgttgttatgatattcacaccttttgttgggatccctccggaagctatccctatacaggggagggtgttttccgataatgtgtatttttcctggtggcaaagtatacacgctcctgcatgtccgtaagctccatatattgagtgtattaatgggtgtatcccctccgctgtcgtttgtcctcagtccgggtgctgccctttgaggaccttttgcttcgggagctctaaggaggtcctgccaggctggcagcaggcgcagattgggatggggtttggacactcattcccgagggatttcccataggggacccaaagtgtgatgatgcgggagccagggcgaggctttgattatatcctggggtagcggagaatcgtattctgctcatttgaggagtggccatgttaggccttgggattagtatggtgggctagcatatattaaataaaagggtaattgagtctttgtattgagggtagtgttttgggagggaatacaatagtatatatagaatattgaggggaattgaggggtatgcaatgtttgagtaaatctctatttgcaccaaaggggcctaagggctcctatcttttgtaattgggtttctcatacatctaatatacttttcttattgttttgctactgttttactcttgctttttctaatgttttattgaattcttgagtaggagttctcgggtcttatcaattggtatcagagcgagcgattccggtggatgccgtcgactcgaatggaaaaattaaaggaacaatggagatcggagtcttatgattatccctctgaatttaatacacttgaggaccttgcttcgcttttggatcagtacttctcgggcaagtaaggttaccccgcctctcccgcgatctccaaagtcatgtcacaacaagatcggaggacaacgatctcaatgagtggatccaccaagctgtgtagtcaataggggttcatcaccaagaaggaatccgaaatcgctacgcgaacctaacttctggatctccttcaacaccagagacggatagtgaatgtgatgaagagatggaaatggcaataagagaacacaaaagagcctttgctagactcaacagcttccggcaagtgcaggaagtagcaccatcgattccgggagtgacacagtgggtgtcagatgtcgacagtgatgaggcagctatataatcagagctcctaaatgaagattctctgccttctgtggcatcgcctgagatattcgaagctgcgaagaacatcgccgatggagaagaagataaatggctagagagaaatcagcagcgtgatttgccgcctaagatgacgaaggaagaggcgtggttgttggtggagtcttttaagtaaaaggatttattggcctcgacaccagatcgagaagttgttccatggggttcgctcgcacctcggcaacgaacgatatcagagaagaaggtggttatgtcgaaggagaaagcgtccctggtgccattgccggagaagaaggttgtgtgggagatggtgccgaacgagaaagagatgacgaagacgctgttagtgatagcgccggaggagaaacgatcactagaggcagtccatcatcggcgtcgaataggaatgaacctc

SEQ ID NO: 321740 - DNA, 712 bp, Cannabis indica
tttaattacaatttatgtacttgggtataaatttccctaaataaaatatataattataaaccctaaactgacggaacatccctagatgtgtttctgttactgaagaattgagttttcaatagtcaatttgtcaggtaaaaaagtttgcaattttgcgcctaagctcacttctttagagtttatataaaattataatcagtttggctaatattatttttttcatactctattctgactgacgaattccttttctcacctcattgccttcacagctgcttaaacccttgttctttgctcatccctaaacaatatgtcatctcggcctgaactccaagcgccacctgagatattctatgatgatgatgaagccaggaagtatacctcctcttctcgaatcatcaaaatccaatcagagctcacggagagggctctcgagattcttgccttgcccaaagatggagttcccaggttgcttctggacattggtacacaaccctttacttcttttgaattaatgtctttaatttgattttcagatttctgcatccactttgagattccaacttgaagtagagcatacacatatgggttttaatttcaggttgcgggtcaggactcagtggagagacactaacagataatggtcaccagtggatcggtttagatatctctgacccaatgcttagtatgttgaagtatatattctcagtta

SEQ ID NO: 321741 - DNA, 764 bp, Cannabis indica
aacatacatggtagtaaatctagatcctgttaaaatatttccaacatcaacaatattaaaactcattgtactaatattagagcatctttgaagacattggagacgcaagtgggccaattggctagttctttgaagaatcaaagtcaaagatactttcctaatgatacggagaataacccaaaagaatgcaagatcattatgttgagaagcgagaaaaaacttgatgaaactaataaagtgaagggaatgttgaagaaattccaaagaatgttgaagtggaagatactaagccaaaagcaacaaatggtctctagatcatctgctgaagtagaatatagagctatggcaaacacaacttgtgagcttgtatggattccctctctgctcaaggaattgaaagtggaacacaagggaccaacaatgatgtattgtgacaatcgtgcagcacaacacatagcttctaatcatgtgttttataagagaacaaagcatatagaaattgactgttatcttgttcgtgaaaaggttcagcaaggggtgattaaaactgctcatgtatcggcaaaggaataagttgcagatattctaactaaggctttatttccaacacagttcaaagctttaaaggacaagaatgaattgataagtctatacactccatcttaagggggagtattagacttaggcttagctttgtcatttggagtcttagttattagaatattttatatatggaagttattttctaattaaggaaatgattt

SEQ ID NO: 321742 - DNA, 990 bp, Cannabis indica
tatattagtacacataatataattaaaatcattttaaaattaaaaaaattaagttgtaaaattattaaaaaacaaaataattttgtctctataattctttattttctttttcatattcttttttattttcaagtacttccttctttatctacttcatcttgtgcgataataacttgaagacaggtgttttgctcgacaaggaccaatgtaccaatgattataaatctcccaagttttcaaattggtgacaagtttgtatgcccaaggatgaagaggaacatgactacatccctcgcatccattattttaaaaacacgaccactcaggaaggtgaagatggggctccccgaggtaataattcttgtatttatggatggtctcctactgtccttagggctgatcgaataactttagttcagtttaaggatagccaatataatttcttcatctacaattgtgtcgacttagttgcccataggtttgatagttggtatcataaatatcatgtccaactaagttgtaatagctcctactatgggatcgctgcacaatatggaactaacttcaatagggttgctagtttagattaggatctatctccacttaacccctttgatctttatgatcactggttctagggagttaagtaattattatagccattcttcctcgtctaaaacttatggtaatgttctaagtgggagttttagcctcgccacctttgtattggtttacttcacacagaatttaacatcttgttttctatcttatagatatggactgtaatgccctatccaaagggacgctacgtgtgtgtgtttatataaaattctcttactaaattatataattatatcaaaaagtatgggtaattacaattttacaatttgaaacaaactcataaaatttctttttaataaaagataagtgttaacatctcctgatacgaaccacactaacagttgtgatgaaacccgacaccaaatatgg

SEQ ID NO: 321743 - DNA, 534 bp, Cannabis indica
tgagcgtctgcccatttatgctctgtggcagttataagtaacttatggttttttaacggtttttcaaacaatttctgcattacttagcagttttttttagcagttttctgctctttttggcagtttgttcttcctttcttcagccttctgcaagtatactacatatttcaattgtttctcctgggctttcaacactccatctgcaaaatatggatcctcatagggacaaaatgaagtcagtaattactcttacagatgaggaacagtcagtctttgagtttgattttggggaacctatctctactggtttgggcgacaaccatgtgctatatgctaaaattctcactactaaaaaagtttggctatctactttgcaaaggcaaatggcagagcactgggatggacgatttcctgttaagattactgaagatgatgaattgtttatgctgtcatttggttgtgcaggagatcgacaaagggtccttgacaaagagcctttccactttcaaaatcatcacatcattttactatctc

SEQ ID NO: 321744 - DNA, 829 bp, Cannabis indica
gtgaattgacaaatcagggaattaaatttttgaacatataatcatgattatattccactgtgctgacaacactataatgataaagaaatacatatgttctggacttaatagaatttatacactaaatacaatcatgaaataaatcatgtgaaccatgcaacataaaatgatttatgatctttattaattagtaaatctgattatattgaaatgggttttatttaaggcacaaaacccaacacattatcaccccgaggagtagaaaaaagtggagaatactataggtcgatgattctataagagacaagtgtgagacatgagtattgaaaaataaagcaagccaagaggaattgtacacaagcctatcaagacgttcttggacaaaaatatatagaaccacgacatttattacaccaagtgaattttggtccttcaaaaccaacattcatccagaaacaatctttaagagccttccctatgcatacactaaattttgaaataatgtgggggtttctcatattttatatctaattattaaattgtatgtattcaaagaaaattagtatttatgattgaacaatataagtaggattgcatgataaagaagattttttttttctcactcttgccttaagcgcaccactaatgcaaaatctcgcctaaaataattaaatgaccaaaactaaattttaatatataggtccttctatagtaaattaatcacattaatgatttatttttgatttcaagatcttaatctaatgattaataatatctttctattttgaatataatactaaatacaataataattttttaataaaaaata

SEQ ID NO: 321745 - DNA, 807 bp, Cannabis indica
aaatagtatttacccttttttaatttttttttttcaaatttacagtttgggttgctccggtggtttctccgttagtttctatatgtagattgctatgtagattttattaggttgctctgttagttgctatatgtagattttattatgtgaaatttcgtaaaaatacaaaaaaaaactattttgaagtgtaaaaataaaaaggtccataaattaaatatttaaaattttcaaaacaaaaaattctcaatctcttcactagctatatatatatatagtcagtacatcacattttggcagagacagttgttgaaattattgctaaaatttgttgaaattattttatcaattaatgtatgaattgacataatttttgaacattgctaataagaatattgcagttgaaaaaatctgagaaatgagatcaacaagatcataattatcctactaattaaattataattaaggtggtttttttttgtgcgactctaaagtagttttttttcttctaaattctaatcaagttgatatttattgttaacgatgctagcttatatatatgacaaattaagtttgtatttaatttctagggtttgataagagacataatatatatgtacgtgtttcaaactaattgattaattatatacatatgtcaagtaattaaagtgattgttaccaaaactaattgtaaagacataatttgaaaattgtcgaagatcattactaatattacatggtcaaatttaaggcatcattaaaatcaattttaattagtaaaatattatctaataataataataatatggc

SEQ ID NO: 321746 - DNA, 1250 bp, Cannabis indica
tatttgtagtttgcttcttagtaatgcatattttgtggcatttagttttgttgccatatttatcataagatgactcatttttcccatatttttgaaaatatccctttccataaatacctaaaaaggacaaaaaaatattaaaaaatgcatctacaaattcaattttcaagactagttagaatttttatccctaaactttgacgtacattagattatattcttgaaatcttagtcattaaaaatttctcttaaactattgagattattgtattcaaggaaacctaatcaatttcgtgcaattttactaacgtggtgattgtctatgtatcaaatcgtgttctctgaactttgatatgtactaaaatgtatctctatataccaaattgtgcccctaaacatacatatacgtcacgcgtttattaataaaattagaagaaaatttttaaattcaacaacttcaatagttcgaaataatttttaacgttttgaaagatataattaggtacatatcaatattctaaggtaaaaattctaaccagcattttcttaatatttgtgtggatttaaattttatttacaaaaataaggacactagattttacattgttttcaaaatattattgttgcctcatttctagcattgtgttacattgctacaatatggaaataatgttattattataaaaatgtattgaaaatgggtaaaataaattataaaaatatatattcaaaaaaattaggtaagtcgtgcactttttaaaggggtgtttcggtagacttctatttaattctgcatttataagagctttttagtctattttttttcataatcgcatatattgtagttatttatgatcacttgtaaatttttaaaaaattttgaataatttacaataccgaagaaaaaattaaatattttgtttcacgcttgactattttccttgtacgcctggtaagtaattatttaaactttatttttgacattgtaaactatttgaaattttctaagaatttataaattatcttaaatagctacatgatcacggaaaaaaaatagactaaaagactttcgaaaatgtcaaaatagataaaaagtactattaaagtcaaaaccagcatttagggtctactacataaatttttaatatatatatcacttaaaagagatgcattgatgaaccatttacctgttttgacattcaaaaaaattaagtcattttttattattcatgtatattatagttatttaa

SEQ ID NO: 321747 - DNA, 1333 bp, Cannabis indica
atttcatgtaattttcacttctacttgaggtggttttataccaagttttgttcaagatttattgttaagatataggataacacattttcaataaagcgcttcatgaagataagtttactttttataataatttttgttcttcatttataatttgtaaaaaagtaatttggatatatatagtgatttatgttttacgtttcttttggtttaagagaaaattaaatataaatattatcaacaatagagattttacagataagttacattataacaataatcttcacatttttattatttatttaatttgatatcgatatgtttttttttctttttttgtacataggttggtgggacaaggacacatctcgtgaatttcttttctgatatggagtttattgtctaatttttttgatgcatatctttttatgtatgtcacaacgttattattgtggcccaaaaattggtttagcattctcttaagatagacagtgaacttttttagatggaaaaaatctctttatttctgtctttcaatatttttgctctaacctaaaatggttaccttaaaaaaaaaaatatgtattgccacaattttttgaccaaacatgacttcatgaggaagaccaataccttctcaattggtaaatttagtgacatcactttattaacttgcccactagttattctttccgtaattagtttaattaattttaatgataaaaaattaattaattaaattcaacataattaaattctaagataaattaaccaaagattatgggattaaattttaaagataagcttcatgtagttttcacaatttttttaaaaagaacacagaagagttgttatgagctgaaccaataaagtaaattggatctagagataagattcatttaaatttcgtctctacataatacattaactaaggggttactttaaaaaatatgagaaaaattattaagattacgataaatatgacataaaaagtaaatgtcactaaatatgacattatctaaccaatcaaactaaaaatatagtttttttttaaaaaaaaaaacccatataaaacattaaaaaaaaaatgtgaatttaaaattcataaaaataaaaactcaattaaattaccataaaaaaaatattaaaattacctttcatatttatttattttttaaaataaaattatagtgatcgccgaaactgtcactcgtgtcgaaaaagtcaccggagtttactgtcggcaccgtaaaagtcgtcggagtagccaccagtgccggaaaagtcgccagagtttctgccggcgccgaaaagtcgtcagaattagcattgtccc

SEQ ID NO: 321748 - DNA, 1537 bp, Cannabis indica
gtgttcgaactcccttcgatctctgaagtgcttgcttcctcctgaggcaagaattggaagctatctctcaaaagcttgtagaaccttctcccaaaggtagcactgttattcttcttctttttttgtagactttattacagactcaagacaataaaaaatacataaatacagagaaagaggtaaacaaactcttctcaacaaaacaaatactctcttttctaaagacataaatacaattcaaagtgtatgaaagagatacatgacctatctgctataaggtgtatttataattaatatataccttattgacagctcatacacagtttgaacaagaccacaactcacttagaaacttccctaaaataattctttaatcagcccagaaatttcttattctgtactcatagaatcgtgagcagtgtgtgcgactttctttttatagaaaaataaattcttgcttcagttttcttcaaaagaaatctaatctaacattttaagaaattcacaaaagatcagatatacacaactggatagatagatattggttgaatcatcaaacttaccctttatgactcactttccataaatagaaaaactagtcatatttactaccttatataattcaattactatagaaacacaagtaaggaaacaaccaaaataactcagccaaaaataaacaattaaattataaaatatttttttcaatttaaagatgtcaaaaatagaattaacaaattcattaaaattgggcttgttgattaatagttaggattaaaattactaagacaaatttgtggaattttaaaagctaaatttatattttatgaccttcaataattcgaatctaaaaaatattattcaacaaaaaaaattatagatctttttattattttttttatagcacattaaaatttgaattctaaatcaaaatttatgaataatacaatacaaaaatatttttatttagttaaacaaggaatattagtatattcctcaaaatgaaaaaaaaaataaactattaaacccttaaatctttaaataaccaaatttataaaagatatttaatttaaaataaaatttcatatttttatagtatttatatttgtccattgttttttaaagtatatttataataataattaaaatctatgcttactctactttatcagttatacaatattatattatattttatcatttgatatttaagtcattctcctcctatctcaatagttttatgtagacatcaaattatcgtctccatctgtttgttcggttttttgggtccgtcccttgttgttgggcttggatcaataagggttaaagcccatttaaatgaaacaattataaagagaaaaaaaaacaagggagttgatggttgtgtcgtaaagaacaagctcaaccagcagaatgagaaagaaagaaaaagaaagctagagagaggttttgccactttactttgaagatcaagtagttgattctcatctattttagctcaaattttgggtggtgaatcctgttggaaattatttta

SEQ ID NO: 321749 - DNA, 581 bp, Cannabis indica
tggaattgaaagctactcctcgacggaagaactacgcaatcggggagagatggttaaggtccggagctgcttctagagccggcggaatggcgttttccgatcatgctacgactggcgagagatctgcgcccatcaatggtaatcagaccaacaacaatcatgggaggcaatcacggctgaatcacatcccacctaataatctgggatcatcatccaatcaatcaactaatgaaaggggaaattcaaataagatggctatttccttgcctcaattgaaggaaggtggtgacataattgatcaatcttcaatgacagataccatcgtgggagatactgctttgaagccaaatatgataaataaggaaactagtattcttattttggatactaagaggagaaggactgatattgttaatgggcttgggctgaacaacaacctagacaataacacacatgtggaagttactaatgatgagcttggtgatgttgggccgatccagggtcaaggtgaggatatggataccgatcttttgaaaaataccacaaaaaacttgtttgggcgggttctgtttcacaggccc

SEQ ID NO: 321750 - DNA, 729 bp, Cannabis indica
tttttattgaaactttatagttacatacaattctttcctagttttttttttttttggtgataatgtctaaaactaaaatactttgtaacgtttgttatttactttctaatttgttaatgttgtgtcaatgtgattttgcagattagggacttaaatattgctgaaaaagaggaggatattggctactatgctggttatgttggtgagtttattattttattcagtaaggctcctttagtaagtcgtataagagttgtattgtattaaataataaataatacttagataaaacaatatatttattaattatatattaccactaaaatttttaatttgaattattttatacatatgatccgttttagtttgtattataatatttataaagaatttgagattaaccttaattttcgactcagatccagggacttgaaccccgaactcaggactgaatttggactctcgagacttaaaccaagactcgagacccggactggacccaaaccccggactagagtcacataccccgaaccctagacccggacccaaacctagacccaaaacctaaatcgaacctagactcagacccaaactggattcggactcgacctgtagtcggtgttgcagttgagtttattaaaaatatattataacttacacaacctatcagtggcggacccagaatttaaagtgaggggggcgtaaataaatttaaaaagaaaatataaa

SEQ ID NO: 321751 - DNA, 875 bp, Cannabis indica
tttggaaaattagaaaaactgcatgtgcgggttaatttgaaaaaatagtcaaaaactgtaccacccgcaccgcgaacacccctagtataagccacctaatattgcccccctctattatctaattctggctccgcccctgaacacaaccaaattatcgagcatctgggaaggcataaacggatgccccatgggtatcccagatgagtagtccaaggggtgttgaggagctaagggtttgtcctctatgtcagacttgtgaaaggcccacaacacaaaaagcaactacctttttgtccaatgtccactactctaacatttgtgttcatgactggcggcgcacgcccaactatcaccatcaaatggcaccgtgttgtacggacgacgattactcctcaattgggcctcacctactcggcccaaaatcaatattatattgtattttatcccatctgtaggcttatttcatttttgcaaatcctaatgggtctaagttttcccataaacccgacttcagcctatataaaaggcttgaacctttcatgcaagaggttacgaatttcggccacactctagttagaaatttggcaaaaatacttgtgtaaaatataatattgacttgtggactaaggctcattaacgccccaaccacgtaaggattctgaatcgtttattttcaatcattttctttaagctcaatctatttcttaatcagttttaaaaaatctcggtaaataattattatacttgaaatgtcatgacgtgtataaaatttattggaaaattctatgtatttcggcatctatgagacttgtttcgtgtaatttcttttcatgatcgtgtacgttgtacttatttaaaatattttaccaaaattt

SEQ ID NO: 321752 - DNA, 928 bp, Cannabis indica
tttaaaattccgtgaaactgtatttttataactttttcttttttattattatttttgtgaaattattacattttttttttcaaagaatactgatactattacatcaccttgtgtaaacaacttacacattttatttaacctatcattaacccatttgttaaatatgtatacactattaatgagattaattggttgatactagagagcttctccattatgcatgctaattaaggttattaagctggcaaggaatacaatattaaaactaattaagatttttttgcctagccataacatttatcaaatcatttaccaaattgtgtttctcgaacttttcaagtcgttaaaattttttctgaaaatattaaaattcatggattcaagaactttcattcaattttattaacggacacgtaatgtggtaattgttcatatactgaatcatgcctctaaactttgtcatgtatcaaatcgtgtctctcaaacttacgtctgtgtcaagcacctattagtaaaattgaacaaaattctttgaatgcaacaatgacaatagttcaaaaaaatttaacggcgtacaaaattctaagagcacaatctgatacatattaaaattcaaaagaaaaaatctttattaaccttaaattaaagtaacccatataacacccaccgagcagctaccaaatgagacaggtatccaattgtttctatttcacaattcctaacctaagctcttccttgtaagactagaaaattgttatttcacaattcctaacctaagcttttcttagtaagactagaaaattgataaaaggatacacatggtgctcagcaatgctcctaagtcctcagaatatttagtcaccattaaaaaaaaaggtaaatactatttggaccctgtgttttgcaaaagttacagattggaccctgt

SEQ ID NO: 321753 - DNA, 1461 bp, Cannabis indica
tgctctcatgtgacctctaacatataattaagttgctaaccatcccattatggttatgagtaacattaggcacataattaatgattgtgtattatggaattaaacctatgattgtattagtccattataataattctaacatgggaaattctttagaggttttttataattcacataatattaaacttaaaaatattatatttaactataatacacattaaatacacactaaataaatgtgttaaatatatcaatacgattttgacaatgaaaaattaaatatattatccaaacttattggttttattgtttttgaattgtgtcgttgtgtcattacgaattatcagtcctattaatttttttttttagaaaaaggtaaattaaatattgaaacaaattaagaactttaatctaactttatactaaactgaatttgttggaaattttaaaacaaaactgtagtcagaaaaataaaattttgattttagatagttaggctttatttggactttaaattttaacatcgaaaattctgtagagaaaaatattttacgttatatttttttaatatttgtaattgacataaatttcataaaattatactacaagatgggtcctgtttgactaaacgtatacttttgcttatagctagaagtataaaataaatttaagtttggacttatttttacaattttgatattattatatggagatatttttttaatgatttttttaagttatttatatattattaaaaaaaaaattgtaagtaaattagatattatgtaaattattttaatttaaaataatttcttaaaagttttttcgggagaaactacaaattttagcttctttcaaaaggacttttaaattaaaaagagatttttaattttttatccaaacgcttttagaaagatttttttaattctaaaaactaaaaaagagctcatagaagctaaaccaaatagttattagtaatctttctaaagtaaaattctttatttattgattaaatcaaaaatgagaaacgaaatccttttttttattatttaactttttttcttctttctctttcttaaaattcaatgtttaggaaaacttacaaaaatattgtcgcacagaaaaaatttcaaaaatactgtgtttttataaaataccagtagaatacaaaacggaacaactcaaaacaacagtggaacaactaaaaaacaccagtagaacaccagtgaaaatttaacatagtatactgcagtatgaaacttataaaaaaataataaaaaagtaaaaaataccgtctgacagtatttttgtaaaaacatggcaaaagttaatataatttcccaagaaaaaagccctctcacagtcacacatagcatatctaggttggctagttgtgcagttttacacctaaaaactccaattgtgtgcaacaataattaaaaagcccaaaagagaaaaagg

SEQ ID NO: 321754 - DNA, 1343 bp, Cannabis indica
aagaaaacaataaaaagaaataaataaataaataaacaaaatgaagtaaatttatgagagaaaaaatagatagaaaagaaagaaaaaaaaaatagtgggagagaaaataaaaaagaaaaaagtaatgagaaaataaaaaagaaaaagttaatgaaaggaaaaaaatctaagagaagaaaaattcattaaaaaatcatctttcaaataaaaagaaaatcataggaaaaaaaaaggttaaattatcatatattttttaaaaatcccctaatcatattagtagtgatggacatttgacttacggatactcactctaaatggggcgaggattacctgacttaataagtaatagagcaacaatagaattgggaatgatactacccaccctatactcaatcgagatatatagtttttaaattttcatttggtttttaattagtatgtattaaagttattggttatacttataaagttaaatattgctcttcttaatttactgtgtaataaaagttttttaataagcacaatgtttacttattttaaattcaatttttttttttattttgaattatattacattattttattattattttaatctaagtaggtatctaatgagttctgatagccaatagagattttcccactccaaatcatggaagactaagcgggacgagagcaggaatagaaagcagaaatgggaaaggagagcagaattggaagagcgtatctacccaatttccatccatacacattagtcatattagtttgtagtagagcaaggtgaggagtagtagaattcaattacatggcccaatacaatccattgaggaggggtacaccaagcttgtgatgggattgggtgcatgtgatcaaaagtagataaataatgtaggcactcctaactgattaatgaaaggaaatgaatgagtgtgggctcctttacttgactctactcccattccctcgacagctccatcacctttatccattatttttctttctttcttaatcacatttcatttacattcatatataacatatttaatttacttgactctttgtcttctaggatcatctgtgacaatatttgtatataatatttctataattctaatattaaagtgaggtcacatcctattaagataaaattgtatactcacttattaacctacatttttttattatgttaaaatatgaaagattattacacattagagcatcttcaacttgacatcaaatttcgtcttacacctatactaattttggattcaaaaactctttacattctaaaaaaatttcaccaaaaaaattctttaatgttataaaataatataaagtagatg

SEQ ID NO: 321755 - DNA, 839 bp, Cannabis indica
aatgtagtaataggcgtgtgagggtaattttgtaataaagtgtctaaaatggatttttcatgtaaaaatttcttaaatatataaattttatattaaattaaaattattaaaatggggcgccgttagaaatttttagggtgtaaataaaatttcccatcttgaaaatttacatcaaatatttttttttggtaaatttttttaacttttatgttcaaatatatgattttatatataaatgtagctatttaagttatttgttggtttaaggatttttatttttatttttttatttttattttgaaaatagatagaatgttaacgttaaatgttgaaaaataattaaataaattaaaaataaatattaagaatcttttacgattgaagaccttctttaattgaggactacaactcctttgttctctcaactcattctgactcgcttcgatttaaacattgtccttaagaaaactcgattctaattgttgcaagcctagttctgttaattgtggacctcgctcttcggctaccactccaatctggagtacattatcacctcaaccggagagcagaatgcggtctcagatcccaaagctgagtcaaatcgtcttagatccaaattctccttgaattgtttcacccaagagaaggcgaaacaactcaggcaaaactcagtgatcgcttctagactagcgttgattagaagaaccaacccaagaagtaacggttcttgttcggacagtggcggacccagaatttaaagtgaggggggcgtaaataatattaaaaagaaaatataaagtgtagttagtgggatttgaacctttaccctctaacctatt

SEQ ID NO: 321756 - DNA, 983 bp, Cannabis indica
atcacttagacatcaaaaaaatacaagtcttggacgttttggcactcacccggcgtccaagttgacgttataatattaacctggtattgggtgtcaacctgggcgctgggtcgtcaacttggtcatagagtgatgaacaaccttcagtaaaacgaccataactcacttaatattgatctgattgacacgattaaacttgcattttgaagttatttcaaagatcaatcaagtcatttatcacacccacatcgcaattctgaagattttgggtccaaaatttgtcctcaacaaagttgctatttttttaacaaataactcgaaaataatccaatggacaagattcaaagttcgaaattgacaattttcaccaagagtcaattttcaccattggatcatcatgaatcatcatcaaaggtcaagatcatcacaaaataattttttcatattttttaattattattttaataggatctcctttcctataaaaggagagctcatgtagtttatttttcacattctttgaagttttaaaaggttaaaatatctctctctactttcgctctctagaatttttaatcccacacttagccaattctttgtaaatctcgtgagaaataaaaacaccaagtggacatagctccattactgtagtgttaggaggagtgaactactataagtttgttgtgtctctcttacttatacttaactctcattccattctcttcaatctaacgagcgcgtattgccaaatatttgtgtccagatttttgcatcaacaagtttattatgtcaatatctactactgcatattgtgtcaattaaaaaaaattatcattgtatttttaaactaaatatatgtatttatatctacaaaacaacacaaatacagtaaaaaaaaatgtcagaaatagactcaaaatatacactatataaaaatacacatgaataaaaaaaactaaaaaataactgtggaacaaaaaaat

SEQ ID NO: 321757 - DNA, 1128 bp, Cannabis indica
atcaacatatcgatccacactttcaacaaataatttaagttttttttttttgaaaggttataattaatatttagccatgaatctacgcagattaattaatatttgtgtatataatatacatgtataaaaagggttaatatatcttttgaaaatttaggatgaaagattaaaaaataagaatatgaattccccctatatatagtctactgaaagttttataactaaacactcacaatagattctttaaaatagagaagttacaaaattcaaagaagcttattaaaaatatgctacatcatggtctaaacttttttcattttaaacttcctttaaaatttactattcatcctctatttattactctaaacatattttattaattttttttttaattttaataatttttttgaatgagaatgtgtgaagattcactttgacccagcacacaaaaagataaaaagaaaaaaaaaatatttcataaatatggtaggacccacattttattaaataaactaattttctctcattttcccaccaaataatctctctttcccacttctctttcactttctctctcttcaaagattcaaagaagtcataaccaccaccaccaccattttttggcgaccactctctggccaccgtccggctccaagcgccaaaccgttcaaacccccaggcgtcaacgacctcaacccccaagcggcgccacccctttcgccgtcattagcacgagattgcaagtcaaagtttagaggttcaaacttttaacggattttctagccacctccagtgtcatgcagtttaacgagtcgtcttcaccacaagacttagctcgtcgaggagaacaacttacactaagccattttgcccaacccgctactttttttggtgacgcttttgtagctctaccccttttcggcaactttttggtgatattatgtattgttttggcaaatggttggtatgggtttgatctactcatcgaggtggttattttgatatatactactcctatttcggtgtcatttctggtacactaatttttaccaccaccgatagttaatgtaatgttcccgcttcaagcctccattaggcccttatacacgagtacgtcactctggctgc

SEQ ID NO: 321758 - DNA, 1080 bp, Cannabis indica
cttaaatatagtgtaattttatcaacaaattaaatggtactgctacagagcaagagattctctacatcatctggtctccaagcaaatgctataataaaactacaattttctgtacgagaatggagagtcaagatgtgcaacagatttttcgaatctgccatttaagtatatatataggtctcccaatatgttctaagaagatctcaagtgtggaatgtgaactgttgttgatagagaagatgtgaatatggagctatagacatctttcatatgcaggaaaggtcattttagtcaactccattcttgttgccattcactcctattgggctcaaataatggtcttgcctaattaaaaaagtcttgcaagtcattgatagggatctgtagagattatctttggcatggttcgcgacacattgcagctatgggtaagtacgcgtgggcttcggctcaaaaacaagacaacttgtaagtgaaatgggttcatgaaatttatatgaaaggtttgaattggtgggagtacgtataaattcaccaagatagtagttggtattggacaaaagtaataaaggtaaatgctgacctgctactagattgagaccatgaaatactggactcgagaagcttgtgacacttttttttcagcgtacatttagtaagaattgttttgatcagttgatgcaatgaattggtattggatcaaatcaataccagtttaaagaaatacttaattggattgggaggatacaaattgtaaacaaaagcaagacgaggagagacatttacatatggtgtttaatacttgtgtatatatatatgatttggaggacttaagaacaaagttttttgggataaagaggtccctactgtgtaaagagatttgtgcaaaatgttaaacaggttatttgtattagaattaaagtcttagacataaagaaaatagaagatactcgatcagtgacggacctaaaaattttactttgtggggcttatttattattaaaaaatatttatacatatattataattactcttactaaatttatttaatttcgtggggcttttttttatttattttta

SEQ ID NO: 321759 - DNA, 1302 bp, Cannabis indica
ttttttgtgtttttgtgtatttctgaaataatccttttaattattatagaagagttttaatgatgagataattaaattaaaaaaatataataaattcaatataaaatagtacttctttgatatcagatatttttaaagaataaagtgattgatattaatagtaaataattacttgattataatattattaaatagagatttaatgatgcaaacatgattattgggaatgttaactaagtattgaataaataattaaaaatggtattaatatgagatattaatgaaatttaacaagtaataaatttcacatcatgaattgagaagaagtcttaaaatcataattaaatacaatagactattatagagttgtctaactgagtgaagatattaaatatacttggagtatattaaaataccatttaaaatgtgaattcatttaaaagatattattataatttagattaaggagttaattaataaaagaatatatgtcacgacccgagccctaggccgtgacagatatgtaatatctatatcttaggtggtcaaaggtcacactttgacctttttaggaagataaatcttataaatgatcttttaatttttatcacaaaatactaatttaaaagtaatggattaactcctatattaataaaaaatattagtaacaaaattaggaccactcatcaatataaaagaacaataatattcccacggttatgtaattaccgaatagatagatttaataagtcaatagaataccaaaataatacctagcatccatcattcctcatttctaactagtgcatagctaatttaagtcatacagaccatccgtttcagcttaaatacaaaatgagtttcatagaaagattaaatagtagaacaagactaaactaataacgactttcttcttcaacggtaccaccctcatcccctagcatcaaactgagttcctggaatggtaaaaaatagggggtgagcttataaagcccaataggaaaacaactaatatcaaaagacccttgatttaataaaattcttgcatggttagctttttaaaaataaaatatctcatcatcaatatcaaaatgtataaacaaagtagagagaccacaaataatcacaaaattaaacgtcaaatacatatcacaccgtccaccagaccctcaataccaatcatagaaaacgacatccaaaactaggtagtcgcacttgatatccaccataataccgaggctcagatttaattcactccctgtacagattctaggtctttcacctacaggtgagtgcacacct

SEQ ID NO: 321760 - DNA, 1372 bp, Cannabis indica
ttacggcttgtattgttgcggtagttgctatatgaattgctatgtgaatttaaattgcaaagttattcagttaattactatgtggattgttatgtgaatttccgtaaaaatatataaaaaaaaattatttgaaatgtataaatgaaaaaaaaaaataccttttaaaaaccataattaataatagtttattttaaaataatgtaagaaccggacaaactaattagcatattttctttggtataaagaagattgaaatggattagagattacagttacaatgtttaatgtttagttgagccttttaacatttgtaatacctctacataaaaacttttcactcttttctcttacttctttagcaaatatgtatagttgacaacaaatgaaatgaggacactttggttaatatattaattattgaattttatttttatatcaaataaaaaaaattgattataatgttcatttcaaaataaaaaaaattataatagtattagtaaaccaaactcgacctacattaatacaaaccgttcttatcgagtaaggaatatttgttaattaaaataatcttcttccaaatgaaagattagctttcaagtaatgtctaaaaaaatattgaacttaataataaaaagtgacaaaactgtggtaatagatataattggtattttttcacacctagaggtctcaacttcaaattttcacttctctattattacaaaaaaaaaatgaaaaaattgatatgatcatatacctgaaatcaaagtcgcattcatcttggtcctcatcaattttaacttcaatatcacctagttgatcttagatcaaatgatctcaatcctgagatggttaggttctagtttagttgcattatttgtgttcttaaatctgttcgttaaagtcgaccaaatggattttctcatgacatataggttaaggacatggtagtttaattgagtgggaaagttaatcatagatacagaatttataacttctatctggatgtagaagtcaaacaatgattttatttgatcttggcttaacagagataaatggttgagtactcattttagtgattatattagttcactgaaatatcatttataggtagctaagtgtttcaaggataaaatacaatggagggtgtaatggtaaattaatccctactcaatgtaaataatctatagaggatcattgattattgagataataacaaatggataatctcatagcgtatctatatcgtagaacatatagagcgttttatataattgagagtgcaattctaaatctatagtgatgcaatgaggaattaatatgttagagaaggtaatggaaatgagtcttttgggcacgccttattgaggtctgt

SEQ ID NO: 321761 - DNA, 1147 bp, Cannabis indica
tcaggaaaaaattgagccatctattccttctatagaattctgaaacattatatgtgtttactttcattgttttagaaatttatatttaggatattaaacaacatacatggtagtaaatctagatcctggtaaaagatattccaacagtgcatagatttaactaacttgaataaagcatgtccaaaggactacttcttgcttccaaggatcgaccagctagtagatgctacagctggccttgagatcctaagcttcatggatgcctatttaggttacaaccaaatcaaaaacacccaccagacaaagaacatacaagtttcatgacagacctaggcttgtattgctgtaaagtcatgccttttggactgaaaaatgtaggggccacctatcaggacttgtgaataaaatgttcaaagatctcattggccgtaacatggaggtttatgtagacgtgatgttggtcaagtccaaaaaggctgaggccacgtggaggatctacatgaatgcttcaaaatcgtccaagagtacaacatgaagctcaaccccctcaagtgctcgttcaaggtagactcgggcaaattccttatgttaatggtcaaggccaggggaataaaagtaaaccaggacaagatccaagccctactggacatgaggtcgcccaaaaaaatagtagaagtacaaagcctgatgggatgcattgcaatattaagcaaagttgttttaaaaatccacagacaagtgtgttcctttcttcaatatactcaaaggaaacaaaaaatttgaatggaaagagtagtgtgaaagatcattccaagagtttaagaaacaattagctcaacctcctgccatatcaaaacctctagacaatgaagaactaggcatatatttggccatcacagaatatgttgtgaatgcagtcctgattagagaagaagatggtatccagcatccagtgtattacgttagcaaaaggcttattgacgctgaaagttgatacccactcatggagaagctaacatacttcttgctcttagcatcaagaaagctaaggtcgtacttccaagctcacccaataaggttgtacactaaccagctgtcgcgacaggattatagaaacctaaagcgtctgactgattactcaagtggg

SEQ ID NO: 321762 - DNA, 841 bp, Cannabis indica
tagcataaatttagtatacgtgcctcgcacgtaattttttactagtatatatatatatatatgcacgaagtatttattgcaatatacatacttgtagattattcaatctcaattttaagccatattcaatagaaaggaagcaaagtaagatgaacgaagagtttagaaaaaaatagaagtacgagaacggagaggatagttgttttgttggattcaaatctctaatgtgggcttatatatatttatatgtatatactttgagcaatatttataatttattaatgagctaaattataattaaatacttaaaataaatgatatagctattggggttatatattaatagttgtccatagaaagcaacaaccactctattctcatcttctcctatcaatagaaaaaactagagaaactataaaccttgtactcttgtaagataattacttaaagatctaatctacatatggattaagatcattaccataaagatgatctctattaatagattaaagtacctttcccgttttttttttttttttaattaataaatgtattttttagatttatgattaaacacttatattaatatattaatatgtaatatatatatatttgtctatcaaattaaattttaatattgtatattttatgagtgataaaatattcaaacaagtagtatcagatttacttttgattctttgaggatttctgatttaagaaatttgggaaattttaaaaaatttataaaatttgagttttaatcacccatttatgggttttttgttactttgatgtttgggggtgtttttcgaaaaattcagatttaatttttttttttttt

SEQ ID NO: 321763 - DNA, 1014 bp, Cannabis indica
tattgtaatttatttattcttaagcaaaactcacaactaaatttgagtgtttctatatataggttggattcgtaaatttaatataaaggttttttatttctaaacttacgaaaaatatgatgtgtgaatttaatttaaaatataaaataataataataaagttaaaaatataattgaaaatatttataatattttaaatttaaatttctttatataaaatattaacatagttttttattttattttaatttaaagttaaaccaataaatttaaaaataagattaaaattatcaataatattttgggtattttaaattaaaataaaaatttatttatataaaatatctatataatttttatttttgaatatatattattataaaattaataaagaatattctgtaaagttaacgtagaaaccaaaaatgtatcgctaaaactaaaaattctgttacataactacaatttatatagaatagatatacttgattatatatgatattttattttatattttaattatttttattatttattcttgttattctattgcaaattatttatttttatttatttattattatatatttttatttcaatttaagtttttcttaaaagaaaaaaataaaacagtgtagtcttcttaaaccacacaagattactttcactataatccattcttgtttaatctagtctaatcccgcgtactaaacagacccttaaaatttctattttaaatatattttcatagctatataaacatttaaataaaaaataagtaatttttttattaataaattataattcatatatgcaattagtttagatgcaaataatattataaacatctcaacaaaataataccgataatagaaatatttatcaatactaactaaaaacgattacaataccgcccgaagcattgtttaattttctggttgaagcataaacaaaaaaaaccaagagtgagaaaaaggaagaagaaagaaagagaaaaagaaaaaaaagaaaaaa

SEQ ID NO: 321764 - DNA, 1186 bp, Cannabis indica
taaggcattttaaccgaaggcaatttttttagttgtcgattttttcggtgttcggatggtcggtgtattcagtttagtcgattttttagatttttttctcacccctaacgagtattagaattgactagcatcacctataattgcacacaaatactaaacacaaatttaacatatacttatgtgacaaataattttatccaatcatctccatttatgatgggtcctacttgttaaaaataatttactacccaggcccagctttgggcataggtggcctaggcctgtgactagggcccacctaatctaggggctcagaaaaatatttttttttcctttaaaattatacatattttgtttattaattttaaaaaatactatattttttctaaagaaggacctaaaaatatatattttttttttcgtatgacccactgaatttcaggctaaccctgttaccacgaaatgtgtgttaagtttgtgtataattagggatgcacacggggtagaaaattggcaggaagtgctcctcccgtccccatttccattaaggattttaatttccatttccgcttattccccattgggaatggggcgggaaatcccctaataggggcgggccgggacgggaaatcccttaataaaaaataaagtttataataaaattttaaatatataaaaatatcaaactatataaaaatttaaatattacaaaataattattattcaataaactaattattattataacacaacttaaaagtcataaaaatgatattaatatactacaaaaatgtaaatataaattataaattgtaaaatattattaaaaatataaaataaaatactaaacgagtcttaggacggggagtgtgatccctgttgcagccccatttaacatttaaaaacaaaaaataatatctgtctctgctccattctccatttaaacaggaaatgctcctctcataggacatctccgtgcagggtccatgcatcccaatgtataattgatgtgtgagcatataattactatcaacccgtaatcgaaggtgttacttcaccctttctattcaccaagcattaattttgctaaaaaaatatcaagcattaattagacattaaaaaatctcaaaatttgttaaatgctaaaaagtattagtggtgtctaacataaaaaaattattatatt

SEQ ID NO: 321765 - DNA, 550 bp, Cannabis indica
ataacaatggtcaaaagttttgtcacctgtcatcatagaacactcatcagatgaaactaagcattgggttttaaaaaaacttacgtcaaaattagcatcacacaactgactgatactcgagaggttgacttttagcccttgtacatacaatacatctattagttgtggaatgccatttaacttaaagtctcctttttccatgacctgtcctttatttccatctccaagaaacacaattcattcctttgcccccttttagttcatcaagacttcaatatttccaattatgtgtctcaaactgtcgctattaagataccattgatcctttaccatagttgatggggatgtgtgtgccaccaaggccatattttcaaacttaggtctccaactcactcgagaaaattttctttgattcttatatgattgtgagaaagaaccttgtcgttgaatcatacttttcaaatatgtctgcaacttataacatcgaggtcttatgtgaccttttttattatagaagtggcatgttggcacaaatcattttgaaatgtct

SEQ ID NO: 321766 - DNA, 1693 bp, Cannabis indica
ctgaaaaagtggatgttttatttctagcggaaataaaagttgatgaagttgcgatgactcaattgaatgttcgactgggtttctcaaatgtagcgtgtattccagctcttggaataggagggggtttttgtgttggctggcgtaatgggattaatttacggatcaaaaatgtttatagttcggtgtttgaatgtgtttatacgcctttgaatgggatgcggccatggacactcttttgtgtgtatggcaccccttatgcgagggagaaagacagtttctggcaataattaagtagtgtgattattggatgttcaactccttgggtgatcattggtgatttaaatgtgatcttgaaggctgaggagaaagttggaggccgggctttccgctcctttgaaggggcaatacttcaaaatttcttgatggactcgggaggagtggatttgggcttctcgggcccttgtctgacctggaagaatgcaagagaccatcctcatggggtgagaaaacgtttggacagggcaattgcatccccttgttggtgtactcaataccctcgggcaaatgtcagaaatcatccaattgtggcgtccgatcatgctcctttaactcttgatactgatttaattgaacgggggctaagatattcgtttcgctttttcgaagtgtggacatcggacccctcttgcggtcaagtagttgagcaagcctggaagtggccttgcaccggttattggagttttcaagtaatgcagaagctaactaagactaagggggcgttgaaggagtggaataaaaaccattttgggttctgtgatgccaagctgaaaaggctatacaatgagctctctactctgcagtcttccactcctgagagacaaagagaggaattagaaatccagacagaaattgcggatttggaaattaaaatggagagtatatggaagcaaaaatctagagaattgtgggtggctcagggagactgtaattccaaattttttcacacttctactttggttcggagaaggaggaataatgttcgagccatcaatactcatgacgatgtgtggatcagagaccgaaaagcaattggatcgtatctggtaaacaatttctgcaaactgtatgaaagttctgagccggttattgacagtgattttgaaatgcttttcaatgagaaggttacggagcaggagaattcggaactttgccgaagccccactgatgaagagattagggatattgtttacaagttgcatccgctgaaggcgccaggccctgatggtttcccgggaatcttctttcgcaaatactggggtacggtgggaggagaagtgtgtaatatggtcaaagaatttttcgtcactggcaagtttgttgatcaactaaaccactcgttcatctgcctaatttcgaaatgtgaaagcccaaacaggtttgatcaattcagacctattagcctctgtaacttcgggtataaaattattgccagaatccttactgatagattaaaaattgtgttggataaacttgtgtgtccgttacaatcggcctttttgccgggtcggtggatcgcggagtgttcggttctcgctgctgaagccttacatgccatgaaaaaaatgagaggaaggggaggatttattgttggaatttattttaccaggatcttagatctactcacaagtatgtt

SEQ ID NO: 321767 - DNA, 1212 bp, Cannabis indica
gttgtatcaacttgcattggttcgaccgagggattaggatcattctctatttaagtaaaagaagatagaacattagttggagttatatttgaaagcatttcctctaatactactttactttgcggcttgaagttcttaatatagtcatcttcaaggaatgtggcatttgtagaaacaaacactggttcactgcagcgtatccaggtgtagggactccgagagctagaactttgggaagaggtaatagacccttccacatcttccatacccccaacctataccgcattacctgggaggatctgggtggattcgataaatattttcttagcatagacctctatagatatcccatgaaagactatatagacagggtggaccaaatcattaggagccctagtaatgtagaggtattcttagacactgttagggtggatccttttgtgaccatgtcattgcctgacttcaaggaatatggcagcttccttggtcaaagaaataaaatttcttttgcttgtggtgaaccttatagctgctcatagaatggttgcacccacgcacaagccttcttagttaattttgctgttttacaactgtgtcttcatttattttgacttggcttgtactttctagttactgatattctggttatgcgtgcagatactccagaatcgaggttgttaaagtccttgagcaacaagattattgccaccctagctaaggggggagacacctaggagaaagggaagggcaaaggcaagtctcgggcctacaggacccaaaaaccacatcctccctcaactttctcgtcatcagatgtttgggaaatcgcaactcccataaaggcaagctctacactccaaattccttggctcccgttggggttgagaaaaatcttactgattctaggaaggtgttagaggcactaattgctccaagggagcaagccttgggggaaactccataggcaaagggagcgactttcggcattccgatgagtgcgggaggttaagatgatagcttggatgggattgtctttccctagaagggtgcccccacgtatcctaaatgcaaagggtcatctacttccctgagccaaggtgcgaaaaaggcaaaatcttcaacttcaattcctattccatatgatccattattcacaacaccctcatcattgcaacaacaacaacaaccataacaacaaaaaacagtagcaaa

SEQ ID NO: 321768 - DNA, 2061 bp, Cannabis indica
atatatatatataataatgttctctctcttcactgtcagtaccactagttcaatcaccaagtaactacaaataataccaaacactactactactatatacgtctttaattgtttgcttcctaattcttaatcctaacttctcatatttcaaatcccacatatatatatatatatcttactgtacattttctcatcaggaaaaaatcgatcgatggagagtgagagaagacgagttatgaggaatagagcagagattgatacaacggcaccgttcggtctgtcaaagaggccgtttcgttgttcggagaaaaggttttagcaggggagctctatagtaccaccaagctcaaagaggtaatataatagttattcttataatttatgttttattataattgatgacattgtcttcacatgattacaactacaattttgttttaaaggattacataaattctatttgttctgattcatttttctttttttccacttgtcttggtttgaagacactctacagatttttttttcttaccttttgattttattaatttatatgtctacatatacagaattatgtgtgattaaatatataacaatacagaatttgcatggtaatgaataaaatatagaattaagttgtaacaatttagcatgccatgaatcatatactcaggacattttgtcatgcccgcctcttaataattttaattaatacatttatagcagcatttaatatatattttattaatataaaaaataaaataaattagtatttacataacaataaaactttctatgcacaaataatttcttttcaaatattaaatgttgttatgtaaaaaaaattatttttaaatattagaaatttattcacttaagtagttcagtcatagattttttttttatatttatcttttagaagataaaaataaattataccgttttattattttaatcaaaataaattttaatatattttaattttagtaaaaaattattaccttagaattgttgtttcaatattttctaataatattattagttttcttcattttaaaaaaatatattgtttttatagaaaaagttatttatatatttaaaatataaaatcaattaatttttttaaattgttttaaaaataaaaatatatttataaataaaataaattacttaaaaatattttttttatattaaaatcctaaaatttagttttgactttctaaaatatataagataaattgcggctactatactttatatttacttacaattaaataccaaaagtttaattgttttagtcagtgaaagtaccaaacaatagaacaataatatgatgatacatggccataactttattattttagttggtaattaattaaatttgctgctcaagtactatactttatattacttaagttgatactgaaatataagaaaaagtaacgttttggtatttttacaaaaaacaaaaaaaacttaatcgatacttaaatgtgaaaaaaaaacgtaaattttttaaccttcaaatttcccaaattattgtaactaaaacattttaggccttctcccaatatataatattagtaacagataagaagccttttttgcatttacaataatgaaatgatgaagtataaattatcaaacactaattttaatttttgtaaaaaatttatattttttacgttcaaaatattttttttttttattatttttataatgttctataaaaataacacaaaaataacaaaaaactatataaaagtaacagaaaaataatacacaaacaatatttaaataattaaaaattaacaagagtataatataaaaatatatcaaaagatcatattttctgtaaataaaatcataaaaattgtataaatatttaaagtttcacacaaccatatttttataattcttttgaaattaccccttaaattaattaaaaattaaatcttacaaataatattattttatcgaaaaaaatgcattgctattaggcaccagtagtgtctaggacctctagacatgtcgtcttacgattaactcctaaaacttatt

SEQ ID NO: 321769 - DNA, 1241 bp, Cannabis indica
gtcgctagatgggcttatgctcataatatctcaagtattgtagaaccctctgctatacctagcactatcctgtgtaatgaccgtgaggtctaatcttatgatttcaatcattcatttcaaaaaaaaaaaaagatagaagaaaatacattgataaacataaataaaacattaattgcttgtatacgcgcttgtcttgtcttgtctctacaactttattgaaaagacttcctaacatattacatcaactttattaggagttttgatacctagtgggtgcaccatcatttgtccttatttgacaaaaatagagacaacaacaatgatgaccctctattttttttaaatgaaatataataataccttgagccaaaatttggtcatacttttatttaatatatttgaagccaattttagtacaaatacaggcaaaaaaaataaaatagcctccaccttaatgtatttttatatttttaactaaaattgagccgaagatattataatcatccattttgaaaacatatagttttagttgtcatttaaaaagatccaattgataatttttataaaacacagggttgaaaatttcgaaaataaaataaattactttaaaaatctatataaacaatttttttttaatcatagtctattttgtactttcttttattaaaatttacttcatttatctcatcattttctctctcattttctattatattattttcactatttttacttaaaaaaactataacgtaaaaataaaagttataaacacatttttatttaaaaatttatacaatatacttaagatcagactttatatatattttacattttataaattttgttggttgtacagatttttccttgttttgtttccagaaagaaacattgttttcaagttgtttttctcttgaaactaagagtattcataaaataactgatctaatccaatccaatctaatccgtaaagtaacaatatccgcacttgtacgtatttgattggattagaaaatttaaaatctgcacttgtgcggattggatgttgattgatatgtaaatccaatccacacatatttataaaattttttaaaaaattatatgtacaattaaaattttaatgtaaagaaaatgataattgaaaaatctaatacatataatacgcatatattttaaaacttaatatattaaatgtatattccattcttatatataatttttttctacatataatttaaaataaa

SEQ ID NO: 321770 - DNA, 508 bp, Cannabis indica
atatatatatatatatctttctgatctgagtgttgtactaccgtctgtttgctttgattcgtgtttaaatacttgtacatgagtcggttgatcacagatctaggagttagttacaataacagttgtaactaactcctatttcttgatccagtagaggcgaagccacctaggattgagtccttgttcattttttgttgtaattaaaatgctgatgtggatattttgtgtgtaaagggactagttataagtagaatttactcaacaagtactttgattgagatggagtgattgaagtaaattggtgatcagttctcattttgatctctgttctgattgcaatttgcaggatttcgccattcaccatcgttctaggaccagagctatccacatttgccactaatggtggaaatggcttagataccatattgttaggagagttgatcaatatccgtaacatgttagaaaattaataatatacccaagatctatttgtatataacatagaaca

SEQ ID NO: 321771 - DNA, 1538 bp, Cannabis indica
gaaaagcatcgcaccaggtgcaactgttggaaccttgattatgttccagcaactttgagcaaaaggacatctcaccaatatatgcagggttgtctcaggaacaacaagatataagggacacattgaatcaattggtacatgtctagacgaaagctggaaacgcgttgggagactgttaaaggatgccctccacaaaaaatttaacaccttgggaggaagcttaagctgccataactgacgccaaaaaccagagttatcaggtaaactactactggttttcaatgattgtagcatagcataagcactctttacagtgaacaaacttgactcttccttcaaccaataccacatatcacttgtcgatgacgaagagagaggaatcttccaaactagcgatagacccctaacattgagcacatctgtaacaacttcctcatcccattcaaccaagcctactttcataaaagaatcaactgtcttccccacaaggcctggatgcaaagattcaataaaaggattctcatcatcaggttgccaaggctcagccagtatagagacgttaggaccatcacccacaatttgccgtaccccctgaccgaactgcctcaaaaacacttctccaaatgtaacttggattactacccaaagatgcagtcaggaaagaccctgtagagaaatatctggctttaaacactctgcccatcaagctatccccacatgtcaaaagtcgccacccttgcttagctaaaagagctaaattgaagtctcttaaatcacgaaaccccattcccccatggttcttgtgattcttgagtttgtcccaacttaaccaatgaattcctttatctttggtcgatctccaccaaaatttactaatggcaccctcaatgtcttgacaaatgccaaccgggataagaaacacattcattgtgtaagccgggagagcttgcacaagtgatttaataagaatttcctttccagcatgagatagaaatttattatcccaagactgaattcgtttctgcaccttatctttcaagtagccaaatatcacatttttatttcttcccacagtactcggcagccccaagtacttgttgtgctcagattcttcagtgatacccaatctattgcatatagtaggtcgcatggtggctgaagtattagtactgaagaagacagatgacttaccaaaattcacatgttgccccgtaacagtagcgaatgaatcaagcaactgttgaacccgattaacctcctcatgtgtcaccttacaatacttttttaatatttatccatataaatttatatatttcttgtgaaactctttatcatttttctttaattgagtagtatgtattttcacggtgctcatttattcaattataaattctctaaactagccacattatttcattaacacactcctatgtgacgtttggtttgaggtaataaaatggaatagaaaggaaaagaaacaaactccattccattcatttatttggttgcatattaaagtgttggaatgtcattctaat

SEQ ID NO: 321772 - DNA, 945 bp, Cannabis indica
ttcatctttattctactttcctccaccactacaagaagaagaatccaataatgataataatatgttgatatttgatgaccctatcaataataaccatctacttgggttgtcaccgccgccgccgccgtcttcaccgcttcctccaccttcgtccactgttccctcgccatctccagcttcaagcacagtgttgccggaaacttctgaggttttgaacagtacaactccgacgacgccaaactcatccactctttcttcctcgtccaatgaagaacaaaaacaaaaagtagtaccaaatcaccaagaggaaataactgaagttgaagctgagacagagcaagatcctgaaaaatcatcccacaataataataacaagcagtaagactcatctctttctctctctctctctctcttttttgggtactgtttggtttattattataattattattattattatgacatttaggctttaggtgccatttcttagtcacgtctgtagtaccacttgtgttctgatttaactatcaagatcatcttttgtgttaattattattactattatgtgtgtggggttttggattttattttgatatatatatatatatgtatattgtataggttgaaaccgaaaaagaagaaccaaaaaaggcaaagggaaccgagatttgcgttcatgacaaagagcgaggtggatcacttagacgatggttacagatggcgtaaatacggccaaaaagctgtgaaaaatagcccttatccaaggtctatacatatatatacacacacattatataattaatcatcatcatccatgccaatcttcctttaattacaattacttattattaattaattatctttattatggtccccaaccagctagcttgctataatagattataaatttgagttacccataactcaattaataataataataat

SEQ ID NO: 321773 - DNA, 884 bp, Cannabis indica
aaaaaattatatataagaataaaatatacatgtgatctatcaagttttgaaatataattgtattatatgcattagacttttgaatttctatttttgttatattaaaatgttatttgtatatatatattttttaatttttttaaataaatatatgtggaatagatttgatcggttacttttacatgtcaatcaatattcaatccacacaagtgcaaattttatatttttcaatccgaacaagtgcggattgaattgatttgagtcgttcggattaaattagatcggctattttatgaatactcctactttttaaaatttaaaattattattggtgtaacttaatattaactctatttattttatttttattaggttagagattaaagttaactaattataaaatatcacttcataataatattaggcacattaatgtctcgtagtaatgcttgataaatttaagcaatcgtggcttctcatgaacaccatgctgttaccttaaaatatttttatttaaatatatatataaaaaaaataaaaaaatagaatccacctactcttgccctaaagtaataaagtattgttattgggcattagtggtgtccagcatcttttataagcggcgttatacaattggttcgctagcgatattttctaaaagttatttttttaaggtttttaaaagtattccactggcactacttaattacatcaatagcgatataacacaaaagagggtactagacggtgccttttagcaattttcaaagtaaacatattaaaaagtgatggaatagtagaaaaggattctggaagtgttttggggtgggcacagggccggccctgaaatgtagtgggctatagggtaaaaattattttttggg

SEQ ID NO: 321774 - DNA, 741 bp, Cannabis indica
taagagccattcattccgtgggtgtaagggcccaatgaaagcttgaagcggggacgttacatataaagtaatcaaattttagtctttttttaataatttaatgtactttataattagtatcattctgactaagaatgtaaattgtaatgatcaaattaatttataggagataattcagaaaaaaagtaattataattaaatatgtatgtgatccattacactagctagttgtagcttctttttttgactctttgtatagtaatagtactagtggtcaccaccatatttatatattatttttatatatattatatataatgtatttatttatatattcgaaacaaatacaaaaaatcaaaactactttttgtgaggaaatggaatatatcgacatatccttggacgcctactatattacgcatgtaccaacgtaattattctaattaaatatttataattaatttaatgttgtatataattaattacattaatatatagtttaatcataagtacgtgcaccatgcttttactttaattattgattcttaattaattcttaattattaatatattatagcatattgaaaccgttttatttcctttactttttgacgaccaaattaattattaatgtcatttttacctcttaattttcgttttttctaatataatataaaatattaatttacacgatatattttactaaatgaatgatatttttatacctctaaataaatagta

SEQ ID NO: 321775 - DNA, 768 bp, Cannabis indica
tttcataattaatcataaacaactgctagtttccaaattaactaaacgggctttacactaaacatgtatatcgaggaaccattgatctatatcatcctacttactatgctacaaaatatcaagttggtatcagacaactatcggtctatatcgtcctactgaatatgctacaaaatagcaggccggcatcggacaactgtcagaactttatccctaatctttaaataatttaactctcagaaccccatcataccaccattatcaactatcaggccaaataaaaaccagaaagcccaaaaaatacaaattttttccaaactcaaatttccggcaaagaaatactaacaaaccacatatccaacatctaaaaaacattttcaatcatcaacagcattagtagaaacaaaaatcaagtacccatttatttttaaacaaaatgagacaatgctcctcgagtcacaagccaccaatttggagttcttcaaatcaaagtttttattacaagattttagtgaaaaaatcttgtataattattgatttgtttagagagaaaaggaagaaaaaaaatagaactcatttggacgtgggaatgaggaggaaagagagaaggaagagtaatgtctttttttttttttttttttagggttaaattaccaattttggaccctctgttttacaaaagttatcgattggaccctgtgttttgttaaatgacaaaatggaccctgtgttttctaaaatagtacaaataggaccctgaattgattt

SEQ ID NO: 321776 - DNA, 2480 bp, Cannabis indica
attggaggttcttctattttggcctattttagtggttccagagcaaacattgattgctcgttttttatttcattgacatatcttttcttggaattattactctctctagcgaggtgtggccctccggagatgaccaatatatcctcgccctcaataaggggaggttgtaatctttggttatccgtgtttttaggctgattaggttagttttgctcattccctttacgcttcatatattatccaaaatatccacgagagatcaggctctctgtcccgtcctttagttgtcgacactcttcgattgtatgccctatgtatttatgaaatcaaaaaaatcttcttggatctcgtttgtgtctcgcatgtctcattggcttaggtttacgaaacgcaacactgtgctcatttgcgagaaagatgttttcacgagtttcattcaactcggtgttagtgatgtaaattggcacatatttgtcgtgctttttctgtttcttcttatttttagatgattctctcgagtcatcttttcttttggtgttcgaaccacttggactatcagccttcgttgagacagtacttgttatggcagtacttgtgttgggtttttttcccaagctagtcttcaacaacttcatctcattccttgcttcctccttgcgcataaacacttacgctcttttgttgaaatcattaatgtttcttactggacgaacctgtaagtcatcacacaactcgcctccagctgttgaaaggttagttgtgatccctgtttgaacagtagtaagttgaatactgtcattcaagttcctaacctttgcagcaacaatgctaaagtgacttaggttagccttatgcgactcgcctggttgttgctttatgttagttagggatgatgcttctggtcgcctatctttggcagcttaaaattgtttcttaaagtccttggatagctgttcccaagaagttatcgaatgatgagtaaatttatcgaaccagctagtcactgccccagtcaatgaagttgggaataaaatgcatcgtacattatttgagacgttgctggctcgcattatggtattaaagtaattcagatgtgcaactggattagtagtcccatcatactacgagacgggtggatttttgaatccctgagggaattcagaattcattacatcagaatgaaatggctccgtttcctcatccgagtcatagcaaggtaatttcccatgctccccatcttggtattttctaaacttgtcctacaactcaatgattcgcaacttgatagggtccattagttgttggttgacattacgatgattgtgtaagttaggtgcattctgatttagtcgcttgcaaatatcaggttgtcttcgattaaaatgctaacgaagattaggttgtcttcgttcataattactcacatagctcgtatctaagtaattcttagattgataacttctcgtattgctcatgctttcttgatcagcataatgtcaaggtgtgcttccttcttgcattttccttcctgatcgactgtgcccttgagacctcgagtgtcctgagctagaacttgcctcaccttgtataggccttgtcctttggaaaaggttagatacacgtcctttatttacgtttgtatatacaccctgcctcttggatcgagagggatgttatgggtatcacagtggtaacccacttgctctaggttgagtcctaggatttctctcgttattacgagggatttcttattccctagtttggggctgccatatacccttattcctaagagaagcctcttgtacatcattacattcattcccctgattcgtaaatccttgggatctttgaggacattctcgacgttattcttggttattttgttgttcatccactggaacatccctattcccccaaagttgctcctcctaggtgttttggggatttccttgattcacttcctgcctcttggttcttgaaccccgaggtctgcctcatggccttcttactccaagatcaggttgattctgtgtaatagttccttgagttgcccttgccgcttcagcctgtctttccaactcagcgtttcattggttagatttgactaagcattgtcggatttgtcaattttccaattccactaatggtcatacctagttagatcataagcatcctcaattctaggtaaatatctaatagtagtattggtttcttcgttccttccttctgggttttgattatttccaccatagtttcttcttgaacgtgttgttccagaagtatggggtctttgagaacccattggttctttcccaaggagatgtgtagtctcatcaggatgacttccattgttttgattgtgatcagccatggacagttttttgtttgtaaggaaggatttttctgagttttgtcacgtaggctctcaaagaaagcaccaaactgttaacgcagatttttgttaaccaatataagccttt

SEQ ID NO: 321777 - DNA, 3308 bp, Cannabis indica
agagagagagagagactgaatttaatcgtatttttccatcccacaaacttatgttctctcacatactcttcactcctatatatatcattatatatatatcttattatatagatcttatatatatatatatatattaatatttaagaacttctttaatcctataaaacaaaagataatattatattttaatttgaaattcaaaattcaaatttaaaataaatcaacagaattcgactataactctttattttatatcatcttttagtttaaatacattatcctataatatatttaattcatataattaaaagataattatcttttattttgatttatcttatttaataaaataatcttttttttttggaaatcagcgttttatagatagaagcactaaaagttagacctcgtggtcattacaaaggataaagtctggtatagaagagggatcaaccatactggtaacattgttagcagacgcccacttagctacattatgggccacaaaattacaaactcttggaataaaagaaaaattacaacctaacataaaagtagagagatgtttacaatagtgcacgtagttatcgattccccaactgggacaagttcccttttagagtcttgataactgtctcagagtcactctcaaccatcacaaaagggtgtcgaaatgaaacgacagtctccatggctaaaagacaggctgcagcttctccaataaggggatcagagaagttaagcatgtttgtagccatccataaaattgactccgtgtggtccctagccaaagccacaatacacatggaaccgcacctaactctcacatcacaattgattttgacccaatcatcaggtggaggggaccaaacaggagacttaactgcttctgacgaagcaaataaacaggactcatattttacgtaacagatagagatagagtcaatacaatgtttcctcaatcgagccctcaaaatcgtatctaccacaaacgaggcatagagaaacaatttgtcaacatcaaccccttttgattttaaattccataaaaatttaatccaatctcaaacccgagcaccagaatcaaaaactggcatcacttcccaaggagaagatcgccaaaggtgaaaagcaaagttgcagtagaggaaaagatgctccatcgtttcctcaccctccccacaaagaggacaagtaacctcctcaatatgcattctcctagcaaggagggcaagaataggaagagcagtagaaagaatgtttcaccaaagaaccttgtgacgttccaagactttagagctccataacttgttccacaactctggggcaacatcacacacaagggcgcggtcaaaggcttgaataagataggtagacttagtagaaaacaaactacccggttctttagtccatacccatctatcccttccttgaccacaaggcttaccacccttgatgatattaaagaccgtttcttgatcgaagagagtgtgtagtttagagatgtcctactccccgttgtcaaggagtaaatccgcaacttttttcaaaccctcagggggatgattgataggctttggatagaagttctcgctatgaataacccacggatcatcccaaatattcgtttctttgccatctgatataaacttgcaagcacctttttttagaatatctttagttctcacaacattcttccataaccaagagtctgagttcttaaatgaaccctccaagaacggcctacccttcaggtatttggctcttaacactttacagcacaatgattgttcctcgatgagaagggaccaaccccacttagccaacaaagcttgattcatttccaaagactttcgaaagctgaggccaccccgggatttgggtagacataggtgatcccaagactttaagtaaagaccatgattcctttgcccacagccccaccaaaagtctttggccataccatcaatcttagaagcaagtttcttagaaagcttcgttgtttgcatagtgtaaattggtaaggcaagcccaaccgatttaatcaagttccacccatggagttttgaaacaaggttgtccaaaataaagttgaaatctgcatccttctaacgagacctaaataatgggagccccaagtagttaatgtcaccaatcgcattattgagcccaagttccagcatgatggctcttctcataccctcactagtgttactgctgaagaagatggaggtttttagtttattaatccgttgtccagaccagtcgcaaaacttctccaaacactgccaaaagcccctagcttcaattaaatttgctctacccacaaggatcatatcatctgcaaagaaaaggtgagagagtgtaggaccattcctactcaacttgattcccctaatagctctagtatccagggcgttttcaaggattcgcaagagcatatcagcagcccatatgaagaggtaaggagagagaggatctccctgcctaatgccgcactcagggatgatgctactaaccttgcagccattgaggcatacattaaaggaagtcgttgaaacacattgccggacccaattacaaaacttatcagggaccttaaagctccggagcacatgattaataaattgccaacttagtttatcatcagctttgactaggttaattttgatagcaaacaaaccttccttcccctttttgagtttaaatgagtggataatttcttgaactaagacattattattttgaatattccgttctggaaaaaaagctgcttgagtaggacaaatcagccggggaagaatcggtctaattctattggcaatgattttagaaattaccttgtagaccacattgcaaagagaaataggtctaaactgagatacttttttcggattaggtaccttaggaatgagggtcacatttgtagcattgagacccctatgtgtaaactacttggatttttatatgttaccctacatgtgtggggcttagccccacacatgtgggtcatattttaaagcctaaaatacttttatcaattttgcataaataataattgattaattcttattaatctctttttcactaggattaaaataaataatatcttacataaaataatatttttctctctttaaatattatttcagattaatgttatatttaactagttaatataattttatcaaataaaattaaatagttaaatatcactttaattattcaatttataattcatataattattcaaaataataatttatacaaattattattttttctcataagaattatttctcataaaa

SEQ ID NO: 321778 - DNA, 970 bp, Cannabis indica
tatgaacctcatgtggcttagttcatttgatctaagctaactatgcccaagtctaagaacttagacaaggtgcgtggtgggaaagtgatggcaattgagcttcttaaagctgccattgagagtgatgatttgagagatcgagcttttaggcaaagtcctcttgtgtttagcattcttaatgaaaatcaagctcaattaataaaagatgactactgccttctcgaaactgttgtctagaagccacgatatggtggttttaatgtgtaatatcccaaataacctaattgtgaatattaagtgtttattattatattatgggttaatcagttagtgatgagtgagattataatcctactaatatattttaacataaatatgaatttttccataagtggataaataagcacaatttattaattacagagctttatttggaatatgtgggtataatgtgagttattggtgaaataaaaatattttccaatttggcgatcttggagacacgatcggaggaaaaaaatatcacaacaagtttagttggaacaaattttccccctctcattcttttctcttgaacaagccaccaccattatcaacctttctgtttttttctgttctgatatgggtttcatgcctttggtagcagctagattaagccaaacttgaaaggaggcctaaggtaagggtttggttctcttttccttctttgaaagtttaggttttagaagtgtgttttgtttctgtagctgctatgagttgagtaaggctttggattagattctgggattgaataaaagcatttttcagcattcttttggtagttttgcagttgtggtagagtgagagccaagcttgagtttttaagctcaatgcttgacctctcatgaaaacttttgattgagggcagggccggccctgaaacaaagtgggccatagggaaaaaaaaatttgggcccttatgttagaaaaa

SEQ ID NO: 321779 - DNA, 1949 bp, Cannabis indica
cacacgtggcgtccctatagattagggcgttacaacttggtataagagtagtcatggttttaatggtcctaaagactggttggatatgtacatgtattgtaagtgtcgaagactggttggttttaaagtattgtaagggcgaagacaggtcgactcatagtattgtaagtgtttgtattaattgctattagattacttgtctagattattataaagcatgttggaaaagtaatgtaacgagattgttataggaatatgtgtgtgacatatgcatattgatattgatatttattgaattttgaatggttggaagttttggatcgcaagtgcatgcagcagtagtctgggcgtttgaactatgagctggggctcggggtaagtggtgaggaagatcatccttaaccaccttagaactgggaacaagtgtttgttgccatgcaagaggcaattaggcagcaagggtagaaaattcgagacccgacagagcaacaggctcgtcctgcacctatattggaacttcagatagtgcagcacaatgttggagattgtatggaaccgattcatgagcggttcaggaaataaaatttgcctatgtttgagggtggtctagatccactaaaggaaaaatagtggataagtatgatatttccctctatctttgactttatgtgggtcaaggttaatgaccgggtacgatgtgctgtatacatattatgtgatgatgcccagatatggtgggagatcgtatctaaaggtcatgctttgaatacaatgacttgggatgcatttcggtcaatattttatgagaagtattataacaatttcattcatgtcgcacaagcagaagagtttgcacagttagttcatggtagcatgactgtgactggttggccaagtttgcttctgatgaagtgactactgaagctgtacgaaaatccaagtttattagaggcttggaggaatacattggtagagatgttattatggaagccaaaaaaataaggggttgtgaagacttatcctcaaattgtggatttagctctcactactgagggggttgaaggtttaatttgtaaaaagagtaatcagagaaaggatgcgtggaagatagtgtctgacactggaatgagcaagggatctaatcccaatgattgaaagaggaatcaaaatgaaccatcgattatggattcaaacataagatttaagggtaaccactcttttcgtcgggatagaaatgaagtttgggcatcctaccccgaatggccaaaatgcaagagatgccatttgggcgaatgtcagaccaaagcttgcttccaatgtggagtagcatgaaattttagaaataagtgctcggagctacagaagactgaagtcaagaaagaaaaccataaggctttccaatgtattctgtttatatagaattgaatgaaacttgtgagaggatcttcctcacaaatgaaaatcgagtcactttctgaaggcccgaaccaatgaagaatgcgagaagtaagcaggatccaagcaaagattgttggttccacaaagatgtaggacatactactgaagaatgttgccaattggaagacgagattgaaggacttatttcccgcggatacttagatagtatatgagaaacatgggaaatgaaaagaaccaacccaacaactaaaaccaaaaccatagtgtacaatctcccctagttgaaggcgatgacattctggttatttttggagggccacatctcgctagaaccagcaatagtgcccaaaaatgtatattaaccaagtaaaaagtcaagtattagtttttgcacttgaggaacccccaataatcctcattgacgaagatgcgacacatgtgcaattccaacacacagatcctctagtcatcacacaaattttctaacttatattttataaacaattaaatattccacaaaataaccaatt

SEQ ID NO: 321780 - DNA, 997 bp, Cannabis indica
atgtataattaacattaaacagaaataataaaaaagaatttttattttaattttttaaaataatatataagattcatgtacttaaccaaacgacgtaatccaattaaaagaaatatgattacatattacctttcatagccaaacacattttacacatttctctataatcatattgtccttcataatattctcctataatcaaattatttttaacacttcattccaaacgccctttaagtgtataaattaagtgtatatctagtaatatttttctattatgattattattattatcattacatttgtttttttgtttttatcttttctcttctataaaaaaaatgtaatttgattataatttacactaggagagttttatttgttattaacacaatcaattttattatttttaatttgcataatatatatatatatattaatattttttccttcattctcacattctaaaaaaatacacatataaaataaaatatagttgatatgggtttatttcaaatattaacataaaaatattaaaacaagaaaatatataaaatcttagtagagtgaaaattataataaatacatattatttaaacaatataaaaacaaataaacttacaaacataatattttaatatggatatatttgtagatttttatttgaaaattcaaaaacaatttataaatactgaaccccgtttcaataatatattttcagtcacaaaattaaaattttcatgtcaaaatcacaattttaaattttataaattttaaatcacgaaccaatcagcctaacatttaatactaataaaaaacaggaaatttgaattaatatacttacattaccctataatttttctcctaaatgcaaatttattaaaattggtcatatatgaccactttaccaattttcctaaactacccctctcatttgaaaccatcagcctctctcttcctctctcttcgtctctctcagccgaacaaacccaagaaa

SEQ ID NO: 321781 - DNA, 1082 bp, Cannabis indica
aggaccccaaggtccatatatatactttaactgttctagaaaattttagcaattgtgcttgagctttagtttaaggtccaagtattagaattcacttcattcatttaaacagtacttaactattctagaactttctaagtcagtagtgactttcaacatcacacagtataaaacacaaagacataaaatagaacaaaacacaaaactataacaatctggtttctaaaagcaagattcaatgcttgctacaagactggtaaaatcctataatgttcactacactagcacatatatgaactattataagcacaactacaatcttatggctgccccattttttggtcttcttttcccgtattttgtcctctttgagtttgcttgaaagcttggctttcaaaacgctagctgactcgagagtgtttctagggtaccaactctcgaaattattcgaatcatcactctcaacaacactaatgagatgctcattcatccttaaaagttcactagcatatttttgttccagccacttctcatttgtgatgtgtgtaagccaataaagacaccctgaaataatagttagtactgatgctataagggcaagaccaccgctacaccctggaattatggccccaaaccatccttgtaaggcaagggtgaaagaaactattactacaaatggaccatctactatcttagacttattttgcatatcctcaatttttttgtccaattctttgaagtattcattcttctttgtgctgcagctttctaacttcggctctaattttggctcttcgactattgttacattttcaaatatcgaaaatgttcctacacatttgacaccaaccttccatttgattggaaagtttaataaagtttctgtcgagtgagaccacctcaagtgttcattctttatgttgcgtttctgaaaggctttcaacatttcaggataaaaggagaagaactcatcctctgtgatgatttggttctcaaggagcgccttgtaaaactggttaaaaactttccgaggaaatagtgtggaaatcactaatgcagctaatgctgcaataagtgagggt

SEQ ID NO: 321782 - DNA, 1369 bp, Cannabis indica
tgagcagtcatcttgcatttaatgccgcatgggaggaaacgtgttgcaactgccacacgcaataaagtctgacgacacaacccccaatctgcacctacaaggctatgatcacttaagtctattgacggctacactgtgaagagtcacatcagtcaaaaggcaataaggacattccacataaaatccctacagcacctagggatttgaccatgcattacccatggtatattcattgggaacacccaactttattgatagttacagaaatacatgtactataattctggaaatcaccccaccaaaaacactataaataccccctcaaagctcattaatggggtcgagaattttgggttgcataagtgcaagaagagtaaatactcaccaagaacaattctctgtattaaagacactcataaatatacagactcgtggactaaggctcattaatgccccaaccacgtaaaaatccttctcttaatttcttacagctctttaatcttttattattttattggttgccgaaaacctcggtcaacagtatgtactcaaaattggttggcaattgacaaacaatgtatatttatttatctatgtaaatctatacattaattaacaaaattttgctatattattttgataatttttttttacagacacaacaactaaactaatcaccgtaaatgatcaagataatgacgtaaatctgaatatggtaattattttcattttaaaatttattaattattaaattatacttttattattgactcatttgttcttttacaggagttgtacacagtaaatcttgaagattaggatagatgaaaagtttatagttaatttcatgtaattttttttagaagatttatttcatgtaatcattatactacattataattgatgataatattagtgatggattttaaaaatttggtaaatttttaatttttctaaagtaaatacttttttagtgtaaaaaatttcatattctctttccttcttattgattttggcaaatattaaaagaaaataaatcaatgatgtcaagattgagagcttgttgtagtggctcctttgtgaataaaataataattttattaaaagtggcaacaatcaccaataaaatgattatttaagtgtattaagaatacaaaattaacaagatagatgttacgtgtcagtcttgggtttcattcacgcttaaaatttttattaatttatgaaagaggaatgttaagcagaagaaatatagtgaaaacaaaagatcagatctgaatgatatctcagatcctcttttggattggattgaaaactcgattatgaggtgagtttcttttttgtttttgaattaaatcttccattcttt

SEQ ID NO: 321783 - DNA, 1239 bp, Cannabis indica
tttttctttgattttcaataagttttgagtttatttttggttagggttttgggatatcagaactgtgatgttgagctgagttcagatgatgtttttaggattgttttagagtatgcttgagcttaggttaggagatttaagtggctgtttgagttggagttagaaattttaggttaggatcttgatttgtggttctaacttggaatttttgtgagatttgatgaattgttgtgttttaatgtgtgggatatgttttattttctatattggattgttttgggaagtttgtgcatatatggaagagatttttgtggtttttggggtgacaatcaggttttccttttccgccagctgagaaaccggttaacggtttacaggtgttgtaaaaccggttggtttttccagcaggggaaaattctagttttagcctcaaaaccggttttgattcggggtgtctttgagagcttagattaaggtattttagcaatacttgaattgttctaatccagtaggaagttagatgtccggttacagagatcagggttttatttcagagattgaataagttgtttatcgagttttggttgtcgtgacataagactcagggtcgtcgagcataattccactcaggtcggcccacacacctgatctttggattgaggtaaagagaagggcaaggttaaacaaccatgagtttgaggtcgcagcagcaatgtacatatcagtcgcggtgccacggtccggtggacaggataacccattttgattgtattttgaagtataaacatactttgtaaaagcatttttggttccgaatgtaaatattatggtaacagggaatccccgtagatattaatacttatctttatataaattatgtgtttgtttttaattgcaaaattttaattagccatactttttgtataattatattaattagtaaaagagtagttttgtaaaagcacacacacgtggcgtctctgtgggacggggcgttacactcttttttcaatgggtagttgtaaagtcccgagccttgatggtatgtcaactttgtgttgggttttatgccctaaataaaactcattacaatctgattagttatcaatttagaagtgaagaatgtttacatgtatgttacatgtttatggtttaatacatatacttgatatatgcacaaaatcagttaaatccagaacatatagtaattcacaattacagtatcgtcaatacagtgga

SEQ ID NO: 321784 - DNA, 2220 bp, Cannabis indica
gcatttttttcaaacttgttataaattttttttcaaattattaagattattggatttaatatgtactaatatacttctaaatttttatttatatcagacttttactagtaaaattagacaaaattattgaatccaacaatctaataattcggaaaatattttaataacctaaaaaatttaagggcatgatgttaaagtttgaagaacaaaaattctaattaacttataatttatattaaagaaatatgtggaatacattatgaaagtaggcaatcattccctaatatcagatttgagaaattgtgtcaaatatagttcatacaaacacgacaatatataatgagcatataaatactctaataatatatagaaaagggaatcggtcaaaaaattcttagtgataaatactattattaatacagtgacttgtaaattaaacttcattaatactcaaactaacataaaaaatcatctattctaatattcattcattatttcatctactcaaactacgtaaaaaatcatctattcaaaattttgatagaagtacgtactctattattgttttaaaagtaaatttgtggatgagtgtttcatcaaaggcccgagccacataaaaatatatgtttatttatttatttttgcttgaatgattttattatttttattgttgtgatcatattgattttttcgaagtgaagcgatgttgttatttttgtctcattcaacttaacctggacccaaaatttattttaggagaacttattaattactatataaaaaattatgcctagttaaattattataaatatatgtgtgtgaggggtttttataccatatttcgtgtttaattatcaaataaaataaaaatattaaaaacatttaatacaattttacagtcttctattattcattccaattgcaattaggtgggattgtaaataaatttatgaatcattaattatcatgttttgagtattgtctcatcatttgtacgtaatataatgaaatatataaagattaaaaaaaagagagagagagaaattaaaaattgaaagtaagtagatgagatgggttatcccaaatgggggggaccacatgtgaggtacgtaaatgacatgcaaagtgtgaggtccattgaggatgtaaaaaaataacacatataatgacttaacatgtaatagttaaatagtacagaaattctaaaaatattgaattaattattaatgtcaaatattaaatttatttattatttacaagtaaatttaatctttctttaaataaataaaaaggaaatatacttattattgggtgtgactgtgaaccactctctttcctgttttttctcttcttttcaattattaaagtttatctcatctcatgtcaaaaaaaaacaaacaaaaggtttatctcatctaataataccatcttctcccctctcgagagattcaaaatggatcttatatcgcgagatactgagtttacttatcgtctcattcaaaatgagatccaggattgggttttacaaaatgattccacgagttgagttgaatcgggacaaattaaaaatcattttttatttttaataatagagaatgattaaataaaatttgcattttttaaataaataaataaaatggtctgtttttggtctgccgactgatattgtggaaagaaggaaagttgagctgtatttagtgggcttggtattatacaatgtttctaccacacactacatagtcttattgttgcataaattatccaattcaataataatcaaatgatataattataatcgacttttaaacattggatatcttatatcctaaatcagattagatattatttttaaatatctaattgtatcgaatattgaatggagtgtccaaaaatttaataaattcaatatccaatgaaactaattaatattatcatttagtttagacgagtaattaaattttatattgttatacgtaaaatatatatataaaaattaacattaaaattaaactcttctttttttaaattggatggatccaatctaattcaatacatactgggtctgctaaaatattggatgaatccgacccgatccaaaaaatacaaaatctaaagtattgaataaacctaaattaaatcaataaatatatgaaatacatctaacagatagaaccgatctaatccaacatccaatagatattgatcgattgaatgactaaa

SEQ ID NO: 321785 - DNA, 1281 bp, Cannabis indica
tatataaataatgtacaataaatttccccaacactacgttatctaagcaaatacatcaaatttcttattcgatatgtataccaaaataaaataatatataaaaacaaaaaaaaaaatacaaaatttgaaatatctttcaaaaagaaaaaatgcaaattacctacactgtaagtgttacattttcaatttcactcttattaccgtattgtcttctacagtcgcagtaaaaaacagtggtaacaacataaccccatagcataactaccccatacaaaccaatcagacccaccttgtccaccacacctctcgccacaatcacaaccgtcgatgttggtttcccaaacggatcttgatcgttcatcaacttctccacatccctcgctataagccccgttacaaaaacaaacacggcacttaaaacccacccggtaacccgtctcccactcatgataaccgacccgacccgaatagcatcccatccgaaattatcatctgcgatcgagaccaccatacctagactcatcaccgccattagataaacctcgacgattgatccgacggtgaggatgaagagtctcggcgcaggtgaagaaaacacggcggaaagcgttcggggaatttggacgtaggcgaggaggagagcatagacgacgatcgaggtaacgaagggtcttttccacgttatcttaaatgccgtaacggcggagttgagagtggggcgttttccgttaacggcgaggttgacggagctgacggtggagatggcggcgagtaaggagagagcgtagcaaggtgggaaaaagaggattttggcgcggaagatcgatgcggcgtcttcgcgggaatctttccacacgtgtcgagcttcgaactgagttgaggccaggcttgctaggtattctaggtggtagattcgagattttgatgggtgggaagagagggaaagggagaagagtagggctgagagtgggagggttatgagggtaaaaattgaaaagaaatttgtttgttttggaggaaaatttggatggattgaaagaaaatcttgggagttaggaagatggaactttcctgggtttgtgacattattattgtttcgtctctttcggacattttctcattcactcttcttcttgatcttcaataaggtttagttaattggtaacattagcttatagatcaagaaaagagattatacatcaattcagctttggctgcagttcaatccctttcgtggcctttttctctgaaaagaaagaatacaaacatcacaatcaaacc

SEQ ID NO: 321786 - DNA, 602 bp, Cannabis indica
gattccttgtgaaaattaagcaattttggtctttacggaactcgcttctgataaaaattgagagagttatggtggtttgaagtttcgggtgcatggagtgtcattgcacgacaccatgtgtgcacaagtgctcggacaagatgaacccgtgtgcgtgtctgaaggggttctgtccgaggcagcacccccatgtctgaaggtgcaccttgcaagcagggtctttcgcgtgcgcctgaagctgaagatgtcgaggtttctcagcgtcaagaggctgcatgttcctccctttcgcgcgcgccacggctgtttgcagcctactttggctgcacgtgcagccctcctcggcagcacaccaaaaaatccgaattttttgggatttttacccaatttcagatttcccccaatttcaaacccaaaaatcaaaataaaatattatttttaatatatttaaacttaaatatcaattttaaattaataatatttattttttaattgattagtattaattttattatattttgaagtttaaatttaaaaatcgattatttatttttaattatggtcaaattttaaaattagttatttttttaatatttatatat

SEQ ID NO: 321787 - DNA, 1580 bp, Cannabis indica
atctaagttcctggtaaaataatttccaatatagtcttccatccactttcaaaatttacatctatactgggtgaaagcatcacaaccagcagcgcatgattcatcttatccttcttagaatttgtgtctatgatgggtgaaagtatcgctactagcagcgtgaagtttttctttagtgacctggcctacagcttctctaagcttggcaagctcaatataatctcctagtgccaagtgagactcaccaataattggtttgtcgatccctgacactgtttctcctgcgtagcattgtggaacaaccacaattttgctctgtggaggttgctccatgttgatcagcccttctgtgtgagatcctataggttactctagtcttggaggaatggtgggattaataggattcacatgattggttggattggcggtgttatctagattggtagttccctctatggtgggaggaacactagcatcgggatttgtcatcatgagatcctgaggaggattcgagagaggagctcttctatttagaagcatggtgattaatcagaaaaaggctctcaatgaaagcaccaaactgttgactcagaattttgtcaaccatcaattaagtcgtatttatgataaacaatcactacaatataattaagaacaataaatgataaaagagacacaaagatttatagaggtttttccctttgtttagcaggcaataacctagtctccttttagttgtattgattctagagataatacaactcatatcacaattgttgtgagttctagagtggcatttttgaatagtataatagtgagaccaatgctagaaagaccaagaactgatgagttcttgcgaacgactaaagaagagaatacttagtgtctatgaggtattgatgagatatgagacttgagaaagggagagggagagagaggagcacgaggcttaagaaaatttttgtagcacttaggatgagttaggttttgagtgagacccaatgccctttatatagtgcagggcttacaacagatctagttcaaattaggttgatatcccttaaaatgaggagatatcacctcttatttccatatttaatatatagaaaataacctattaattatttttaaagaataggtaaatatatggagtgttgtccaagttgaaagtgtagagacaccgaaagtttctgccagaagagaagttggtcagcctacccttattttgcaggacttggccggcctatgcactcctatggacggcccagtattcctcctgcaacaccgggatgtgcccgctaacttcctatgtgcctgccagcttttccatgtgcctgccagctttggtacatgctggccaaccttggtacgtgcttgccagccttagtatgtgttggccagccttttttacagttgtccttgcaaatgttaggcttcgttggtggaataggcccttcttggtctaacagtcactttttggacagctagcttgtgccgaaaccctgatcggccatacaagcttcctttggcgagacatggctgtgcagtttcttgacggcttacttaactcatttcgcttg

SEQ ID NO: 321788 - DNA, 1860 bp, Cannabis indica
gaaccagggtttaggtagttatgccgccaaaaatttagtttttgtggttaactgttacaaaactataaagttcaagtggtttaaccgccaatatcccttcaatttataaaagttacaaactcaaaattttaaatacctattactatgaaatttttaaatgaaaaatataaattgacactttatttacaaaaatacatctataaggtgtgggcaataattttatctttaatgagcttttatttaccaaaacattacttacacatatttattcatgttagcctaaatatcacctcccaaccataactttcaccatcttcttcttccaactgcctcattaattagttttttaatcttttatttcgtatatataatggctattatttgtggcgctacttctccatctctattgctaaaaaaaagctttaaaatggttcataaattagttgctaacaaggctaaaggaaaacgcccagtcatcgacaatgatgacttcgattttgctcccctcgtgactaaaggtggtcgtcgtccagtgaagaagaagtcgaaggtgtctttgcctgaaaaaaattctaactctgacggtcagaagggaaaaaataagtcaacttcaagacaattgtgatgaaactgtaatgcaacagttatatttgttgcgagccaactaacataaaaccacaaaacaactaataattccacatatttaatacaaataaatattacaacagtcgtgttttatctgttcaggtcacatatttgacaatttcgagtcttgtttttataatactacgatattgtagtagcaaaactattattgaactaatgtgcaacttaattgcaactagaaatgttaaatgttaatgtatatttttatgaaactatttgtcagtattttttttgtcactgatcaataattaattgtaccttaatagtaatatgtagagaaacaactattaattagacatctgtaaactaattttatatcaactaatttagtatattaataaaactaaatatgttataaaattttatttaaagagctttatattgtattgacgatatgaaacacttgcaaatatgataaaatctattgtatcgttatcactttgtaataattgatatatcaagtttcagagagttaacaaaatatttatgcaactgttatgaaacataaaaaaccataacagtatttctacgtgcgtaactctatttacatgtaaatttactattttatttgtgatttaatattaaattcactactaaaaatatgaaaaataacaaaaatacatcgagataaacattgaactatagtgttgatgtaaatttttttggattatacctgagttggattatttgggagctccagttcaactttttgagatcttcatttcatggatctaaaaattgaagtgaggacattagttttatgcgaattaaatgatatttgagtttaagttttatagtaatttttctgtaatttttttttcatgaattcgaaatagcctctgttttgattgatttcaatcatcttctcaactgaagttgctgtaattaatggtggttttcttttcgattggatttcgtttcggttgtgttaggttgctgggttggtcgatcgaaaattgcatgcatgatgaggttgtttgtttcgttccgtacggctaaagtagtaaaaaagtgatattttggtaatttaatttatgggttatattaatattcataagaccgaccataaatattagggttgtacaaaaaaatttgtaaaccgctcaaactgaataatctgtccaaatcaaacggaaaaaaccgataaaaattacaaaccgaaataaccagaaaaattacaacacgcccaatctg

SEQ ID NO: 321789 - DNA, 588 bp, Cannabis indica
taaatagaagttctactgtaaactatatgagacccaatacttagttagaccaatacccggtgttacaattaatgatgctcaaaagtgccgctgcaaccataaatcggtcaacaagtgtaagttttcttattcattcatattacatactaagcatgccgtttaagattcagcataggaatccaaccaagaagtttaatcgagtttaaattcgagacaaatcgatccctcgtggtgaccaaataataataagtacagaaaagaaaagtatatttaattttatattaaaaaccccaaaaagacaaaaacgtaaaagaaataagatgcccagaatatgaccgttgaatccagctaacacgccacgtcatcaaaagtatgctctcctcgtggatcgctcctttattaaataacccctttctaatttacaaaaagacccctaagcttattgcttttgttttaaaattcccacacaagaacaagaattttatagtacaacacttctaaaagcatctctttgagggtattccttaattaattaggattttttgctccttaaattttaacatgcactaaatcatgttctctaaactt

SEQ ID NO: 321790 - DNA, 1642 bp, Cannabis indica
catccttattagaagagtccccatcatcttccactaccacgaatatccctccctattgatgggatcatataatggacagccactttgggatcatcactgattcgaataggctgttcaactggctcttgatgcctcttgagctttgtcttctccttttgcacctcctactcaatgataatctcctcaactacttgttcggattctcaagcctcctcggacgagtaaagcctgtactaaagaaaattagatgtggtagctagaagggagatatttcgagatgaatctgacaatttaagaatcgtctgggctcttgaccttaatcctaaggtgaaagaaggatgatagtaggaggggatttgcagaaagaaatgtggtcagtatccatgtttttgacaatataataatcatcgaggaaatcaccgatcttggacacctccttgtccgtagtaccgctcagccactagtattcattttgggagaaataaaaatatctcgatctgttctactttggacttaacttcaagtcaaaaagccagttggtatcatgagcggaaggctggccccatccctgtgtggcgtacaacacgaacaacacgaccaaatacttaatgcccttagaagtgagttgggtcgggaagatcttgtagtagttggccattttcttgaagtacagatgcaagggaaagattgcaccttatttggcatggggccagaccatgcgcataacccttctcctgggtttgttgccagctgcccaagatggggtaagaaagtctctactccctcgaggagaccctcgttgaaaacatttgtcaatctcttgtaagtaagtatggacgaaggagagacccaccaaggacccttttttcctttggtggttaaaggccaggcctcctcacactcctcctcgacataatcttggcccaccactaaaacatcgcccaactcggagacagactctccgaccttcttgtaaataccaaaaggaagaaggaacttgaactccttcttcctcttctttttcttcctcttccactccgtcagaaggacttgcaagatggacctcaccctagtcttcaatttcttggagctcgacgtccctagaaacgacttcaacatcttcattcggaggcctagcttgctctgcaccagccattgtaaatagtcgagcaaagtagggatcgaactctaaagatttcctcagtgtttgtttagtgtttgtcatccctttatgcttggacggttgtttcaactcagaagtgtgtcttgcaacagtaacgacaatctctgctaaggcagtatgtctagccaaaggtgttggtcgcctctctggcaatgtatcaacaacaccaagttagaccctatgcgtccacgaagtagggagatagcgtctccaactcttgttcaattctcagatgaattgactgtatccttctccacttatctggcgaggatactgatgttgttgcaccaccggctttggagattcaaagtgatcactgctaacttcccaataatcaaagcttgaagtagaaaagctttcactggacaaagacgagtgtgcacgaggtcaaggatgagttttatagagaatttaaaggagatcttggtcaatgtaatgattacctccccagaactcact

SEQ ID NO: 321791 - DNA, 563 bp, Cannabis indica
atctaccttgacttatataaaaaaaaaaattccacataagagggtcaatctctagaccccacggtcagcccataaagaggatcaataatattgaggacaaacctaagtgtagaagaaatcctaaagcatgtttgtgccaagcactaagcccaagagaagatgcacaaatacaatcaatatttcacattgacaacaagatatgacgccttatatcatgaatagtgattataggtacatgtcttctcaaaccttgctcacaaaaatatggttccaagctagtctatgcaaaaatatatacacacaacaatgaaaactacctatggtcactcgtgtatctataaaatagtaactatccaagaccatctttccttggacaagacaaacctatgctatttatatattgaaaatactttttatagaccacatatcatatcatccataaaaggttgggtcccacctagctacatggatcaacttattatattcattattgtcacctcttatctaccttgatggtggatctaataaatggagttggtactccatatgtaaagtcacgcctg

SEQ ID NO: 321792 - DNA, 1781 bp, Cannabis indica
ataaaattctttccaatcccggtccgcggatttcggtttccaaattaaaaattggtcctcatttcgacttactatacctcccattttctttatcatattcttttacggtgtagagagcataaaattctactaagtcaacactcatctcaaatacctcagagaacctctcaatacaatatccaagaaataggcatcagttggctaggagcaatctaatactaattcaagattgacgaaacaaaaggtggaaaaggaaacctgaagcctcaaaaaaaggtatacgaatacatgccacaccaattaggaacatcccagtctattcgttcctccctcctaggtagcctcatttttatattacgagaaattccataagccaatctcatttgagctaggagtggaaccatcaatttagagccaagattaatgcgtaaaatactctgtgatttacctaggaaactcggtccatcatccttattcactaattgggctaaggcataacctattactaggaattcctccccatccaccgcttacccaattgcatcatggtcgtctacatcctgaccatagtactcttctgcgacggtgacaggaacgagagacgaggcatccggaacctctcgatcaaaatcaccatccatgtccgtaaggaccacaacctgtcagcgaccactatcaatatcggaatgtgctgatctaacaaccatatactagggacaaagaataagggataccccctttccactactcaatgtaagtaacaatactattagaaaatatcgtattcccaccatccacctacatagagataaactccctttggaattccgtaatttcgagatgaatacatagcttggggtctacacttttttctatttcaataatcctaaaatggatgaggaacacaataagcacattctttgttactcaacaattcaaggacggatacaaacactcaaaaaatacatttccctattctttaatattttatcaaatgcccaatccaaaattcctagtccaagcccacaaacacataaaatttatttatttatttaattttattttctttttcctatcatgtttataaaaaaaactatttttctaaatacaaaaataaagctcacccctatatatatacccaccaatacacactatgaactcatttcactactagttctcaagtattacaacaattgtaaattacttagtacatatacactatttagattttatccattattataaacgaaaatcaaaaacattaagaacaatgctcctccatttcaccaaaatcctaaaaatgcttgttaggctatttttagtctaagtttcgggtcacattttatagttgtttttcttttttattattatctttggaatagaattacgcttattttttctttgatttcaggtttctacacttgggatgtataaattggacaaatttcggaaaacagtgatctataaaatagagaaaattttgaaagagaataaagctgaaacttcaagcctaaattcgactatgttctgatcatattttggaaaaagtcaaaacataaaagttttagatctcttttttatctttccaacgcatcttgaatcagctcatttggagttcgtatgagaaagttatgcccattttactaaaagagatcgaagcagaaaattccatctcgccgcggcgagatttccatggccgcggctagaaagtctgggcagaaacgtggttttttgatgcacttttggccgcggcaagaccacttttggccgcggcgagcgtc

SEQ ID NO: 321793 - DNA, 750 bp, Cannabis indica
tatttttgtaaaaattaatctaaattccaatatttttataaatttccctttaaaaaataaaaggtctaattaataatttttacaaaacacaaagtctaaaataatatttacctcacgaaaaaagaattatatatataaaaaaatatattaatcaaccaaccaaataccaccaaatcaatacaaaccacaagtcaacacaaaaacaccctacgctcctacctattccttaaaaattttgaaaatataatttgctcatatattttcttctttctattagtaacactgcacaatctactctaaagcatattcttaatgtcattcactatatacaaagtcaaaaaggagcagccctaaatacacacctattacgattgaaccacaaactgtacacaactgccacaaacaaggcgttaatgacaaaagccataagacttgttggagtactgccaatccaaattgtccaattatctaaatcaagagaccacattttataactaacaacaaattcaccactttttagacagactacacttgaaaaacaaatgagtgaggatgactttcaatttctatatcaaaaactaggcaaagaaagctctcaattagagcataaagtgttgggttttgtgccctaaataaaactcatttcaatataatcagatttactaattaataaagatcagaaatcattttatgttgcatggttcacgtgatttatttcataattataaattctattaggtccagaacata

SEQ ID NO: 321794 - DNA, 498 bp, Cannabis indica
gtgggtgggacccacaattattttttaaaatttatttaacaccccccaccggccctttctctgtatcttcgatctctctttctttctctctcttcaaaacaccaaagacaaacccccataaccacaacctatggagcattgacgacccacctccggttaccgttcgattacacgcgtaggagctacatgaccaccgatcgatagtgaccttacacctcaagtttggtggcaatcagagcaaggacgcaaccatacgaaagcttcaaagttttgccctcaaaactttgaggcgacatttcaatcaactccgaccaccatttggaaaatggttggtatcgttgaaatcagcgtcgcgagaggaacatcccttactaagtcatttcactcaactcgttactttttctcaatgagatttgggtatttgtttgggctaacgggttgtcatccatgtctactcatcaagggggtcgtttttgatatatactaccccctattttt

SEQ ID NO: 321795 - DNA, 1233 bp, Cannabis indica
tatactatacattataaaaaaaaatattatactatatataaattgatgataagaaaataactttttaatataggggtcttgtgcaatggccaataagctgctctatacttaggctgaccgtgtacacgttatcactaatttagttttagtcacaacaagtattataactaaaaacacatttaatcacaacaaattataattttgagactaatacatttatccacgaaatttttagtcacaatataagaatgataatttataattagtcacaactttttcacttttaatcacaaatttcgttgtgactaaaaataaaattttttgtagtctatgggtaaacttggacctgatagggtttgcatgtgtcaactaagcccactgatgggtaagatacaatattatattgactttgtgcaggttagatgagatccaatttgtgagacaacagttatccgtatgaaaggggaccacttgacagtgacaggggtgttgcgtgtcgctgatagcacacaatagattttagaaaagaagatgttggacaaaaggcatgttcattttggtggtgtgcgcactccccatgtctaacatatgggataaacctcttatttggtgggattcagtatcaaaaaggtaccacgtaggattactcccagatgtctctttagattcccctcctggattatcccatgagggcattcggatacgctttgcttggtctttcatcttctaggcaagtcgaccttttgggatcgataagtttcggctttattatatctatacatggaatttgtagctgaatcaggagccatggccccatgataggctgactcacgagtttgattgagcttgtaaatgaacgtcttaattaattttgatctttaattaatttgaaagtacatgtgttatccatccaaaaatgtgaataacaaatatatttggtagtataagttgtattgaattttctttatttttatttgaaacgaatatgaattattattttttatataaatatatttatttaaaatgaaaaaaaaaaagtgttttaatcatgagtacgtaattataatttaatatcaaacaatactatatatattcataaataaatttcaacaaaatttgctttaaaaaaaacaacatcaaatcaacaaacttttttaatttaatgtttaaaaatatgataagtgttataaatattaataattatgtggatgtccaaatcttttatttattacc

SEQ ID NO: 321796 - DNA, 1110 bp, Cannabis indica
ggtcaaagcaaattcagacaatcagatatagagcagtggtcctatatacatatgtaaaattaattgtttagaaatattatattatataacaattttgggatctggccataaccaaaacaaaaaaaattaacaatataaggttttataattttcataaaataatctaaaaggggaataattaagataaacacatatatagggaatgaaacatccatccttatcatgattattattcacaaatgaagccagtagatacaaattgcatatatatgttaaaaaagaaggttaaacatttatggctctgctataataaatagagactttatagttaaaatttgtattaataatgaatattagttaaatacattgtgggctcagtataataacatcatcgtcaagaaggtaaatctacagtacttataagtaatatctcttcatcccaaaaaaactgtagtacatacatatataaaaatatatatgtgtgtgtgttttgctaaaaacagagaatagcatataatatagtttgattcagtaatagtactatatataatacatatacgcatgcctatatattaatattagtactatatatatataatatatattactattaagactttaaaaaaagtaaaaaataaaagataaataaaacaattaaagttctgttcctttggttttggaagaataacaaatgtacagaaggtttttatacatgcatttatatattttttaatagtaagataggtctttatcaatggtatattttgtccagtgaaaaaatacatatagtgtggaatgagctttgttggttgtggtatgtatgcctaagataatgacatgtgagtaaagctttgtcccattttgaaaatctaaaggggaaccaaaaccctgtcttgtattggctacacctcataatatatattaataaatagttttctaaaaataaaaatatcgttgatgggtcttaaagctaataaagcaaagccaaggaaagatagaaataaagaaagaacaaaagagagaatataaaagaagaagaaaaatcaaatattgtgttgtatctttgactgcctcgtaaatcaattcaatattatatattttttaaatatt

SEQ ID NO: 321797 - DNA, 1416 bp, Cannabis indica
tagtataatattacagtaacatagtaatgattttttttagaacaacaaaaaaataatagtctgtatttttgtagaaaagaaaaaaaaatgaagatttgtaagaacgtaaactttttttatttttaagtatttatgaaataatctctatttatatatgtttcatttttttaaaaaaaaatttaagaaaaaaagtttagtccaaataactggagggactacatagaaccagtatcaacaaaattagacaatttaatataaaaaaaaaataaaacaaaacaaaacaaaaacaaaaacaaattaaaagtgcttggcttcataacttaatttttttttcaccttttaaaaatagatagcaactcttaaaaaccaataaggggtgttaggtcaaattttttaaaagcagtttacgaaaattaattttaaaaaataaataaataaaaatcagaaaacatcaaaatgttgctttctattttaaaaaataatttttactttttatctaacatatattttttttacattttctctcacatacccaagtctaggcatgggaccaaggtgtgaggccgaagttgggtctagggtccaagtttggatctgcgttcgagtttgggtgtggggtcacggctaaggttagagtcggagtcgggggctcgggtcctgggccgagaatagggtcggggtcaaagttgaaggtttgagttcagattcgaatcttgggccgagaccaggtctaggtttggatcaggggtcgtgcttaggtccacgatgttaggattttatgtcctaaataaaacttaattttaatataatcttatttactagccaataaaagatcaaaaatcattttatgtaacttggttcacatgttactttcatgattatatgtttgatatataaattatgctaaatcctgaacatataaatattcatgattatagtgttgtcaacgcagtgtaaattaattatgattatacgcttcaaactatttttaatcctccaatttactagtacactgaatttacaatgacgtggtaatcagcaatgtggttgcttacacttagataagtagaatttctatcccaggacattagaaaattaaacttatattagatgtattagctatacatcggactggaccgatattgacaatggaaaggatatcataaacttacagttatatattttctaagtcaatgtcacatagttaatcttagatcaattgaacttgatcttgaaatagttaagctttaacattgttgtagcattcaagctctttaacttgttcgttgttagcttagctgtcggactagcccttacttacatcttagagaactcagtggtgtaattgagtaggagcgttaatcgtagatatgaaatctataatttctataactatttagaagtgaaatgatagtt

SEQ ID NO: 321798 - DNA, 757 bp, Cannabis indica
tcttaattttttttattctatttcatttgaaaagcagtcatacagataaaactagggatttttatgtggtatactgtatttgggcatttttttacttttatactgccacacggcatagtttacttttatactgtacggtattatacaattttatactgtattttataaacagtatgaatcttcttatttttctcatatcgccactcgtgttgttgcatgtctttttttttattttttttattaattattttttttttcaaaaaaaggtgttgatttgatgttgatggtttgttcatgatagtttccttttttaaaaaaaaaataatatcaaataaaaaaaatcatgttattatttgtaaacgccattgatgttctcttcttcttcttcattcattttttttagtttttgaaatttaaatttgtttgagtgtggttgattttgagcaattttcttagtagtgcgatgttgatcaatttttattttttgtttgaaacccaatttctctctaattttttccctcctaactgttgtgcattttctcctataattttccatttcggtttcttttccatggttgtcacacattctaagtctacctctccagtagttaaaaaatcccaaaatacccgtaaatttaagttacccaaatctacaatgtggaagtaaaaattgaaagacaatcctccaagtccttcttcccctgctccttccaaacgcaagttagttgctcaatctccttctaagaggatttttaaa

SEQ ID NO: 321799 - DNA, 824 bp, Cannabis indica
agagagagagagagaagttactctgtatagtagacaaaaatggtggcatcccactcaacaacgtcccaacccaagaatgcagccataataagaaaagagagagaacgagtgagcaagagccaaccagggtgcactcctttccagcagctggtccataactgggaactcccaacataacccctcggcagtgcaccagccgcaaacaccacctgactactgggttgagccactaggaggccgtcgtaaatagtgctgtcttcgagcctggaagacgagccttctcttctccaaattacccataaggcaccgcaaaaggaagcagctacaatgccaaagcaaacgaagtcataccaatatacttgcagtcccatatgtcagtcaattaaccgctgttgtcgttgttaatcgtgaactccaagtcttcagtgtagtgatgtggagaagagaaggacgacccgagtctctaaattcagaaatgaagaaagggtttcgagagatttggatcattttgggagaaggtgtttattggactagctttgtttggtttgggagctacgagttttggttgatggtttgatatggactagtagctttgactgtctggtcaattgctcttgttgaccattcttttcttcaattatttttttgtttttgtgaagtttctacaaagtcgttaaatagcttcattgaaaaattaatatttaaatgaaataacgatggacactcattttatttctagagcattgctattgggcatcagtggtgcctagcactttctagatgtgtcgacttgcaattggttagcgatactccataaaaattat

SEQ ID NO: 321800 - DNA, 1307 bp, Cannabis indica
acttgatgtattactatggactttaaaagtagctgcaatgtatcaattatagtatgtatactacctttagtttgttatttgcattctttgcaatgagagcttacttgtaggagggcaagagcaatgacttgtttgaggtagtaacatttttttgtttttctttttcaagaaaacaaattatttaagttttttttagtgattaggcatatatacgaacagatgtagtgtggaagttgttaagagcagctcgaggcatgaaatatgtgggttgctatgtcaggtggtagctatttaaggaatagctattgcattggagagattttagtgggcatctaccattcctataaagtagcaatggtaacattccttatttttttaatattaaaaaaataaaattaaaaatgaaataaagaaaagtaagaatttaaaataaatatatattaaaaaatattgtgtgggaccatattattaaatttttagagttgtttaatattagagtattttttttagaaaaatgttaaaaggcatcaacataaaaaaagatttggtaattttatttcagagggatccaaagaaagtttactttttgaattaagttctaaaacaattcttttactttttttcttaattatttaaatttatttaaaatatggtgcctagtatcatcatatctgttaatatcgttattgatccaattaactattgtgttttattatagttcgatgcaataatttttaaggagtatcggtatccaatcgcatgacaacatatctagaggtgttagacattagtgatgcccaataccaatattttttttaatataatagaaaggtagccaaaaatgatgtaaatgagagagaaaataaaatattatatttaaagtgatgtggagttttataacaattttaaccattgattacattggagatactctaatgacattttttaaaagtaaaactcagtaacaaaataaatgcctaatgagataatagtactaggaacaacattgttattagtggttagcgatattctttaaagttatatgacttgatatttaattttactaataaatgtatgatactttttagcatatctcgtactaaaaaaacggcaaatactattttggacgttgtgttttgcaaaagttactaattaaaccttctgttttgttaaatgacaaataaactatatattttctaaaatggtaaaaaatatataggaccctgaactcaattttttaacaattttatttttaatataaccaactttaagataatttttaatacgaatagatataaaaaatgtaa

SEQ ID NO: 321801 - DNA, 813 bp, Cannabis indica
gcaagcctgaaatgtaaatcaaaataaaggatcactgcatttgttaattagactatatgagatattacatgttaaaaaaagtgcatgaatttgtgaatgaagtagatatttttatagaaatgttatatgtataaaataaatttaagctgaccttttagatgggcagtgaggatgaacttagtatcagtttccctagagataaaaacagggcctgaggagtcttttgctatccttaggttggtggtggtggaagtaatatcatctgtacttttggtgattttgagtcctaattctaactccattgatcaaatatgagacacaagagaaaaaaatgaactagaagagaggtggaaattaggttctgtagatacaaacaaatcaatataatggagttagaagggttttaggataataatggtgtctctatatgagcaaagcatatattcattgcttgttaatatgtttatatatataaatttttgttgttgaaggaaaagctgtttagaaagaccactcaagtttccttatgatgttttgccttgtccccaagataaagactctgttagataccaaaatgtgttgttcaatgaaatgatgccagaaaggtgtattttcaaaaaaaaaaaatataaatatactaaacccttttctgttatgaattctaaaatatttatcatttttttttactgtctttattatgttctataaattaatttacaaaatgttaagcgtataatgtcactttgtaatatatattatatatatctttatatattaaagtagtctatctaacggtattcttggtttaacatt

SEQ ID NO: 321802 - DNA, 595 bp, Cannabis indica
tttaagatatatctatttttataaatgatatcttcattatacccgttaagttaatgtaatttatgtgctaataacttctgtgcaagtgtctcggtccccgaccttcaagaacttatgtgctaataacttaagtgaatgataaagatatattaggcaatacactcacaaaagtagatatattttagtgaatcataatataaatgtatttttgattaatagaattacaaaaaaaaaaaaaagtattcttcaacttactcctttttataggtgatgtcttaagattgcttatcaatattttttaaaatatattttcttaagttatgtaggactcggtacttaattacaccaataaaaatatgactcagacaaaaatactagacactaatttgcagtattgaatgttacttgtaaattggagaaatataccatttactttttttttgtcctcaaattttacacaatattttatttacatcttgcatttttggactcctctttattaacctttttcatccataaatacccaactctaaatcagcaatagccaatctaaggcaaaaaaaaaaaaactacaagcctaaagatggaagcttat

SEQ ID NO: 321803 - DNA, 1735 bp, Cannabis indica
  modified_base (82)..(82): a, c, t, g, unknown or other
aaatttccctcttactttgtacattatttttgggctaaacccgatagtttaggcccaaaattcaaacgaacccctaatttcnccgattactagaagttttacactaatgctacaatgtcacaaagtgtatttgtaattaatgaaagattaaatcaatacattataataagtaactatctagacatagatatcataaatgatcgatatcactataaagtttcttgttatttattatatattccttttactaattttcaacattattagatttaacacttgagtgatcacttccataaatttacacataatcattcttatatccactctattcatattacgataaataactactaaaaaaatgtaaataagctttatttagaaaatattttcgttcatatatgttgtaataattacaacgaaggcatgccaagactacaaatatgcatatatatatatatatgtatattaatctcttctcttttattttatttttagaaaaagggtaactgttaaagtatgttattaaatcaaggaaattaagtggggtacactacacagctagatataaatattataattagcactttatatttatatatatttgttctttgccaattcactttactttgccaatctttatcaaaacacatcttatacataaattatacttttgttatttttgaggacttactctaaaaatggtcaaaaaggacggttttattttatctagccttttatatattttatttatttctaaaataataaaagagagcaaaatgctataaatataaatatatatacataatgttcacacttgtatagttatggtattacatattattttctttagtgctttagtcttttaattagaataattttaaaaggtgttcattaaaattttgtttaggatggggaatactatatatttatttacataatatatatacacaccgccaaaccgacattttttaaattaatggggacaattatttatgatcatttgaagagaatttttcaaagatttatattatggactataacatatatatatatatatatatgcatgcatgtgaaattaataatagtacgtacgtaccccctcactttagccatgcatgcatgttattaaagaggtacgtatatatatattttctatttcttcaaattaatataattgtttccttcaaaaatataattgttagaattatattgtaattaattaaaatgaataactaaaattaatattatgtatataaatattattttttattataaatatatatagtaaactaattaaaatacatatatattttttttcttattttttttttcaatagacgattaagtccctcgtatatctatatatgtaggtccgctgatgataatttaattaccccatataaatatgtatggttcataacgaagatcacactatatacattatatttatatatatatatatataaatcatcccctatctgttgtatcaaaaattagcagtgcatgggaccattatatataatttatgagattttggtaaagagaaaaggtgtcaaagacagaagctaaggggaccccaaataattgtgggtaatacttcctttagaccaatatatatagattccaaaatcagatattgactaaatcatcatgcatgtattcctataatcacacctatatctcttcattaattataactaattaataatgttaaattaaattacatcaaatttct

SEQ ID NO: 321804 - DNA, 1117 bp, Cannabis indica
agggtttagccgtaaaaaaactctatttataatagtaaaataacaactagtattgtattgtaaaatattgtgtattgacatagtattagtattagtattatttaatacaatattatgtttggtattgacttgtactaataggttgtgtaaaattataatatttttacaataattcgacctcaaacctgacctcagcttagactcgaatccaggaactacaccgcattggagagaccaaagaattgaataactaatatgattcgcattaatatattaaaatttattttcgtaataattaatattacaatacaatattttatatctaaacataatattatttattaatctttataaaatttagtaaacgaaataaaattttttatatataaatatatatatatatatatatatgacaatattcaacttattattattattattcaagtggatattcgagtagtagaacaattttactctcttcaaaaaaaaaaaaaaaaaaaaacaattttaactatttctaaccaaaagcaagaatatctacgatctagatttagaaatagacattagtgcaagaagagaaagaaaagaaagaaaaagacaaaaatgtatataataataacaatattttaaatatataaataaaaaaccctagaatctgtatgtatcctatattcttctctagggttacaacaaatacaaactatttgactacaaacttataaaaatagaagattaggtaatattactcatcatctagaactattaatggtggctgatgaatgtgtatatagatataatatataatataatatatatatatatataaatcttcacttgctcaaagcaaactacaataaggacagccgcaaaatactttagttatacacattattcacttatataaatatatatactaaattaatactaagaaagatgacaaagaaatttaggaggaaaaacattattataattaaagaataataataataataataataataataattctctctaatgtcatgaagaggaaaagtttaggattgacagcttgccaaaattttcatcagccaactgctattctgtcttttctgtaaattaattaataataatataatta

SEQ ID NO: 321805 - DNA, 1526 bp, Cannabis indica
ctgataccaatctcattagggaaatgcttaagaatgacttgaaggttatatgggacaacattcttgttgtgatgagcgctttccaaaagatattacttatgaagacatccaggataggactcaagggttttcttttggtttggatgatcgtgattagttttcaccttctgttcatctctaacctttatcattccaacctttgcagcaaaaatatattgtctttaagctcttagatttattcaattgtgatctttctgacagattgccttattatctatttaattgttggatgccatgatttaccttattaaaaccttcattacatcttttattgttatgttaagaatattacttcacaacaagttgtagtagagtaaaagagatctttacattaagaccatgagagttcatagaaggttggaggagtgaaaaaataaaactaaaaaaatacttatatttttagtttttacgttcatttgtctttagttgaaaaaaacacaaaaccgaagactattaaggagaagatataggtgttgaagtaacctcagacatagatgcacctatgtaataataattgaagacgtaggcgtatttatgtcttcagttattacaaaataattgaaggcgtaagcagacctatgtcttcagctattacaaaataattgaagacgtaggtatagttatgttttcatatatttacaaaataattagtaatatataggtatacctatgtcttcagttattacgaaataattgaagaagtaggcatacttatgtcttcggttagtatgaaataactgaagactataaaatttttcattttttaaaattaatatttatatttatcaatttgaatttatctagtttaatttattttcatatatttatattttgacaaatttaaatattttgcaatttatattttaatttatttaattaatgtttttttttttgacaaaatgagaaaatttcattaattcaaatcgttcatcaatacagaaatgaactccgcgggagcattgctcacacgtaaaatacgatcagctataaaacaagtagatctcgctagaaagtgagctccattgtttacagaccgtttaacaaactttaaagaaatagacttatgatttaactcaaataacaactccttgcacttagaaacaactctaccgaaataggaactcatggtagaagagctacgaatggattgtatggcaacaaggcagtcggactcgacttcaacatcacaccagccctgctgctttatccaactcaaggcttcaagaataccaaaggcttctacaatttcaggctgtaaagcaccctgtcagcaagatgcctgagcctccaccagtcggtcagcatgatctcgagctacacacgagtagctgtagcgaggagttgattcgaagattgcagcgtccgtgtttatcttaatcttgttttccttaggtgcttgccaatgctcattgccatcttcaagattcatcaacctaaaagaaggatcaaattgtctatcttgagca

SEQ ID NO: 321806 - DNA, 1744 bp, Cannabis indica
caaaattcaagggaaaatattactaattagcctttaaaaatcatagcttcttgatcaaagccattggcttaggcttcaaaccaaactttattcattgtcatagtgaagtttgatatgttaaaattttttctatatcttatcatttaccaattcttaatgttcctaaattaaatccaaaaataatcctctggtcaatctaaaaagcatccacaaagtccaaaataataccatgaatatatatatatgtatatttatataaaaatcactatgccattaaagttgaaattagatttcatagagtataaaatatctatcaacccagttcataaaattgaaaacctgctaacgaaactgacctagggattttgattacacacaactatatacataattaggaatagggatgatacctttcgtggccagtggtgttcgaatatttggccacgccgaaatctcctaattttcttatcgagtaatggaggttgagacggaccgatggaaaaatcagaaagatagagcggcgtcggagttcaaggtggacaaaatgggggctgaaacgaaatgggcaccgaagttcagagagagagaacgccgccagagttctcaagaatgaaaaatagagccagaaaatcgatttttctttgaaattttcgatcgagcaggctgtgtgatgaagtggggagaatgagggttttgttatcagtgctagtaactatataactatatatatatatgtatatgtgtgagtttgagagaacaaagaagaatcggagatgaagaatcgcagataataattttgattgtgggggtgaagaatcacaaataaaacaatcggtattttgtcttttttttattggaaagaatgaaagttcatatgtattttggtttgaatggtttgaaaaaaatgagaaaatgaatataagtttttgatatatatggaatacaaatttaattacactaaatatgatattttttaaaaaaaaaattataaatatgagaaaaatttatgagaattgttataaatattacatttaattaaaactggtttgaattattttatgttatttatatttatttattattatattacaaaattggttatattttaattataatcggattgaattattagtttttattcattgaaccagttatatttttagatatatctgagacatttacttcagttgactttaatttttctggtgacttttccagcgacggtgattttttcggcgactgtgtttttttcggtgacttttccggcgatactaacttttccggtaccggtgatttttccgataaaacttattattgttttacaaatatggaatttctatttttttttttacaaaaatatagcataaaaaactcataaccttatagtgttatttatttaagccataaaaaataaattatattctcaattcctatatttatgaaaatttcctataaaaatatggcatattaaatacaataaaaaaattcaaacgtgaaaaaatatcataaaagagtgacaaacctataaatgccaacttttttataaaatctatgtaactttcacttagcaataaataatgtgtcccaggctcgtgtgagacgcaagtcatccttaatttatggctaattaataatttttttcccaaactttgacatataccaaatcatgccctttgaattttctaggccgttaaaaattcccctgaactattgaaattgttagatttaaggatttctgtctaat

SEQ ID NO: 321807 - DNA, 1535 bp, Cannabis indica
atttatttattttttttttgaataatctaaggaattaatcaagtacttgtgatgttcaggaatctggagatgagattcgaaatactgtgtctagatcaagaacaatggaggttaagagtactaataggattccaaagtttgctcctcaatttgatgggttggattgttttgagacttttgttgcttgatatattgatatcatgtatgtatggtgtttaatattaggaacatctatatgtgtgtataactatatgtaatttttgtaagatttatcattagagatagaaatttaactttaatatatgtgattatgctgttattcatttacaggttcaactctctatacttaatttgaattgattatataatgattgactttcttgttcatcataaccctcttattatgtttgttaatgaattggcaagaaattcatatgaaagaaaacatatgattcaagttgagaagagatagagaaagaacaattgaaattctgtaagagaaagcactctgaaaatgaaaatagtataaaataatattgggtaattaggattttttctttccgaaatttaacgaccttaaaagttcgagaggcttaaaaaaaatcctaattagccaataatattttaaacttaattttcatcaattagtatgtacccttatgaattaaattggcaagaaatgcagtaagaaaatgcattgtgaaattctgaaatatttttatctaatttttaagtatttacaacagtacacaagtgtcttatattattctaaggacaaagaatctctgtgttcacaatctctttctcacatttgaaaatcttcttgccaccccaaatataactgcctttgttaacagtcctttgtcaaaagtgcaagcaaagatcatagcccccccaagaattagtagcttcggtatatttctaccctgcggtttttcagataaagtatctactcgagtctctgatgaatcgccgttaccatcatcatcgtcgccatctaccaacattgctctcatgtaatcgggattgattttgctgttgatattagccataaaagcctgtcgagagagtgagattcctgatgctctttctttctgatatgccctgaaaccggtgtccatgtttttgacagtaccccacattcctttcttcactccaatcttagcgatttcccatggaattcccatgtcttcgtgatggaagagcagcacttcacaggcggtaagctgaccgtcaccactcattgattccactgcttcaaaaaacatagagacaagaggttataacagtgattgatcaaagtgttagaatactgtaaactctgaatatagccctaattaattcaagagaatcaaacaataagattaaggaatagcggaagcgtaccggagtccatagaatcgacctttaaatgatctttattagtatgatcttccaatttgcatcaaaacctttctctgaaagtttttctcttggtgatggggatacaagagttctgtaaaattattgatacgatgcaaaatggggacccatac

SEQ ID NO: 321808 - DNA, 835 bp, Cannabis indica
ctaataatttcatgggagtttggcgagactacttacggattcgggttaagttgcgagtgaatgtgcctctaaaaaagaaaaagaagttagagattcaaggaggaccggtctgtcatgttatttttaaatatgtggatttgcctactttttattttatttgtggagtcattggccacacagagaggttttgtgagagattgtttgacacccctaaagagcttattgttaagaattatgatgcagagatgcgtgcgatttcagacgacatcgatacgcggatgactcaaaatggttgaagtcgggattggctacaagaactgcttctatgcagaccatggcttcgtccagcaacaatggtggcggtggagattctctggtgatagctggggaagtgggtcaacagattgcttttcctaataatcagggatctcatttattgcctaataatcaagggaacaatggggttgacttgaatagggagttaagggaccagggaagagatgatggcttgattaatgggaaatcccttgacacaaggggagtaaatgggaaggagctgatggtggcgcctagtggggagaattcaaatcatgggctgactttccttgagaataaaagaagaagaatgggcttggggaatggtattggggcttacagaggagaatgaaaatgaagaagaatatagagcccatgataatatactctatgttgatatggaaattgtaaaagatggtgggaaagctttgctgggcaatttgatcagcccagaaaacttaagtggggcgggtcttggtttccaagccaccaagcatatgaatgtgttaagctggaattg

SEQ ID NO: 321809 - DNA, 596 bp, Cannabis indica
tttgccttgaaaccgcgtcattcagtcagagactcataactcattcattcattcccagccgacaatgctttataatttcattactaaattatagtatttctccaaataacatgtacaatatttcatgaaacaaaagttagttaccatccatatttgtaaaaaagaaaaaaaaattaccatacacttcaaaattattactactctttttttggacatttaaaaaataatataggaaaaataataagtaatagatttttatttttggagggaatagtaaattgtcatttattgaactaaaagactcataagtggattcccataaaaagtacctaaattttgtttgacaaaatgtcacatagaaaaaattcaaactcttaataatataatgaaattattgtagttagttagatatgtataacatctcccctaacaaaaaaaaataaataaaaaatatccctatatgataacattaaactaaatatcttttaagtagcatagaatgagtaaccccatccatacaaataataagtaaaaaaaattgcattatacactcattttctcttgtattatacctaaaataaaaaagaacaaaaaaa

SEQ ID NO: 321810 - DNA, 730 bp, Cannabis indica
taggttgtttatttaacaagcttttataaaaaccatattgcctattttataaccctctatgaaagtcaggctgcctatttcacaaccttctacgaaaattaggttgcttatttcataaccttctataaaaaaaactaaattgttcacaccaccttcaaacacgtcgacaatccttacagtttctttttcttcttacaaacataattatattgtctaatacatcctatttatctcacacaaaaaagtaacctaatctaggttaccacacttgcccaaaaatagacagtattttctcttaatctttacaatattttacataaagatgcaatactgactccttgctactgtagatgtaggcgaataaagtttactgaactacgtaaatttgtgcctaattttatttaaagtaatatatatgatatatgtgtatatttaaatttatatatatttatataatatgtatatatttaaagcaatatatatttatattattaaatgtttagctagaatccctgatcactcataatgcaaggtttgatgatgcattggaagtttgtaaagaaatggagtctatgaggcaaagacctaatgttggaacaatggctaacttaggagtgttcataaaatagtcgatccaatccaattcaatttacaaaatgcggatatttgtacttgtgcagattagatgttgattgacatgtaaaagtaaccgatccaatctaatccacac

SEQ ID NO: 321811 - DNA, 1714 bp, Cannabis indica
aaaaataatatttattgtggactaaatttagcacaatgctatatcttgtgccgaatttgacacaacatttaacttgggccaaaattaacacactttttagaacattattggagtagtaatttttttcaagtgtgctaaaatatagcaatacaccacctttttggcactccattggagatgctctaaaaggcacttatagtcttagcatatttgagatgtgtaatattattattggtgcaattcaatattaggtctacatattttattttaataaagattaaaaaatcgttaaccaattataaaatatcacttcataataatgctagacatcttaatgaaccgtaacaatgttcctcccacaccatgccatatgagaaatcacatttactcatctcaatttttgtgcaaacattaataataactattgtcaataactctgaccactttcatcacaataatattgtgcttgtactatatttgagattagacacattaagatcactttaaatataactcttctggatggtattttttcaaagactttattaatacaaatcgtatagtaacacagttttgaaatcaaagcaaatagaaagctcattaaaaatacaatctataatgaaattaaaaacacatgttgtgctaagaaatgaactactttattagcaaaacatttaacaaaaaataataaaatacttctgaactctaaatgcaaggatcgacattctttaatgacacaccacattattacagattgcttaaaaaacactaagacaatttgtctcaagaatcacatttattagatcgagagagaaaataatgaacatagaaggaaaatgaactctgttttattgattgacaagagttgaatacagagtataatgaatgagctatatataactcgaatatacatttacaagttagttgcttatgaccataactgaacaacaattaaccactaacaacttgcctaactaactctaactaacagttcaacggtctagcttgatactccccctcaagatggatggtatatgtctaccaatccaatcttgtcctttaaagtcttgaactggttaggtagaagtgccttggttaccatatatctgcaagttgatctttggtggagacatgtgaggtcttaatcaagttgtcctgtatcttttgtctgattaaatggcagtcaatctcaatgtctttcgttctttcatgaaacataggattggctgcaatatgcaaagctgccttgttgtcacagaacatcaaagctggacctttgtgttcaatcctgagttcctcgagcaatgacaattcccaagtaatctcactcacagtatttgtcattgccctgtactctacttcagcagaggacctcgaaactatctgttgcttttttcttttccaagagatgatagaatcaccaagaaaaacataaaatcatatagttaatctcctagtatccacacatgctgcccagttagagtttgtgtaggctttgagtaatatttcaaatgtaacaggcaaaagtattccttatcatggacttgacttaacatattgcaaaaccctttgtgcagcttggagatgcctagctctaggagcagtaaaaaattgacttagtttgtttacaggataggctatgtcaagtctagtgatgattagatattacagcttcccactgatctttctatgcaatgtagtgttgggttttatg

SEQ ID NO: 321812 - DNA, 1031 bp, Cannabis indica
tagaatttctataatttcgggtcggcaactaacagaagaaatagttaaaaacacctcaattattcgaccatcacagccgcgtgctacaaacacaacacagatcacatgtgtctctacaaaaataataaaataataaaatgattatttaaaccaacaaattttgctaaatagccgcactttatatatataaaaaattacggcaagaaaatcacttttcactactgaaagtgaaaaacttgtgactaattataaattaatcacttttcactacggcaagaaaatcacttttcactacggacgtccgtgattaaatgtattagtcataaattaatttgtgactaaatatattttagtcacaatacttgtcgtgactaaaactaaattattgacagcttgtatctaaatattatattttagtcacaataacattttgttgtgaataaaaatcacatttagtcacaaaaaaattatgttgtgactaaaaaattgtcactaaaagtaacagttttttgtaatgtttgcccttattaagtagggacgttgttgttttcaatatattagcaaattataattattattttttattgtatgacaattgtatatattatagttataacacacacagtctactagtttttcaaaaaaaaataataatttacgatgctaataacataattcaaaatagatagttgtgaggatataaaaataaattaaaaatgtaacatgcgttcaattgacgttctgaatcatattttcaacagcaacgtccccatgattattcattgtaaataaatcaaaaatgtttgttttattcattattctagatctttcaatgttgttgttcacacttcagctaagttcgttttattaatttgtgtcttctaacactatttggtgaccgtgctaacatttttgaacctattacgatgatcagttgttgtttcgattaagggcctgtttggcacagttgtgctatgggaaaaagcagttgtagctgtgctgtaagaaaaagcaactgtaacagaactgta

SEQ ID NO: 321813 - DNA, 1702 bp, Cannabis indica
ttagatcatttgatccacggatcaactaggtggaattgaattgaatagatattacggtaaattatcatctctaatccaagttcaatatcggtcccttccaatgtatactccatacatctgatactggtaaactttggcaacaccttggaaaggagataacacttatccaaggtgtaaatatacctatcgctgattatcatgccagtctaattcagtgaacttactaatcagggaattaaacttttgaacatgtaatcatgattatattccgctgtgttggcaacactataataatgaacaaatacatatgttttggacttaataaaatttatacattaaatataatcatgaaataaatcatgtgaaccttgcaacataaaattatttctgatctttattaattagtaaatctaattatattgaaaagagttttatttagggcacaaaacccaacatacccctaggctggctggcctattcatggaattagggttcctggccagcctttaaattgggtcttggggtctggccgaccactaggacccataaacatagccggccaaggccaaggctccaattgggcagctagtttttctccctctatttacctaagctagggtcttacgacggccttagaggaatatacaactattgccttatgtgttgtttctcttggaaactctgcataaggctaggtagtgagtcccttatagtcaattatgcaacttaggacttactatgtgtcttagtaagtgtactgaagacggtacttggtcgttcatcaaccatgtacattgtgttttacctagaaggtacccttgtgtactattgacttgaatgtgtttgtagctttgttaggttggtcaactccccttatttcttccgtggaggtagtatgctagggtgcctccatatgaccctcacgtggccagggtggccacaaggggccgagttaggatggtggaggagaccgctcagccctgctgatgttgagcgagagattgaccaaggggctgagagttctaatgtaaaatctgatctagagaaggctactccgtgaagaggaggtggtatatgacatgttctatcctccaacatggtcccttgggttgctatgacgccaatggtaggccattgaacaagctcagtgaacctttcgagctttgactggatcatgtcttagaggagtcttctaagccaaggatactagatgcgagatcaaagggagacagttgggtctccgccgcttctactcttttggatgaggtctttagcgagattcttgctagtggcttagtaggggatctccactacaagattccccgtaggaattgttaggcacataggctccctttggattgattggtgtggtatgagtgcaatattaagcatggggcggtgaaagaacttcatcaatatttttgggacatcgctgcttactttgggatgttcccgacacagatcagtactactttgatctgaagtctatgcagaagcagaaaagaacaagatatttttatttcagtcagatcggtctccaatggttgggtgacactaattacacaagcacgtcgaaggtcagtgggtacgccaaaaagtattttattgcctacggcctctgtaggatcaagcactgagaattttggcatgtgccattcttgagatgttgtatctctactttgcagataagggatagggaaaa

SEQ ID NO: 321814 - DNA, 3771 bp, Cannabis indica
ctcgtgtcttcttcttcaacaagcagccatgctcaaagacagtggctagatgggaagaaagacagtcatgcttaattcttgactcatgcatcaattcttggttcggagttgagtctaagccaagaattaatgcatgagttagcttttgggatagagaaatctgggttgacgtttatttgggtgattaacaatcgcccattgtgaagagaaatcgggttcagacataattccacctgggtttcagatcgtcgtgtgacacggtgggattgggctccccaactttgtttcttggctctttaatgggtgggttattgtttcattgcggttggagttcggtgatttaggcactcagattcgggcacgcattggttctaagatgaacaaatctgggcaagtgcgacactaattcctcctcttccttcttgccgtttggagtctcgccggaatgtgcaggtcgtacatggcggcttatgctcagatctgtagtttttcatgtttctctctgtgttcggggttgtggagatctcaaatctgagatctaagttttggtgcgctgcgttcgattaatgttgaaaaaataagagtttgtaattattatttgggttttattttgtgattagaggtgtagtggtggtgggtggtggcaaaaatggtggtgttgggatggaatgtggtatggtgttatggtagtctggtggtgtggtgtcgacagaaacaaggaaagaagagagagagagaaagaaagaggaagagagagagaggagagagaaagataaattaagttttattattattattaagagttaatagaaatgttttttagttttaatttatttttaaatttaaaataatataaattaattaaatcaattgtacatttgtgtaaatatgtaccatttaagttggcagccacgttggaattagtggtgatgtgtcactagccacgtagacaaaatgacaaattaacagagattatgggacggcaccttaaaaatgcaaacagaatatgagtttggtaggttttcccaccaaaatttaagtttggatggttaattgcaagtaaaataagagttgggagggtttagccgccaattacactcttgttcttttggcaagctttaaaaggccccttgcttaggattctcaaccgaacctccttcctaatattcaagctcaaatgacaaggagaagtacagcacaaataaaaaatgcatctatttctattcttctacaagttatacaaagtcgcagccaagattgcattaatgattcgattttggagattcttcatcccttttctactttcaagcaaatcctcaatagatttaggcaattgaaactctccaagccaagagatgtttcaaccactacctgtttagcaaagcaacaagtaaaaaatagatgttcatgagtttccaactctacctcacaaactgggcataaagcgctcaagatggtcatgatctgagaaagaaaatctttagtaagaagctgggtattacctatttgccagaataggaacctgtgtttaggcacaataagcttatcccaaactgctctagcataatctactttgtccacctccaccaacaagtcatagtaccttttagctctaagcttgttccctttcaccgcaaggcacattctatcttcatccattgtttctcgaaggctaagattctttttgaagtaccagctgtcatccatcttctgtgggtagttccaaatgtcatgctctttcagataaactgagttgatccatttaacccataggcaatcctatttactagcaattgcccaaaagaatttagccaaaagagccttgttccactttttaccttctcggaatccaacccctccaaaatttttaggcagacaaaccttttcccaagaagctcagtgaagcttacttctattcccagttgttccccaaagataatcacgacagctcttatcaatagcagccgtaatctttgaaggaatgatgaagatactcatccagaagttccttattcccaggagcaccgagtgaatcatttcagcacgacctgcaaaagacaaatttttgctagcccagcaattaagattcttatttactttatccagaataataccacaaccagttaccttccactttgttggccgaagattcaccccaaggtattttagcggaaaactaccttcttcaatgtggactaaatcaaggatcttggatttgatttcttcactaacccttccaaagtagatatgagactttgaagtattggctgacaaacctgttgcatcacaaaacttctgaaaagcttcaaaagtaagccttactgaattatagttccctttgcagaagatagcaagatcatcagcgaagcacaagttagtcaatctcagatgcttacataaaggatggaagccataacccttcttatctgcataaaaaattagtaaccttgtgaggtagtccataatcaatacaaaagagtaatggagacattgggtctccttgacgaagccccttttttcctttgaagctgccttggattcttccatttaacagcagatggtaagtggttccccttagacatgtcattatccacatgatgaatctagaggggaagaagagcatccaaagtaaatcttctacaaactcccagtccaccgtatcataagccttgctgagatcaattttcatgatgcatctagcggagacattcttcctagtataaccctttagcagatcctggaatatcataatgttatgggccaatagtctattcttaatgaacgcaccttggttatcacttactatagaggggaggacttctgaaagtctaggaagcggtttgacaagcgccacccatcctttgcacctgaacccagaaatgtgaggttgggtttgtccactgatgggttccatctgtttggtaacatgagtaactcttacagtatgtggcctgttatcttaatcttgtatatattacccccttggaagtgcatcaaagtggagtcgttaatattgtctctattgatttgagggtgcactatgcctgcaaaagacatggatgttttcatgagaccattaattgatgaaataaaagagttgtaggagtcaggtgtcctagctcaagatgcttacaatgagattttgtttacaatgtgtttttctattttgtggaccattaattacttcctagtgtatgctttgatgtttggttagagcaccaaagggtacaaggcgttccccacttgtaacgaacacaccccttctattggattgcacagcaagattggttaagttggacaaaaatggtttcttgaaatggacgacccaaggcggagaagaaaaaaatatgatggtgttaacccgaaaacttttcctggggatgtggatatcaatgtttgacacatagcatgaaggatgacgtcatggagttgagtagactcgagtcatagcagtcaacgtggaaggagagcctagccctgcgcccaagttgactctgagatctctgagatggaagtttggactttaataacttgaatccaacccattacctttaagtattttgtaccatgaagacatgaaataaccgaatctaaaccttgggagtggaaattacacaaacttgcaacccataagccaacctgggcacctagggtttcacatggcgcccaagttgacatcctcaactatggtttcgatttttgaggttgtcttagtgcaaagtggtcaaaacttgcattgtgatatcaattagacataccacaaacatattt

SEQ ID NO: 321815 - DNA, 1339 bp, Cannabis indica
tagacaaagtccttaaatctaacaatctcaatagttcagggagaatttatacggccaaaaaagtttagggggcatgatttggtacatgtcaaagttcaggagaaaaaaaaatcctaattagcctaagaaaaaccacgtgtcatgcactaatatggcattgtttattttcaaatagcatacgctacagatggctcaacttacaccctaaacacctaattctaaaactgcctctaaagagtattaacaatatatatacttagatttttaccaaaaaactacctctaaatgttaatttttaactaagcgggtatgatcacaccccttagcttcctttgttataaaatgagcggaaaaaatagtctcgaaagcccataattgtggtagtgttagtgcacatttgtacactcattttcaagttaattattagaagaattagtaattattttttaagttttgtataaatttaatgtgttttctgtagttgtatagtttagtgctttaaagacaataataatatgaatttggtgcacaaaacaataatctcgatatatgtaaaagtcaggaagaaaaacgcgaaagaagttagaatagaaaatattattttaggcgacatgttgcctaagtgtggagcgacatggcgtctcacttatcaaaagtgaatatttcagcacatgcggatgaaaaaagatagtgaaattctgatgacgagatttaggttccatgtcgcctagtccttaggcgacatgtcaccacttttacgaaatgaagtaatatttgcacgtgttggatagaaaagataggaggtcccgaagataaggtccaggcaacatgtcgcttggccttagacgacataacacctggtgctgttttcaaatttaaatcttaattctaaatgacatcttttctatctttttaagcctatataaagaatgatgtaaatcgactttggacgagaaaaaagaaacagaaagaaacttagatattagaaaatatattgaagagtaagagaaagagatttcaagcttaagcatcatcaacttttattagagtcctttattcttcttcttctttattcttctgtttagttgtttgattatgaacatgattattgttgggattgtgtttgtcgttatgaactaaacactttttctaaagtgttgatggaactatttcagattatgaattaaagtttttagattattttcgtatttgttcttgcaatttatttatacaattttgtgctaattatcatctcgttaacgtttgatcactattaattagtatagagattttaggttctacacttgagagaggtaatctaaaatcagacttagaattg

SEQ ID NO: 321816 - DNA, 675 bp, Cannabis indica
aaaacaagatgcaccttgttgatataggtagtaccaatcaattcatttaagtcatcttcaactgtgtagtcccatacctacacagcctcagaatcatcccacttgatcttgcccatgcgatgtgggattgtactgcttacccggtatttccccttacagatcacaagactactgactgtcacatcacatttgtcatactacaaaaataacaattttttcgtgatgcgtcacgtcactatatatacactattttttttttttaattttagccgaatgtataatatttcaataaataatttatttgctcggtgctaaaattaaaataaaaaaacacaaaatatatgcaatttgtttttaaatgattatacaaaaaaaaaaaatcgaaaaattacaaatttattataatctcacataggcaatacaaaggaaaaaaaatctgtaaaaattacacaaacttcataaacaatgacaatgatataaatacgaaaaatgtactccacaaatctttatacttgaatagcactgaggccactatcgtctttgtcctgcaaataacaacaatttttcacgaatggaaaaactaaaatttgtgtagctccacaagttttaggcatgtaaaacctaaacaagaaaaaaaaaacactactacaatgtaagcctttagcttcccttttt

SEQ ID NO: 321817 - DNA, 1517 bp, Cannabis indica
gagatgatgcagagagagagagaatattgtgaggggggtatttttggagtttgaaaaaaaagaatagttttttaggttttaaatttttggtttagggaaaaaatttttgattttctaagtatagaaaatcaaatttcccttattataatattggagcatagtatagaatagatgcttgctcgaattttatcaaaaacaaagttgtaaggaatgtctggaaagaacagtgcacaagtccaatgaaaatattagctaattttttagtaaatgatctcttacagaattattatatatattaataaatatgctattaaattaattttctgaaaagtataaaatccaaagcagtcaatttcgtatagagaaaaatccaaattaatcagcaatgacttttcctttgtgaggacagagagaaagaaaagcaaattgtccaatatgagttataaaaatagactgattggggtatttcaagtcacgggtacctcataaaaaaagtaggttcattttacatggaatctttatgtttccaattcaaatcattttcatatatattatttttccaaaagaattagattgtacactttttgttttgggtgaatgtaattatgctgtagaagggtctattcataattaaataaaattatttataaaattttacaagaattggtgttattctttctttgattaagatatttcaatagaataattgaataaatgcaatcacttgaataatcattatctctagatcttattgtgtaagtacgaggataacaacagaagaaattatttgatgaagggtttaagagtagtacttattgattcaagatcatctataataaaaatgttgtgctttgatgaaatttatttatttttattgatatttttgacatttctgatatttttaaattttctgatattttagtatttaatatattttctgatatctacaaatgttcacataataagtcggcacaattattatggaaaagatcaacttttttctcactacattctattgtattcttcttgaacatagaatccacatcaaacttctgatctggacacgatattattataatgaaatcccttgattatttatgagtatacattttattgttttttttttcaaatggaaatcctttattctgcaaacacaattacgtagaattagacaagtcttactgcacaaggaaaaattatccaaatctacctagtactaatttttgtattgcatggtaacacttgtattttttaattttttaatcacaaaatgaaagtaaaatttttgtttttaaaaattttgtttttgaaaaacgttaatgcgttttgtaaccacttttatttttcaattttaaaaacagaaaacaaaagtgtgttctgtaaaatttattttcattttcattttttgattttatttacctcgggtctagatccggtgtcgaattcgagttaagaataaaggacgggttcaatgccagggccgtgggaggatttgagtctgggtctggtcgaagttc

SEQ ID NO: 321818 - DNA, 2128 bp, Cannabis indica
aacgagctgcacagtacgtttaagaataaaggttatacactttatcctaatagctcatactattccttgtgtgtggtggaatgatttgaaagacactcgtgtgagtctaaattccaaattccccatcatctgaattaagagatacaacttacgagaagtttcgaggataccttgataggcttcaagaggtgaactctaaaattattatttttattatttttggtttaatgtatacatatttggagatctattgtgatatggtacgatgataattagataatacgaaactcttatgttgcgtacctaatttagtaccataaaaccaacaaatagtctctattatctcaatgaaaaacagcaaaatattgatctcgtttctagtcaacaatgcagagtcaataaaacgatgatataagtgttttaataattaaaataatcaagaagctataaacaacacaggatttatagaggtttgacccttgaatagataatgacctactccccttttgttgtatttatctggagaataacaagatcacatgagcttgatcaagtgagtttcttgttatctctaaaggttacaaataatttggcagcataatagctcttttgagaatgtagaattcgatcctgaatagtgactatgatccataatttatagggagaagaatgtagactatttacattttattatagaataaagaatttaatatttgaatgagtcaatcccatgtaatctttcaatttcctctgattcttgcaatccctcaattataggtgtgctgattgaccggattttaaggaaataagttgttgaaatgaatttagacatttcctctcatgaacttgttggtcagacgtcttctattagatcaccctttgattgctttgaaagctagtcgatatactctgtctagcacatatctgatgctgggcggctctatctggtcaatactgtcgaccgacatcttctggagaatcttctcgaaggttttctatccgtttaatctcttctacatttaccatgtgtcacgttattctatgccacatcatcagggtaattttcaggataagaacattaacttctccttgttagttgattcagttttcaattgtatacacaactatttttgtggccttttatagaaggtttcatagctattttcatgaggtataaacttaaatggaaataaaggaagatccatcaaactgtgaatttgttgttgcagatcaataagattttaattcctatcatattatcttctagaaaagtaatttttatactgctataaaagcatatacaaactatctctcgggtttttataatgtataaatagaacctagagagcaactctcttctcttatctcttctagtatctcattttgatcttagctttgtgagaaaagtatttattttgtaaaaacctagagtgttctgctaggtttttatgaatttgttattgttctcttgttgttcaaaaaataggttcaaaagaagctttcaacaagtgtgggtcttcagaagaatacttttctaagtctcatttcaggagaacttgagcatatatctttcggtgaagatttttctaagattcactttgggagaaagtgagcacacatcaagggctgaaggaatttcactacttggtgtgttttagagatcaaattagcaatgtggattataaaagattgaataaaagggttagatggattcaaactttgtataagtcaattgcatttgcaaattttgatacgttactaattgatttcattctctgggcgtggcctcgtggacagtagtatttgaaaaaatacttgttatttatgtttttgaattaatggcacgtgtacttccaaggcctaaagttaattaagataggcccgttcttaggcccaattaagataatagatcgacccacaacagaatcggcctatggctccagatttgaacgttagtccaacttacaaacatgataaggctagattgtattagtttgagaaggaacacccacccagtccatcaaagtgcatacagacaccttcatggggcaatctagaacaggcaactaaagagacatccataagcatccgaaaaccatcctacgtggcatcctctaaatgtagggtc

SEQ ID NO: 321819 - DNA, 1472 bp, Cannabis indica
ttacaataatatgtaagaaatatttttgataaacatcgtagagttgagacattttggcaaagggttttaatttaatttgacttttgttagttatttttaatggaatatctctctcatttttccattttttttgatagattgcaatcatatacatagcatctccaagttaattatttaactaatttattattaaagtcattatattattttagtaaattaaagtaaaaaaatgcaatatatttatatatagatcctcatcatttaagaaaaacaaatatacatattttttttttatagttttttgtggttaaactctctcaactatatattattctacttacacttaaccttctaagtttaaattttagtggtaaaatccttactgaattgttagcaaatatgtatactctggtacacgtgacagatttatattggtacactatttaatattattatttaaaaattataaaaaattatttcaaaacttataatatttttataattttatttaattttaaaataataatattaagtgtaccaatatatacgtgtcacaagtgtacacataaacagtccatggtgacagttaaccggatgacatcttaaatttattaacagttcattaagattttaccgctaaaatttgagcttgaaaaattaagtgcaagtgaaacgatagttgagaaggtttaaccgccaataactctttatatttaatacaccttcaaaatatctagtacatgagttatagtactaggttttgataggggtaggagataaggagagtgatcagtggtgatcagtgagtttggttggtaaagactaaagagtaaagagtaatattaatatatgtatatagttcatcttttgtaattaatttaattaattagtgtacttgatgtaatgtccaattcattataacagctatgtatggatggatgagggtaaaaggttattaattattgaacaacctatagccaccctttttcgtttttgtttctaatttagttagaattgtatttgtatcctcctattactaggttggcccaccttataagccaaatatatatataggatttttttttagatttcaataacacgtagagttttctgcactatgcatggtttgatgaatttgatacattttaaggcttttttgtgtgagttatcatggtttgccaagacctaattatttagtttagttttttagtatggtctcataacttttaccttgatgattttttagttcataaatattttaagttttgtaatattggataattttactaccatctttctttgtcaacattatttattttatatatgattaaattgtttgataataaaatttatttattattattttgtaagtcggtttggtgagagtttatgtttacgaaaactttatcgataagtttaattttaatataatatgttggagagtcatatttttttttttaaatattgaattg

SEQ ID NO: 321820 - DNA, 722 bp, Cannabis indica
ggaggagtatttttgaagcaaaaggactgatacaagcaggggttacccgtacctataacatacttaaatcttaagatatccttggcttccacataccacaaatggttatcttatttcttcacatcctgcatttgcgaatcagacagttagcagccttttcaaaattaattctcatgagtgggatgaaaaggtaattaaagatctctttgatcatagagatcaagagctaatcttctttatacaacttagtgctactgctatatctgattattggagctagaggtttgaaagattggggcactactcggttaagagtgcctacaagtatatacaagaagaaaaaggagcttgggtcgataatggtgcggctggtttttggaaggatttagggagtcttaaagtttcctctaaagtcaacaacttcttgtggagagcggcttcaggttctttaccaacttgtgctcaattggaaaaaaaaacatgtcccatttaactcaacatgtcccttgtgtctcactttggatgaaactatttttcatgcgttagttgggtgtgtttatgctcgagcttgctggaataggacaagtgtggatgttggtagcaacatggatgataacttcagcaactggttgctggtgctgcaatgccgaggaaaagatggcatgttggaggaggcgactatggtcagctgggctatttggcgtgccagaaatgactttgtt

SEQ ID NO: 321821 - DNA, 919 bp, Cannabis indica
atttttgtaaattttcctttataaaattggttataaacaagcatgacccatatttatagaaaattagtgatttatatgtatttttcaaaatagtttctaattttaaagcacatagattgtttcaacaaatgatttttcttaacttctgccaacaaaggcatgtgggaataaggatttttttttttaaaaaaaataaattataaacaatttaaatcttttagaaaatatatataattttgaaacattttacacaatatattttaaaaatataaaaaatagatgaattaccaaataaaaaaaatggttgatagattcattcgtgcttttcattttgtgcttaagtgtgacattttcgtgctttcatgtgatgttgtgtttaagctcatattttttgtactgtatctaagcccatatttatttgtgtctaccaggtacaagtccatattttttatagtgtgtcgtatttgtgtcacttatgctcgtactggttcgtgtcgtgtcgaaaagctcaatccaaaggtaaatgatgagtatatgaattgttcccaaaaccacaaaattttctattttttttttcttttttaaatttaaaatataaaataattttaaatttaagacactccttagcgtatataattttattctaaacatctactaaacaaaaattgttggtctatgtgttatagcacgcaaattttatgagggtatttggtgtaagagttttacttagtaaattttagttgagtggagttgtgattactcaaagttaaatttaagttaattaggatttttgctccctgaattttgacatgtaccaaattatgtttcctgaacttttaaggtcgttaaaaatgttccctgaactattgagtattgttggatttaaggacttttgtctaattttattcaattttactat

SEQ ID NO: 321822 - DNA, 858 bp, Cannabis indica
aataacgacaatgtcgttgttgatgcaactcaagaaatttaaaaaaaaaaaaacaaatattattcccaaggacattgtcgttgggattaatttttatttccaacgacttaaaaagtcgttagttaataatcgtttttcccaacgaagtattcccaacgactttttaccaacgaaatgtcctcattaatgcgcaatactgacgaaaacatgagtttttaccaacgaaatttgtcctcagtaatgctcattttcttgtagtgtgaaagtattagtttgtgtggtcagtgtaaagatttttttgtatatgcaaattgtatgagtaaattaccacaaaagtgtagaattttactatatgatttagattttatatgccccaatataagaatatagattggattgtaatatgctatcacatgaaattaaaagatatataaattagattcatattgatattattaccacaggaaattgatgcaattgaagttaaattttttatatttttattttgtggttatttattatcttgttaattttagtttaattttattagttttaaacatcaaattttcaatcgtcaaataaaactaaaaattcaattacttggtacttaattacagtcctcgtaataacaatctcattttatcataattttcttattaattgctaattaatatttaatactacataacacaaattttaacatttaaaatataaaatacaaatattacttagaaaaaagaattccacccctcccccaacttaaatctcaggtcctttactaataaaatatgaataaaataaatttaaaaatcttcttctcatcttatattttcactacaattttttttttacttttag

SEQ ID NO: 321823 - DNA, 723 bp, Cannabis indica
gtgtcaaatttaaattgatttaacatagcatgagatattatattttaacagaaatcttgactcatgtgttagagattctgagttaatgttaaattatatgtgtaatatataaacgtttaaataaaaaaaacttttttttcgaacagaatgagctaactattaagaaaatgggatctcgtaaaataatatatttatatatatatatatatatgataaagataggtaaatatcaatctgtaatccaatactataaatgggtagtgatgaaatgtaatattgccttttttatatatgaaacaaaagatattcattattggctaaaacgttcttattgagattttactgtaaacaaattaaggttatgtatattttgttaattttctgatctgatcccaattttatatataagcttcttctaagaattaacgacttaaatttaagaaattgttcgttataaatttgtaattttaattaatatatataatatataaattaactaatgtcatcgatcagtaataataataataagacaatattcttgcaaattcttgaagattgaaatatataatttcttttgtaaggaaaaacattgaaaataattttttctgcatctacatatgtgtgaataattataattctcaatttttattagactaacttatataagtgccgtttggtaacacttttgttttctaatttttaattataaaatgaaagtaaaat

SEQ ID NO: 321824 - DNA, 1654 bp, Cannabis indica
aaactataacaattgttatgtaggggttctcaaaaaggacatgaacttcagacctatggcagcaaagcaaaccatgtgttttttgagtgctttgtaaaaatagcttttatgaccattatggtcacaaaatgatcatagatttacattctgcgatcatgatggttgcatagtgtaaattaaatgagattattttacaaattttagcatttgaaatgattagtttagcaaatttctctcgatatggtgtgttttagatgtaaagtggtaattaattacatatgaatttctattgtcttatttgacaaaatagttagtaattacataagtttagtaattaatgtttaaaataaaaagtttttaataattacactcaagatgaattaaaaaataaaaaatggacagaatgaagtaaagaagagagtgttaccaaaaatgtgtgtcctctgtaaaagccaatcaaaataaatccaccaactaataatccaacgatgatagctataattatgactgctctctttcacgttcaccttacgacgactaccatcagctcttgtttcattatgaatatttggagctgtgaaacaaaagaagcaaacattagtcaaatattgaacaaggaaaaggagatccatataaaatgtactaacaacacatgtgatgcgaacctatttttgaatttggtattcgaatataagtatattgtctttcaccaccgccagaaggacacaaatttcatttgagtaatttgaccctgagaattgatagctataagccatacaagagcaatggcttaagcatttactgtcgcattcgcttggataattaatcttagtcacccaactatatttagtatcaggcactttgaagcctagatatgcatcaaatccttcgtaactaatagaattgttgctggaacttatgtcatcccacatcccttgccgatacaatattctagaggagaattagttagaggatatgtatggtgttattcatcaaactcaatctcataagtgaataagtcccatcccaatttcattcctgtcaacaatgaatcagtaggataatgaaagctttcccacaagtagtttgttgtgtttgcatcttcctcatctctcaaaaccaagtttccattatccaacagctgaaccaatggtttcgcggcttgtttagacgtgtttgtggaccaatggttctgaaaaaaccacaagatttcctctgtcatctatagtcaaggagccagattgtcctacataataaatcagaccttctgatgagttaatatctctcagaacttctgaaagtctaatgttatcaactacaccaaaagttgtcgtagaaacagaagaaagtgccaaaacaactaataaggtaaccagaaaagaaagcaactccatttatgttaataattttctagttcaccactgcaccacaatgcatgttaatatttggtttagtagtttgctctgtattgcacacaggtggaatgcatattagtattaggcttgtttgtagaaaagtcttggtcattgtggaaaaacagcaatcataaaaaaagtagttttgtacaataataaaagtttgagctatattttcattcgaaaaaaagttgagctatattttgtacaaaatgtattttgtaatatttttacatcaa

SEQ ID NO: 321825 - DNA, 1456 bp, Cannabis indica
aggaaaaataacctgtttgttggtctgagagtagtcgaccatgtactcgtaagcatcggcttgagcattaaccctagtttcagtaccttcgacaggtaaagcaaaagcatccatgacaatgatagcgtcaccgtcggtctttccctgcatgaggcccatgacctcgatagtgccaccggaacgggcatggactaccatcttgaggagggcaagggcggagatcttaacacgcttgaaatagtgagggtcagtggaccagggtttgtcttgttggaatttgttctgagcagactcatcgtagtagaatatggagtcggaagcagggtcgggcttcgaagccggagtctccatggggatgatgttgttctcgagctcccatgtctgttgggctatctgggaggaggatgggaagggctccattgttcgtgttcttgtgatgtttttagttttatttttactgagttactcgatttctgagtactaccacatttatatatagtctcagtttgagtgagctttcaccttcgtttttaaggtagaatgaagaatagaggaggtgagctaatcccctattgggaaatttgataatgaattcttaaattaggattaccaatcctcaaaataagttataattaaatttctcatccaattttaccccttaaaaaataaaaaaccaacaaacgcccaaactttccatctctctcgtatctctcttctctctctaggaaaatcacaccacacccacactctaccagacgaaccacctatcgatggagctattatcgttcaaccactttacgtaacggtggagttgtttggacaaccttaaaaccaaaacttttagaaagaaattcctttaaaaaaaaatgggtggataatttctttaataatcattgttggatttagttgtattaggttgatatgaatagatctacacatatccttgtttgtatgtaccatctttgtcactgaaacacaaactgcagcgattttgcattttctgaatttttttacgagtttagcgatcttaagtgatgttgttagcgacatttagtgatacgagagtgtgttgaaggtaagggataaagtttaacgatttgtagcgatgtatgtcacgacatactgtaattttgtgttctattgatgattttttacaatttttatcgttgttgtttgtgatatgtatcgatatatttagacgtagtatttggggaagtccaaaatgacctttagcgacaagtagcgatgtgttgcgatataattgtcgatatgttccacgatattttgcgatactgttggcgatatttcttgacatctgtttgatctgaattaattttttctcatttttgtttgcagattcaactgtgcttgtggttgtattgtatgatggggtttgggcagttgaaggtctcaattggatattcaatacccaaaaagtaagatgttaatgtttgag

SEQ ID NO: 321826 - DNA, 1259 bp, Cannabis indica
tattttatatacttttttgttactttgaaactaatgtatttatttttagattatattacattgttttattgttttaaatacttttaggttacttttttatttttcttttgtaataatatttatttacaaaagttgagagaacactgcctatttttttgccagcttgaagaaaagaagagaagaaaatcgaattgtaagctacacatctgagcaaggtactttgatagatagctattcggaggtggtgaagcactttgttgatcactttcaaagctttatggagagccagagcacaacttgttctaagcttaactatgactgtcttgaccaaggcaacaagttgaatcttgatcagcagctgttactaatcaggccatttaccatgaaggagataaagagagctttattcagtattcctaactccaaaagccccggtccagatggggtcagatctgcttttttcaaggaactttggccagaaataggcactaaagttagtaatgaaattcttcagttctttgaaacaggcaatatcccttctcagttgaatgaaactgtgctatcaatggtgccaaaaaaggaggtccctaccaaagctgtttactatagactaatagcttgttgtagtactctatacaaatgtattacaaagctcatttgtcttaggttaacagaaatgcttcctcacttggtccatcagaaccaaggtgccttcatcaagcagagatctattgcacataacatacttattttccaggatctaatcaaacactatggcaggaagaatgttactccaagatgtgctttcaagattgatctgagtaaggcctatgacacggttgactggaacttccttgaacacctcttggctggtttgaactttcctaatagattcacaaactggataatggtgtgcctaaaaggaacttcctatactctgatgatgaatgggaggcttcaagggaactttaaagggaagaagggcctaaggcaaggggacccgatgtctcctttgctatttgttctaataatggagtatttaactagaaggctcaagttggaggcaaagaagaaaacctttaggcaccaccctatgtgcaaaagtctaaacctaatcagtttatgttttgctgatgacttgattcttttttgcaagggatctaaacaggctgctcatcacattaaagtggctcttgatgatttcagcaaaacaaaagggctggttgctaatctagctaaatcccaagtgttctttgggg

SEQ ID NO: 321827 - DNA, 700 bp, Cannabis indica
attgtccccaatgtgagaaaataaaattgcggttgagagagacttacctgagccccatcagaaggggttcggtggaggtggctggtcataaggattaaagcagggcggcattgccaagtagttgggctcttccactccgacattcattcttctaatcagcgaattcaattgttgcacttgattctcatcaaaaacgctcctctgcgccatataattctgaatgtgcatgttctgctgagtaagataattcagttgatcatgcgtaaactgcatggctgggtcgagagacccagcagtacgttgcggtacattttcttcacgttcttcttgttcctccgcaggagggtctcttcgagccagaggttgaccatggggatgctgtggtttaactctaaacaccgtgggcatggagatactgcgttgtggtgcagcttttgtgtcataggagtattgtggtactccatgaacctcacacaaagttgtgataatataagcaagcctgagtcctatcaacatttgaacgaccaatgtctatggccctatcttctatgaatggtctatccttgagttgtcaaaagcgctcttgtgcttcggcattcacaaatatagccctatcaatatttgaacgacccaatgacctaggtgggttagatgaagaagctccccctctttaattcactcttgctcttttaggacccat

SEQ ID NO: 321828 - DNA, 952 bp, Cannabis indica
gtaaaataatttccaacattagagacatgaggcaagcatccaggagaaagctgcaagctcccagcactcttgagttctgagggcttgagaagtaaatgttatccgtattcccaaatgaagtgtacgtggcaatcacggaaggatgccatggaagactacgcattgttaatgtacaccctcaacttcttagagtcacggaagacgctataatactagatgttacccggagactctctctgctagctaagactgaaaggactccgggattctcattaataaaactgctaccaagtgggaacagaagtcacacgtgctccaggatggtagcagattagtttagtttgggaaagccttagctagacgttcctagacctcgcttataccttatctggagctgaacccgacagttgcataccttctgacatcgaatcagatttttcccttgtatcagactttggtagtgcgtgtacgtgctctgtagctcctttttgtccaacggcttgtttagacactaactttacaaggtaaaaccttgagcgacacatgtcattagtcccacgagttatgttgcagcatccgtgcaccacacgatggaaaagctacccaccaaactagcggtcagatcctcttgttgtagtctcgaccattatggtgtgttgagtaaaaaaccctaagtgggtaaagggtatgcctttatccacatgtgtgcctataaatacctctactttttatgtgcaaggagtgaataattttttacttacaaaacctctacaaaaattcctaagagttttcttcttctttaagagaaaaaaaaagggaatacagaactaatatttatgttataaacacttgtaatacttaaacactcgtcaacaagactaatacaacggactcgtggactagggatcattaatgtctaaaccacgtaaaaaactacttatctattatttat

SEQ ID NO: 321829 - DNA, 864 bp, Cannabis indica
ctaacaccaaagattactcggttcagtagacaatagtatagttaaacacgtataaatcatgcatagttttatattatgctctctggcctactgccttcttattttattaaaattctgttcaaaggtagagaatactgaattatttaaaaccttgattataatgtttacttttgttggttatgcagttctttcttagcataattattccaatttgtgtggttatatgccctaacgttactaaatctgtagatacacaataaacaagtttcaatggcgagagtcggtgatagtagctaactccaaatactccctcaaaaaaaaattgccaggatcaacaaccagctcattaacgatttcaaatcaaatgcaacactacttatatttttctatctattttagttaaaaaagatttcgaaatgaaaatccaaataataaggagataacataagcaataatatatatgattcaatcaacaaaaaggacattaaaaacgaattctaatatgctgacctcttgttaaagcgccgatgatgaaccagatcttggaggaggtgagctaagaagtttccgattctgtaaaagtatgagtcagatttacaaaatcagataatattcaaacacaagtgatattcaatcacacaaatacattaccacaatatttcatttcatctcatttcaaattaagaaatatgagatggtaccattgctttgaaaatgaagaacagaggaagcaattaagaaagcaaagagaagcaatttgagcttagagttcaagcaatttgaacggagtttaccttgctgatttactctagatctccttcaatcgaatcgacctttgctaatgtgaacgagggagaagaagag

SEQ ID NO: 321830 - DNA, 677 bp, Cannabis indica
gaatttatacattaaatataatcataaaataaatcatgtgaaccatgcatcataaaataatttctgatctttattaattagtaaatctgattatattgaaataagttttatttagggcacgaaacccaacaatatctacaagtgttaattgacttgtatattttctaatatgagagaattccaatatgcactaattttgacttgttagaatgcattttctttaatgaaattcacacaagttctaaataaatttagtaaattcagagtaatgaaagtaccccacaatttactaatatttattctccttatgaaaataaactatacatcggtgccataaatgtagaggaattcttatttataatatattttttgttgtcatattgaacatgcatatctttatgagtgacatcattttgtaaatcaatatagtaaagacctataaatatatgtcaagttttagaaacttggagcattgataattttaaatcaagtcactattatatgcttatttttttagattgctaaatgtgagaactcatcttgtctatggataagatttgctcacagttattgatttccttagatttatttgtgaacctagtaagcaattatgaatgagaaataccaatctaaaataatccactttgtgttaataatcacattaactatattagaat

SEQ ID NO: 321831 - DNA, 750 bp, Cannabis indica
actacctttagtaaaacaactattactcactcaatattgatctcattaacgcgattcaacttgcatttcaaagataattcaatgatctatcatattatgtatcatacttcaatcataattctaaagctatcatcgtcaaattttacccctaatagaattacgaaaataagttccaagttacccatagcgggactcaccaggctccaaaaatggctatcaccaccaagagttgattttcaccgttagatcatcatcaacagtcaacaatatatgttaggctattaatttttagcctaaattttgggtcaattttacagttattttctttgttaatgttatcttctggaatggttttacgcttgatttttttgtttcagatccccgaggcattagagttcaaattctatcaattggtgaaaagatggggcaaattggagaaaaatccacttaagctgacaagtgtgcttcaatagtcgtgaccaccattttccatggtcaacaccctttttcatggtcgcgactattgtcgcaactacgaggcataagcaaaaaccttgattttaagttttgcctatggtcgtgactaggctttatgtagtcacgactatgggctaaacacaggaattttaggcagttttagaatttctccattcagagatagaaatcctaatgtctatttaagggtctcgttttttagatgaaaaagaactcagaaatcataccctaaaactgaagaaggaggcaaaggaa

SEQ ID NO: 321832 - DNA, 1981 bp, Cannabis indica
aaaacaaaaaaaaaaaaacaagcgtaattttattctaaaaataaatacaaaaaagaaaaataactataaaaagtgacccaaaatttaggctaaaaatagcctaacaccaagtgcatgtttctcccatgcatcctacgtaaagactgcatctttacaagcatctggtatgaattaccaatatgcgtgacaactcatcctgaaccgcagttctatgttgtcagtacatgaacgcctaatacgcgaccagaatagtcgcatatgttctatcttataaataaccccgagaagattgcatgtcagctaagaacccaagaggtcttaagtggtccaaagaccttataagcgagtaacatccgagagctcgcgagttcacgtgttactcaagaaggtgaacgaccaatatgcgacttctaaagtcgcatacatttattaattaagcacggtcaaactgttctttcatttatttttaaactttttctatcttaattaaatgtaattaatattgtgacggtactgtctgacctgttatgtaatctaaaaggtcacttgctttctatataaaggagtgatccaacctggaataaactaatcgcaaatttcttttaatagtgaattaagcagactaagttctaattgaaccactacaactatcttattttttttacatattcattgtttacagttgactacttgttattttagtttgaatattcatcattctaggtgaatattcgcatatatacttgtgggtatttaagcttttctagaatattggtaacttttgatgttatctaatttcctccaacaacaattaccaaatgcattttaattttttttttcttcaaagagtgcagttatttgtttccattggaaaaatagctactcatttatattgttattgttattcatatttatgaataattgtgctatcattaaaataataataatacttgtgctaatataatattatgaatagatttaaaaggttttaactgtatcagtcgatgttttctatccactataacacatgcagatcttaacataagtgattttcttttatatttttttattgacacgagttaggtttaaaagtagtatagtgctatcatttaggtaacatttgcatactagaaaaataccaacggtggggaagtcatattcatatcaaaagcaaaatcgtacttcaaattaaattttaatttaaagttggcataaaataaataataattaggtaatcaattttttcaaatttgtaataaaaaaccgtaccaaatacaaattatacaatggtaacatgagaatttttacaaagatttattgcaagagctctctcacattctagagaaaaaaatctaatcaaggacaaggatgatcggctctcatctcgcataagacaagacacacctttcatttagatgataagggttcttgttttgagggaaagaaaggttctttagaagaaaagctttcctgctaacccaactcgcgaggagcaggacccatcttcctagggcatttctcgagctagttgtatttagtccctaaaggcactcacgggcctcacgtacctatcgactgtctcccatgaggtgtttcgctttgtgtactcacctcatttggcgcatcacatgtgagccacacataccctgtatcttttggtgagtcttggaaaccacaagtacttgtatgagacacaaacataggatcaacttgcctcgctgatgactagggctgaatatcgggcgggtttatcgggttttggatttgcaggtttcgggttcacgtgtttcaggttcaaaaaattgaaatcgaacccggacccggatagggcacaggttggcaggtcacgggttggcgggttgacctggtcaactcgatcggtcaactttaaaaaaaattaatttttattcaaataattatttcttttatttttttatttattaaattaaacatatattatataacaattttagggtttttt

SEQ ID NO: 321833 - DNA, 4340 bp, Cannabis indica
agggttttgccacttttttttttttattactttaatgctaattaaatctaacctaaccctaagtggtttcctttaaatatgtagtgatggctaaagggaaaagatgatgcatctcattccttcagtaaaaatttgagcctccttcacctactctattcgaaaccttctctctctcttcctctcttcaaaaccaaagcctatagtgaaaagagtgagtgctacacatcaagtggtactcaatcatagtctgtaaggttgtgaagaatccaatttcaagagaaggagatttggactcagatcttggtgataccctgctacagaaaggatacaagggttagagatctgagtggaaggagacattatattccgctgcaactactgtaaggttcctgaaattttatatgtgtttatttcatattgttttagatgttcatgtttaggatgttaacatcatacttgttagtaaatctagatcctggttaaataattccaacagtacgttccacgcctaaccggcccgacatgtacaatctccatcaactcgctctcacggctgctcagccttaggtttgcccttacctacacatggaaatagaaactgtgagtcaacagactcagtaagaaaagcacaacataaaacataataacatctcgggttataatcagggactcatacacccaaccataaccctatccccgtgtcccacacggtactgattctaaaactttcatacgacaatactatcgacaataaggtcagcctatgctcaatatgccagtcatactctagccatattgatgtgacatcatcgctcagtatttcagccaacatacatttatcagtgatcattataactctatgtatactattactactatcaatgtaatctgacatgcgtaaacaacatgtacgctaaacatgcaataacatatgcatgatattatactaatctttccttgtttctgaatttaggtgtgccggccaacatgggcggaacaactgttcggagaattatagccccctaaatcacatcgatcataacaaggataagtgacacgctaaatcacaactggggacttagattttaaaccaaaaatatacctacttaaagttaacatggcaataccctaaactaacagggaattaaccaatcaaagctctgaaactaacaggaatcgacaacacgaaaaatctgaggaacccagcactgatccggttaaccggttttacagggcctgtaaaatcggttgaccggtttacaccaaaaaaacaaaaaaaatcgaaaccctaaccaaaacaactccaaagcttaccaaaccttccagacctgcatattatacccccaatggacaaattgcaagcaacagaacaacatagcatgctcaaaatcaaaaatcaccattagacagccaagcttgagttctaaaactcaaagtttgctcaatcaacacaaccactaaaattagcttaacacaacatttctaaccataatttaacttcagaaacacaaatcaaacatcaacaacaactacatgcaaaattcacaaatcatgcataatttcataactttaaatttaataaaccaacaagggaagtactaggaactcaccttgaacttgaatctacttagaacctgctggaaatcactaagattgaagaagaaaaccagaaccctagctgccctagggatttggagagagaaagagggagagagtttcttcttttttctaattttgcttctttgaaataaaaatgagataaacatatgttttatttaattaatatcatccataaaattatattataaaactaaattaaccttcactaaaagacaaaatacaaatatgcaaaatgaccattttgcccaccacctagccaaaagtcataaaatcacataggggtattttggtaaattcttaaatctcaactattcccgatattccaaatgtctaactatattgccccactatcctaaaaatattgagatgtgattctaatagccaaacaccgcgttccaagattgcttggcacaaaacatgaaatattataatttcctatataatatataaaatgtattctgaatttaaatatcaatccgtaaaatgataattcataactaacatgcaagtttcataattaaacccttattatcggctaatttccaaattcaagttaagtagtttttacgattgcgtgaccgaggtatcatcttggcggagatcgaacaatgcagcttcaattgcaaaaagttctaaggtattttcagaagaatctttgaaagcatcccataattcctttcttgtggcatataagagaaaatttctcctatatcattgttcatagaactcatcagccatgatttaatcatgtgattataagatttccaagcttagaatgtaggaacatcttgttttggaccaaaaatttcacgtgtgagatactccttcttaccttttccactaatatacatcaccaaagattgagaccattgaagataattatgcccattaaatttgtgactagtaacaaggatatagcttcattactgtgagagagagttggagtagagaggggctgatctggtgaggaggtcttggaggttacgtttgatatggagttgtctttttcggtagccatggtagtccaaaaaaacacagatggacacagagaagaggaggagaaaaaattcgagagctaggctacagaaccttactctgataacatgtgaatttttaatatttttttgtgttttattatctcaaagagagggaatatatatacaacttagaatctgacctaataaatataaatagctaattctagaaagtacaccattaaaatctcctaattttaggaagaataaatatataatatatttggtattaatacaaaattgattcctatatatagttgtggtcaacttcctaattactgaaacaaatccacacgtgatattatatgtatggtcagattttgatattcattacccgatttgatttcccaattaattgtaagaatattctgacaattaatatgatgcaaatactgatggagtatctcacctataaaatatagggtctcggtccctgagctcttcactcattctgtacaaacagcaaattccatctaatgatagttgagcgagcgaggaaccccaaatttgcttaccgaagctattgtagggattgaagttcaaatatcaatggccagaggtatttcgatcatttcatcgcatatacggtttcgatatgtctatagttatttttgctttacatatcgtttatatatgctatattttcatattatattatagcctagaaacatatgctaagacatttgcttaattatatttagaaacttcaatattttatttttattaaaaaaattattacaaaataaattttaaataataatactttaagaaaaatttatataatagacaaaagttttgaaaaaaaaaattacaaaaatacatccacacgaatttttttttttttgctctttgaacttttatatttataatagtatctctacagtagaaataataaacgattttatttttgttattttatagtttattaatagttgttataaggtttcttttcttattatttttagttattttacaatatatttatagttgatttatagttatcgtgaggttgatctctcgttacttttttagttgttttttactttttgctgagaaagatgtatttttgtaattttaaaaatttacaagtatattttggtaattaaaaattttagtccttaaatttgtaaaggaaacataaaaaagggtattttagaaaatcataatccaccaaaagtttgaaaaatattccaaaaatacatcaacatgaaatttttttatttttactctttaaaattttatttacaaaaatatctcttcagtaaaaataataaatatatttttaaattattttatagtttatttattgttgtattatagctgtcatgagactgttttctgattatttttggttttttatagtttatttatagttatcgtgatgtcgatttctcattatttttttgtgattttttacgtttagctgagcaaagtgtatttttgaaattttaaaaccttacaagcttatttttctaattaaaattttaggacgtaacattataaataaaatataaagaatggtatttttaaaaattcccctttcaataaagccaattttatcttttttttattctatttaattaaaaacctaaccctaatagctatcatataaatagaatgttgtagcttttattttcataacctaattggctgtctttgtcaaacaaatagaaaataaacagagct

SEQ ID NO: 321834 - DNA, 1867 bp, Cannabis indica
ttccataaataggaaagctagtcaactttccttccaagtttagatttacacaaatagggaaactatatcaatatatgccagccgaaatatacaaagaataataaaatatttttgtcaattaaatatgccaaaaatggaattaacagaaaagtaatccatttgacttctgttgttgcattcgctaatgctcaaaactcacttttactttttgtgcttgatttagcaacaaattgttgcttcttggctgaacaagacaccaaattattaccaaaaacataacataccctcctgttgatcttctatcatcaacacaacttgtccaatctatataactataaccttgaagactcaaagtataagatcacttgtagctttagaccattagagagggcacatttgacttaccttagtagtcttttataggctttctagtgcttagttgttggagcataaaaaaattggcttaatttgttgataataaagcaacatcaggtatggtcaaatttaaataatgcaaagcacccaatgtgcttctatagagagaaatatcttcaaaagaatcatcatctgtaaggcttagtttaaaggtaaaacttgtaggattgggacatgacttgactccttccatatgaagtctggtttaaagatcagtattatattaactttgacttaaatatattcctgtagcatccctgtaaatttccacaccaaggaagtaatgaactaattccaaatctataaaaaaaaaaatgcctggttcaaatcagaaatgagagcactaatcaaagttgaatttggtcctgttataatactgtcattgacatataccaaaaggtagacaaaattattgtgagagccataaatggatagagaagtgtctgacttggaagcttggaaaccccattgaaacaaggtttgttttagcttttcattccagactctcgatgcctatttaaggccatacaaagtgttgtgtaatagagaaacacgagtaggctttagttcatcaatgaactcccgaggttgttgcatatacattgtttcttgaagagcaccattaaggaatgcattactcacatctagttgcttgactggctaatttgcagaaacatcaaggctgagaacaatacaaactgtagttggcttgacaacaagactaaaggttttagttcatcaatgaacccctgaggttgctgcatatttttgaagagtaccattaaggaatgcattactcacatctagttgcttgactggccaatttgtagaaacatcaaggctgagaacaatacaaactgtagttggcttgacaacaggactaaaggtgttctcatagtctattccaggtgtttttgaaaataacctttagcaactaatctcatttgaatttattcaaggagtcgtttaacttgactctctgaactgatttattcccaatgacatctagtgtcaatgtcccttgcttggttagaatagtaaactcttgattcgtaaaagcaaaccattcaagactattgagagcaactttaattgatttaggctcagtgggtaggagagactccagaagaggatggtttgtagcattataagccttaggtttaagaatgtcattttgaatctagtcctcatagagtgtagtcttggtggaatggcaataaagagccacttgtggagtaatttacggtaaaattccctcaactattaatgtacttgtaaaaaaccatccaacctcatattttggtggaaaaaccttccaaagtactgtttcgtttacatttttaaggtgtcgtctgtccaacttcgttaagtctaattttacccacgtggcaatgacaggtcactaaaaaattatcctacgtggcaatatttt

SEQ ID NO: 321835 - DNA, 3622 bp, Cannabis indica
caggtatgcttgctacacaaatccctctatggcctaaagcaagcaccaagacaatggaacattagatttgacaagttcatgtcaagaataaaattcacaaagagtagatatgatccatgtgtttattttgacaaggagacttacctgctattgtatgttgatgacatgctaatagtaggcaaggataagcacaaaatcagtgagttgaagtgtcaactcaagggtgaattcgagatgaaggatatgggagaagccaagaaattcttggaattgaaatcataagaaaaagacctggcttcatcatgttaactcaacagggatacttgaagaaagtattaatgaagttcaacatggatgatgcaaaaccaatgttgacaccattggctcaacacttcaaactcactaaagaacaggcccctcaaactgaagaagaaagaagaaatatggatggcataccatatgctcactgtgtaggttgtttgatgtatgccatggtatgcacaaggcctgacttggcctatgccatgagcatagtcagtcgatttgttgctgatccaggacaacagcactgggatgttgtcaaatgggttatgaggtatgttaaagggtctctcaacatgggtttaatctacaaaacaactgagaaaggtggatgtgaagttgaaggattcgttgactcagactctgcaggttgcatagacataagaatatcattgacagtgtacatattcactgctttgggtggatgcatcagctggaagtcgaatcttcaaaaggttgtagccctgtcatccacaaaggccgagtatatggctgcaaccgaggcaataaaggaagcattatggttaaaaagtctctcaaaggaacttggattcagttctgaagacatgactgtccattgtgacaaccaaaatgcattgcacttgatgaaaaatcctatgttccatgataggtcaaagcatgttgacatcaaactacactttattagagagatcattgccaatggagaggttcaagtgaagaaaatcagcactgatcacaaccctgctgacatttttacaaaatgtgtcactcaaaccaagtttaaacactgttaaacttggtcaacatcaaggaaacttgatgagtttctcttccccccatcaaagttcagaattcttttcttatatcttctaagtctaagtatctatgccaaggtggaatttttgtattgtggcccagaaactaagtcttagatttatgctcataggtatatttcccaattctgttagtaactgttatgccggtttgttaagtatgtcggttaaggtagttatgactatttatagacataactaactataggttaaagggctcaggagttcaattttagagtgtccctttcctgtaataaagattgagagctgagagtgtttgagagagagattgagttctggtgtgagaaaaccagcaactttcggtgttgatttctctggtgtatcattgatttcaagctctcaattgggatcacccattcatgtgtaatctcaccttgtacaattgtttaatgggaattgcctcaatggctaaattttgaatttaattttgtgtttgttttcaatctcatttttcactactgttatctatttttgcttttaaaactttgatcattttgagttctttgttcttgattttggttactgtgatcgagttggatcacatcaaattgcaacttgttgttgcactctcaacttctgaagaataatatatttccactgcagaggctatcaaagaagctatatgaattaaaggctctatggaaaagctaaaactaagaaaatgaggacctacaatctactcaaataatcataattgcatccatatttagaagaaccttgccttccatgacaaccaagcgcatagagattagtattactttatacgtgacaaagtgacacaagaagttataatggagaaagctcccataaaacacaaccacgcagatataggaactaaactcatacccttacatgagttcaaacactgtatgagtttagagagctaagacccttagtgaactatactatcatcacttataaggatatttaggtagaatttattaaatacccttataagctaaagtcaacttacaatagaaaaaaaaagttataaaccagaactgctcaagctcactggttgtcattgcctttctctcaaaaatagaaattacaaaaattaaaataagttacaatagatccagcttaacacaaaatagctactcaaaatagaacctaaagcctatataaacccaaatcatttacctgctgcaattttcattttctacaagttgaaattgagaacagagagagaatttatccattgttgtatagagagaaatgaaagaaagagatagtaaaataaaaagaaagtaaactaaatataagagagaaaaatattatttgctaaattttgtggcatgaaatcttaaagaacgaagaactgtacctatttttgacgatcgtggaaactctcatcactgaggcaagctcgacaaggatgtcacctaacatttgggtgaaccttgacaaaaatcctatgttctttctgttggttttatggtactaaatcaagtacgtaacgaaagatttgtatatttgattatcatcgtaccatagtcccaaagatctctaaatgtgtatacactaaatcaaagactaaattaatgaaagaaatatatacctcttgaagcctatcaaaatatccttgattctttttgtaagttggatccaataatcctcacaccatagtcttctaaatcgatccaccactcacaaggaatagtgtgggctattaagataaagtgtataatttgttcttgataaattctcaacacatgagcaagaactatttgagagaaaaaaaaaacaattttccttttctctgtgtatttcaaaaattacatagtgaaaagcttcttctgatttctcaaatcaggcttaaatagttgttaattctctattaatcaaatcctatttattatttaaataagggtaaatagcggcataagtacccaaagtttcatgcttgtaagcggcataaacccaatgtttatttttagcggcataagtacccaatatttgtaaaactgtaatttttttccagtttcgttagtacagactctattttgaatttattaaaagaatatttggaagtaactgatagtacatatttctatctagatccaatgatcaagaatttaggccttatatgtaccctgtttaagataataatagagtctgtactgacaaaattagagaaaaattacagttttacaaacattgggtacttatgccgttatttaccatgaagacagttttcatctttattattttgaaacttaaatatctcatattttttttttcaaaatataaagtaccattatttgaccatgttaacaactaagcatgactaaaaaattatacttatatatctccttgatgagattttaaattccaaatctcttttttttctgtaaaaaaaattgtatgtatcattaatatgactaagaaattataaaagacttttttttaaaaaaaaaaataaaaaaaaaaatgtaataaaaaagggagttatatttgcaccc

SEQ ID NO: 321836 - DNA, 2223 bp, Cannabis indica
agaaaataaattaaaatactgaaataaagaaagcaattaaagataggaccagtagtgaaagaattcactaaccttggtaaatctggtcgtgaaggagtgttccctccacttcatgtggtgttaattctaaaaatagtttcaacctttatccattgactttgaatacattaccggatttagaatttttaatttcaacagctccgtgaggaaaaacagtacgaacagtaaatggaccagtccatttagaacataacttaccaagatcaaaaggaatgtccgaatcaagaggtcgaaataatgtttctggttcagggagtgagtgtgattctaattggagaagaagttcaactgattcaactttagttttccattcttgcgtgttcattaatggtgtagattctaataacgaatttacactatcaaaaaaacttttaaaattcttaccaaaattatttacataattttcaaaagatttttctttatccagcaaaaagttttgtgtaacagaatcaacaaatttttcctcatacacatcatcacttctcacaaatttattagcaacattaacaatattcaactcaacagtcatatttctaaatgataatttaagaacaccattacgatagttgatgattgcattagatgtggctaaaaatgatctacccaaaatgataggaatttgagaatttatgtcttcaacaaaatgagtatcaagaacaatgaaatcaataggaaaaattaaatttatctacttttatcaaaatatcttctatgatacctctaggaattttcacagatcgatcaactaactgaagtgtcatagatgttggtttcaattctcctagaccaagttgcttataaacagaataagacaacaagttcagactagctcctagatcaagaaaagctttgttaatcacatgatcaccaataatacacgaaattgtgggacaccccaaatctttatgtttaacaagacttttatattgaattatggagctgacttgttctgttaaaaatgcttttttggaacactggtgtttctttttgtagtacacagatctttcaaaaatttagagtacgcaggtatttgtttaatggcatctaagaaagggatatttatacttacttgcttgaatacctctaagatgtcaccataccgactatcgatcaatctttgtgggaatggagcttttggaatgaacgacaaagtttgacttgattcttcaaccgagtctttggaatatgaacttctaggctaactcttttcattttctttcaatgagtctttattcatttcggcattaggttgaggtatgtaatcattttttaataatttttccagaccaaaggatagaaattgatttagcttcttcagaaggtctagatgtacttacctcgtactgactctttggattgggaatgggttgatttggaagttttcccttttcccttttagctacagcagtagcaagctgacccatttgtgtttcaagccttaacatggattgttgggtggtttgtatgaactgttgtagggtatcctctaaagatggttttctttgttgttgaggatatggcatattaggttgggcatgactttgattgggcgtgttgtacaggtgcccttggttcattggaggttggttctatctccaataaatatttggatgatttctccaatttggattatagaattgagcaaatgggctatcaaatgaattcccataagtttgaagagcgttcgcatcttcagaaaatgcctcttggtatataggcaatgatggacatgactgggcagtatgacttgtactataacatagagaaataaattcattcatgtgtataggagtattcctagattgacttaataagatagcttcaactctcctagttagatttgctaacgatgtttttaaatccacgtcatctttgacatcggaaattgcatctctcttaggtgtgttggaagcttttgatctaggatcttggcaatttcactgttgagaatttacacaaagattatgaagagacccccaagcctcttccgctttaaattgcaaaaattttccagtgtgcattgattgttccatttgtcggtttgagggagatactccatcacaaaagtattttaccaatctccatttttcaaaaccatggtgtggatattttagcaataaatctttaaatctttcccaacattcataaaattcttcgtgatct

SEQ ID NO: 321837 - DNA, 569 bp, Cannabis indica
ttttttatatattttttagggtccgaaaatttaattcgtcttgggcccatatattttcagggccggccctgagtagaatatttcagttttggaaaatttgtttcttccaatggatgccctatattctactaaattttttgttaagatttatgctttaaaaaatttgtaatagacattttaattataaatataagttacacatttcgacaatgttaaattattctttaataatttatatataaatattgaaaaattctttattcattcatgaggttttcgtcttgtaatgtaaagattgttaggattttatgcacaaaataaaactcattttaatataattagatttactaattaataaaatatcaaaaatcattttatattgcatgattcacatgatttctttcatgattatttatttaatgtataaattctattaaatccagtacatatagttattcattattatattgttgtctacatagtgaaatataatcatgattatatatttaaaagtttttgtcccatgattttttagtacactggatttacactgacatgataatcagcga

SEQ ID NO: 321838 - DNA, 1374 bp, Cannabis indica
cgtgcctaagaaagtggctaaaaacatgtatcagaatttgttagatgtaaagttgattgtggtaatatacttatttaatttaccacaaaaaaaaccatcaaactgtttttgtttttttcttttcgtatatatgtgtgtgtaagatgatcaaacttaaatatgagttgttccaaaaatattttagacttttatgctgtaaataaaataatgaaatattaacatagtctccatagtagtagtactatataatatatagcatttattatatatagtattaaatttcaataagaaaaaagtagctagagatcagataggctaatgatatatattatgcagggatgtaaatctacggagacgtttagttgagaggaataaaaatataagaatgagaataaaaatgaaatagaataaaatttaaaatgtattaaaaaaattgataaagaaattatgaaattttttctcatcatacatgaatgatctttccttctattttaaaaatattaattggcatgtatatatagtattttattcttattttgttatgtgtattatatatatattaaaaaatttttaaatgatataaagaaaaatagaaaaattgttgtatggtataataaaagtttgatgtaaaataaaaaactaaaattttaataatgtattttgaagaataaaataaagaattaagagtgctcttatgttcttagcatgctcagtcaaagtagagatatattaattggcttatatttttaagtaccgtacgtaatgaatagttaatatgattattttttcctcacttagtgattgatcaacaatttcatcaaagtaaattaatggaaatctttgtcatccaagcactgtctctgtgtactctcaaccaaaaaactgaaaaaaaaaatatattggaatcgtatcttccacgattttaattaagttggaaaaacaaaagtataagccttttgagctcaaattttgtgaagaaaacaaagtaagctgcccactcattataatcccaattgtttcaatttaattaatagaggatattatatatacaaataataaggtgcttactgcttacatcgattaatgcgtatgtctttttgttcatgcaattttggttttaattttattttttttcttttcaaaagatgatagtcttcttaaagttattggttgatttttgttggctctctttgctgtgtcttatctgcgatcatatttgataaaagaaagttctttttattagaacaatgacagtactaatatagtcattattgatttgttgccggttgagtctcgcatcattacaccctttttatctatacctttttagctttccttcgtgaaccactcaatcactattttttcttttttttt

SEQ ID NO: 321839 - DNA, 984 bp, Cannabis indica
ggatgttaattcaacatacttgttagtaaatctagatcctagtaaaatattcccaacactcactagctgtgaggagaagctaagggcagccctcaatggccagcgagccataaaggatgattaggtcggcttctcttcagaactcatctatgagttaagatgcttaaccccaatgttgatctttcatacatggaaaatgcctatttcttgaagagcacacttgcccaaggaagggcactgtttgaaagcaggttagaagcgaaccagaccaccgtccagccagagggtcatccttagggtactttgatgaggagatggccgacccacctgctgagaggtagctggctaaggcttttactaggtgtccgaccagcctatggaggctatggctggcccacactccggtgatccagactatacagcttccaattcatccccacctgcacctacccacatgtagattcatttggaacttattttaccaagatctagatttactaacatgtatgttgattaacaccctaaatacgaattctctaaaacaatgaaatcaaacacataagagtttagaaacccttacattgatagtagcggaattccttccgctcagatctctaacccttgttcctttctgtcgcagggtaataataagatcttagcctggatctccttctcaccttcggtttggttaatcaccgtcttgggcactatgattgagtacttgacttgctatgtgtgggcatggtactctatcactaaacgctagaatagatggataagaatgataaggattcgaaaggagtctctcatccactagtttttagagaatggaaactacgtttagtttggttgaggtgagttggatgggaatgagagtatcatgttccttttatagtatttcaactagggtttaggatttaattgtttggattaaaaaagaataaaataatgggcaaaaatacactctagtggtcggccacttaa

SEQ ID NO: 321840 - DNA, 765 bp, Cannabis indica
taggatgttaatcaaacatacttggtagtaaatctagatcctggtaaaatatttccaacaacactttggttggagagctattacagggacactagcaaccaaagttcaacttaatactaagcatgtccatattaacccgaaatgtacattttgaaatattgcagatgagtcaatcatacatgttctggttggttgctcttatgctatgtcatgttggcacaaatcatcactcaacatagcagccttctctcagctacattttcaagattggtttcaagctttagtacagatcaataatggtgaccagatcgaagaagctttaatggtggattgggaaattttgaatgcaaggaataacctcctatggaatcagaaagtcaggaaaacaacagaagtagttatatcaacacgttctaatctttaccaatggcaaagtgctcaacaacacagacttgaacctctattatctctttatgaggtaggtaaggaggtggagcactgtactaagcaagtaacaaattttaatctaatcctgctaaaccgtgattactaggaataagagcagaaatttaaactttaattttattacagagtaaaaaatataacttgtaactatttaatgttacaaatattctaaaagatcatacacgtttcgggatcccataaaaacctttacaaaacattacaagttatttttacatgccgacctaaacgacaaaaactgagaatacaaaatacatcatctggtagacccaacccgcgtgg

SEQ ID NO: 321841 - DNA, 837 bp, Cannabis indica
ttttactaatattaaatactttattatatcactaaaaaaatttgttaaatttctaccgattacaatctcaaaattttagatatatacttcaatccagtgtcaaattaaaatggacttctagataagttcataaaattaattgtcatgaaaaatatttatggtgattaagaacactagaaaattcgcattctctctctctctccctattgtcatataaatatataataatagtgagataattaataatccacaaaatatttataagatatatatatgtaagagtatacgtagtcggccttcaaagatgacagctgagcttgtaaatttgcagttaaagagtgtgaactgaaaaaatttataatttccaataataattatatgaaaattattgaaaagtcgaattaaatacaaaagctactaatatataataagaattattaattgataataataaagcctttataagctcaacaacagctccaacacattatatattattattattattattatagggccggtaagcagccattgatgatataaaaatattcaatgaacaacctatcatgaacatcgttcaaattacgtaatataatttatatatctatatatataccaatatactatgcagtagtctttattaatttagtatctagaatacatgtattgatgataataaactttagtttttgaaaagaattaagagattacgcagagacttgaaaacatatatacagtatattaaatttaggggttttttcaataatatacttaaaattgattttatttgcaaaaatactttcaacaaatttatttgcacaaatattgatgtgccac

SEQ ID NO: 321842 - DNA, 2399 bp, Cannabis indica
aattggattagattaaggatttacttttaaggcacgctttgaaagtcactgtgtgattgaaattgagtgtaatttagagtaattacgggatttggctggcatgtttgttcaaccaaataattacacagtagttacgtaattggaggtaattcaatggtctcagttacacttttcaattcttctcatagttctatgaaaattgagtgtaattacataatattactatttttaaattataatattcttaaactgtttaattactaacttatttgtcaaacatgatattaataactcatttgcaattatgattttatatctaaatacatatggtattttaaaataatatatttactctcatatgtaattactactctaataattacacaacatcttttagacgcacccttaaattatgtttgaattatgaattttatacacaaatatttttctatttatagaaaattctttgaaacttttgactctgtcaagcattttgtgatcattttaattcttccaaaattagatataaagtttttgttacagttctttttgaatccaaacaaaagcatattaagggacttcattttatttcatcaaaattataggaaggttatgttatgaagttgtctagtcacttaatctcaattgacagatggcaactcatgattggttcctactcaatattctgttatttctgttgctccaagtcctacatagtttagataccaaaaattagaataggcattctaggagagaatcttgtgcgagaactcgatttagagatcatttttgtttctgtattagagtgttgagaatcattgtaaggcgattgatcgaagcttttgttggccgttcctaccgtggattaggctcttaaattagaactgaaccatttaagttgcgtttggttgaaaataatcaaataaactggaacgaaaataaattaaatttacatttcattctttagtttagttgtattttaaagttatttttattctattttaaaatagaaggaaacattatttcaaatgcatttatttattggaaaccatatgaagactaagattttaagttccaaattcttaattggcagcagtgactgactgactgaggagttattcaaaatgattattcaaagacaatcaattcaattctagaactaaagttattctcttttactttactttatgtgatatattaaaagtcaagcccttaatttggtttgaaataattcaaaaaatgtgacataatatgcctcaaaattcttgtaatatggaacattttctttgccacattagtcaagaaaaattcatcagtccagcaaagagcatcagtttaggcagagagaaattcagtaagagcatttgtatagccgaactttagagagaaaatactcagtaagtgagtgttttagtaaatttagagaaacacttcgggaaaatacattgagagatattattagtgagaaatatttgtatatgtattttgtatattttgtactcaatttaataatatcagttgtcttgtgtaaagtaaatgagttgttgaaccacatatttattgctttcgcgcacaacaatattaaggacaaatgcatgtgataatgtctaattaaaattgtcaatacataatgtatatcattttgtttacaaaaaaaaaatgtatatcatttgggataaacactactacaaaattgggctttagaggcggtttttaaggggttttggcgtcggttttggcgaaattcgctaccgacgctgttccaggtgacgctatagggtttaaaacaaccgacgccaaagggtacctatggcgtcggttattatgaaaaaccgacgccatagggaccctttggcgtcggttcttatgaaaaaaccgacgccatagggtcttggtatttactagctttacaatttcgtcttttagcataatttatatatatatattattttattattaatataattaaattaagtataaattatatacaataagcataaataaaaattaaattgaaaagttaaataaatacacatttacattaatctaagtgtttgtatattagctatctttttattaatattttatatttgacattatgtgtttgtatttttgtagtatattagtatattttttataattttttaagttatattttgtataataattagtatattaaataataaataatgtgtaatattttttaatttttattgtaaatctaaaattttaaaaaattaaaattttccaaaaccaataaataaaacaataatttaaaggacaaaaataaatagaaaaaattagagaaagggcgtaaactttggcatgaatttttttgtaaaactttgaatattaataacttttgtatccgattatccatttgtagacgattatttttt

SEQ ID NO: 321843 - DNA, 1101 bp, Cannabis indica
aaaatagtatttactcaaaaataaataaaaaaatacaagatagggttaatgaccatcatctcatcttaccaaatagtagtatcatgtcatcattcttgttacatatttctgtgtgcaagcaaagaattgtatgtgactagtttatacaaatattcaaatgtggtactcggatgtacaacaattatacatacaaaaattattgatcaatgatcattttctttcttttatgtgcattaggaaatttcctaaaatgtctcaaatatatagatgaaatgaaaggatgaagtttttttttcttcttcttcaatctgttctaggttggacgcacatgataatttatacaacaagaacatgtttactttattttagagatgttcatacaatcagggagagagggacttaagccattgtgatttgttttactataaacatatattaaatcatcactcaatttgttcatacccaattctaaaggcaagcacaataaattaaatcactaaaatttcaaccatatttaaaaaaataataatatcttttaacaaaaaaaaaaacaattctattaaaatgcacaaagcttgaaatgtctcaaattacaaaaagagctcaaaagattaaaaaactaaatttataaagagactcgatcaccaaatatgggactcatctaaaacaaaagctcgctttgctaaaaaattaataataatattcttagaccttttacaatgcgacaagaatatactatgaaaggatttccaaacatgaaaaatatcatgaagtaaaatactaaactcattgtgccgagtgtctttactattcacaacaagcaccaagcgaagacaattagagaaaacaataatagtcttataccccaaccgaaggcaaagacagagcccataaagcaaagccaatgggcttcgcaacgtgagactcaaaggtaataacacccataaacacaccaaagaagaacacatggccaatgggatccaaagcaacaactccatccccatcttggactcttcatcacttcatcacgaagcctgttacgaattttatgtttattacgcaagtgtacgcaatcaagtagtatctcacgcaagtgaggtc

SEQ ID NO: 321844 - DNA, 1072 bp, Cannabis indica
ttcttcttcttcgtcattatcacccctaccacagagtaccaccaaagtctctgccacaccacaattaatatcactattatccccataaccaccacatcaccaccatctccccacactaataattcccaaataaggttgaaaaataccagtaatcagaaaatcttttcccattctcaaaaccaaattacaaaataaaaaattcaaaatgattagcacaaccaccacaatagttagatcccaaaaaaaaaaaccaatcaacaatagaacttgattttacagtagaacaaaacttgattttgggagaagttgagtacggtttcctttggcttgtcaacaatcggagaggcagtatgcacgagagggatgggtgttggggttcgggatttcgagggtcccttagcatggtggagaccaccgttcaaccaacagtgaccagagacaaccctctggtgttggactgagctaaacgtgaagagagagagagagagagagagagagagagaaggagagagagacagagagagagagtagttagacttggtgttcgtcgcctggggttcactagggttgttgggttcctcgcagggaggaacaactggttctagtcgcaggtgaagaagaagaaggaactcggttggttccagatgaaaggaagaaaaaaatgaaaggaaagaaaaaaaaaatattttttataatatttaaataattaaaattatgtggaccactaaaattttgacatgtgtacacttgtgtccactgggatagtctaccatgtcacttaacaaagtttcttgaacagaacgggtaaatagctaacagaagtggggtttggagggttttacaaccaaaaaattagtttatgtaattaagtgtaactaaatgtgtagtttgagtagttttaccgcaatatccctatcaattatgaattgtataattaaagtgatatttaactatttagttttattagataaaactatattaattagttaaatataatattattcttaaataatattaaagagagaaatatattattttagtgaaaataatataagagattaatgataattaa

SEQ ID NO: 321845 - DNA, 883 bp, Cannabis indica
tatactctgctacagacaagaattcaagagagaaaaatagagagaatttcgaaattcccttgtgagagagaagtggccacacacatcactcagtacctcaatcatagtttggaagactgtgaaggatcacatccaacagaaggacattcgggctcagatcttgattatactctgctacagacaggaatcaagggttagagatttgagtggaaggagacacttaattccgctgccatcactgtaagttattcttaacttttatgtgttttgtttatcattttagaagttcatatttaggttgttaaatcaacatacttgtgactagatctaagatcctgataaaattaattccaacagctattaccattcttactaggtcgaacctctttaaaatttgttattctttttactatactatttttgctttctattatttctcttatttaatcgctttattttgactcactgtcgttggctagaagcgaggtcaatattttggtgctttcattgagagcaaaaacataagcatttgttttaatcttgacaggttaacaggatggttgtacaaacttgaaagggaggccttactgatcaaggtaatccaatggtgacaaatccaaacgtgcaaactcctggaaacatgagaggaccactagggacaaaccctgaacaagttaatacacaaccacctacagtaggccatagagtgacttcccctctagctaggatcacaccacgcatacaagagactggaaacactattacggctgtcgatcagacaactcccaacactaaagtctcgtccactaataatactcaaaggccaggtggagatgacatttgttatcccaattcttgcactctgatgtggcatcacatgatg

SEQ ID NO: 321846 - DNA, 639 bp, Cannabis indica
gatctttttgccatgcctacctaactttataggaagttggaagagaaatactatttttgtcacattttgtgataaagaaaattaatgggcaaataatttacattaatgttgtttaaatattcgacgtgcagtttatttatgttatttcatgatttttttttataaaaattaaattttgataaaatttgaatattttaattctcaatctcctaaaaaaaaagagaaaggaaaatgattcaaatggaggagtatagttggaattaagggaaagataaatatcaatttgagagagtgttgaattttgggttgttttttaatttttgcccaattaatatatattacaaatcaaattttccgaatttgagtgttaagtatgttatgttataacattctattagagtctttagtttataataatcaaattgaacgaaaattatagtttgacttattataagtggtcacaatatatttttttcacaaaaaaaaaaatattaagttcaaatctccatccccaataataaaaaaaaatgattaacataaattgaaaattataaaccctgtattataacttttatatatatatataaaacagtagcttacaataattaagtaaaactaaatggagagagagagagagag

SEQ ID NO: 321847 - DNA, 1266 bp, Cannabis indica
aaagcgagaatcgatgtcgcacattctctattttatctttcatattgatccacatggctctatcctcttattcccttgcgcacttccttctccgttctaccttccgaactctgctcttctagctatcccacttgttaacgaagattttcattaacaattaatgagttattttttgtaataaattaaacacagatatatatatatataagaaaattgataagtataataataataatgacaccaattattttaagtgaattttgcagttaaatctgcatacaccaagtattatttttttatttactattttgtcactcattactataatcaattaatttttatattttatttatacattcaatagatttttttatataatttcaataaaaaattaattcttttgttcattttcttacacttttttattcttttttattaattttactcctaatgcattagaacacaatagtaaaatttaaatcaattattcatacaaaaaaaaaaaattaaatcaattataaattcaattattttttttaaattaaatttaacataaattttacaccatttattaaagatgatgcaatagtgcaataatggtatgtcacttttacgcccacaacattataaaattttattgataaaaattaaaaaaactaaacctaattcacttgattttctctaacttaattaagatgagaattaaacactacaagatatgtcaattttaccagcttagttcgctattgtgctggtaaaagtaacttttaccagcgcattttgcaaactgcgctggcaaagaggttaaaattttaccagcgtacatttgcagtggttaaaatctaacttttaccagcgcatttacgtgctgggaaaagtcatatttaccagcacttttcattttatgttggcaaaagttctaataccaacattgatttgccaaccccattttgtcaacgcatcacaagtaaattctattttaccagcgcaatactaactttcaaaagtgatatttcttgtagtgaaattatataaatttttattacaattatttataaaataaaaaattagacaaacaaaaatataaataataatggcatgtcctagtctctttcactatcttaaaagtttgtagctaaagaaatagcagataaaaagataaataaaagataagcgaaaaggcataaataaataaataaaggctaattagaattttttcctcttggattttgacatgtactaaatcatgctccctgaacttttaag

SEQ ID NO: 321848 - DNA, 525 bp, Cannabis indica
aattagtacttgaagttttttaaaattaatatattttatttatgtgctggttttaataatatatactaattatgttctttattaatttaataaatttgttaatattacataataaaaataattgaagaattcatatttgaaagaaaaaaacatctaatatttcagtatttgattcatatatgatattttattttttagacttttatctagatttagatttcctcatcttaaaaactaaaaaaaaatattagcgacaaaacaacttaaatttaatattttttaatatttaactataaaaattgaatttttgacggtaaaacttactgaacccaggtttcgtcgttttgctaattacacttccgtctaaaaatctcaattaagtcatacaatggacgtgtacataaatgtgtatacatggaaaaaatttcgtggtccacaaattattaaaatattataaaaataaatagaattataaaaaaaaaaaaaaatacaacttactcttttaccttttcctttttccttttt

SEQ ID NO: 321849 - DNA, 569 bp, Cannabis indica
ttttaaaatataattaaataaaaaattaaaaataataaataagtttaataattaaaaaaattaagtgaataaataatgaattcataataataaagataattcatcataataagtgaccataagttgtttaaaattcatcataataatcttctttatttaaatttttttttagatggagattgataaaagttggataacaaaaaaatcgttgtgatgatgcttattgggaaagtgttcaagcctttattgaatttgcatcgaaacatatagactctagtggtaaaaattttatgtccatgcgtgagatgcacatatttttgacaagggctttggaagttgttatcaaaagtggatttggcatggggaatcaaatggacctcttgtcaatggtattcacgaggacaatgaaggtgatgatgagatggctgatgtcataaatgatttcttttttccaatagttgatgagacaacaactactgctgacgaaaatcaaagtggtcatcacgacaaaatatttaaggagattgaagctgagttgtaccctggctgtgattggatgtcgtcgctca

SEQ ID NO: 321850 - DNA, 598 bp, Cannabis indica
ttgaaaaaatagtcaaaaaccacactacccgcaccgcgaacacccctatggaaaatgagatagtctagaatgtattatgagacgaagatgcttaaagacgaaaattaatcaatacaaatatattaagtcgtttatatacctaggattttttattgagagcatcaaactctaatgaaagatctctaatcatttacaagtcacaagaagggatctcctactaagcaaaaggataacacgttctcaggccaggtcttgagttaaggcggattaaacccgtgcgtaaagtttactcaaactcagaatctaaaatttttatataatatatttttttgcattagtaaaagatagtaattttaaaaatttttgtaaaaagaaacttaataatactttcattttactttagacaaaacacacacatttaataaatttcttaagcttatcattactcaaggtcaaccttacaagttctttcagttggcattcattcacacgggagcagggacggacccattaagattgatgtggggactatagccccacgaacaaaaatattgccttttaaaaaattaaatgtaaatttttttatttaataattata

SEQ ID NO: 321851 - DNA, 969 bp, Cannabis indica
ttattttttactttggttttttttttttttttttttgcatcctacacatctcaaatagcctgcgacagtttagccatcaattttctctaaaatcacaacttttgctactaaactcatattatgcaccctttgatgatcgcgggattgcacaactaattttatatgatacttattattttaattaattatcacaagataataagacatataaacatttcactatagaaataattagtcatatggatcatgacctcccttttcatcactacaatttaaggtataaatttcacattcacaaaaaaattattaaaatcaatcctcttatctaaacatttcatatgaaaaaaaaaaccattttatatgaaaaactctttcactaacatttttatataaatctctcaatttttagttttcgcaaaaggtaattatgatagtccctttgtagctctcatactacattgacttttgtgaagaagacattcaaacaacaccacaaaacaagatataaaaactttaattaaaagtatagttaattaaattgtttatttttattaagtcaaaaaattaaagtctaaatagtcttttgaaaataactacattatcagtcataagaccagtttattaaatttagaaacaattaacttttttatttattttattataaaaatacatgtaatttttttgttaattttcataatcattaatattttttcacaaaatcactaactttctatatattttaaaaatagcaaattaattatatttttaattttaataatattactttgttaactacacatcaaaattatatattttagattatatcactcagtataaatacatccaaaatacaataccctgcctaattaacccgatattaaaaataatcacttacgtttgtctccactagaaatagattctaaaattacttacatgtgactctttttacttatattatatttatactgt

SEQ ID NO: 321852 - DNA, 2574 bp, Cannabis indica
accattgaaattgacttagaaagatataatggtaagtgtatgatatcttatccaagatcaatatcggtcccttccaatatatactccatacattcgatactagtaaactttgccaataccttagaaaggacataatacttatcaaaggtgtaagtataccttattgccaattatcatgtgagtctaaatccagtgaactgacaaatcacgggaattaaacttttcaacatataatcatgattatattccactgtgttgaatttatatatgcaacataaaagcgatttctaatcttttattaattagtaaatctgaatatattgaaatgggttttatttagggcaaacgaccctggccactgatgataacgctggagagaagaacccgcttgacgagtcagaccccgtggtcatcatggctaaataacttcaacttgcagaaagcaacttgactcgacaagatcaattcaacgaggtactgctctcaaatagcccaaataaaggtcgtaatgaatgccttgactaaaatagttcctaatgtataagcttcgccaacaactgatgctctagagaaagtcgatccaaaagatcctggaacctcaagcgttcaaaaggacaaaggcaaagggatatctgttgaagagccaaagaagactttttccaccaagcaacataaaaagtctaaagctacaaacaaaccttaacaaaagaagaaaggaaaccatgcttcagggcatattaaccagacaattctagaggcagagtcacgcaaaaaaataagactgatgctagagtccggaagcttgagtttgagaaggagaagcgtcaacttagtgattctagtcaccacgatgatgacatcgatgaggtgtaccctgtatcggacggtaatagtggaagtctctccacaactaatcttctaagaagactaaatgagaaaaaagagagagagataaaccagaaaaatctagactccgtgggaacaatctgagaaaccacatcaatgatcgcgctcgcagaagagaatcttaagtgacaagagtcaatgcttggaatgcaaggtcaaggagttgatgaagatcatggaaaagatttctagaaaacaaagtagcactgtgttagcttctgaggaagaagacacggagccctgtgtgaagaggatcataaaagtgccactgctagagtgcttcataataccacggatggagttgtatgacggacgaacggaccccaaggaccacttgtccaaatacaaccgcattatgcaagtcgccaaggccagtgacgatgcaaagtgtttatgtttttactaacattaagcaagtctgcagaggactagtggaagaggttgtctctgggatcaatccacaacttctgagacccacaagcaatgttcagaaagaagtttatagtagccaaagaatatgaactagaagcaagttatttgaccagtgccaagcaacaaccaagagaaagtctgaagaaattcattcaacgtgatggatgtggctgctaaaactaaagtttccgatgacatgaaaatggtggccttaacatcagggctggcaacttgatccttattgtggggagtctttagcgcaagagggcagacactttgattgaattcttgacaagggcctagggattcataaacttggaagaagcctacgcccaagcttccgaagtacttttagcaccttccaccgatgtaacaaatgcctaaaactttgcggatgactactccatccatttaccctctaccaattacttttactacaacggtatatggaccaattacttccgtgaagccaactgcacaggctagtttttctgggtttagagcttcgtaaactggatacaatgttgctcccgaacaaacgaacaaaaaagcaaaagtagacaagctaacagacatcgacttcctcagggaagctctgtatcccatatggctttccaatccaattttggtcccaaagcctaatgggacatggagaatgtgtatagatttcacaaatttgaataaagcttgtcctaaggactattttctgcttccgcacattgatcaaatggttgatgcaacctcgggataccaacttctaaccttcatggatgcatactctagctacaatcaaattaagatgcacgtagctgaccaaaaacacacaagtttttcagactgacaagggaatctactattacaaggtcatgccatttaggatgaagaatgctagagctacttaccaacgaatggtgaataagatttttaaaaatgttctgggacataatatggaggtttatgtcaatgacatgctagtaaaataaaaaaacctccaagagccaccacaaaaatctagaagaagcatttgccatcatctgagagtacgcaatgaagctgaacccaatgaaatgcacttttagagtttctttagggaaattcttgggtttcatagttagttcttgaggcgtagaggcaaacccaaagaagatcaaagctcttctagacatgccctaacccaaaaaacataaggatgttcaaaaattaactgggggaataacatgttggaaatattttacc

SEQ ID NO: 321853 - DNA, 3920 bp, Cannabis indica
ttaaaattaaaattaaaattaaagttgggtaaggtaaaattaaattaattaattaattaattaattaattaattaactaacgttagggttaaggttttaacggttttacggtagtaggaattttcggatgagatgatgaatgagtgtggaagtagagattgtagtacgtacgtaattaggataagagtgagaaaagaaagagaccctagctagtaagcttcttaattggttagctgagcctgagacatgagtcattttcatgcatgcatcatcatatgccttgtactaagagccggtcctgaaacaaagtgggcaacaggaaaaaaaaaattttgagcccttatattagaaaaaatatgtatcttttaaaatcagtaaaaatatatatataattttaaaagaaaaataaaattttaggcccctgaactgagtggactctagacacaggtctagtccacctatacccagagtcgaccctccttgtactactataaaagccaagggtaaagggatatatatactgacttcctccaagggagcttaaagagcactttgcatttattaatttattattattattattattattattacatcattaaaataatatattaatcgatgttattcatttaaataaaaataaatgagagatgataaaatgaaagaagaaacaaatagttaaataagtttgagagaataatcgatcgatgttaatggctgaaaattctatcaacaatggtcttgagtattagtggaaagaaaattaataaactcataataaacaatggtcttgagtattgttcaagcatgttcaagaatttatgtgtcaaagaaggcataacaaggcatcatacagctcaaaagacccctcaacaaaatgacattgtagagagaatgactagaacactcatagaaagagtgagatgcatgctgagtggagctggtttggaaagacaattttcgggtgaggtagttaaaactacttgttacttggtaaataggtgtctatctactgtaattgaatttttgacacctaaagagaaatatggactagaagagctcgtagttgtgatcacctgaaggtgtttggatgttcggccaggacaaactataaccaagagcaataaattttttatttctaggctattgagatagagtgaaaggctataagctttggtgtcttaaactaggatttaaaagatgcatcatcagcatagatgtcatctttaatgaaatggacatgtctacggaactacagaagaaaacagacagacaagctatggataacaatcgacaggtttagattcaacttgaaaatggcacaaatgaatatgaaatgaggataaattaatctacatgcattgaaccttctacagcatctcaaggtgaacttgagacatatcaacttcccagagatagaaaaagaagagagatttactctcttgatatattgggcttttttgaactagctaacttcactgggtttgctttattagtggtagatgagattaaaattgtagagccaacatcctacaaggaagctataaatagcagagatggtgccaagtggctccttataactcaagaataaatgacatcttttatcaagaacaagatctggtgataggctagttttattaggtttattttatgaagtatttagaggtgtgtttcaattgattatattcatttcgtgcataattatgcttgttttctacttatttcaagtctaaaaggtaaaattcataatatgaattgaaaataagaagaaacatgttaaatgagacgagtataattaatttatcatagaatttgaagttctatgatataatggcgtaaaagattctaagttttggatattcaacacaatttgtttgtgatcaaaaattaagtctcatgattcaagccaatttttgactatgatgcgttcactttaaggaaaaatattgtaaataaaagttataaatctctctttcagcttttaaaaacatcttgaatggtctaattatgagcaaaattgcacttgttaaaccattttctaagttcttatatgtattcaagaagctccacatcaacatttcttttactgaagccttagaatgtttagttatgtaaaatttataaaagatattttgtctaagaaaagaaagatagaagactatgaaattgtggctctcactgaagaatgaagtgcgccattttaaaaaaaaaaaaaaattaccttaaaagcttcgtgattcaagcagctttaccattccttatatcattgggaagtttgaatgtaatcactctttgatttgggtgcaagtattaatatgatacctttatcaatgtttagaaaacttggtttgggggaagcaaggtgcaacaccctactagcttaagtacgttacaatgttttcttaattactgtgctaatatttgttaatcaaagggttttcaatacaaaagtgtgtttaataaaaaaatttataataaataaaactttaaacatggatcatatttaaaaagtgtttgcaaaacttgagaccccaaaatctatttttcaaacatagacaaaagacaatataaaaaaaagtgtcgtctagtgataaacaaaattaagctcgttctgtttcgaagatcatgaccctctaggtttaactgtccggatatgtacaatcttcaccaagctctccactaactgatgctcagtcttagccttgcctttacctacacatgaaattgtgagtcgacagacccagtaaaaaaaatatataaaacatgcaatatatatgtatgaatggtaattagcctcccatacacctaattatcgcaagtctactatccgcatccaacgcgtataattaagtcatgaacattcttaattataatacgattaactataatattagcctatatactcaacactctagttgtgctgatgtgataacatcaatccatactataattataaatgaccatagtaccaacctatactcggcactctaatcgtattgatatagtagcatcaattcgtactttactgtattgccaaatatatatattgctggtatctaggtgcaattctatgtaaactaataccgctctgatatattatctaattaataatatttactatctgatacgctataggtatctaaatgtaactttatgtatatacatacatactcctatctctagtatactagataagtcgtattataaagggaaatttgatatattatgcttaaaagttagaagtggtgtttaattaaactaaaaatttaaacatagtaaatatatgccaatttttcaatattctcccaaaattatccctatcctttcactttccccccattctctctaacagccccctctctctcctccttcactctcaattcgaacccccaacgcttcccctccgtttgaactagcaagctcgaaccagacgaccccccaatcaacccagctcctccattcgaaccacacggccatgtcgacccctcgctcccacgaccctctcgaccccaagctccgacgaacgacccgagcgaacaacgagacccactcgacggacgccctctcgacccaatcgacccgagcgaacaacgagacccactcgaatcccaccaaccccaatcgcagcaatccaagttattttttttggaatttttctttgaatttcttctttaaaatgcatacatttgtggttgattctggtattgaattgaaagttgctattttgtatgttatttgggataaattgtgcaataaaactatgggaagaatatgggtttcgagcaatagctgttttttgggtttttagattattgtgcgattttgtgcgattttgtgcgacgtaatacgagtgtgcattggttctggggtttttagagaattatgcgattttgtgcaacgtaatgcgagtctgtataggg

SEQ ID NO: 321854 - DNA, 1282 bp, Cannabis indica
attagctgaaaagatggaccagatccatctctaggcatatgagagcgagatggttgtggatgcattggttgtgttggatatgcatcggttatctcaatatctatttgtgcacggtcttcaagtgacaatttttgagtcaatatctgaatttgtctttgcatttgagctactgtttgttgtaagtcgggttgatcagtagttgcatgttgtgtgtgtcatcttgatgatttccctttcaatttgtgacccacttgtaatattcagaaattatgattatattaatttgggcatattttattaaatatgtgattaaatgaataattaagtataatttattaattacagagattttatcagattatgtgggtattgtatttaccatttttaaaataaaatatttttgggtttgacggtcgtgaaaactcggtagagtggtcagaaatgtcacatcgataaaaattgagttatattggaattataccggactagtttagaatgttgagaagtcggtttagtcgggatagttagaaaatgaccaaaatatcgttaggctttatttaacctaagtgattggtggatgggtagaatattattttgtcttttatgggttatttaggctgaaaacttagggtttaatgttaggttatatcattaaattaatatttatttatttagttaaattaaagatagaaccaaaactaagaaaaaaaataaaaaacattgctctttctctcttttctctacggcttaagagaaaactaggagtgttcatcaaaccgctcaaatcgtctacaccacaaaaaaatacggtttgaaattctttgtggtgcggttgcagtttgaattttcctaaatcgcgcagtgcggtgcggtttgcggttttgaattgttaatacgcggttcaaattccaccgcaccgcacattataaaaaattaatttttatatttatttaggtccaatatgtgaatatccaacccaaagcccactaattattgtattatttaaaataaattttttcatatttattttcaagccttatggtatttttgacaagtgttgctcaaactttattgtatttgtaatattttaactattagtgatagtccaaaccgtaaaaattgcaaaatcgcaaaaaccgcactgcactacaccattttttacggtttgatttctgtggttttttagtttcgtggtgcgggtgcggtttgggaaattagaaaaactgcatgtgcggcttggtttgcaaaaaatggtcaaaaaccgcaccactcgcaccgcgaa

SEQ ID NO: 321855 - DNA, 1829 bp, Cannabis indica
aaaaacttatatacattgtgtatatatggaaagatatataaacaagaggtcaagaaagagtagatagaaaccaaaagacactaattatttaaatacttttaattaaccagacacaggaagttacgcgcagccgatcgaagcacactatcaccatgcataaaaaaatgaaactcatattaatgaggtcgatcgatcgataatctacataattaggctgttctagtaagcactagaattaaagttgaaattagaacaagttgtttgtctaaacaaaagagaggagctgaaaccaagccttgaagcacccaaatcaaacaaaagaaaattgttctcaatttgatgccctccaatcacaacagcagttggggtgaacttaataccccaatcaacaaagttaagtggaccgccatcaacgaatccaaggcacaacacatcattaccaacacttaccatggaattgtctccaaatattgaccacaatttatcatttctcaataccaaatctatctgaggcacagcaggcccaactcgggtgctgcctatgtgttttgcatcaaaacacgctccaaaaggtgcaacagccttaaccctaggaaccttagggccaagagctttcacaaatgcattaactaaggctttgtacattgaagtttccaatgttgtgaatggatcaacagtgcttatcttagttccgccatgaccgccttcgttgtcaaaggttagtagcgttgcgttgaacttcaagggatttccgccaaccttgatggacttgactccgatgaaatattcggctgatggatttccttcaaaacttgttacaaggcttctagggttttggataagcggtgtgtaagttaaggacttagggtcagatacgtcaataccaggaagcaacacataaggttcctttccaaagaaaacgacaccattagaattaggggacaagcaaacaccaaactttcttgggaagctaaaagccgaggcgagcaaagaaggaagcgcaactttgttccggcccaggccagcaattccgacagccccttttgagaggccttccaagagagagttgggagcacaagagaagagtagattaggtactgaaacttgtttaccgctattgaatccgtttgtggattggacatataatgtgtcttggaataaatcaccgcttgttccgactgatgagatagggttattgggcatcacactacaaatgcctacgtctgatggatcattatcactaatagtacaagcccctgataagcttagagcgcattggggtgagccacaggggacaggctttttggttgaggatttatagcccttttcacagtcaacccataggaactcgcccccaacatctaggacaactttggcttgaactggaggtgttctttgggttatttgagttatgtattggcgagtagtggtgtcttttgtaacgcgtaggacaagagctttggggaatggtgttgttttggctgtggagagatgagaattaagggcggaaaagagaaagaagaagaggagtgtgaaagtgattgaggaagccattttagatggtttagtagtgttgttaatggattggattgtgcagataagtcatggttatttatagcagttgagccatgaaatagtagttggtggagtggagtagtgccgtttataattttcttatccaaatggggagttttatattatagggtgattcaacaatgcactcgccccttaacagggatgtactgatacaccatttacttattttggcattcaaaaaaaatttgtagtctaatttttttcatattcatgtacgttatacctatttaaga

SEQ ID NO: 321856 - DNA, 1096 bp, Cannabis indica
tcttacatttttaacgtattttttattgacagagtggctttactaataagtttttaatattgggataattacacaaggcactattttttatatgaaaaaaattacatctttacgttgaaagaactttttttatatatatatttttacggttcttcatagaaacaacacgaaaactacataaaagtatcatgaaaatgacgtctaaataacattaaaacaacaacaaaaaatataacaaaaaatcaacaataaattaactagagtacaatataaaaagaccgtattttctgtaaataaaataaaaaaaaaaatcgtaaaactatttaaaatttcgtgaaaccgtatttttatgatttttttttattatttttgtgtatttgtgaaataatccctttaatataattattataattatttaaaaaaaaaacacataattacgaaacatttattatacatattctccaataaaaaaaatactaatttacaaatccattatagggcttaaattaatttagaaattacactatgattcatttccttataaagttgtcttcatacattgatgagtactcaaattttgaacggccgtagaaaaagaaaaaataaacaaagaagaggtctcgaattggttatgctttttgtacattgagattaattgttatttgtatatattatttttttttaaaataaatatttttatatattattctaatttttatctacatgacgtgacatgtctatgcatacaagattgatgccacgtggaatataatttgtcagcaagaaggccaaatcatcatacacaacatatgaattgacagggagtctaaatacaacgagaccactaactgaccagcttaagggttctggctagactcccttagccgaccctatggcttgcataggctggccaacctctatcctggcaggcacttgttatgtctctgcagcttacatcctggacaacactttaaataacgaattgagcttcaacaatccatgaaaataagagataaacttcattataaacctattcttggagactaattaacaaattatttatttattgtaaagtccttttttggcaagttaggtg

SEQ ID NO: 321857 - DNA, 636 bp, Cannabis indica
tcttttcactcttgtatccccatcaccaagagcaaaagtttacagagaaatgttttgatgcaaattggaagatcataccaataaagatcatttaaaggtcgattctatggactccggtatgcttccgctattccttaatcttattgtttgattctcttgaattaatatacagatttacagtatttctaacataactcagttttcataagcatttttgacacggtatgaaattgatacaaattaagttaaacacgaacaaatataagtttagacacgacatcacacatacaataaattatcataacttaacacaaaaatatagattaaagcatgacgaacaagcctaaaaagcacctaagcacatatagagtaagtccaaaaaatacaataaattttaataaatatatgtatttatcaattacaataacacaaattttactgaatcattgaataattattcttcataatataaaataaacattatattatttcagtttacttatacttttattggcatctttacttctttttattagttttttttcttttctatttttccgttatttatttagttttacgtttaagtatatatcttatatttatttttacggtttcttcataaattacttttttttt

SEQ ID NO: 321858 - DNA, 811 bp, Cannabis indica
tttgataggaaaccagtgattgtacgtccttggtctaaggacctaaactcaattcacctaattcgatctgtccccttataaatacgtctccatggccttggtctttagtattggggcaacaattgcctcagtgctcttgtttgtacaattggaagccaatgatgatggataaatttactaaggaaagaacccgaattcagtttgcaagagttcttgtagagatggacatagctgataatcctctttggtttattcagtatctaaatgagtatgggcaattggtcgagtaagaagttgactatgagtggctcctcgtgaaatgtaaaacatgttcgggttatggccatcttatggtggattgttagaaagttgagaatagtcaagacggtaaggagatgaaacaaaggaaggaggttacatggactgttaggaaagaaaaggaagttcctactgctattgtacagcaggtaggaaaactagtggaaaaatcaacagctccagttgctgtgcagaacaaaaaagaagtgaaggataaatggattacccccgaagaaaatagcacacaagtagagagaattgggtggttcagatcttcaggtggataaagacagtcaaaatctgttcgacatccttgatgttcagacagaaaatttggtagcgggtcttaaagttcagatggaaggtaaaaaaattagatactagccctttacatacctgttaatggactgttgcaaaattttaagttggaatgtgagagggttaaatagtttgaataaacaggttgatgtttttaaatttttgtaatctgaat

SEQ ID NO: 321859 - DNA, 502 bp, Cannabis indica
catgtcccaaatattaccttttcgagtttttcttcctaaccctttataaagataaacaaagttaaagaaagtcccaattatgcactttttattcttcatttattattattctatatatctacttttcttagacaaattgtgaataaatagataaataaataagtagaagaagataagaggggtaggggaaaaaacagagagtctctgtaattccattctcatgatgacatacactatttgttcattggtttgaactgggtttgttgcctctgtaaatttatactgcccaccatcttaattcctggcctttgaaaacggttacttaaacttcaaaatttgattcagactctggaatttgtgcagctatcttttggtctggggtgtttttcaaataaaattcagaatgtcaacaatggacttttaactctagctaatgcataattatagtacatggtgttggacaccacaacacgtgaaaaacgtaattactttattattgtaa

SEQ ID NO: 321860 - DNA, 999 bp, Cannabis indica
taatctttaaaaaaaaaaatatatgtatatagtagtaaagtacttttaacttgtattttgatactcaagatcccgatccatgtgattattaatatataaattattaaaattaatcttcgagtttattattataaaatacgggcgttacaggtgctttgtgaatgatgtgtgggactctttttataaccaacccaaagtttcacatctggactattttaactctgatcaccaagcaatatcaacagatatctccaacaatttggctcctcagcagcataaaagatacaacaaattttgatttgagaaattgtggttatttgaccctgaaagcaagagcatcatctcaaattgctggctggcagaaaacacattagacccgattaggagtgtccttaataacttggatttgtgtgctaaatcattgcagcaatggcacattaaaaatatgaccgaatgaagaagaatatagctgatgcacaatccaaagttgacaccttaatcaattctcatactctaaacaatgagacagctgctgcactgaaacacaatgaatcaattctagatgatttgttagaacaagaggagatatactggcaacaacgctctagaattgattgggtgcaattaggggacaggaatacagaatactttcattttaaagcctcagcaagaaaatcaaacaacagatagcttttctcaggacagaagatggtataaaagtcacctctaaacaagacacgagcaaggttattcaagattatttctccaacttgttccaggcttcttccattgataataatgctcttgctacaactttggctacaatcccagtttctgttactatggacatgaatgagactcttctaaaaccattcaaaaaatcagatgttgagctggctctgcaaactatgggacctaataaagcccaggaattgacagaatgtctgcaatattctaccaaaacaattgtgatgtagtcggtgttggaattattttacc

SEQ ID NO: 321861 - DNA, 1164 bp, Cannabis indica
agagagagagagagagagaccttcgaggtaaaagctctgtcattggtatctttgtcttgttttagagctgtgacgaagaaagaggctttggttatggtggtggtggaagccatggctttgtttggtgggcttagccgccgagagtagtgggaggtggagccatagagtttggaggccgtgactgaagcggtggctgatgctgctactgacaatgccattctttctcttttattatctctttgttgttgttggcttggcttggcttgtccaaagttgacttctttctcttctctgcctttaaaactttggaattcgaaaccatctttttttttcatctagaaaaaactaatatatattttaatttattattacaaatttttttggctaaaattttaacacaaaattggtctataaagtttaattaaaagtaatgtactaatatttacctacaaagtttcaatttttttatattaaatttttaatatcataattttttatgattttaaattaaagaagaagagataaaaaaaaatttatgtggttcgagtgttaataaattctaatctacgaatcaatgttattgagctacaaatattttttaccctaattgaagaactttaattctcagttcttttctcaagagtcaagaatttaattttcaacattttgcataaaagggtaatgttctatttataggacagaatcgagtatgagcataccccgacccagtaggattttttggtatcaactaggccatttgacagggtaagatacaacagttaatgactttgggccaattgagtgaggcccaattcaccaagtgaggattgttcgtacaagcatagaccgtttgaggattccaggtgtagtgtgcagccacgtccatactgagaatgtcaaagaatatgacgatgcaaaaaattgtgatcttttggtagtgcatgctaggggtgtacgtcggtctatttggtcggtttacattttattcaacttaatgtaaagattgggttacaaaaatttaagtgcaacccgctcaattaagaaaaaagaaataataacccgcccaataaaattagtcagtttgatcgggttaacctgtccaaacgaccactaatacttttttttaatttttttttgcgttggcttacagttgcattatcgttt

SEQ ID NO: 321862 - DNA, 1056 bp, Cannabis indica
agctaccaaatatagattatttgttactaattttttagtagctaaaacttatatttcttgtagtaccaaataaaagtttcatatgaacattaatttaattcactacaaatattattatataacaaaatttcaaatataaataaattcaataaatatcaagatcaaggtaattccataaaaatcaacaacgtttcatatgaaaacagaacccaaaagtaacactaaaaaattaaaaagaaaaatagatatcttaggaaataacaacatttcagatctgaaaaatcccccttcaaagctcccaccacgtctaggagatccttagacaccgcttacgaccttaatgcttattcccttttaatcccgaagtcacctaagattgaaaaacaacagatttgaaagttagagtgagagatgagaaggagagacagaaatgaaggttcttcagtggtaggtcagtatattacatttaagactatgatatagtgacgcgcctggcaggtcagtgcatatttacccagtcatacttggcgcgtcactattggttaacaaatcttttttttaaaacaaaaataataaaaattataggagttactttttagtgactcttcatatatttagtgacacaaattgtaggacactaacattgattttttagagtctttttgtgtgggtcactaaaactcacccttaactttttactgacccacattttcatgttggtcacttaatagtgtcactaaatgtcaagtttgtagtaatgtatgtaaatagataaatatatatttgttcatgattatagtatcgtcagcacagtggaatataatcatgattatctgttcaaaagtttaattcccatgatttttcagttcactggatttagactgacatgataatcgacgataaggtatacttataccttggataagtgttatgtcatttccagggcattggcaaagtttaccaatatcagatgtatggagtatacattggaaggggccgatatttaacttgcataagatatcataaacttaccgttatatatttctaagttaatat

SEQ ID NO: 321863 - DNA, 530 bp, Cannabis indica
ttgttgttaataaatcgataagaagattgttctgataaataactcttctatagagttcattaatattaaatttattagtttactatcatctaatgattcgggagcaagaacgaataatagacatttgtttgaataaaatgtttattttgcgtctaacttaaaaaaattattttttttttttaaatttttcgatttttccattcattattcgtgggctctccttctcctaattctttccattctgttaacgaataatctataataattcctaaatccctaattgttctcgaatagcacttgttctaatagaaatttccccatttcgaaactcgttgtagccattagtaaaaaaaatactatatttttaaaattggattttatatacgaatgagcctcgtaatcctaaaaattacatgtttttatagggaaatttaattttctatacttaatattttttccctaaactaatatttttctacattgaaaatatatgaccacttttccaaaaccccaaaaatacccctcttaaa

SEQ ID NO: 321864 - DNA, 622 bp, Cannabis indica
tggttcacattggtgttgtttggttaattggtgtctttcgggtgcatatttttgttgaatcagatacactcgggaagtgagagccgccatgccaaactccagcaaaagaatactcagtgctttcagtttgttctttttacttttctaaatctcaacatagttaaatcttgttatttgtttgtttatttcactcaattaagaaaaggacattgttgaaaaatattatactagaataattgaagtaatactaataatgattgtatgttttaaagattaaagaatataataataaaatatggtatattatcacttcgccactcaaattttatttaattttttagaatgactaaactattaagtcatcatcttaaatttgtatataatagcctataatatggtgcatcacttgccactcaaattttaaattacgaccatgacaatcttgtccaaacttttctcttctttttcttttgagctgatcctaggttgatacagtcatatatatttgtcttgcctttaattaatttatattgagtacgtcttgtcttgtgacatgtttttgaaagtgtattcgtacttttgttattctggctactagtttttctgattggtttgatcgatc

SEQ ID NO: 321865 - DNA, 1157 bp, Cannabis indica
atatatatttattttaattttaattttgtcaattattcttttgttggctcattgctaccacctacttaaaattaagaacctagaagaagtatagacacaccggccattactcctctctctttctctctctacattcatatataaatatatatatagtttgagctttgttgctatatataataaattcatgataaattctttaataaaaggctttcttgtttcaatactatatatatatatattcatcaagaaggaatattaagtagacaaattatttattatatatatatatagtaaatgatggaattggttatggtggaatcatcatcttcatcttcttcttctttagagaaaaatattaataataatgttataataaaatcatcatcatgtgaagaagaacattttcatgtattggctgtggatgataatctcattgacagaaagcttttggaaaggcttcttaaagtttcttcatacaaaggtactcaatattaattaattttcttagaattaattaagtatatatatatatttaatttgctttttaataaatatatatggaaatatttaaaaagatatatagtctcttcatttatattattgtttggtaactatatattgattgttatccttacaaaaaaaaaaaaagtatattaatttgttatgagatttggaattaattaaattgagtacatacatatatatatatatatatagtgacatgtgttgattctggagatgaagcactgaaatatttgggtttggttgatcataataattcagacaaaaattccattgataatgcttcttcttcttcatcatcatcaacccccaactcaccaccacaagaggtacatataaataaatatatatatatataaatattataaactgtattaattttcttttgatgatcaattttcatgccagtttctattatttgttatataagttaatttctagttgttaatttttatatttattgtacattatatatatatgcaccttatagtaaagtataaaacttttaaaattcttttatatatgaaattaaagaaaaggtaagatagtggctataagtacttaaagtttgtagtttgtaagcggacataaatctaaatgtaattttttgtaggtctataagtaccctaatg

SEQ ID NO: 321866 - DNA, 518 bp, Cannabis indica
tatactctaaaattagtgaacttagtttagacatctataatctattgctgtaaatccaaggaggattgtaattttactttactgtgtttattgattaattcattaatcaatgacattgattgtgcttgttgttagttcttgctcttggatctctgacggaacacattttataattccggaaaagtattgataactgagttattcatatgagaaaaaaaaactagctcctacgtatagttatttagccaacaactttttcatcaaaaaaccttgaaatgaaactaagatcattctgcttttatatcttttccatattcgaatcacgtgcaagttgaatttaaagcgagataacgcctacttgtgataataaagcgtttctgagataaattgtatagtaagttaagaagaaagatgattgaagaatatatatataccgaaagagtatttgattttgtatgtttaaactgatatgtaaaagtgtacatgaaaagctggttcccagacttttctattgctat

SEQ ID NO: 321867 - DNA, 687 bp, Cannabis indica
gtatatttttcatgaatttatatttttagccatcatatctatattattttgtttttttactcttaatttagttattttgtttaaattagtatattttttttttatagtttttatatagttatttcttttgttagtgttaattaagtttatatatattttagtattttaaaaacactttattttagtttaaattaatctttttctagcttttttattttaattataattaggaatatatttatgttatttcggttattcaccacaagttgacacttgtcatacaacaagaatatgaatcaattcaaaaaatataataattaaattgcattattaaatacggtttaattatctcatttcaattaatatgaattttttttataatgaaaaatatttttcaaaatacttagatatcattaaaaaaaaatgtcttttgtgaataaattaaaaattatgtaaactattttaatttaaaaaataacttctcaaagtccgtttgctagaagctacagcttttttaaaagattttttgtaattctaaaagactaaaaaaaacttatataaattaaggtaaacaagaccaaaaaataacttatagaaaagtacatttaatttctactagcaaaaaactacgtgcgaggcacgtatactaaatttatactaatttttttctatgttatttgaaagtaa

SEQ ID NO: 321868 - DNA, 2131 bp, Cannabis indica
cttagagcttggaggcaggtttcgtgcttagattttagcttaggttttctaagttagagttaaggcctttatatagaagtcctaaagccaagattacaacttgaaatcctagatatttgtatattttattagttaattacaaaatactaaaatgccattgaatgtagatattatttagcaattctgttgggcttttagggcccaattcgtagcccaagagttattgtccacgtgtagaagtgcacaggaaaccctgcagaacacctcctgttcggccaagcccctatggagggtatactggccagcaatggtgcaaccctcacaggggctggccggccagcccctatgagggagctggtctgtcacttgatgcatgtttgagtgttggggtctcaatttgcttaggtactaacttggccttcttattggtgagctgctctaccacgtggtgctaattttatcgacataagcatcccacttcaggttgacaaaaatcaggataacatttgccccaaattccttgtctaaacgtctgtatgaatagggactttaccaagtgtgttggtgtagttgggactgttgtaacctttgctgaataacagttgatgcatttttagccttttaaaatactttgtcttgactgtctgatctcattgttgtagaaaaattaattgccttagttgccttttttatatggtggtgaagtaagtaaggaaagggccccacatgcattacataagtgcttgttggaggaaaaacctttttcacttctcactttttacttttcactagaaatttgcattagaaaaagctcttccttctctctagagggccgaacccacaagcatcatcttcttggaatttttacgccgtttcgacaatccaagcttcccacctgcttcttcaataatatcttgtaacgcgtaagctttctattcctgcttttttcacttgatttggttgatttttccattgctgcatggacattattcttgatttgaaaatgctttgattcttacattagattgttttcctttcgatattctgatccacatgatagccttaggatacataatgtgtgatttctagacaaaaagatctgacatctgaccttcattgtgattcttggctctttgagtcacgaagaacaaaaaaaacatgtttgagttcttgaaaaaacatgagttctgatccatgcagatcttggccggccaagggaggttatcatggggtttagccggccaaggtgttgtaccccctagcctggctagcctatgcctagaattagggctcctcatcggccactagacttggtcttgggtttggccgaccactaaggcttggaacccttgtcggccaaggccaaggctccaagtgggcaaccagtttttccctcttttgacctcaactagggtctcatgacggccttggaggcttatacaattgtggccttatgcatggtttcttttggaaactttatataagtctaggtagtgagtccattatagtgaattatacaacttagcacttaatatctttcttagtaagtacatttaacaccgtatgttgtcgattactgaccttgtacattatgttttacctggaaggtacctttgggtactcttcacttgaatgtgcttgtagcttttttcatgttgctcacctccccttatttcttccatgtaggtatcaccgggtattgaataggtgaggtgacagccgtgtaggtcccttatttactttgcttttgtggcaagaacaaaacaaaccctccgtacggcgcctccatatgaccctcatgtggccagggtggccacaatgagtcaagtcaagatggtggaggagaccgcttagccccgtgctgatgttgagccagagattgactaagaggctgagagttctgatactgaatctagtctagagattgtcccttgggtcgctataacgccaatggtaacccactaaattggctcagttggcccttagagcttggactagatcatgtcttagagcagtcttttgagctggagatattggatgcgagatcacaaggagacagttgcgtctctcctgcttttactcttttttatggggcctttagcgagattcttgctagtggcttagtgagggg

SEQ ID NO: 321869 - DNA, 615 bp, Cannabis indica
tattttagtttaccacgcacgttcaataaacttaaaacgtattttcggcactgtaaattattcgaaatttttcaaaatttaccgggatgatattataagtataacaaacactcctgtgaaaaaaaaattaaaaaaatattccgacatgtgttttcaggtgtgaaggttgactaagaggttgtaacaggaggttgacggtagcactcctcatgtgaatatcgttgttgtaaagaaaaagaatttttatgacttatatactggctttgagtctcaagtgaggcgagcaagtcgtacaccttgagctcccgaacatttaaagacttcgaaattgtaaaaaaaaaacaatagttaaaagataaaatattaaattatatgtaaatatatcaaagtattgtttatagtatagtgatagaaagtgttataaaaaagtattaagttattaagcttttaaaataattataatatcattacgctacactcaacaaaaaaaatagaatatattataataaaatagaaggtcaaaatatcaaattccaaaatatacaaaatgttagaatttaagataagattaatggggttctcatctcaaaactaatttgtaataggaggagtagc

SEQ ID NO: 321870 - DNA, 1335 bp, Cannabis indica
tatcaaagtaaaatagattatatacatgactattgggcgtcttacaaggtttcctctgtggggcgatagttccatacaactggggactactgttggtgcaaggcatatgtaaggtaaatgtcacatctcgcgggaaaagtgctcagaggagttgcgaacaaacggagtattcagaagaggtgcgcgcatgctctgacacaggggacaaaatttgatcttgcgccaagatggtaaacacgtcaagggagacgtcaagtttccacttcgtagcaggctttcgatattccttgagtacacgacattcatcttagactcttcagatagctttccagggtttcttcctgtagacttaatggatttagttttctccatgacccgaatggccgagaaggcttccagggtcttggacggttgctttatcttgtggcgaggtgctaagcctttcctggacctaggcctcttccagattaaataagtcttctcgcgatgtttgcgattagagagaattaatcgataattacataggtaatcatcttctctcttttgccacgtgtatctactccgaaaacatggataacattatacatattaaatttcatacaaaaattaaattttttaaaaaataaaataaatgaaaatctaaaaattaaaaagattaactaacaaaataagtcacttaaaaaattagggtccactctcaaaaaaaaaatgagttcctatttttcattgtaaatttgataaccatcactggattcaagtcaccatgcctcaatctttcccataaagtatctaatattttattttattttttatttttttataaggaaatgtaaattatttcaaagcttacttcatcacctttttttttcttcttcttgcagacggtggtcggatctaggtaagggtttgtcagatatgggtcgaaattagtcatatctagtctgggcacctttaatctcttcgtgttagctctaacagtgcctagtatgttggtaggttctaacccagcttcttctgcttcgtgtttctcttcaaggaggcaccggtctgcatctcgagtgcgactgggaggacgacggggctcatgtggctggctctcaatgattcgacaagcgcagcgacaatttacacatggacgtcgactttggagaagaaaatggctggttcttaatgtctataagattgttttttctattaaaatctgattttttttgttatggtttatgttaaaaatctgctgaatgatctaacttaatttaagtttgtagatgatgataaaaatgggtttgatgatttcttggtattcaaatgcatgtttgttgtatttttttttaa

SEQ ID NO: 321871 - DNA, 339 bp, Cannabis indica
ataataataataatagtaaaagagataaatatattgaatttgtaacaaatttggtcatataatatgaagaaaaggattcaaaggaattccaaactcatccaaggtaaacttcaccttatgaccttgtattaaatccattcatataaaaagaaggaagaaataacgaaaagattctctctaagttagcaacttatcccaaatccttgtttgtgctttgtgggattatattgaatattgtgctttgtgggattacttcacgttgaggcttttttttttaacgacaaatgctaaagggaactagtgttgcctataacactttcttatgtgtcaatattgcta

SEQ ID NO: 321872 - DNA, 685 bp, Cannabis indica
ttgagaaagagtgttatgagattcaaactcacaccattgtataacgtgtgcgccctacacatgcctcaccagcatatacataagatcggccctgatatatatatttattttattatattatatattggtttaattaattagtttatatataaatatattatatcaaatgcttttttatcgaccatctttgtttgagcacttaattatcttgccaatgtatgtaattataccactaattcctttaatagaatttgttattcacaatcactgacatcaatttgttgaggagtcatctagtaacaaagaagacaaaacaacaaaacaaaattaataaaataaaactatatcacgaagagaagactaatcttaataacttaaacaaaagacactcaaaaatatatcacaaagacaagactaatcgcagtagtaaaatttaatcaatagcaaaactacatacctcgaccaagctacacttaagcccgtaaagggccggaaggcctagctggagaaaaaaaaaaggataattttagaaatacacaaaaataacaaaaaaattataaaaatacgatttcacgaaattttaaatatttttatggtttttttgattttatttacagaaaataaggtctttttatgttgttatcttgttaatttgttgttgattttttgttatatgtatgttatt

SEQ ID NO: 321873 - DNA, 608 bp, Cannabis indica
aaaaaaaaaaaaacttgaagccttctcttctacactgcttcaaaagtctacccagaaacaacatcgtcatcctcttgtgcgattgcaaccctagcaccgacaacacaagatatggttgcattaacactttatttacaaaaatttctaaaaaaatcttcatagtggacaaagatataactaaattatagatctagtaaaaaacacctaagcaacgagatttaataaacaaacaatatatcccatcgatgcccagatctcaaccaagaccaagtatcttgttgacacctcacccatatctccattaggttcggtgaagtctgtttggccatggacggccagagttgcttcgtccgactctgagtagagagaaataagaaagggattgagagagtgaagagaactcaagcgagatcgagagggagaacaagcttcggtgtgctctgatgcttgcgatcattagtagaatgcctcgtcagggtcgggcagaagtgccctcggagatgaaacttgtgagaagagagaaatgagacagaggtttacttttaggtttcttttgattttttttatattttattctgtttaaatgtttaatgttaatttattatttt

SEQ ID NO: 321874 - DNA, 524 bp, Cannabis indica
ttaattaattattgtactttgagtttgagctagctaaggaagctaatttataatatattatgtctcaattaggagatggagaaattaattaatttacttaaagcactgcttttaattttcgaatatgcttagtctcaccatttcatgctgtgtttcatcaatcaatatataatgttgtatatatataaatagtgcacaaactaactaataattaaatgcttagtctcccaaaagttcaattttatttcaggatttatgatcattaagttgatcattcgactggattaattgttcaacaaaatttggaagcttaatttaattattgtgtctttctacttccatgagtatatatatatatacataaatatatatgtgttggtagggtttttattttagtgttttaatgagctagctattaccattgatcatttgatatatagatgtataaaacattgtctctcttctccaaagcaataaaatatgatagaatcttaaaaaatcattttttgttatttttttttttt

SEQ ID NO: 321875 - DNA, 1109 bp, Cannabis indica
aactctaacttggacccgcccaaatgtcaatggtcgactctcgacctggacttcgaccttatcccagacctagatatggatccctatatattctggtccgaaccccaaccctctcgagacttgagtcgttgcctctaacccttggagcttgacaccctgaaccgatgctaaactccaactcactttctcctcattttgtgatttctcactaaaataaaataaacaaagaatttacgaaacacatacatattatattttatttgtaaaattaaaaacaaaaataattatgaaaaaacaaaattctatttttatatttgtgatttaaataaataaatacatttgatattaaccaattaattaagaaaaagaacattatatttaattttgctaacattccgactagaattctaaggtggcagttcatatcataatactataacttaatatgaattattgtggattagaatcatttaaaatatatgcaagttaaaattgggtagagctgtaatacactattattatttgagttgggttaaaattaatacatctgacgcgaaatcgattcgaattaaaaattgttggttcttttccttgaactagccatggcatgaaaaaacttggaatttttatcaccgctatgataagtcaaaatgagaacacgataagttgtgttagggttaaaaatttttgacacgaaatatatatagattatgttaaagttgaccatgtcaaccaacataacacgaacacgaatataaaatattaatatgaattaccatctttatagaatattcattcaagatccatatacggctaattttcgttagcttttacaactttttcaagggaaaaatattattaatcttctaacaaatttagaaaattcaatttgttgaccgaggttttcggcaactaataaaatataattatactattgagcagtaagaaagtgagagaaggatttttacgtggttggggcgttaatgagccttagtccacgagtctttgttatttatggatgtatttaatacagaatttatacttgggaggatgtcacccttataatttcagagaatgttcttggtgagtatttactcttcttgctcata

SEQ ID NO: 321876 - DNA, 1810 bp, Cannabis indica
ggacaaaaaatgaaatttccctataattatcacctttgtaatgtatagggtgtatcttaacaacttgagagaagttatattgtgtaaggttagagtgagaaagtattaaacttttgaaagaaagttcgtcttagaatctcttataagtttaaagaatttttgtaaccttataaacaaatatcaataaatatatagctgttgttgttctaacttagatataaaatattacacatagttcgaacttgttaaatcctaatattttctcctcattgatttactgtcttaatttctaatttttataattctttgatagtgttattcttaatttggtattttttcattctatgtcattgattgattaaaaaaaaaaaagtttttaaaaaatacacgatcttagtttacacatgtattatcaacttgtttcaggatttcaatttttatattttgtatgatttggtaaatagctgtcaattttagttaataaataattttaaaagaaaaattgttacatcatcaaaagttacttatcaaatatgctttttctaaaaggatatttatttatttatttatagagaaatacttataaaataatgcttggataagcattattcattaacaaaaataataataagtaatttctagatataattattattaatattataattttaagaatagattggtaactaatacagtggaaagttgaaccattctaccaaaaaaaaagagaaaaagaaatataatggaaaccaatgacaataaagtcaaatatcttaataattaaaaaaaacattaaaatataataaagggtcatgctcagaaaagtagtaaagtcaggacagatataatagttgaatcggagatttatatggatttatcattacaaaatacactaaataaataaatacaaaatttattcttaaaaaatatgtataatcttatcctacaaaactagtattttatttatattattattgtggaaccagacaggcatttatagttgtaataatgtattgtttatttgataaaaaaaaaaaaaatgtattgttctaaatgtgcaatttacttcccttccctttttaagtattgttttttttttatcaaataaataaaaagaattgttaaagggtggctacatgtggtatttgagtgtataatttaagttaaatttaattaaaaaaaataagtaaatattatatttgatccaaaatttataatggtgttctcatacattaaggtaaaattaacttttttttttatataaaaaagtgtaaaaaaatcataaaaaaaacattaaatttttattgaaagtaaataaaaatcataataaataaataaataaaatgtaaagttattagttacattaataaatgacaaaagagtaaataaaaaaattatatttattgtagtgtaaaataaaatttgacttatattgtgataaatttaacataaattttaacattttagcactctattaagaataattttataatgtataattctattaacaatacaatttaatatcatgtcctatttattatattccaagtaaatattataaaaaaccactaaaaattataaaaggtacctcaccgtaaaaatggctcataaacaaattgtttggaaagaacacgcgagaggtataaaaggatgaaaaagaataaaagttaattaattatgaatgtttaataataataataataacagtaaagtaataataataattaagcgaaggcgcgactagaagaggaggagagtctcacccgcagtctctcgtaggttttttaatttaatttatttttattattat

SEQ ID NO: 321877 - DNA, 2553 bp, Cannabis indica
gataactaatcagattgtaaagagttttatttagggcataaaacccaacacatattgtgttacttccaaaactagctctattcaatgtaaccgaaagttgtatttttcccattgcaacaagggtatctccattaaagccttgaagttgaactgggcaagatgatagatttgtttccacaagacatatgactttaaaagcttctttgaagagaatgttgatcgagcttctgttatatatgagaatctatgacactctcttgttagcaacttaagcttctatcaccaatggatcattatgtgaaaaatgtacatgcttagcatcttcttccgtgaatattataggaagaatcatcattcgaggacgttgtgtaggtgattataccagactataggcttcaccatgcttcaactcattcaaataccttttctatgcatttctcatgttttttgctatatatggtcctccaaatattgtggctacatgaccatctaatgctagcagagcagcttcattcaaaaaaaaaatgctagcagagcagctccaggtgggtacgggtttccagatccaagagcaactgtagttcttaccactagggcattttgtacccccgaggggtttgtatagctggagcttgtattctatgagcttactggattcctactccctaaggaggatttatggctccaggctatccaggaataaaaaaattgtatgtgtactactgcttgtctaggatagataactaaaatccttacccagttggataagtggccatggcagactaatccttcaattttttctgttaagtagtcacattcattcggtgtatgaccaacatcgccatgatattcgcaccttttatttagataccttctttgttttccacttttatacattggtggataccttatgtagtgcatcgtgctgcaagttgatttgtatacattatcttgagtatcgatcaagcttgtatactcagattatcttggttcctaagttctccccttcttcgaagattcgctcctacttggggctttagaacttcttttgcctcaaggattgctaacgttcgattctggtacttccttttgttggttcatttgtctaagagcagaactatattcagtttgtgccactccaaagctagagaaacttgcttatccagttggttatatggaagtaccagctctgtaaatagtaggcgttgtgaatgtagatgttggaggcaaaatagcgggagtagttatttgagttgtggatgtgtttgatgatggtgctagaagtattccatatgcctgagcataagcttcttccaggttgatgaatccttgaattgccctcttactctgaagcccaccccatagtaaggatccagtggatattcttgatgttaaagccaccatcttcatatcatcagtaaccttcatctttgtagaaatatccatcatatgctgtatgtattttttgaggctttcttttggttgttgtttgatgttggtcaaggagctaacttctagatcgaaatcctttggtgctataaattgtttcttgaacatggctagcaaatctctccagttatgaattgatcgaggagacaacctcttccaccaatctttaatggattttgtcagagtaagtgaaaagcaaagacactttgcatcatcactagccttagcaacttgcatcatatagtggtatttggatagatggtccttggggtccattcttccttcatacaatttcatatgaagcattttgaaatgctcctatagtagtgcgtctataattcttttcacatatggctctgtgtcttcttcttccaaattagacacagttccattatgcttccgagagatcttctccgtgagtttcattaactcttcaaacttgcattccaagcattgagttttgtcatctaaagattctcttctgtaaaattaatcattaatgtgattccttaagtcatctccacgaggtctgactttctctgttctagatttttctttctttgcatttaattttctctgaagatcagttgtggagagactccaactgttgtgatctgataatagatgcacttcttcaacattgtcactttgactgagtcaatcgtcgtattgatttgcatcctttcaggcagtaggctttttggctttggcatcagatttatctttttacgcagctctgcccctagaattagttcggttaccctaccctcaagcatggtttcctttctttttctattgaggttgggggcagatttagatgtcatttgttggtcagtttaaggagctttcctcgaagttttgcctactttttctttccttttatctttataagggtcataagttccaagatttttctaatcagccttcccggtggcattgtccgttggagttgtttgtttagttttgtttcatatagccagtgatgtcattacaaattctattctcgacattttctcaagcattagcaaagaaaattcttcctatcaagttaattttatttcaactatttgtaacttcttcgccatgatgaccacaggatctgac

SEQ ID NO: 321878 - DNA, 779 bp, Cannabis indica
acattatcaatttacaacaatactcattagcaccattatatcaactttgcatttttaggtcaatttaataattttagcttgtttccttcatagtttgtgtttgttaattttttacctattctcatcactgtattttatttttgttgaaaccaatttgtgagtaattagttttataaattaatttctaattttcaatccctgtggagacgatactgtatttatcactttattacttgttacgattgcgtacacttgcgtatacaatttttcacaacaattaactaagtaatattgatttagaaaagatataactgtaagtttataatatattttccaatgttaatatcggtcggtccgatgtatagccattacattcgatcttaaattgttttacaaatgctttgtaaaagacattccactcgactaagtgtaagtaaatcttatcgatgattatcacatcagtgtaaattcagtgcactgataaattgtggaacttaaataatttgaagcatataatcacaattactttctattataataacatcactgtaattgcaaataatatacattcagaactcaataaaacttataatcatgtatcaaacttgcgaataaagcatgtgactaagttatgggtttatttctgatcttaattgaaagtaaatataattacatttgtaagtgtcatgtctttgtgtggaaaattatgtaaatacttttgtttagtatttctgcttctaggattgttggtctaacatcttttctgtagttagttgcat

SEQ ID NO: 321879 - DNA, 1145 bp, Cannabis indica
tcatattgcatacctaaggaagaaagtgtcttcttcgcctcatagaaagacaaaggcacaacattcccttcaagtaataactctaccaggaaagttagtaaatccaaaaaattctcttcactccatccatgtttggcttttatattgtataatccaataagtatcgataatttagtaaacctattataattagggtaaataggcttctcgacatcctctacaaaactttgaaatttcaatggatcgatatttaattcaaattgtgcatctcccatcatttatggaatgtgatcatcgtcatagttcaaattaacacccttaactatattagacttagacgttctctcgcccgaaactgttttattttccccgtggtgaacaaaaaccttataacccttatttatttctttcataaaaaaatgctcatttatcttagtaatttgtatacgctccatgttaccacatataacacaaaaactcagaaccaatttaggatttttttagcatacttttgacaaaagtctaagaaatggtcaacacattgactatactacgctgataatctatttgcactcatccaatttttatttatctcataacttctaaaaagacaaaactttattcaattatttgttcgaatatgtgtagtaaataattaggtaaattaattaccactcatgtatatttttgacctaaaaaagtgatcaaccgacagcggggtcatacagatctgatgcttgccacgtgtatgcacaaataaagatgaaaaacaatagacaaaaagatttgttatagaggtttggccccttgaaatatcaagtaatgaccttctccccttttagttgcatttatactgaaggtgccttccctttgggaggtctccatggcttgtgttttcataatggctgctcgattaccaggtgaagcagcagtgttatgagaatcaagggtttcaccttggacactagttcccacgtgacaagttggtcgatggggtgtctctctcaccaactcgaataaacctttttaggaagtaattatgtgattagagtgacaagcttctctaatccattgagataggttagctctctacttttcctactaaacgtgttagctttcaatgttttgttggattttatgcccta

SEQ ID NO: 321880 - DNA, 2201 bp, Cannabis indica
tattgagctttagcaattgtacatggatgaaaatcatgagcttttcaaaagtagtttcgacaagattaattgaagctatgtatatcaaatgttgttgtaacaaataaaaaataaaagtagtatgaaaaaggaaaataattaagaaaagaagaaagtataaataataaagtgcttttaaaacccaattaactcacttcaatttatataaaaagatgattagtcatattcttatttatgtcatttgcccccacatgccacgtataatcaatggttttataaacctttttataagatgtttctatatatattattatttttttaaaaaaaaataaaaccaaacaaattaagcctactgtaatatgttcttctagatgactttaacccaaaaaaaaaaaataaataaaaattaaaaacatgaactttgtcagaaaggaaatgttgaaagttgatttaattttatgagatgagctaaattaattacagctagttggaaaaaaaaaaggggttgaagtttaagtgcttgtctccaagaaagatatcactgttattagttaaattttttttttattacttctaatttattataaattacttattgtgaatgttattattatttttttaaaaaaaaccaacaaaaataatggcaacaaaaataatggcatacattgttgtagtcaatatttctatgaaatgttattattgatataatattatatctcacatattttattaattaatgattatattgactactaatacataatagcaatattctccttttgttattttgtattctttgcctacttttattcaatcacttttaattgttctaaatatataagtcttcttacacatttctattaaaaaaaacttcttttcatgtctcttgaaactcttacacttcaattaatattttttctaaatatagtgtaaatcgttttttttagactaaggttcttataaggttcgaattttttactcttctcatggttctatttatatattattttatttgatagctagttgtattctatgactagttattcaccaacttactttagagatttgttatttatatattctattaacattagcaataaatcaacatttatagtggaaagaaattttattgcgactattatattattataattttatgaatcatcatttctatatgcattgtacaagattttgttgttatccaaataataatttgtctttatataatgtagtttttttttaataaactttaaacagataacaactttttttttttattattttccaataataaataactactaaaaaaaaacgtgtgtacgtagatatgctataaaaaattactatttttagtgacaaatttttaatcgtaacataatttttttaactaaatatgacttttagtcctactaaaatgttacttgtgattaaaacatagtatttaattacaagttgtcactaatttagtcacactaaattgtaatttttgtgactaatacacatttagtcacggaccttttaatcacaacataagaatattaatttctaattaatcataattttttcacttttaattaaaaattttgtttgtgactaaaattaaaattttttatagtgatatatataataaaaatatatagttcaccatcttatgtacacaaacactgtagtaattaaaatacctacacaacacaacgtttaggtggtgtttgaatattagagggaatgtaatagaatagttagaaaaggatataacttttattctatttctttgtttggttttatttttaagtattaaaatgttatttttattttatctatgttttcattcattttaaccaaatgctaataagatacttgttatgtgaatttgagctaaaaatagtaaagttaaaccaaatagagtttgagaaaatattaaactcatgtgtttaagggaattaacattattaccattaattttaattaaaaaagtgagacttaactcgaaacacaaattccttgtcattcaaatttaatttaaattttatattctcgttctaatcaagtctaaaactcgtaccaattacatattgttgtttgtataatggcgtttaatacaattacttttttctttgcttacaaggataataagtagtactgttttaaattatatatgtagctactgactagagaagagggaaatatatatatatatatat

SEQ ID NO: 321881 - DNA, 688 bp, Cannabis indica
ttgttttaataatttaacaacaaaaatgaaaataaaatatttttaaataatgtataatatctggtacacatatataaacaaaatagtaaaaatataacatttatatagtcaaatatagtcaaaagtacacataattagctcggttagcaaaaaaactaactattcttgttcatataaactactatgcattcataaatgcatacacaaaatatatgatagctttaacatgagatctatctaaatattcaagtcatatgtattaatctaattgttactcaccacctaaagataaactccatttagtagttataaaagcttacacattttaaatttagtgacaccacatataagatataagttatattttaatgtctttagagcctcatccatggttaataagggtcatgacaaactctatcttggtagcctcatccatatttttcaaagcactcacattccatggttgttcagcaaatatctttagagctttgatttgatcagcaacatggaggttcatctttgtgatctcttcccaaacagagtcatacatcttgttattatctctattttttagcgtttcaatgagcaacttcgtttcctcatgtgatttctccatcatattatccaaagactttgctagtttttctaacccaacacaaatatctgaacctggtctagctctcttctt

SEQ ID NO: 321882 - DNA, 2077 bp, Cannabis indica
gaccaccgtcttactcactatgattgagtacttgacttgctatgtgtgggcatgtcactcactataaggccaaaaaataggaagaacaatgaaggaggtgaaaatctctatagaaggaactctctcatctaggtttggttgaatagtcaagttgacattaattggatgagtgagagtatcatggttcctttaatagtgtttcaactagggcttaagattatttttacaccttacaccctctttccaaacaagataaaaaaaaatacacatattctctttgctatcacttccattttctatatttcatttgactttcctttataacaaatataggtgaaagttgggttgttgttaagtggttttatcattgttatttagttatttttgttatacacatgtatttttcttgttgtttatgtttggatagagtaattaatattcgattaattaaagtaattttttttagatattttgtaatttatttagagttgatttatgaatgatttgtatgtttaaatgatgctaatattttgttatttttatgttgtaatgtagttatttttatgttgtgttgtagttatttttatgcagtttttaggtatttttttgtacaattattttgtagtaattttttgatttatgtgaatttgttatttaatttataatattgatttttttgttgctttatagatgtaaatacatatatttagttttttttttttgacacaatgataagttttttttatttattttaaattgacacaatatgcactagtaaatattgacaaataaaaattatattgttatctggttatatttttattgttctaattatttattagacattatattatatgccctatttaaaaattataagactttattctttctattattaatgtaaccactcatttaattttttttttaaaataaattgtcatcttagttgtcattatttccaaaaggagaaggctaagaaaaggggtcaaaaactatgaagttgtaacaaacaaatttcatgaagagaataacgtaatagtataaaaatataatcaagttgttaaaactaatcgaagaaaaaactttgcaaaataaaagaagatgaggagttgatattgatttacatattgcaatgagattgatgtcttgtcattttttattactttgtagctgcccttttttgttgttttataattatttttgttgacctaaattcttaagtctccttgttttgatgattaataaatatttgattattattttttattaatgatttgctaactttgtagtaagaactaaagaggattaagcttttaagtcaaaactgactccaagggcaaaatagtaattttactaaaattctcaaaagtgacctaaagtgtactccaagacttaagaaactaaaaatatgactccatgaaggttaatttatatttcctagtcttgtaaaatgatttacaagtccacacttaaaatttttaagtatgaaattcaattcacagactcatgctataaattatttaaaaaacaatgatatctaaattttttaaattgatttttaaggtcacatatcatttatctaagataatgcaattggaatttttaaaatcgaataaacaagctagaagttataagcgttttagggccaaaaaatgaaaattgccctctgccccttcaccgaaagattgaatgggtcagtttcacacttctggttctcaaccagacgtccagatgagcacagagatgcataaatttttgtgccgaaagactaaaaataactagtttccccccaaactctatataaactccattttctctcaaaaacttatgttggctgagcatagggctgtacatcggtgaatttagtcgatttatactatatattttctaactcaacgtaatgatcgggttgtaaaattctgcatgcaacttactcaattttttttaaaaaaagtcttaacccgactgatggtgtaacccaaccaaaccgaattagaataacaatcgactttatgacgccttctgtaagaaaatcaagacacaagaattagaataacaaactctgctgtaaacatag

SEQ ID NO: 321883 - DNA, 774 bp, Cannabis indica
agtacaaattatctatcattatttaaacaataataaatatggtcctattttttgtttgagaaatactaaaaggcatttatagtatcttgtgaggtgaaatatagttaaggaaaatatcatttattatacttaataaaaattcttatttcaaaatataatccatttaattattttatacaacactattctaataatttctcattttacccaagaaaagctcttattattttattttttcaaaacctaaaaaaaatcaaatctctctctaataaccatatcagcccagcacttcccctttctttgccaaaaaaaaaaaagctctcctcctttctctttatctccgccgcttacaaccgctaaggacgtccactcagcagcccaactaccgtgaaagatgtctgccccatagtctaaccgtcgcccctcctctaactttcttacattgtggattaatgggtaagtacgtattttttttaaatatattgttactaccatggtctgacaggtcatgttcccgccagagtcttgcaggtcatgttcctgccatggtctaacagatatgttcctgccaactttatcgagaggaggctaacctttggatgtggaggccaactttgtacaccttttccctgtagaggtcaggttttcttagtcaaatgaaagctcctttggtctgaaagtcaccttttggccagccagcttgtgcccagatcttggccggccatacaagctcacaccggccgacctataggcttctcttggtcgggcagcatg

SEQ ID NO: 321884 - DNA, 1884 bp, Cannabis indica
cataaaacccaacacccagcacctaggttgacatattgtcaatctaggccatttccaacagtaattatgacaaagtgttatgtccatattctctgttttcaccaaaaattaaggtacgcgtgcttttggaaaataaacaagccatctaggagtcgaaagtgggacccatcgcccaggttgactttgtgccaatttccaaacatttttcctgagaagtctttcgggaatattccccatttttaacaaaaattaagttatgagtgttttggggagtcaaacatattcatctggtggttaaaattgggacccaacatccatgtttacctggtgcctggtcccagcgcccagattgacgttttgtcaacttgggccagttttaagtatttttttagaagtgtcccaggaatctttttcatttatagaaataacaaagatacaagtgctcttgaggagcaaacaagatcatttaagggctaaaacggggccccaatgctcaaattgacatgggtgttaggccttgtgcccaagtttacatacaacacggttcacatgttttttctcctcaaacacaaattctactctgagtattcttgttattttggtcaaaaagaaggtaggagacctcactagcagtctcgaataccatagaagtatcaaaacaagccgtgagaagctctccaaagagcacttagcgcaccagcccaggttgacatgtagcctagtgccctgggttctgcttatcagattcgggtttcgtcttgagcatttggcaattttttttattaataaatgagatatacgacttgtgacaagtcaaattcagaccttgatatttcacatttttggtaaagtggaatatcgacaaattagctgcaaatcaggatgttttgagtctacctgattttgtgaaaaagtgacatctctgagaacttgtgaaaaactataccagatctatgaaattgactaagtaatctcaatatatatctaaagcataaaaaacaagtcagacacgttttcccactcaatacaacatctatgttgacataagaatgtcaacctcggtgctagatgtcaactgggctctagatgtcaacttggacactggttgcagacccgcctttagtaaaatgaccataactcactcaatattgatctgattgatgcaactctagttgcattcgaaagctcttttcaagataattcaagacatgtctcacactcatatcgcaattctgaagatttcaagtctaaatttcctcctcaagacaagtgtagttatttctacaaattacccgaaaacgatccaacggacacaattcgagctctgaaaattgacgattattatcttaagttaatttagccattagatcgtcatcagtggtccaaattagcctagagtaattttttttatatatatattttgtattatttattatcattttaatagacctcgttgcctataaaaagagagctctattagctcatttttacattttactaagtccctataagattatagcatctctctgtactttttttctctataaatttgagtttttttcttagtcaattctcttgtaatcctcgtaaaaataaaaaccttgaaatagatgtagctctattaccatcgcgacatgaagagtataaattatgtgtgtcactctttaatatttacttaactcattatttatctcgtcaatctagtgagctagtgttggccaattttcagtgtcaacataaatataagagcacttaatacacatatatatatatatatatgaattcaagaattaacaatgtcaagtataaaaatatatactacaaatataatatatagataacaaagaaagaaaaacttaacaaaaacggttaattagtacatta

SEQ ID NO: 321885 - DNA, 1072 bp, Cannabis indica
tctggtcggtaggagacaacaacttgataaagaagcttgttggatacttgttatattaaaggattggtatatgctttaccaatatatatttaaagaggtaaatagttcaacgagttattatttctttggttcccaccacctcgacgatgacatgctcaatccaagcccactaaattagtctaggatcccacaagattcgatctttataattatttgagattaattttaattaattaaataattttaaatttctgtgataatatattaattgatcttgttattatgggtcaattcatatatgaaatatttttctcaaatcttacaattgttgtgaacaataaaataagatgtgaaataatattaagtaataaatattaaaaactaactaatctaaaataagatgtgaaaaaaaataataaatattaagtattcaatattaaaaactaaccaatccaaaataattgatctaatttgcacttttgtgaattagattggattggattttagttattatgaaaattagattggttccaaaatatgaaattcacacttagtataaatcgaatgcactatgagtaaaatattgcagaataaatttgatgagcattgctattgagaatgataaaaaataaataaaaaactcttcaaaaaaataaataaaattaatagaatataggcaaaaaataattggtataaaattatcaaatgaaagtattaagaattgaactcatgtcacttaacaagagataggataatttaccaagcaagaataattttgttgtgtaaattgattcttattaatttatattttattgtgtatggaatataaatatatacatatgtactttcctatgtaataatgtgcattatttactatttccaactatatatgtgtactactaactagttcatgcatgatttatatagatagtgtaattaaaataaataattaaattcaagacctagaaattttaaataccttgaacatttacattgaactaagttgaacaataaacatattatgaatatgtattattttctatttcatgcatgattatataataaaataatt

SEQ ID NO: 321886 - DNA, 903 bp, Cannabis indica
agtgatctagcattgaaaattgtggatgttgaaggttattccatgcctttaaatttgatctctgccatgaaagacttgtttcacaaacatggagacataagtacacaatcaagttattccaaagagttcaagagcatttgcttttacttaatatgtaaagtggtgaaagaaatgcatactactttggtcactgacatcactaaacatcgtcttcaacaatggtatcactacataaactttgtaaaggactttacttactttgaggtggactttgtgtgggaatgtctaaagaagatcacaggagatttctattatcaacaaatgaataagctgttgtgtacagatgtcccaacaatactaaaaaagaggattgatgagttgcagaagaatataagtgagtaccagagattgtgtgagtcttcttcaacagagcaatccatgaaagaaggactggaagaggcaatgtattccaagtggaagctcgcaagccaaattggattttgaataataaacttaattttataagctttaggcatgcatatgcatgtatgaataattataactatgtatttcattttctttattaattttcaagttatttagttataaaatatttatacatctcatgtatattttacaattataaaagttttttttggtgttgatatttgacatgattataaaagtaatggagtttatattttaatgaaacaaatttgtcatgatttatattttgatatgattattgaagtcctttagtataataatatataggaagaaacttaaaaaaatttatagtcaataaagttaaaggaaaaatacaatttatatatctatatagggaaatttgattttttatacttaaaaaactaaatattttattcttaaaccaatacattttaa

SEQ ID NO: 321887 - DNA, 1151 bp, Cannabis indica
agttgatgtcccaatacaagtttaaactatttttcactaagactgtcccaaaaattgaaaccctagttgaggatgtaaacgtgggtgtcgggtgaaacaattggtgtccaagttggctttcaggttgtaggttcgtgtaatttcaactcctaaggctaggattaggttgctccatgtcttcattgtatagaatactaaaatatagtgggtttattcaagttattaaagtctaaactttcatcacggagatccttaagtcaacttgggtgcaagggtagggtcccttcccaggctgactactatgactcgggtctactcaacttcatgacatcatccttcatgccaggtgtgaaatattgatgtccatatcaccaggagaagttttcatgttaataatactctagaaacattattaaatgactagcttctacatttttctacataattcacactactaacacaagtgaaggagacttctaaaaaatttaagagtactcaaacaaactagtaaatatagaaaatactctagaaagtttagttaatgtaggaatactctacaaactctagtaatcaacaagaagaagtaaagattgggagaaaaggaagaagaaaagaaaaaaaattaaaaattaaaaccataataaatttttatttatcatttaaaaatatttatttataatttttgaaaaaccatattacctaaactttgacacttagtgcagaaattggatagaaaagtaaaatgctaaggtgccgtttggtaacactgttgtttttaaattttttaatcacaaaaataaaagtaaaggtgtagtttggtaacacttttattttttaattttttaatcacaaaatgaaaataaaatttttgtttttaaaaattttgtttttgaaaaataaaaatgtgttctataaccacttttgtttttcaattttaacaacagaaaacaaaagtgtgttctgtaaagtttatttttatttttattttttgattttatttaagtcgatctaggtccggggtcggatttgggttcgggttagaggtcgggtttggtgccagggtcgtggggagatttgggtttggttctccaaaatattaattaagaaaaaaactgtttaaaaaaatattaaaactgacttttttttatttt

SEQ ID NO: 321888 - DNA, 1940 bp, Cannabis indica
ggtgctctactgtgcaggaaagggtaagactattgctgatcagccatgagtgcaggaactggacgaagaatgtacatgttcgggccatatcagaccaagcgggttagggtctaccagtgttgtgttttttaaactctgttttgctgcttaggccggccgaaaggaaaggacttgtaataatattttataaatgtttttgggatcccaacatctgtaactttcagtttataaagtttaaagtattacaagtttattttcattcttattgttattaaagtttaaattccacgccatttttattaggaatcccgtttaggggattagggcttattaagtgacttaggtagcgtgcctaattatttagggcattataataagccttgaggaggagaactatgtgtagaattctcgagaaaactcattccaggaattgaatcttcttggggcttgcttaaagtaccattgttgagctgcttccgataaacttgccgagaatatgcaacaacgcacatcaccagtatttttagaaattaagttgcatcttgaaatatttgatgtgtgctagtaagaattctcgcccggtatacatcttccatactagcttcttaaacttaggcaagggcaaggcatttatgtatgctgagaatggtgatccccttgacctatcaagttctagatctgaaggttttggacctgctaggcccttgatcatatcccttatttggtccaaccgtgcttgcatagaaggatttgttgctatagggacttggttgactggtcctccttggacaagctgtagacctgaatgtgccaaggtctggctggccatactctaggagagtgtatggtggaggccagccatccctaagcttgattgctagccttggccggccattcccaggtagggagattggtcctggtcggccaagcctttgttgggtagttgttcatggccgggcaaccctatgctggctagggcctggccgcccgtgatcccccagttggttagtacagtcagtgtcttgatagggggtagatcgcactagttgttggagttaagtggatttagatgtcaactcactttgaaattaattatcttgagtgctcccacccgctcccaagcctagccagttgaagattggactccagcttgctcgctctcagatgcctcaggaagggagttcacctccctagctggccataggtgcactgccaaggggcaccaaggggctggtcaaccaacggttggccaatgggggagttgttgagcctaagatccctggcccgccccccagactgccggttgctgggatctggctgttctttccatcaagccttcgtggcacggcttgtcctcctttgggtaggggaaggtctgccttggttcttaaagaacctaattggaaagtatatcagtagaccctccccaatctattgactaatctcccttggagtggatctctaatgagatcctggccttttctagtagttctttgattggaccgcctcattaggtcactaacttctctactgcaacggtctagctctataacgccctaatctatagagacgccacgtgtgtgattttataaactagtttaatactaatagattaattaattattaaaaatcgtgataatattaaaaacttgaccgaaataaaacactaaaaatggacattataatgacataaaaagcgtgttccggagatccctattataaaaagttttacaaaagaactatatacgacaatgcctcaaaaacataaaaccaaaatacacaatagatacagcccaaaacaacttctggcaacccggcacgcaggtcgacgaggtcaatatgtacattgctggagaagactgtcacctcatggttgatctagcttttctttgcctttacttgcaccacatagcacccgtgagtcacaaggactcagaaag

SEQ ID NO: 321889 - DNA, 1535 bp, Cannabis indica
cctataattataattagttgattctgggacatgttatctcccatctaaccctataaggctataagatttagggatcagagaagggacatgttacctttcacaagaaaaaaataaaataaaagggacgtgctattttagtaacttcattatctatctccgtttatgtacggataatattaatttcattgtataatgccgtgtacatagtttcatgttttacttatgcgaaatttcatttacatatacaaacatttatatgtataaaaatctcattttatgtttgaaccgaagcgattcccctccatataaataaatatgtcaaaaacattgtagatattttgcaaaactgatgcttatgataaatgccgttttgatatagattcctaatgaacatatataacaaataattatataccatttactaaatatttttagtattaattattgtgatgtacgattaaagtagtgtgtttcttacgtaagatgtttttgaaagatcaaatattttagaaattgacttctatgataatgacttaaactagtctgcactatatgcctaaaatgactaccaaactaagtacatggattggaaaaactatttgtgtatgtgatcaagttggaaactttacttcgacaaaaataaaaggtaaataaattcaaatatatcttataaattataaaaagaagcatattgcaagttgaatgaatggagcgacattattttctttttataatttataacccaatgaagttttaatgaaaatattaccatcagtaaaattttcactcactataactcccaatggactaaaatcaaaacaaaatgacagaatatctttttatatattatttataagccctattactcacaaagcaaaatataaacaaatgaactagtgtatagagaaggagaattaaaagttggaccactttttgaaatgtgctccatcaaacaaagagacggacaagaagttgagaagcccaaaaaataccaccacatcacagtattttggcacaagaagaaagtgaataccctttaaattttaatgatgatgacacgagatcaccatattatcatataatattatatcccatgtggtcacaacaacaacacaacacaacccaattgatggaccaaatgggctaaaggttaagtccttggttcttttacctctaattttagcttgactaaaactgaaaccaaagacaaaaaagaaaaagtgaacagaagcaccggaatcgaatttttaaacttcttcagatacattttttgtctggaagctgtacaaggagatttaatatgtttaaaaatagtcaagtccgtgactcgaaaaagctccgaacttagacttggaccaactacttttgtttgtgcgagtaacatatttcaatgccagctcatcatttacggagcaaaattttaacgagacacctacaaaaattttagaaaattggttaatttttacaaaaacattgttactcaatttttttttcaaaaatactgtatttttgtaaaacaacagtggaacacaaaa

SEQ ID NO: 321890 - DNA, 1919 bp, Cannabis indica
agagataaagatgattgtgaagaatgagacttgggagcttgtagagtgtccacaatgcaaagatactgtaagagtcaagtgggtctacaagacaaaactcaacgtagatggcaagcaaggttagttgcgaaaggatactcacaactatactgagtcgactacaacgaaacatttgctccaattacatgtcttgacactattagggcattaatagctctagagatggaagatttttcaactcgatgtgaagtcagcattcctaaatggttatcttgaagaaaaactttatgtggagcaacctcaatggttcgtggtacaaggacttaaccgacgccgtagggaccctacggaggcggttcttttataataactgacgtcgtagggtccctacagcgtcagttatttttaacccttttagcgtcacccagaacagcgtcagtagcgaattttgccaaaaccgacgctgaaaggccttaaaaaccgcctctaaagcccagttttgtagtagtgcatttgcaatcgagtactggaagtctagtcgattcagaccgtttatgtttgtgtggtccggtcatcgtttcaccactctcactaatgatttaaaccggaccagaccgtggatgtactttattttttacaattttttttcatatatatgctcattaatgatgataattaatataaatggtatatatagtagtcaatgcttacttgtttataattcattgatttgaaaagtaaaaattctcctattcattcacgattgtacaaatttgactaaccatgaggtttctatcaatatatatatataggggaattataaggtaggactgcttgttttaccttatgctatagggaagtaaattgaacctatcaaatattatagaaaatagagtatacagaattttttgtgaaacaaatgtaggagattttttcattaattgatattttactttatttaattgatgtttaattccactgttcatctctattggggaaatagatgaaatcatctcctccttggaaccctcaaacccatataagagaacacatgtatagtgaatgctttgattggaataaacaaatgaatttaactagttaaactgatttttgctagctctttatttgccactttgcctcaattactcaagacataagagccatatccaagggcggaggtagctatatgtgacaggggccctggcccccttgtatttctaaaaactccaatgttattaattactttagtaattggtaataatatatataaagttctataacataatacctcttattaacttaacacatgcaatgggatggtttccttggtgatagcgtctaacttaatatatcctttctcaatatatatgtataaaatctcgtgaatattatgataattttcaaaataaaatatataatccttttttaattttaaattactacacacatttataatatgacatatcaatttaaaacataattagtgtatttttaaaggtaaatattgaggcgggaattaaagagacttttagttgggttaaaagccaaaattgacactgtgttgagatcgaaacggacaatgtgattttggtccaagccatttgtagtaatcatgcaatgtgttaaacttttggccttctcattcaggattgtcaatctttattatctacgatgtctaatgttcaattatattttataagacgatcagtatattgagtagcacactatcttgctaagcactctcaatagtagcatttttgatatttcaatttcgattgatcttcaacatcttttgtattcagaatgctaatttatttcattaaagttgatattattagaatattttatttatggaaattattttctaattaaggaaatgattttctatttaaggaaataaataaataattgattttctg

SEQ ID NO: 321891 - DNA, 1045 bp, Cannabis indica
tatatatggctcaatacttttacatttaatccatgtgggactatgttctctaataaagtgtgtatatcattattagtatataaacgagtaatgataaatacctacaattttaatttgtacattcaaagccctgcgaacaaaactcgtaaggagataaccaacaaacggcaaatcacgccgtttatttgtacattcaaagtcatgcaatcgaacaaatctcacaaggagatgaccaacaaacagcaaattacgccgtttatgaaaaaaagcaaaagtacgagaattagaacccaaaaataaaaggataaatcccacaaaaacaacacaaagccaacattaacaaagactaacaactaaggtacgtactaactaaaaactactgttgaaaaactacataaacatgaccaagctactatcgaacttaaatcgctgaaattattcaaaatttaagtacattagatctagcttaaaatacattaaaaattaatctaattaaattcacatgcagtacatttacaacacctctatctttatttttactttttgacaaaaaaaaatatattttggactctttgttttgtaaaaataattaattggactctctattttataaaattataaattaaaccttatattttttaaaatagtactaaataataattcaaactgattttttatcaaaataaaactaaaaataatcaaatataaaagtgttataacaaaattggttacattttctatatctattcgtgttagaaattatttcagatttgttttattaaaaaaaattaaaaacttgaatttataatctaatttgtattatttaaaaaaaaaaatacagagtctaatcaataattttttacaaaatataaagttcaaaataacataaacacaatataaaatagaataaaaaaattattacattatttattagaatatgccaataaaagaaaaagaagggcaaatcaacaatattttttaaaaaaacaataagtaaataaataacattgtgttataaatagtattaattatgtggatgtccaaa

SEQ ID NO: 321892 - DNA, 830 bp, Cannabis indica
tataatattatactttttttagttaaaattgaaaaaaagtcttattttttagattttgtttatatgctctcttatttatttatcttattttatatacttttttactcttttgactttctttggtaggtaaatggacatagaccatatcttgtgagtggaagatagcctttaattggatttagtcaagtaaaaatatcattggcacaaagtgagagaaaaaaaaaattaggtcaattagatagtagatacatgttaatttgatctttgacatctctacatggttttgtatatttaagaaaatcgcagtcttcatttctcacaattcttttttcttctatggatcaactaattaacagatgggctttatgaatgcgttcaacagtatatacgtaatttaaatattatttttcacgatgaaagaaaaattataagagtgaaatttttaaatttttatttttgaaaaataaaatgtgttttgtaattacttttatttgtgaatttttttaaaaaaataaaaatatgttatgtaatattttatttttatttttatttaagttgggttcgaatttagagtcggggtcgaggttcgaatctggggccaaggttaaggtccaatttgggtcaggatccaaggccaggactagaatcggtgtttaaggtcggggttcgagtccaattccgaggccggcttgagatcgaggtacaaaatattgatgaaagaaaatacaaattgataataattaaaataaatcatattaaaaaaaaaaattgaaaacatgttttctgaaaatatttttattttactaattacaaaaataaaaaatatatat

SEQ ID NO: 321893 - DNA, 610 bp, Cannabis indica
ttaacccaaatttcagtatttttgtaaatttccctatagaaaaacactaagttcttgctagtgttttgggctccaacaatgctataaggcccatcttttaggtgcaaagatgggccaaaacttgtattgaggcccggcccataaaccttagcctactaaaatagtatctttatggtcaaaatgttaaccaatatcattttatgaatttgatacaatgactatactacatgttgtgttatatttgatacatttcagtacaagagtttcaaatgaactaggagcgggaaatccacaaggagctcgtattgcaaccttcgccgcgatatttctagccatagcagagatgagcatagtaaccacaacacttttcatgagcagaagcgtttttggttacactttcagtaatgagaaggaagttgtgagttatgtcacagacatggcgcctctaatttgtttatctatcgtactagacagcatacaaggaatcatgtcaggttattaataataaaaatatataaattgctctttcaacattttaatatttagtatcagatatcactgtaaaaaatctcgcttttagtcacaacaaaacttgtgattaaaaataaaa

SEQ ID NO: 321894 - DNA, 647 bp, Cannabis indica
ttctacaatactcgatagtcctttttacttcagccttaagtagccatatttaactatagttgattttcttataatgtctcgacatcagtatcattgatcaatctatttaatttatatgtgtatagatacatatatgtgcgtaaatttgtaatctgaatgctagtttgtatcgcttctaatttttattgtctaaattaatattttgttttttttttcaaatatatttgacgaatgtggcaagcttatactctcacttttggatttttagattgtcaactctctttacaatcacaagaagttattgttcttttcttggaaatgtaagtaagttttattttattaaattttcatcattatttatttgtacccttttaaacccaattcaaagctttgaatctgattttgtcatgctccatgtgactatgtattaatttattaggacaattaatagataataatttaattagttgattagttataataacattttttttttatatctcagtctcaagcttcaaataccattagattggagcaagtaatattttaaaataatactaggacacatatttatttttggaaaattctataatgcacccctttaaaactggatatattgatgcaccttatttgttttagcatctgaa

SEQ ID NO: 321895 - DNA, 1931 bp, Cannabis indica
gccaaaatttgagttttgggggttaattacaagtaaaatgaaactattaggggttttgtcgcaattaacccataaaatatttattattaatttaaattagttttgacataaataaactaaaaagactattttgtaattttttaagaacaaattatataatttataatattgaaactataaatattataataaataattaaattaaacacaaattattattaagtgaataataaagttccttttatttttccttcttacatttgtgcatgctatatacatcaagagtcccaaaattttataacgtcccatctccataatttcaggattgacctgatatcattagttacttttacctgcagtatggttttgttcttatgaaaaatatatgaatttatgagaaggacacaaatgaattttatgtaaatgtggctaaatgattcaaaaagaacaaaaagactcaaaaaaatataatgttaacttgaagtttagattccctaaacttaagatttgtccttacaacaggaaaaaatgttggttgttgtctagaaagcaaaagacataatttttaggaataacataagaaattttcccacaagcattggggccgtgacataagaaatgcttgttgcaagtgtaattaaatgggattatacaagctagagattttacactaatttttaagaggagttttttttttttgagaaagtttcaaatttttattaatcaaccaaatcggcaattaacaaagagtgaagttccataggaatagaaccttcaacaaaatggcaacctgaccaataacaagagtttcttgcaacacagtgcgcaactctgttagcagaacgtttaacataacaaatctcaacattgtgcaaattagataaagtctcatgacattcagaaactagtaaaccaaataaagaaggcatcctaattgaagagtgcaaggcttgcatagcaacaaggcaatccgtttcaattataacaccttgaatcacttgatcctcttgcgtctttatccaacttaacgcctcctttatgccaattatttctgcaatctcaggttgactacagccgaggttgtacacagagaaagcctcaatcaaagaaccagcagtgtccctgatcaccacacccgaaccatatgcatttgcagcgtggaagacagccccatcaacgttaatctttagcatattagcagcaggttttgaccaacgctcaccactgtcataagttccagatggaaccagcagtggctcaaaattccttgagttagcgtttttccattgtgctaaagttaaccttgctgtgaacataacatcagctgcattacaagctttctggtgccagattagtccatttcgagcttggcatattgaccaacaaagcatcacggcttcctccaacaattctggtgcattcttgtcgacaacacccttaaaccagagaaagaaattgcagtgggcaggggcagtggccaaaccagaacggttccaacaagacttgctgaactgacaatgcaacaacacatgagttattgattcttcctcaatatggcaaaacggacatgtcaactggacaggtacatgcttggagtagagttcggtgagggtaggtagacagttgcttaaagccttccatatcaaatggagtactttaggtggggctttaatcttccacaaagtcttccacaccttatcttccatatctgaattccaagcccctttgagttcttggatatattgatatgcactttttactgtataaaagccagcagtgtctttattccaataccaagtatcttttgggttttatgccctaaataaaactccatttcaatgtaatccattttattcaatatcaataaagaaacagaagtatttttcattcatttgtatgttttggttgatcttatcaattgtttgtctatt

SEQ ID NO: 321896 - DNA, 1811 bp, Cannabis indica
tttgccccaaaaaattaatttttgtagttaagtgttaaaaattttaaaattcaagtggtttagctgccaatattctaaaattgtaatatcattatgctactctaaaaatatcaaaaaaaaaatgtttgtatttaagaatttaaatgagtatctttatagaaaaaaaaatatattaaagagtaattacagttacatattctatttcattaaaaacaaatgaattagatatttgttgaaagaaaaggaaaaaagaaaaaaaaaaaaaaaaaccattaaaaaaaaacataatactccaaacggtggcgttttgactgtaaaagcaattttcacaaaaaatgaagggcaatttgggaaaaatgaagaagatgatcgtttcattcgtttgacacatgacaacaactgtcgcatatttgagactgagtcagtagtcacctcagctcagctggacacgaaccaaagcaatctatcgccgtggtcggaaccggagaaaaaaccagtaaccgccacatggcggcggccactcgacctcttccgacgtcgcgcactacacccgcgtgttcccatgcgctcaaatctctgaaaccttcttcaccaccagcttcctctttctctcttcctcttccttcgaaatcgtcactctccaatggcttcttctccaaccagaagaggctcgtagtacaggtccggagcgagatcaagagctttgaaaactctcagaattggacaattgaaaccgattcttttcgattcgttcccaactcttcgtctcattcctcctcatcactttccatggcggcttccacctccgctgccaagacctctaagaaggtctgtcttttctattgtgctgagaccaaagcactcgccgaaagagttgcttccgagtctgactccattgagcttcgttccattacatggaggtagcaattcgattatctttgctaattttacaagaaattgtgtctcattatatcgcattttgtgatttttactttttgattctacaatttggtgccgatacttgccttcaattgtaaggtttttatttttattttttgtctatgttttggtgttgaaggttgatcatgatctaattatgctcaattacatggatttttttcttatatgggtccgatagggtcgttatgaatgtgattgaactggtctatctaagataataacatgtttttaatggcttctttaaatttttagcaatggagtaagactcaaatttgacattctttttgaatttgtaaatgttaggaaatttgatgatgggttccccaatattttcatccccaatgcacatggcattcgtggacaacatgtggcgttcttggcatcatttagttccccaggagttatctttgagcaactctctgtaatttatgctttgcccaaattgttcatctcctcattcacattggtccttccatttttccccacgggaacttctgagcgtatggaggatgaaggagatgttgcaacagccttcactctcgctaggaccttatctaatataccaatttcaagaggagggcctactagtatagtgacatttgatatccatgctttgcaggtttgtgccaaatatttgtaagcttttaaggtgcaagctttcttcttcttgctactctaggaaaagtaaggctttatgggaaaattgtctcaccactttgctttcctgcattcttgatcctaggagaggttctactttggggacaatattttaccatgtttcgagagtgggatacctttgctcaaaaataggcttcaagagctccctgattcgcataatgtaagtattgttt

SEQ ID NO: 321897 - DNA, 860 bp, Cannabis indica
aaaaaaaaaaaagaaaaatggtaactcaatccaatccaattcaacaaaacacagctcaaataaaatttatcaacttaaataatattcaattcctgaaacagttaactaaattcataatcttcataacttaagcagggtcacacattcaaatacatagacaggaataacaacaaactttaacaaaaatttactcatttcaagtgaagtagattcaaatttagtataaaaacaagttaaacataattcccgagccctattaagcttcgagagagaagaaccgcggaaagtgtagaatataattaaacaagaaaaacgaaaacaacaaaacctaaaagatgcatacctggtaaggaggatgagcggtgaatcaagaaagaaagtggcgcagaattagggcttgcggaagcaactttggggtggcgctcgctcgctcaaaaatgggcggaacaaggtcagtgttttcctcaattaaattttacaggagagatgtaaatgacaatcaagcacttccttttttttctttttcgaaatcaaattgaaatttgcaatctttccttctattttttatttataacatttttgttttctaatttttaatcacaaaatgaaaatttttggaaaacaaaaatgcattttgtaaccacttttattttttaattttaaaaacagaaaataaaagcatgttctgtaaaattcattttttgattaatttacgtcgggtctaagtccggggttggatttagattcaagttgggtttagcgccaggatcgtgaggggatttgggtccggatcatgatcgaagtccaagatattgattaaaaaaaaaactgtttaaaaaaatgttgaaagtgattttttt

SEQ ID NO: 321898 - DNA, 1661 bp, Cannabis indica
ttggagatgctctaactatttctaatacgtagtgatatgatacttgcttcatgcaccatgtgtacgtgaaatagaacaagatgaggtgaagtgagatacatttttataaatgtttatacttatatacatatatatatatatttatatatatatgcagatctagcttatacttatatacttgtattgtttatatatatataaattctgtgtacgagtacagttttctggattagaagatgatggaacgtgaagtagtgaaagttcgagcggacatggttgcccaacgcttaaaatgcaatctttgtcaaaacttccttgatgacgccactactatagttgaatgcctccattcctgtgagttatataaatatatatatatatatatttttgtggtattattaaaaatgttttttaagctttcttgtcaaacataattattacaatataaataaataataatatatagtaattgaattattttgatttgatataggaagcttaataattagtctataaacagacaaactaaatccaaaagcaagtaatagattggccaaaaattaaaatatataagataatgacattaatttaagtaacttaaataaagaacaaaaatataaataaataaatagttaagtgaagttgaagttacataacctaaaaagtttaatattgaataaataaatagtataaatggattaataattgattggaaaatcataaattatccacacaaaaaaaaaaatgtatagtggaaagaagagtggtagccaagacatcaatggactaagaaagaacaattataggcccaccaattagtgtgggcccctttgattgggcccaccaaataatgtgggctttttcggttgggccatgatggactaatcaataatcattatggtgggttttcttcctagacacactattttggagaaataaaggagaaattaacatgaatagaaatagaaaaaggagtaaaatgaaattcatgatgagtcaatgcaagtattttttttcttttaagaaaatatttaaaataagattttcctctaaccattgtagatttttattttaaattctttcctttaactataacaattattttaacactatttggtaggagggagaagtagagagatgtagaggagaggagaggagaggagggagagaggtggtaggagggagaagtagagggatgtagaggagaggagaggagaggagggagagaggtgagaggagatgataaatctcattgtttggcaagaaagattgaaagagaggaaggagatatgagaggattgaaaatccattcaaaccttcaatttaaaatccctctattaataggaggattagaactctctctctttaaatattataaattacaaaaaatacttttattaaatattattaaaaaataattataagaacgtaatagtaattttataaattaataattatctatcccttctattacttcatctttcctaccaaagaacataaaataagtattattctccttcccctccctcccttttactctccatccttcattaactctctatccatcttactctcattttttcctgccatagtctaatggtaattgacagtgaactcttcttatgttttaattgggaaatttgattttctatacttagaaa

SEQ ID NO: 321899 - DNA, 877 bp, Cannabis indica
aaaaaactagacataaatttagtatacgtgcctcacacgtagctttttactagtatatatatatatatatatatatgtcattggctactctgttataaaatggtatatcatattaaattcatcacaacataattaatagtactgtcacatacagttgatcatactatatagtccttaaaaaatgtttttacattttgacaaaagctactaaatgtccgattaattttcaaatgcttttttgatttcccaacaggtcaaattgttagactttaacgatgatccattcccaaatcaataaagttcaaaccataagtatttatataaatataaatatatatatttgcttttgacaattattgtacttttaactattttgaagtgcttcttatcataaatgtttcattttttaataggtatgtcaaaaagatccatttagttagagcgggttggagttccgacccgacgaattacttctgatccgaaacatttggatacttattcgatcttggatcagatccgctccaccccgcctaatttttttctagaccggatctgatctgaaacgatttttaatttatttaaaaaaaacttaattcaagactcggatcccttaggaccttgattcggacccggacctagacccagacctggaccaagactagagacccggacccaaactcggacccagacccagatctgggactcaggacccagacccgaaccctaaccctgacccaaacctgggatacggactcggacccgaacccgggacgtggacctggacccgaaacctgagaccgggaccaggacctggacccggaccaggacccggatccgggtcccggacccgggaccaggaccaggaccgagacccaga

SEQ ID NO: 321900 - DNA, 926 bp, Cannabis indica
ctccacattagctactgcagggaagcatatgtccataactgatggggaattatattgccaaataccaacaacttgcaaaagtataatttgaggcctacactacttatgccatacaagaccaaagatttcatatgttatcaacaagcttaagtcagttacttgaaaaggtccaacaacaactaaattgaagtggtgcaaagagggtaccaagatatctcaagggaactatgaacgagggtttacacataagttgtgatgagtcattaaatcttagaggatattcatgtgtggattgggcatgttttttgatgatagaaagtttgtggcagattattatttgtactttggtaatacattggtgtcttgatcttcaaataagtaagttgtggttgctaggtcaagtactgagtcaaagtaccgagctttatcacatgtagcaactgaaatttcttggatcgaatcacttctaaaagagattaacttttcaacacttgcaacaatcacatgtttggacaatatgggagtagtgccttagcttcaaatctatttttccatgcactaacaaaacatattgaagttgatgttcatttcatttgtgataagtgatgcacaaacaacttgacattagatacattccttcttcagatcaagtagcagattgcttaacaaaaaaatcctctacttcaagattcaatttcttgattgacaaatttggagcggttcacccctgcgtttgagagaggatgtgaagaaatgaatccaaatcaaccgatagaaattctattatttcagtggtccaagcactgaacaagtgtcatctcctcacagttgtgtcaataatgctaaaaattcgagatagattgagtcgttataatgaaatgataattttatcattgtgtattgaaatatttctttttctttttttt

SEQ ID NO: 321901 - DNA, 263 bp, Cannabis indica
aaaataatttccaacatgcatgtgcagccctggatgcgcgcgcatgaagggtgacgacgaggaaactcgtcatctgcagcatccttgaccaggaaatctcggtcagctgcagggtgacacacgccttcagacaggcatcgcctccattgttcgcgcgcgtcaggcttccttccctgaagcctggtgcgtgcgattgagcaccatgcaacccgaaacttccaaaattcataacttttgcaatttttatgggaatcgagttccgt

SEQ ID NO: 321902 - DNA, 738 bp, Cannabis indica
tataaaaatttcccattttttttttataagaacccaacttttcaaggggctactatttattattattttttttatcaattttttgaaattgtattagaatcaataataatttgataaactagttcgagttttttttaatgttttataaaatatataaccatataataaatacttaaaaatattaatcataaattgtacttttcttttttgttaagaactcaatttttaaaattaaaacaagtctctaaaatatttaggagaactatattgttgagagttttcacagttaagataagagttaaaataaaggggttagttatagaagaaccaaagtttggttggttagttggggacgagtcgagggggcgattaataaaaatatataggaaatgcaattgattaaggcacgagggtcgaggtgtaaacaactaactactgtgcaattaataattatactaacttaatcaatgtaattaataaagagagagagagattgaataagttatttttggtcaaaggagggaagaatcgcacgtgaggcctcttcttattacatacatagatagatcggtcaattccacgccctcgaatctgtcatttcatcgggatggaaaaaaaaaaaaactttcatcctttaatataaggctaattaagattttaccctctaaattttagcatgtactaaattatgtcatctgaatttttaaaattgttaaaaatactccctgaactattgag

SEQ ID NO: 321903 - DNA, 1633 bp, Cannabis indica
tacaacatcgaacaagcacaactaaacttaagaaaaatttaaggctttgttaagcaaaaaattgaaagctaagtgtaaatggcatacattagattagacataagttgctaggatagctgcatgcttagcaaaagaagttaaagttaggattaaagatgacaaggctagtcgcctattccaaagtaaaatgctctaaggccatacatgaacattgctcaaaaataaagggccctgaggccatacaagaacaaaaatattatatgttcaaaagtaaagagcctaaagaccatacaagaacaaaagatgaagtatgcgaaataaaagcataaaaacaaacaacaaaatccttagatttcttcaaaataatagctggagtcgacgggttcaaagttgtgtcaaaaggaccagctgtctagactaagtaagtcttcatcaattcagttatcacctccttaaaagtcgtgcaggttcatccctgcaaaaggataagggaaaatgaacaactagagaacatgaaaagacttagacaaaagataggttaactggccaaaacctaagggtattaactagacaaccttaaaatataaagcgtaatcgaaaaagtataaaatcaagaatcacgaaccgaatagcctatgaaaggctattgataagtccgggaagattcagcctgagacatactggacagagctcctaagagggggctaagtaccgaacgagggcatacaatggatctaagccatcgacagagttcctatacatgatctaagtcatggacagagttcctatacaggatctaagtcatggacagagttactatacatgatttaagtattgaatagagttctaaacaagatctaagagtcggacaaggtctctagcaagatgcaagtccaagactcgatcttgttcatcaaaaagtcaaacattatgcattccaaagctatcaagcaaattataatgtgaaaagagtactttaaaacatgggacttaaaaagctttaaaaagcttgaaactcatcaatggcaaattcaaaaaaaaaaaaaaaaacaaagaagacaacacaaaaagagaagaagagagcaatacatggagagagaagatccaaaggtttaaaaaatcgcatcattcaaaaagtccgatacttggccagataaggctgataagtatggactcctacagttaaggtgaaagctgaaaagtccctatctgtacagacgttcgaacatgaacttgggggcaaatgttattctaaattttgtccacttgacatggaatgtccacatagtcaaaactgaagacacatggaatacaatatttcaatagcaggacaaagtcaccttacacggtatataacctgtcaagagttctaaagcgatcaagcaaaactgccaagaaagaatgagtaaaaggagttaagcatgccatcaagaccttggccaacaatgtctagtcggccaaagaaagcatgttgggctggccaagagaagcttgtaggccggccaggtcttgagaataagctggtcgaccaaaaatgtctgtcagaccaaagaggcttgttcaacaacggaggcctggcccttgcaagaaaagctgaacaacaaagttgtaatgaccgctctagtaatgtgga

SEQ ID NO: 321904 - DNA, 555 bp, Cannabis indica
aagcgtttatatattacaatatgcataatttggaactcgaactcaggaccttcaacacacacccctatggccacttgagctaacctcaagtggtttaggggtcatagatataaatatatataaaactttatttatttctattttaatttttttacatgtaattttgaaaattttaaaaaagttgggggccatggaaataaaacagggacttaattattagtagttagtaccccaccaatgttttttttttatggtaaggagtaccccacaatgtttagcctagagtgttttttttttagcataaacttcaaatatttaattgaaaatatttatatataatatatactatatatttaaagaactcaaaaattttaaggatgaataatttaatgccttataaaactcaatatcttatcatcaaataattcaaacacaccatataaaataggagaattaccacatatattattttatttatttattttttttttacaaatttacagtttgagtttctaaagtggttgcagcgctagttgcaataggggtttctatacg

SEQ ID NO: 321905 - DNA, 1393 bp, Cannabis indica
tgtttgagttctttcttcttccccgctcgacacgtatcctcttctgatgtgcttaccgaatttaaggtataacatcattccataggatcaaaagcaaatggccttttttttgtccatttaccacacagattcagggcggaccagcgtgggcgagggaaatctccctctcctgctactcacagactggctatccttaatagtaggctcatcttcggtgatggtttctaaaacctccacaagctgaggcgttactacgaggattctggattgatctcttccccaaaaaaaactttttgcaacttgaacagattctcctacgatggacatggttatgtctgcgagggggtcttggttaaaatctatggaagaaaaggagggatttattacacacaatctcgttgtactatctcagtgtggtgctggccctaaactaagctaaaatctttcttaccctaaaaagaaaatgccaaggagaagtagacgattcgaaaaagttccctcgaaaactctgtagccagtcaatgcaacagtcgcaggtagcctgaaacttaaatgttcactccaacgaagaattttactagttcattaaaaggggagaagcgtttggaaaatgctccgtgcagatgacgagtagacacggaatcagaccctatatttctttttgcatgcaaaagagaataagaagagggaaaaagaaaagaagttgaagttacagagaaaaagtgaagctttcaataaaaaggataaaaaatagtaatacccctacagatagtatttatttcaaaaagagaaagggctctgcaagatcaacgacttggagaggttacaaagaatctgatgtctaggggaacgacgggtcccatatgatgatcctaggatccacaaaaatatcaaggtcattttcctcatgtcaatcagtagtcagaggcactccttctttcttggtaagcacacttttccatatataaagaggtgcagtgaacacctacaagcataccgcatggtttccatgcaaaaggaagtaaattcaaagaatatccttcaaaggatacaactcatttgggaaggtgtccgtgatcgcgaaattgaagcacgtgttcgcgatcaacatttaagacaatagtaaacttccgggacccaagggatctcgaaagcttgggggtaaatgttatctaaattttcctctaccagacacgtggcacgatcagggtagggacacgatttccgtatagggcacccgagagaatcaagagaaatgactcctagacccaggattcattttgaggtaacaacttacgggaacattctcctttagcgatacatgtttcaaaaaccagggacacactgttggaattattttaccaggatcttagatatgttgggttttatgccc

SEQ ID NO: 321906 - DNA, 1556 bp, Cannabis indica
tcatattagattgaaatgggttttatttagggcataaaattccaacatgagcgcctgcaagatcgggttcttcatcccctactcttgggttctgcccatttttatgctgagtcctccttgaacgtgtggaccgtgtacttgggctaccttcaggttgggtcctgctggaacgagtggtccacgtagatcgcgagttggcacgccttcgagaggccattggttcttttttggcacaacgatgggtggtctcttcaggatgagtatcaacattttctccgttattagccatgaagttttctgagcttttttcacgaaggctctcaatgaaagcaccaaactgttaatgcagatttttgttaactaatttaaagcatatttcgtgatagatttgcacagaaataatagtagtaaaaggaaaagaaataacacaaagctttttaacgtggttttgcagttaaaattctgcatagtctacgagtctatcttattagatttctaatacaaaactagggctctttctccaaatgattttctgtccctttttcagtgtatcgtgcccctatttatagttacataggagggcacttaattataatcagattgatatcccacaacaataatcccttgaaattgtgggatttaattacgtcccacgtaaaataaatgcgtttattacttgaaaatcacacagctgtgatttatctgctattaccaggtcaatgttgacttggattcaaacacgctacaaagtgtatctcgtagagttacctcattgggatagcaacaataaccctgacaacgagatgaagcttttcccatgtctttctgaggctgataataaaaataccgtcgtttccgctactgaagacataatgctccatctgacaatcccagttcttggtgacaaggagaacctcagcagtcattatcatttaaatgtcagcttctatttgagagagctgactcaacggagtagtggatctcattgaaaatgtctaaagctgattagttaaggtaccatgagtatgtcatcctatagcgagatggattcctcgctattccttgttcagattcatcgaactattatacttagtttgtataatgtatattatacgctaagtgttttaacagtcatcatgtcttgtctatgtctcttcatgcgtagcgaggttgatgcctcgctttgcattactgattccgtccttatgatcgtgtcttcatatacgaaatggtttctcatcaatatgtgaattaatagtttgtatatctgtgtctcgctcaagactttacaatcaacgagttataagtatactatatcaactttgcatttaatgagttattccattttaatattctttaatataattacttttatatttgttgatttgtattctcccaggttgatacgtgtcctcttctgaagtgtcagccgaatttcagttataacaattctatttttagaattagaagtatattacttaaatatcatagtatatttatattagttttgttaaaattttttttatttaaagttatattaatttttttattattat

SEQ ID NO: 321907 - DNA, 1373 bp, Cannabis indica
ctctttctatatatttttatttagtgattgtagtaatagtagtatttatcttgttctatcttttatgttcattcttatttactttttattaaacatataggtttagtcatgctcttcctatgtgcttaaaaattaagaaaagtaatattaatgttcatttccttcactatcaccaccatctctatttctattttctttgtcattatttttactaaaaatatataggattagtcatgctctttctatgtgtttctatttagtaaaaataatatttatgttttagttttatgtttaatcttttattgcattattgcttgatgtataatgtcatttctaggttctacataagattaaatcatttcttttatttgcaagaacttgtatactcaaaaatataatgaactttaatgttaaatcatttatcaactttgtgaatcaagggtacaaaatagctaaacaagcatatggatgattcttgaagcctttctttcttttactattgattacacctttatttactttcttttaatatttattatcaaatcaaaaatcacaaaatcatttgttcctattatcactttttattaaccttttgtttttatttttctactaacgtttttgtccataatcacctccctgtggaatcgaccgcccgatctatactacaaccaccgctagtggaagtcacaatttgggcgttaaatcaagaaccaacattttcctttccaccatttgcatcctcaaaaactgtccacactatccttataatcatggtctaaagttttgtttttttcaaaaaaatacaattgcaaagttttaaaattataaaaatccactttgtttagcaaaaattgagaaaacaaggagaaatcaactcaccacaactataataattaacaaaagatataaactataaaacataaaaccaatctcataacaactataaaacaaccaaaaaaataatttattatttttactgaatatgtatttttgtaaataaaaaattcaaagcgtaaaaataaaaaaatttctgtgttgatatacttttgtaattttttttaatttattaaattatgtaaatttttcaaaataaaattaaatatatatgtcactcttatcattattattatttattttaataaaaaaaaagtacagtgatttggagaacatatagagaaaaatgaagttgcgattgtggagaatcattgggtttcagttcgtcggaccaaaaaaaatttacaaacactcttggtttttcactcacagttcttttggggctcttttggaatgtcatatcagatcgtattgtattgtattatattgaattgaattatatatcatatttttatataatactatgttaaactttaatt

SEQ ID NO: 321908 - DNA, 710 bp, Cannabis indica
caggtaaagcttccggggcagggagaaagccgcgctcggccaactggctgcgggtttgcaatatctcaaaccgctcttgatgacggacggggtcggctttggctttaggaaaagtagtgggattctgtttaggtggtggaaatgtggaagtggtgcgcttaggttttggttggcccttggaggttaagggagcggtttttgcggttggagctttgggcttaggtgaggaggccttacggggacgagtatggggtggtgaatgtgtagtggaggaaggcaaggcatgggttggtgggattgtgtggattggttgttgtggtggaggtgtgggcaaggtattggctggagctttacgcttacgagatttagctttgttggttgccatggcgcaatctcacaacaataaactcgaaaatatctgctacacagttcacaagtcaacaacacatcattagccaaaatcaatcacatcaagttcagcaacatatcaactcattttaatgacaatgacaaccattcaacttgaatatcccccactaggctcaaaattagaattcagcacaattagtcctagagcattcaactattcaaccttctaaacactgtgaattcttaaaatgcaaccttctaacacaagaattgtcccacataatcaaaaatgggcagcaatgacaagagtatcttcacaacatttgagaaaaagatttacc

SEQ ID NO: 321909 - DNA, 829 bp, Cannabis indica
aatgttacttattcaaaaaaaaagaaaaaataatgtaataattttttttgatgaaaaatgtaattttcattaataatgttaaatttttagaataatataaataaaaaaatagatgatctagtaccaaccaatgaaatctattgctatggaatagaaacataaatacattattgtttcaatttacattattttaaattatgcatataaattatttttaataaaaaaataagtaaattatattggtttattcaattaaaaagataaattatataaattaaaatcaaatgattaaataaatcttaactatatactaaatacaaatttatattcatagttatatttaaatcatatatgagatatattttgatatatgctttaaataatttaaattaaaaattagaaaataataagtaaaaagaagaagaaaaatgattagttaacaacaataaaattagtaacgaataatagcttgtcttttgacatggttctttagtcttgtcttttgatatggttttttagttttttctgattcgagtcttgtcttttggcatgagttgtgtagctcaaaatcatcatggtgctatggtagaagcattcaagaaggggaagaatggatgtgttcaacccgaaattgctgagataatagacattaaagaagcattgagttggattgcaactcattcgtgggatagagtcatgttggaaaataacttggtgtgtgttcaagcgattcagagcggtattttatgccttcacaatttgtgttttgtaaaacgatctgcaaataagttggcttattgcttggtaagagactcttatttctctacag

SEQ ID NO: 321910 - DNA, 881 bp, Cannabis indica
atattataatttagagaaagaaaaataaagaagagatgagaattttcttaatattttattccaatagacgatctcctatttatacacatataaaagtcaaatattaggaaactaagaaaaaagaatattaattacaattaatggtaataaataaaaaatttggatgtccacataattattaatatttataacatttaagtaaataaatcaaattatctttgtattaacagtcggtatattggatcgacttgctcaccagttttctatcatagttacaacatattttctaaagaaatatttgcaacataaatgttcataatttgagtttgtaactcaaataaacttaataattttttaacggtaaattatattagttttttgtccggtttcattaatacaaattctgttaatgttttaaataagacacatgtaaaattcagaatttaaattattgggtttgaactagaacgtgtaggataaattataagtttaaattttctttttaaaaatttaagaattcagtctgattataaatttaaaatattaacgaaatccaaactaataaaattgggggaaaaaaaacaagtttactaacattaactatttgtgtcactacaaaatataaacaaagctaattacaaatttaaaatatttagagagtgatgaaattgaaaaaaaaaataacaaatttattaatatttggtactttcttcaaaaaaaaaatttgttaagtttatattacatacaaatttaaaatttaaagtagttatgcacaaatattttaaaacataatatttgtcattaatacacatatatatatatactagataaatgttacgtgccaagtcacgtatgttaattttattttaagtttttgtttt

SEQ ID NO: 321911 - DNA, 888 bp, Cannabis indica
ttttattccccactttgctagttggagcaacgagcagctggttcaacaaatttatccatcattcaatcacctcttgggaatagctgtctaaggatttcaagatgcagttctaggcagcaagggacaggcgacctgaggcatcctccgtcactaacataaagtagcagcgaggcgagatgcttacggcttacttaagtctttttagcacagctactccgagggttagaaacctggacgacagtatccagcttacttctcttcaggcacggatcacgactgatcttcccacttctagaggcgagctatgggatgacttgcagggtcgcccaatgaaaaacatcagcgagttcaataaaagagctcaagtgtttgtttgaaaaaagaagcaagaaaagagatgaagttattaaagactggcttggaaagtaaacccaacacagtcttaacaagtaccctctcaaccaaggctgacaatccaggggcctctagttcagagaggaaggataactctaaggagacagccaaggataagcaaaagcaatagaagcacgataaatacgtgctaatatgcaccgtttacaccgagcttaatgaaactcaagaaaacatttatcccgcacatgagcacagagtcgcattccgtaaacttgagcccatgaggcatgcgagacataataaagatgcaaccaaattttttaagtaccataaggacattgggcatatgacagaggaatgtcgtcagttgaaagacgagatagagagtctcatcgcgcgagatcactttcagaagtatgtgaagcaacaaggcgatggaaaaaactagcctaatccacccaataacccaggcaaccagagattacaacctcctcctcttgaaggagaggatat

SEQ ID NO: 321912 - DNA, 984 bp, Cannabis indica
gaacgaggggttaaggttctgttgcagcagagttgacttgtttaattggggttgtcaaaagttcttggtcgaacaaggtggagaactgcattacatatatgacccaccatggacatggtttctgtttgcctagctaactacgtttgaagctcgtatctggtgcgcaggtgataagacccaactcgtatctggttatattttgatgtggtcagatactccatcatgatgaaaattcggatgttagacaggtttgatgttctcaccactgcattgttgattttcgttatagagcttttcatataatttgtttgatgtctttttcaggctgttgtatatgggcttggtgtgtgtgcagagtttggtgcatctgcattcaaacctttggttggaggtataatttattttgttgtctaatgagaagtattgtgtaatcaaatatagaaaatcaaaagctatgttttctttttcttttaggatgccaataacctcaatttctcaaggatggttgtgagatttgtattgtccttgattgattcctggaaacacaggctgcatcgccagaacatgtgcagcatcagctgttggcctacacctagttggggttgatattcctgcttgactttagccttttaaactttgttatattgctttgaaaacctgaaaataagtaaagcatatttccttttaatgattatttgctaacaattttggctgtttgacatgtttcttttttagccattaggattttagatagatgatatgcaaatttaaagcgtgctggtttggattataccttccacccaaaggtaacaactttcctatctttctcttttctaggttttagattacttttgtttgactatgatttgtttcaaacatcaattcccccttagataatatatatatatatatggataatttcttaatgggtaatacccattaatgggtactaaaaaaattaatgaagtggcaatttaatgactt

SEQ ID NO: 321913 - DNA, 796 bp, Cannabis indica
ggaagcctcctcccataaggaaataaatgagtaagaggaacacctctaaattttgccaatttcacaacaattttggccatgataccaacgagtgcaagtacttaaagttggaaatttacttcttgattagaaagaacaatcctcatttatgtcattatgtgctaagatgaccagacacaaacacaaggtacccaaaatggagacctaataacaccgctagtggcaagtcacctatgaatcataattggcaaaccccatatagtaggcgaaataagcaaagctatggagcccaatgcttggaccctccatcatgagcaaaaaagtgacattctagctgtagaagaaagagatcccagatagcttaagcttggaaagtatgccttctccttcatagagggagatgctgcccaggccaggctccctcataatgacccattggtcataattacacagaaagggaacatgacagttgtaggtgcatgattgacaatggagcctcttcaaacatacttttcaagtcaacctataaaaagatggggctctagttgacagaattagcaccctgtacacaattaacgtatgggttctttggccaaggtcttgcacatttaggatacatttgattgtcttttatagttggagaaagtcccattacaaggacactgatggctcaattcatagtaatcgatgtgccctcaccgttcaatgcaatgatagaccaaccatcccttaagacctggaagaagtgatgttaattttgttggaaattattttaccaggatcttatatctactca

SEQ ID NO: 321914 - DNA, 1210 bp, Cannabis indica
cccaagttttaataaaaccaataaaatttaatgtaaggccaaataaaagtctaacaacatattgataaaggctaaaaggcaccaataatatttatgattctccatatgtgttaatatcgatattagtctaactgagtattgaatctcatataatttaatataataacttttagagagtatcagtcactgcaagaaatgtcacttttaccagcacagttcgctactatgctggtaaaagtaacttttaccagcgcatttcataaactgcgctggcaaagaggtcaaagttttaccagcgtacatttgcagtaactaaaatctaacttttacccgcgcatttacgcactgagaaaagtcatttttgccagcgcttttcattttatatgctagcaaaaattttagtaccaacattgatttgccaaccccttttgctaacacatcacaagtgaattctattttaccagcgcaattcaaactaagcactattggtacccaataatattaataatgttcttatatattggagcattaatatagaatatgacatgacctcttacaattagttagcgatataatctttatagcacatctagaaagtgttaagtattattggtttcgagtctcatgcaaaatttatgggtgtggacaatcgtctctcacgacgtccacacccatgaactataatttttttttttttgttggttctaataatcgagacatatagtgcgaaaaagaattacacactagctcgtaagagactaagagtcagtttaaaattagcaccaatgtccaaaagtctcggtttagaaccgaaattaaaaaataaactttttatcattgtagaataggtgtcgatttgtaaaacaaatacactatataagtataagtacatgttaatttaaaattgacaccaaaaatatattttgtagtattgaatggctaattaatttcccaaatattttgaatggtacgtcttttttatgtatattcaacctaaattcgaatatctacattttttaaaaaaaaacttatgaaatacaattcgaatctattagttatttaagtgtgtaatagtcataatttataataactgtgcaatgggtagtaggaaaatggtaaattgcgatataaatacttaatgtttcagattttatacacttaaatacttaatgtttatttttggagacaaaaatacttaatgttacaattc

SEQ ID NO: 321915 - DNA, 1180 bp, Cannabis indica
tttttattattatttaattaaaaaaatatttaaaaatttattatttaaatgatgtagaagaaatataaataagttgatatatgatgtaatataaatgtgtgaggtaaaataaataaagtcgtgattggtgatgcattttaaaagatagaatacaacatctgttgcaagtgctcttagatgtcttgttaaaaaaactctctccacactttctagtcataacgttctaaccaataatgtagtcttatcggctaccaattaagagcattatctaataatgataaaatcttaattatacccattagcttagtaacagtcgagttttcttgttacattatttctggtatgagaaagaagttgagagatggagagaacatgagaggagggagagaggctggagaaaataactttatttggcaagaggcattgaaggagagaaagaggaggtgagagatcaacaagtctacttaaatctctagtatgaggtttagacttgatgagaatgagaatgtaaaaaattaaaggattaattgaggcaaaacccttaatactttcattttgcttgcacttaacccccaaaacttattttttggcggcaaaatccccaaaaccacgattccgttagcaatttacactttccatccaaatttaggtgttaagtgccatgttagattgttcatgtggacacattgtacacgtggcacaattttattgatccacgtaaatatatatttttcaaaaaaataaaaaatcattaaaaaataaaaatatttttctaaataattaatttaaaaaaattaaaacaaaatcataatttttttcctattctttcttttctttttcttttttctttctttttattttcttcgataccttcttcttctctttctctctctctggtatggatgcaggtactaggtgcgacgccattgccgaggaccaccaagccagcgctgttgctgagtaccaccaacccaggtgcagttaccgagaaccaccatgtagaactgatcgttctcaaccaccgcgtagaaccaccgaggaccactacgtagaatcgtcgatctgttagccggttagcctcgattctctctctcagccccgatcgatccagccacgatcaatctcctctctctcccaatatcgatcacctttctctctcccccgatctagtgttttttta

SEQ ID NO: 321916 - DNA, 757 bp, Cannabis indica
ttcatatttaggatgttaattcaacatacttgttagtaaatctagatcctggtaaaatattttcaacaaaaacaacaagtgggcactgtatatttttgaggacacatagcaagatatattacccccaagtgagttgagtatttttgacgtctccaaattcttggtcacctgtttaaaacatagcttgtggtcagagacaaaaatgtgaattcttgtgtaaatttcttctattttcatttcattgtgcctggatgcttacattaagaaagagaaattacatagaattacatataactcagaggaatgtcaagatttggatacccctcacctattggtagtaacgatacaaatggtctgtgttccaggcacgtgggatctctgatccgtccattctatttagctctcaatgaaagcactaaaatatttatccaaatttttcagaaactagatatttaagagcttaagaaataataaaatacagaaataattgagatggagatttttacgtggtttagatattaattaaccctagtccatgagtcattctattagcctcaaagggcgtgtttgatgtttttacaatgtttaagcaagaaaccctaacactattttctatgtttctctttaagagggaagcttagaataatattagcagatctttgactatttaggttatgatccccccttcgatggaaatagaaggttatttataggctaaggggtgggtatggacatgcccatgactcgcctagggttt

SEQ ID NO: 321917 - DNA, 854 bp, Cannabis indica
attctattagcaatttaccctttgcgtccattttaggtgttaagtgccatgttggactggacacagtgtacacgtggcacaattttattggtccacgtaaaaatttcttttaaaaaaaattaaaataaaattaatttaaaattaaaaatatatataaataaaaaaaataatttttcttttttttttctttctttttttttcctttctttctttttctttttctttctttttttttcttttctttctttttattttcctctgaaacttctctcgatctatctctctcgttctatctctctctcagtcctgatctagggttttcaaaacccagcaaccaatgaaagcatggccttggcctctttagggtcaaactctcctccgccagctccgcgaaactcccaaattcgagaaatacccacctccgcctcctacgaaacccctagctccaacgtcagcgtcttccaagaaaaaagaagaaaacaccataagtctttgacgcccagccgcgtgtcgttcaccagcgtcgtccaaaggagaagagaatagaagagaaggttggaagatgaggaggctagcgcttttttgtctgttcaaatagatagagtggagagagagagacagagagagcacatcgatcgagagaagtttcagaggaaaggtgacggattgtttcacagcagaacgagatctgagatctcgcttcttgcccctttgattattgagcttctccattgtctcacctttctctctctctctctctctcttttgcttaatctttgacagatttaattgtttgaattgagatttttttttttgtggatctaatttaggttttttgttgctgggatttgaat

SEQ ID NO: 321918 - DNA, 544 bp, Cannabis indica
aggtatctctgactcaaagtgctttcattcctggtcgtcttatctctgataatgtcatggtcgcctttgaagttatgcactacttaaaaagaaagaccaaaggaaaaaaaggttttatggcagttgaattagacatgagtaaagcctatgatcgagttgaatggggctatcttcatgctatcatgtttaagatgggatttgctgacagatgggtaaatttgatcgtgcaatgtgtgtcttcggttcgttactctgttgtgcacaatggccgaatcataagacctattgttccttcccgagaaatccgtcaaggcgatcctctctccacttacctctttatcatctgtgctgagggattctcctccttgatacatcaagccgaatcaagagtaagtcttcgtggtatccgtgttgctaaccgtgccccgtctatcacccacatgctctttgtcgatgatagctacttgttttgtcaagctaccaatgatgctgccaccaatctcctccatttgctacactcttttgagaatgcttcaggtcagaa

SEQ ID NO: 321919 - DNA, 570 bp, Cannabis indica
atcttcttatttctaatgatagaaaaaaagcccagaatacttttttgagaaactgattggaaaggggccaggttggcaatatgtcaacttgggtgttgggtccaacttcaggccatttggaagttccattggtctctagaaatagttgaatcataatctttgctaaaaacgtagaatattcccagaagacttctcaaaaaaatcctaggaaatggcctaggttgacaaaatgtcaacctgggcgctgggcccttattctagcacccaggttgggctatttcttcactaaaagcacatgtttccttgcttttgatgaagacaaacaagatgaatgagtcgaatgttcaatctgacacttgaaaagtggcccaggttgacagattgtcaaccaaagtgctagggtgcccaagcaccgggtgtctaggtgctctacaatgaaagttctttgaatattattctaatgcctaaaatatgttcgtggtatgtctagttcatgtcccaatgaaaactttcacctattttcactaagacagtcctagaaactgaaaccctagttaaggatgtcaactt

SEQ ID NO: 321920 - DNA, 1216 bp, Cannabis indica
ttcttttctaattttgtttttatttttgtttttgttgtgtagacagatgggggagacaaatggctctcaccctgttctggatggtttcattcaatatgtttgagaatgactcactgtcaaacaataaatggtctattttgtggcatcgaaagggtagatgtgtctttcgatggtgggaagagttgggtcgaggcctctagatgccacaagcctgggatcccttatgtttcagatgatgagaggtgtgataaatgaggttgggtgatgtttgaagccacaactgatgtacaaaccaatacaaagattgttgccaaagcagtatgtcacacattactattactattattattattattcttgaataatcatatgatatgttatcctataatcacaaagaaactgttattcttatatgactacacacaaaccataggaaatattaaacaatttctaagcagtgtacaccattaatatcatcacattcacaacaccaaatagtgagaaaaacagttggtctgtgaactcctgggatgatggtgggattttggccggcattattgcttaaaatactactaataataacacaatacaaactgtaaagaagaagttggcaaatggttaaatcaaaaaacaaagtttttattgttattacagtcttacgcttacacagtcacaaccattttctttttaacaaacatgtgtccacaccacacctcctcactctcaaatgcaatcttaatttatattttgtgttatatgtcactatttatgaactcctaaatatattatactttttaacattttgagatgtcaagatcagtgacacaaggaatccccccaccacccacatcaaatgtgatttgatttgatttgttttttctttttggttttttattaatatttaagaaagaaggttggccaatttattttggattggcaagttgaaactaacttgtgtggaaattgaaaattaattacttaaggttactacacttttgttataatacatgagtaacaagttttatgattattgttatcttttgcatatgttattagtttatatttagtttacaatatacagggaatttaagtttaagaatcgattttattaataattttcgtattgtgtgattagttaatagaatcgattactaattttatataagtttaaaaaatgttattttaattttttttgtattatgtatttactattata

SEQ ID NO: 321921 - DNA, 734 bp, Cannabis indica
aattagttttgagatggaatcctatgcatcttattctaaattctaacacggtttgaggaaccatctttgtaaaccatcgagctgatatagcggctatgtcattcacttgccacagtgtcatactctgcaaggtgccatttcaaggcatcccaactgatacaccacaatctctgtggatcaaatcgtttatgatttttggagttaagataatgtctaagatggttctgtgatgattttagcatttagctttctcaactcaagatgatgatgttcttgtctgtggctgctgctttgttcaggatttcacttgttcttatttgagtgttttcttgctcacatttttgtatgtgtgggagttcttatatatattgttatgtgcatgccttgtaagtaagagactatagagatggatattctgttgtttatggaaattaatcaaatgatatcatatgtttgtttatgaattgattcatgattgagatgtcgtttatagatattacggttttaaggtttattattgcgtcattaaaatgttgtccaatattttttggaagggtagaatgttgtcctttgaaatataattatagttcttttaaatatttatatctattctatataaagtgtgcctatataactgaattcttggtttatgagaaattcatgggtaaccttttttttaaaataattttctgttcaaaaataataatttttttttattaagatgtattttaata

SEQ ID NO: 321922 - DNA, 928 bp, Cannabis indica
tttttgacaaaaaatagtatttagtttttttttgttaaaaattaatatgtacatcggccgctcctcctaataaggattagttccgccactgggtaaaagtggtgcaccattacactatctctaatgaatggtgtaaaacttgtgttaaatttggttaaaatactaacccaattttatgttccaatatattaacgataaaattaacttttataaaaaagaatgtaaaaaagtcaataaaaaaattaaattttcattcaaagtatataaaaaatctattaaatatataaataaaattattaattacattaataagtgacaaaaaagtaaatagtgattaagtgcgagggtctcctttctctccatggggcggaggaataaagagatccagaagcttgattttcaaatcaatgggtcatgtagagctagagattccttcgatccaggcggtgggagaatagggctacataggagaggtacttcccatgacaccccaatctaatttgggtgttgaattgtccttcagtcggatttttgaaaagaaggggactagttcgtgggctgccggagtggaaaaggttgatttgggaaatttaaaacaaatttaaggctaatcaagtaagaactcatttaatgaaagatgttatcattaacactatttgtagaaagggttagtttttcacattttacagatacttaaccactcgcatctctaaaataaagacgctttacaaatttaaagaaccgtactaaaaacacgttacggcagatgctctaaaattgttcttaattttaaagtttttttaaaatatactgttgaagctctacaattatagaatatataattacttttatatattttattaattatttttatatgaggatatttttatatattaatattatatatttgaatgaataaaatataata

SEQ ID NO: 321923 - DNA, 769 bp, Cannabis indica
tcttaggatcgactttagatgaaatagttattggaggtttcgtagaaattttagatttttcttagctggagatggggacatcgaaccacttccagtggttgccatttatataagaaaagaacacaatgggggcgaaagaacttacagatacaatcgagaaaaatggggatatcggcatagaagggaggttgaggaaaacgtgggttagggcttggagtgggtgatcgtgtgatagagagggtgaagaagataggaaagagaagcagagaataaaaaaaaaaaaaaaaagaaaatggaagttatgaaaagttggcgtgtacaaatgcataaaacatgacatatgaatgctaaaaggtcaaattgtaattatgaaacttttgaaaaactaaaattgaaaatgtaaaaagtttaaaaaaccgagtatgacaaaaaagtaaaaaaatggtgaaaaagggcatcaactgtaaaatgcccaaactattaatccaaatttaaactaattatattttatataggaagaattttattttattattaatttatcaaatgaaataattttaacattatttttagtattttaaataaatatgtatataattttaacaggttattgaaacacgacacgctaattattttttttagaataattatattactacgcgaagcgcggtatagtaaactagtctatatatctatctatctatatatataaaggagaagtatgaggtggtgacatggcactctacaatcactctaaaactatttttct

SEQ ID NO: 321924 - DNA, 681 bp, Cannabis indica
agacctcacggtcattacaaaggatattgttcgggatagaaaaaacacacaactgaccatactgattgtttgtgaaagcccacttgaccacattatgggggtcataacattacaagatctgttaacaaaataaaaattacaacactcaaataaccgagagagacttatacaaaacttggcatagttttttaatttcccaccgaaactccaattcgttgagtgaattgctaaccaccttagagtcactctctagaataatatacttccagctttcctccttagcaacttccagcgccaaacagaaagcaaccgcttcaccgcaaagagcattagagaactccaatctagctgtatgaaccccacttaccactccaaggtgatttctcaccacaattgcaatgtacatcctttccattccaactttaacatcacaatttagcttgacccacccaagagggggtgaaagccaaacttcttccagacacgggggatggagtggggaaaagagactccctgtaatctgcataagagtggtaaatatagtcaacacattggttaacattggacaaatatttattgtgtaccttgtcattccgcgtctgccaaatacttattttttttaaaacattatatttatactttgacaaggaaatttttatatttatacttttcttacttaat

SEQ ID NO: 321925 - DNA, 1719 bp, Cannabis indica
cgctaattagtatagggtcccatacttaggaatttttttagcaactaaaagaagaccacaactagggtagcgtcccactccacaaggttttcttacaatcaataagaaaatctatggtggacgctgcgtcctccttccagagagttttcttaatgaataactatgcatttcttttcttttatttttgtgatccgcataggagcacttacattagaactttaaaattatcattcaatcattaaatttgtgtgtgacctcaaacgtttatatattgaattataatagttcgtacgttcttgactcttatgtgcaaaaaatacatagctcgcgtataacatgccttatgcatagctttcatatactatgccttttttaatgctaatatccacataagttaagactgaggacacgtgaactacagccttgttaataataggacaaagtctccttacaaggcatggtaaaaccgtcaagcaacaagcgaagagagttaagcaatacatcaagaaattgtacaatcatgtcttggcggctaaggggagtacataggctggctagatgaagcttgtattgtcggccaggatttgagcacaagctggctggccaaagagtgactgtcagacccaaaagggtctgtttgaccaaggaagcctaatctttgcaagaaaagttgtacaaagaagctcctaattaagggtggccaaaacttactaaggctggccaacacctactaaggttggtcaacatactaaggctggccatcacttcccaaggctgacaggcacatggaaaagctagcagacacatagaaagttggcaggctcatcttgaggctacaggagcaatacctggccggccatggtgcagcataggccggtcagcctctagcaaatggtaggtcagccaactcctcttctcaaagccacttttgttgtctctatagctttcaacctggacaaacgctctcagctacgaatgaacttcaataacccgtgagaataaggattcaacttcaattatttacctatttttttggaataattaataagttattttcttatatatttaatatgtaactaatgggtgattaacctactttgaactagatctgttataaaccatgtactatataaagagcattagatctcactcaaaacctaagctaggctaagtcattccatatgctacaaaggctttcttaagcctcatacacgtgctcctctctctccctctctcatttctcatctatgcctcctagacactaagtcttctcttctttagtcctttacaagaactcataagttcttagtctgcctagcattgttctcactattgtactattcaaagagagccatagctagaattataaggttctcatttatgatctgcatggtattatctctagaattaatataactaaaaatagagtaggtcattacccactaaacaagggggttgaacctctataaatctttgtgtctcttttatcatttattgttcttatttacacgcgatgattttctatcataaatacgactccactgctggttgaccaaattttgagtcaacactattgttatcccaaatttggcactctgacgtggtatctcgagaatggtgacacgtggactctacttagagcatctgttcagatcaacatgccgagcaggatgcctcgctggcatatctaaaaaggaatactcaacgagccgtgcagaa

SEQ ID NO: 321926 - DNA, 1152 bp, Cannabis indica
caaacattgagtacttatgccgctaaaaataaacaatgagtttatgcccgttacaaacttaaaatattaattacttataccgctatttaccctatttaaatattctatgtgaggtgcaatcttttatacccagtatattaatcaattcttttatcataataggggtgaaaatcggtcggttatggtcggtttttaaaattttataaccgactggtcgattacggtttttattttacgaaaaccgtaaccgaccgtttagaaattataaccgtataaaaccgaccgtacagtttttggcggttttcggtttggcggttttttgcggttttgacggttttttggttaaactattttttatttcaaaaaccgaaaccgaccgccatgtcaaaaaaaccgaaaccgaaatacgaccgccaaattcggtgatgacgtggaaccgaaaattcggttacggtctggtcggtttgatggtcggtttcggtttttcgatttttattgaacacccctatatcataatgtcatgatatcttttataattttttttgggtaattatggtcatactgtgtataattgtaattaaattcccaagaaagaaattatgcttaatagtatctaaagtagttgtttaaaattataaaaccaaacacggtcttaagggaacagctgtcacgtttagataggagctgtcatacattaaggtactcaacttaaggatgtgtttatccattgacacgtaatcaccgtcagtcagataaaaccacccaaaagagaacacataaacgacacgccattcagatacttacgtacatcttcaacgctgacgtggcaaccttatgttccttttcgaaacgcagcacggtgggtcccactatctcttttggtgtttaaacaaaacggaacgaatacgttgtctcactcacgtggcacataaatcccaaaacgacaaagaaaaaagagcccgtcgaggtgtcgttcttttaagaccctaaaggttaaaactggggaaaacgagaaagaaagaatcttaaaactattctttaaatatatattatttttaacgggtaaaaaaaaattatttacaccacataaaaacatactctattttgaaattttattattgatatattgaattttaaattattttttaattt

SEQ ID NO: 321927 - DNA, 1359 bp, Cannabis indica
ataatgggaaaaattggattcaattgtcagctaaagacaacccaatgggagtgatagtaacaatttaatcgatagaatctgatccatcacttgaaattcgttaactagcaccaataaaatgttacagagtctcaaattaataatgtataaaaactaaataccatacataacatagatgagctactcctccaaactaaactaaactctaacgagtattcgatcaaatccaaaaaccggtccaaaaagacagccatttgtgattcatggatagtgagccaggctaatatttctaagatttctacttagatgaacgtattttatattcgattcaatttctaggtttcctatacctgtcatgaactgaatatattaaaaacgtttgaagaaccatcaacccagtgatcctttcaatcaaattcttgcatgcattcactactaaattcaaatttcaatcataacaaaatgtatgtacaaaccaaaaagatcagaaatttataactgtttcattacctcattcaaccagaaatgctcattggttttgttagtgatcaaattcccagtccaactatgagcaagctcatgagccacaacctgagctccactagaatcacccttaatcacagtcggagtcaagaacaccattctcggattctccattccaccgtacggaaaactaggcggcaaaaccaacaaatcaaacctttcccattcataaggcccaaacagcttctctccttgcctaatcatatcctcagttccagcaaactccctcgccgccgaatccaacaccgccggagccgcctcagcataaaccctagtcctcggacccacctccctaaaccctaactcaccaacggcgaaagcgaagaggtaaggcggaaccggctgctccataacgaactcctccaccgccctaccctcggcgcaccacatctgatcgccgcagctcagaaaagatccctcgccggagatcggagctcgcttctccacgtgacgcgccgccatcacagccgagagctggcgagggatgttcaatctggcggtgtatcgcacgcgcgccgctggtgtgtcttggcaggggaagacggagcgcgcgtggattgcctggcactgtgtgtagacgagtgggtaggttttgttgaaagtctgaggcggtgagagccattggagagctgaggcggaagggtgagttgtgaagacgacgaggactgagtcgtggttgttttcgagggagatggtgaggtggcagcctctgattggatcgggtaccgaaagtgagaagggaagcggtgtatgggattttgggtcgatgacggagtggacgatgagtgaacgagcgtcgagggagagaggacctgt

SEQ ID NO: 321928 - DNA, 1440 bp, Cannabis indica
taactaacaaaacggttaaaacaaaaaacggacttaaccgactaaaagactaaccaacaaagcaataaaaagatacaaccaactggacctaaactaactgatcctaaaccagtaaaactagtaaaacttaataccccctcctcaagatggagagtgtatgtcgtaaaccgacatcttggaaatatgagtgcccagaactggtgacgttagaacactggaaatgggaatcagtctgaaggtattgttgttgatcttgtcacagatgaagtggcaatccaactctatatgtttggttctttcatggaaggtaggattgttggcaatgtgaattgcagagtggttgtcatagtagatgaaagaagggtgaggttgtggtatgtgaaagtcgtgtaagagatattgtagccaagtaatttcactagttgtaacagctacagcacagtactcagcttcggctgagctctttgagagtgttggttgcttcttggtacgccaggagatgagacaatctcccaagaatatgcagaatcccgttgtagagcgtcttgtaacagggcaggatgcccaatctgaatccgagaacctacgaagatgcaaggaagaagactttgaatagaggagtccctgtccaggattccctttgatgtatcaaagtaggtgattgacagcttgaagatgagtggttttgccatgaattggctaaaagaatttactgcatatgttatgacgggtctagataaagtcaagtagagaagctttccaacaagttgtctataatgtgatgggttattcaatgcttccccatgttcattatccaacttaagcttaggatccataggtgtcttagaaggtttgctgcccataaaacccgaatcttcaaggagttggaatgtgtatttcctttggcataggaataatccttcttttgctcgagcaatttcaaatctgaggaaatatttgagatctccgagagccttgaatttgaatttgaggtgtagagattcttacagctggtgtaagatggatatattagggccggtgatgatgatatcgtcaacgtacacaagtaaggcaatgaaagtatcatcggatcctctagtgaacagagtataatcagcttgagactgtttgaatccttcttgaagtagagcatcagacagttttttgtaccattgctgtgagaactgctttaatccatagattgatttgtgcaattcgcacacaagattgctacctgcattgggagaagaaggaagtgtaagtcccttgtggtaaagacatataaacttcttcgttaagattgtcatttaggaaggcgttattaacatcaagttgtagaatgtgccagttctttatagtagaaatagcaagaagaagtttaagtgtgaccatctttgccacaggagagaaagtgtcaaagaagtctagcccttcttgttg

SEQ ID NO: 321929 - DNA, 2213 bp, Cannabis indica
gaattgttctgctagccattgtgtagtaatgtgtctattatccaaaacaatgccacaactctcatgcttaggttcacatttgcttaccctgaatgctttcccatcttgcttcacttatgcatagagcatccatttacatccttcagtgctacatttcaccctaaacttcttagagtcattagccagtagaatgtactccttattttaatgaatgaaatatgctttaattgtcttcctcagaacttctatgctagcaaaatccatgtatggtttccactccaagtcatccagctttgtctctggattgtatggaaatttatatggtcctccaccttcattgtcttcatcattatgaacactgcccatttcatctctttagcaatgtcaccttcatcttcacagagttatcaggaaccaattcagtgttccttccccatcaggaacaattgtcgaggtgtgtgtatccatgcctctctacttctagctcaccacagtattcctcctcgtgtaaaacaaaatcagcttttggttggatttctcgttcagggcgaggttctaattagctttgagtttctagttcagggtggagttctagttgggtttgagggtcaagttggaatgactgtgagggaaactcaaacttaggttgggttataatatatggttcagattagggctgtgatataggttctgctttaggtttgggctatgatataggttctggttcagtgttgggggattcgtaattcagggtggggtttttggttgagtgtggggttccttaaacttcctcctttgtctatgtcttttggctcttggagatttttcaagttcagggtgggttttagattggctatgagtttttggttcatggtggggttatggttctgtttgggtttgagtttgtggttgtggttgtggttcagattggtgttgtgattcaggttgggtttggggtgttgagagaatggtttctagttcagtgtggggtcatgttggagttgtgattcaggttgggtttgaggtgtttggagaatggtttctggttggggttctggttcaatgtggggttctggttcaatgtggagtctggtttagcgtgtggttgtgattgggcactaaatcacagcatcatcctctaccttagtcttttggctcttcgagattcttcagcctcttaataaccaatgatctctacttttggggaacctgttgaaccatgatgattctgtaaaacaagaaatcaaagtcaaaatctaacaaaaaacataactttaaatagctggaaatatcactgaatcaaatctcgagaataacacaactttaaacaacaaacaaatttaaaattagaaacatgaaccatataactttcttgggctgctggtgctacatctggcagaggggggccttgtggggggattcgatgcaatgtgttatacccaaaattcgacgagcacatcagaagaagatacatattaagctgaaaagaatgaagaactcaaacacgcaattgtaagtacacttgatgtggaataactcattaaaagcataattaacagagtatgtttataactcgactaactggacagtcttatgcgagataaaaatgtactaactgttgacttgtgtctcgacgagaaaccatggaaatgcaagtgtgcatggtgaggcattaacctcgttgcgtggaggaggtataataacaatataaatacttagcgtatatgacacggtatacaaactaagtataaaaagaggggtggatcaaggtgacagatagcgaggcgtctatctcgccgtaagatggcatgcacgcaagaaagatcatctcaacaccagaaactgtagttgtgataattaaagtaaaagcaatattaacctcaggaagatatatgacgagcttcagcttgccatcaaatttaactcaactccattcccagcgaggcacccccatgagataaggcttaacgtatatctttaatatgcgttcattttggcctaataaaagtaggatattcacagccgtgttaattctaaataaaaaccgcatttacctagcgtgatttgtaatcaaatcccttgattctaggggataatcattgtaaaaagattgcagtcaactttataatgaacttcccactatgtaattataaatagtggtaagcaagataaaaagagggacgaaaaaactcatacaagagaggccctaaaaa

SEQ ID NO: 321930 - DNA, 825 bp, Cannabis indica
tgtggtgtaaaaactccattaatatattagtataataaaattatctaaacaaggcaaatagacgtttacaattgaggttgttcatgtgagggagggttaggtttactatgtacctaatactatgacctcctaattctcacacaagtcccgaaaaagagaaatttaacttttatttcaataattttttgtcattgaatagaataatactaattggacctaaaaaaactattaataatataattaatttaacctaattaaaattaattagcaacataattaaatccaaaaatatttaaaattatttttcaatagactattttttaattaattcaaaaattgcacacttagtttaatgagataaattctatataattaatttctaagtaaactaatttgtattttttccaagtgtttaactaaatagaaaagtaatatttaagttgaatttaattcaagatacataaatatttaatatttttggtgacatttaaataaataagaaaattacatttatgatgaaaaattgaaaattaattttagagcaacataaattaaaaaaaaatagaatttattaattttggaccaacttgaattaagtaattttgaataatatttatttaaaataaatagattaaaataaatattaaataaaataaaaatacacttattttttttcttcaaaataatgaggttttaatatgacatattcgatctatattgttggtcttacatgattattgttttattgaggacctcgtggcgcttgacgaccccctgttagtgatggaaattattttaccaagatcttagatctactcacaagta

SEQ ID NO: 321931 - DNA, 708 bp, Cannabis indica
aaagagttttatttagggcataaaacccatataggtaacgaaaatctgcgttaacataactgatctaaagtcgtaggtatgttgaagctaagctggagggcttgtgagaaaaacacaagtgtttgtgcattcttatagctttggctgactaaccttgttgaaagctgctcaatgcatggaagttgtccctcctagccggctggctacaagtctggccaagaccttgctggtaggtacatggattcttgctggcttgtatgtgttgtgcaacatatgcattccaggtctggaaacctgctcggtactagtcctggtagtttaatgctgtatgcactaacctggcaagttggaagactgtatgcactaacctggtaggttggaaggtgcacgacagtaccatgggaagttagcgatgacctgttctccacgtgtcttctgcttttgatcacgtggacatgccacatcaagtgaacaaaatttgggatagcactattgatacaaaaaataatttaaaactgaaaaaaactaataaaataagtttaaaacaatgaatagaattgctataccttcattgctctaaaaatttatgcaaaatagaacatctattgtatgttatatttttaataaatttaggaataacctaacaaaggataattggataattcaatcagaataggtttttttttgaatggaaaatcatcattttat

SEQ ID NO: 321932 - DNA, 654 bp, Cannabis indica
tttatcttagttgctttatgaaattcatcgttttgattcctaagaaattcaatgcaactactctaaaagattttaggccaattagtctttgttcgacaatttacaaaatagtggctaagatgctttctaatagacttaagcttgtccttggaagtcttatctccccttctcatagtactttcctgtctgagcgtgtcatatttgataatatctatattgctcaagagattgttcatgccataaatcatagaaagcaaggaaagctaggttgggtaggtcttaagcttgacattgagaaagctttcgaccgtgtagaatgggactttcttacggccattcatcatcgattaaaatttcccactaagtttatcaacttaatccgtcagtgtatttcctttgttactgttcgtttcagaattaatggtcaaatatttgatcaaatttttccttctcgtggcattagacagggggatcctttatcaccctatctttttctgttgtgctctgaaggccttactgcagccctccgcatccaagagctaagaggctctttcagaggcatttctattgctcgcacgacccctgcaatttcccatcaactttttgttgggttttatgccctaaataaaactctttacaatctgattagttatc

SEQ ID NO: 321933 - DNA, 896 bp, Cannabis indica
aattttcgttcatgtggagaacttccgcctgctgcagcatttttctagcaaaattttagcaaaagtaatacatattcaaagagcactcagcaagatttttgctgaacttttgtggaaattttgctaagcaggcgtaatatcactcacattacgagaggaaaggtccatctattacatattactcctattttacttatatatatatatttatattattatttatattattataaaaaaaaaataaataaataaataaataaataaataaataaaacacagaaatttttttttatattaatattatattaatattacttattatattaatattattacataaaaaaaaaatatattattttcaaacactttaccctacccgacttccccccccagaccccttcgaaaaccaacccagaaaaaaccaccccccttcttcctcgaccagccaccgtccgaccacccccatcgcctcctcgccaccacccgaccacccccatcgcctccattccgaccccgtccacaccaggaagccaccgtccaaacccgaccgcaccccacagccaaacccgaacccctcccagtccgacgaaccaccaccccccagccgcctctgtccaccccagaaaccaacgacccagggacactgttcgacccccagaagcccgaacccacctcaaaacccaccagacccgagttcgcctggaaaccacttcaccagacccgacctccctctctttgaccaccatccctcacccgtcggacacactcaccaccgcccttctccgggtgctccagtagtccgaaaccaccatttttagttggtgactgttgagtgggaggagcttccacattgtgccgactttggcattgcattctttggatttttgttgtggtat

SEQ ID NO: 321934 - DNA, 1258 bp, Cannabis indica
ttgttgtgtggtccaaatcatattgataaatcaaactctctaaatatataacacaaaaagattcgtacggacgacttgggtcatttggactaaatttttcattcttataattgctacttcttcttcttctttctttttcaaaaaaaaaaaaggaaagaatatatatgtaatacgaatgatatatataaagcgttatcactttgctactaattgtttgtctaccttttctttctttgttcttcgttatccaacgaaatatttttaatattcaatttactatatacacatatatgtatatatagataaatagtattttatgataagacgttgatgtgcgtttggttatatattgaagtaaggtcaagtaagcatatattttacgagtcatatctcttttcttattttcattctcaagtggcaaatcgcataatgtattggctgccataaatttatattaaacgaatatatataacataggatatatatatatatatatatatcactactatatactaggctatagatccttacagagtatagtatggtcttctatattttttgaaagtcaaagtatggtcttaatataatttcatgtgtcgtctttttctttaaaaaaatgagtgagatatttatatgtataatatgaaatatatatatatatattgattatgtataaaatacgaaattaatcaatatatagattataattatagaattgaaatactttaactattgattttttaagtattaaattctacacgagttttggatctccaaaagaaaagaaaattgattagtattggtaatcgagcttacaagctctctctactttctttagatggatttattgtgtttcacagaatgagtagcgagctcggaaaccgaaatcctatatctatataggtgagaccttccatcaaaatctctctcacatttaattgtcagaatattttaacaattaattaagaaattaaattaattagtaaatcgtaatttgaccatataaagaatatcaaccaattaattgtatccaaattcaataaatatgaaatattcaattatcttaaattagttcattgattctattcttaaaatggatatttgcggcataaatactatatgttttcggttttatatactgaaataacacatgtttttttttccgacggattaaataccttaagttacattttcgttacttcattcactacttttctattataaatcatattcacacataggagtatttgcggtataa

SEQ ID NO: 321935 - DNA, 2455 bp, Cannabis indica
tcccattcccattcctatattttcattcctcctaaccaaacgccttagagaaaaagtggtagtagtggagaccacaagtctatatttaagtgtatgagaaaaggcaatgtaaaaacaaatagcatttttcttaattatgatcatcgtagagttttgtctaatatttttggttgttgcaaaattcttgttgaactatataaataataatattttgttcatttttaaaacaatttgcttatgtagtcgtgggtcacaggtttaatttcagtacaagggtcacaggtccatttatcatagctccaatattagctaacagtcaaatcagaagaagtttgtggtttattgtgatgcatccagacagggtctggggtgtgttataatgcaagctgatagggttattgcttatgcttctcgtcagctgaaggagtatgagcagcgatacccaactcatgatttagaacttacaacagtagtttttgcataaagatttggcgacattatctctacagagagaagtgtgagactcacaccaatcacaagagcctcaaatatttctttacttagaaagacttgaatatgagagagaggcagtggttggaattatttaaagattataattgtgaaatcttttattatcccgagaaggccaacatagtggcagatgccttaagcaggaaaggtcttagccaagtatttagcacgattatgatctcacctcagttggcaaatgacatggtcaaattaggtattgagtttatggttggtaaacttagtaatttgacgttacaattatacttgctggaaagaattagagtagctaagttagtggatccagagttggtaaagacttgagaagaaggtttagctaggcaagctaaggatttcacagtgtcaagtaatggaatgctgctttacaaagcccaagtttgcattcctaatagtgtggaacttagaaaggagattcttgatgaagctcatactacaccttattcattacatcctggtaccaccgaaatgtatcaagatttaaaaccttactactggtggtgcggtatgaaaaagaatgtggtggagtacgtatgttaatgcctgactttttattagatcaagactaaatatcaaagacctataggattattgcagtctttgactcttctcgaatggatatgggaggatgttaccatggattttatggttggactacctagaaacacgggtatgtttggttccatatgggtagttgtggatcagtttaccaagtcagcacattttctacttgtgaaaataatgtatacagtaagttagtatgcagaactctatgtaaaggaaatagcacgattacatgggactctaaagtccatcacatcggatagggatccaaagttcactttaaagttttgaaaaagtctctagtgagtcatgggtacaaagctaaagtttagtatagatttccatccttagacaaatggtcagtccaagaggacaattcagattttagaggatatattgcgagcctatgtaatgaccgcttagcctattatagtgggggaataattgtaatgaccgcttagctttattttgagaattaatagataattagggtttatttttagaattatatttttaattatttttataattatggagatatatttgaattctaggtgtattaattttgatattgtaaaattttatatttttcatatgcatggcaatagtggaatgtaacgtttggcctatagagtcacttagacaaggtatagtatcttggttttagcagggcaatatagttagatattagaaatatcgagagtatttggggttatgagtttggaccatagtaccctaggcttcaagattacttcatgatgaagaaaggggtaaattaataattttactctaattttgtcttatgtggtgagtggatttttagtaatcctatgtttaattaagtattttcaacctcaaatgattccatcatttattccttaaagcattaacatagaaatcaaactcccaaaaacatataactatttctttctctctctttggtttgttcggccaaacttaggacccaagaacatcaaaattttcctatcatttcagacaaaaattaagaaggttagcaagaattacttggtaccaaacctaaagtatgctctccttctctcttttctttaattttcataagaacttaattaggtgttcataattattttgtgagtttagcttctgtatattttgggttgaatggaaatgttttctgaggttgttttgaggacattcaagttgttttaagtatgtttagttggttgtgggtattaagttgtttttagtattattttaaagttaatttagttctactcttgtttgaagcaattttatgtttttgtcttctatttttgcagatttaaaatgaagaagattagaaaatatcaaaggaataagatggaaa

SEQ ID NO: 321936 - DNA, 544 bp, Cannabis indica
tttttatttttcgttcgaggattcaaaagacgaaattgacctcactttgtatggaacctcactgtggccatggaatccctcgccgcagcgagtgctgatctggccgcggcggtggactatctggtcgcggctgctgaacatgtctcagatacatctttctgctaaatcttggccgcgacggtaaataaatctaccacggccagaagtgaaccaactcctgattgttgcattttttcttagctcaacttgccttttgttccacttttgaagccgtgcacatccacaacaacgggaaacctgaaaacatagaaaacaagcgtaatttatcctaaaacatcgaaaaacgactctaattgtgacccgaaacataagctaaaaatagcctaatagtttgggggcacatagatgacctagacgaatgcttcaaagtcctcaggaaatacaacatgaaactcaatcccttaaagtgctcctttggagtcaccttgggtaagtttctaggctttattgtcatcgcctgaggaattgaagccaatccagagaa

SEQ ID NO: 321937 - DNA, 1111 bp, Cannabis indica
aacattaaatgttatttctgatctatattgataagtaaattggattatattgaaatgagttttatttagggcataaaacccaacatcgtccccactactatgtaggagagacgagaccaaaaattggccagcctcacgtggacatgggagaagatctcgagttagtcagacttagagaggccatctgccaagtcggcctaattgaagaaccatgcactactgattgcaatgtattcgcttagcagagatgcaaattccttaaagaaacacacactgctgattgcgatgtattcgctcaatagagacgcgaattcctgagatggatgggtgaccaagactacatcattcgatctcactaggcagagttaaatcaccacaatagaaaggccaatgatctgataaggtggttcaaccagagaagcgatgtaagaggacagaacgagatccacttcaaggaagactagttgatagatcagagagggtctatcgttaagctgaccaacctggcccctcaaggactaggatagatcttcccttgctagaggaaggacaaaccttgcctcaaaggtctaatggtgagaacagccagatcccgacaactaatggcgtggggggccgaccagggatctcaaactcagtaacagccccctatccatcctgtggccagccagccatcagtaggagtccctgtggttggacagtcaccagtaggactccctatggcggtctatccacctaaataagtcccatggcaagccatacacctccagaagtccctatggccagccagagaggagcacttcctcctcgaggggagccagtcacccaaagatcaattttcaatcgacaaggaaaggaagcggttgcaaacacccaaaacagcaatttaagaagtgaaataaatcactttagacatttggatccacaaaacttcaacaattggtgtgatctaccctatgtcaacgcacaaactccaccagccatgcagagaagtgtgggtagccatgtaatatccagattaaaatttgtattcaaaatttattgaggtaataatcgtgttaaaataatcgtcttatttattttttttataaagtgtgagtagtgataatta

SEQ ID NO: 321938 - DNA, 1230 bp, Cannabis indica
aaaaatgagatgaagatcatcgaccccaaatctcaatgggatgttgacttaagcgtttttaccaatccagtggtataaaagatgcttttaggaaatagagataactagtgaaaaatgttgttaccttgttaggaagctaaaacacattgagaaaaataatgggtatttgtctgacagaatcagaagacattaatgctgatactaaggaagaagatagaatctccatatactaacagaagatcggagtgtgtggttggttatggtatcctctaattcctttaaaagaaacatctttttatcatatttggtcttgtcttgattatcctttatgtttccttcagttgaacatctttttcaattcctgtactattacaatacagccctctttattaatatattaattaattagccctttccttttgtttttgcaaacaagtccttaatttttattaacctgtgccagcattctcttcttcactccttgtaactgtataatgcttttcttaaggttctaactttagcttttaatatatatttttctatatatgtatatatacaactgcatttgacaagctctcaaagaaaagaagaaaaaaagtttgattccttggtcttgattctcattcccttttatgatattttcttttgaaaaaaatggcaagtggttacttattgctccttaactcattcttgcttgatgatttagctttcccattattgaaatcaaattgttgttatttgcatatatagtacatatctcaagagattttgcattatcttcaatcaaaacaaatcagatctcatcatatcaagtgcaagaaagagtgtgggctaccatatttctatgaccacattacattactttgaaatttcttcaatttttatggtatgagcaaatacaaaagaccaaaattaatctcacccactatcctattattactaccaacctttattttgtcctatatatacatggtgaaatatttaatttaatttaagatatatataacacatacaaacacacacaaatattgtggtcttaagtctcttgactcttgttccaatccctccatgtcttactacttaaaaaaacaatattaatttctaatagaataagtgttaaatcggtgatgtaatactatatttatgtattttctgtaaagttagaaagaaataaaaaacttgtactaactttgttttttattggatggttttgaaaattatataaagttg

SEQ ID NO: 321939 - DNA, 704 bp, Cannabis indica
aaaaataatatataataatattttattggagtttatatgtgtgtaattgaataaaaagattaggggtatttgggataaagaatttctctatatgtattgacggtgagaattcgtcaactaactttttggctggataatcaaactctacttcaagctcagaactaagatgaagaaataaatgaaatataaattcaagtgcctatctcaaagtagattgaaaataaaaacttcctattgctctcaatataatggttttaagagtaattttccaaccctttctcacacttgagaataggatatttataagctctaatggcttgaattacatggtagtctcaaataaacaagttgtcacttttgggttgcaaaccgtaagtgcaagaggtggtcttgcacctcgtacctttgtctggtgtcaagtgatcccaggtcgtagaggtggtggctgtagtgtactcttggttgggtccccagaccttgcaggtgcattgcttccactacttgtacctcctcgctctcagaacttgcagggggttgttaggaatattttaccatgatctagatttagtaacaagtatgttgaattatcatcctaaatatgaattctctaaaacaatgaaataaacgcataagggtttaagaaaaccttacattagttgcagaggaatataatgactcctcctgttcaagatctctagcccttg

SEQ ID NO: 321940 - DNA, 1745 bp, Cannabis indica
tcatggatgcacgccacaagaagatacgaactttagatgggagcttcaacgcccaaaacttcttccaccacagttgagattgcagcagtaggctgctgctcttcaagtgatgttgctaaattgtaactagatttgactgagtagaggccatttgattcatgaggccagatcaatttatcttgttgttcaaaaagagtgaaaggcagactttgaatcttgatgacatctgagtttaaaaatagggtctgaagcaactcaggattccattgcctattgtccaggagaagttgtgcaactgtcatggttcggtcatggcctctaaaaaccaaaggtttaaaataagtagaccttggcaaccaagggtccgtagcacacttaatatcaatgccatttccaacttcctaacgtaggcccttcaacaacaactcttttccccaaatgattcctctccaagttagagaagggtaggaacccagatcggcatccagaaatgaggaattcttgaagtatcttggttttaggattcggctgagaagagaattagtgttggaaaaaatcatccaagcttgcttagctagaagtgattgattgaaatgaacaaagcttttaaatcacattccccattcgacttttgattgagtaagagctttccatgttttccagttaatgcccgaggaagaagaattggatccccaccaaaatttattgcacatgatctctatttagttgataagcgattttgataatctaaaacaactcatagcatatgtcgaaatcgcttgagcaactgctttgagtaagatctctttaccaccaatagaaaatagagattcttgccaagctgagagtaaattccataatttcttcttaatttcaccaaataagattttcttatccctacctgaataagatggtaaccccaagtatctctcatgacaaggtttaataaccatatgtaatatttcctgaaagttgtgttggatagcaggcagagtattgggagaaaaggaaagcccaaacttatcttcattgaggcattgaccagaggctcggcagtagcaatctagtgaacgtttaatggccatggcagatctcctattagcccgacaaagaacaagactatcatcagcgaaaaaaaggtgagagataataaggatatgacattttttttgtagtgttttgacacttctctaaaattccaactcttgttattatattgtcctataatttgttgataatgtggcccattattgctcaacaaacaagagctaattttattaatgaaagaccacaaagttgggtgagcaccccactagtataaaatagattttttctttcgaccaacacgatagtaaaaaacccaaaatcgatggaataaattagtatagaaatttcacttcggttgttaaccaatgcaagttatcgtccaattaaaaatgacataaagatcttttgtgtccattgcactactacaaaaataccttttagagtcagtttttaaagcctttcagtgtcgatttcaacaaaattcgctaccgacactgattcggacgacgctgtagggttgaaaataactgacgctaaatggtaccctatgacgccagctattatatagcaactgatgccatagggtacatatggcgtcggtttatagtgaataaccgacgccatatacccataacaactgacgccaaatctgtaatatttatttttttcagttaatttaatttaatttatttaaatta

SEQ ID NO: 321941 - DNA, 532 bp, Cannabis indica
gccatcattggttgtttcagaacagatttataacccttaaatttctcacactttacacaaaatttactttctctctctctctctctcttcctctattttcttttttctttcttatgttgactgcttcaattattttttccaatgacgaatagattggattgggctggccatatgatgtagccacagtataggagtactccctctcccttttgtagatgtaaactatcatcattggtactaattaaatctagctaataggattttatccacaactcaattacatttatgaaagtgtaatattttatgacatttattttaaaattatatttattatgtgtgcaaggtggtgagtctttccatttaaagaagaaaaaaaatcaagtatttcattaaggaaaatttcaaacctacctcatattatatcatttctctttactctattctctcaaaccaatttagaagcataaccttactccgacctcaccaccaatcctgatggcacaacaccccccccccccctcctctctctctc

SEQ ID NO: 321942 - DNA, 831 bp, Cannabis indica
tttagctattttatttattttttttttaaaaagggtaaaatgggaagttcatgtaattaatggactaaatttgtacaaattaaggaagggtataaattttgatatggcttgtattattaaggccaaaaattgaaatttccctaacaatatacatgtgcaatttaaattctttatcttattattaactatcaataaaataaaaataaattatttttaaattatcttattaattgttcaaacgaaaaaagaattttttaaattttacattaaattatacatatgacacttatttggcaacgacacaacaaatacattttgttgaatagattactgctgaaaataaaagaagaacgatattacagaataaaacttttgagttgaacaaccacatcaacaatttctctttactaattaattatatacgtttaaaaattattttaattcattaaataaaaataataaataatttttttcgaaaaaaataaagtgatacctcactacacatgctcggacaatagtgcacgcgtgtggtggttcagtacataagtccttatcaatgcacacaaaattgggtaccctttaagacactaacccatgtgccaaaattacacattatatacaattttaataaagtattcctatcacatataagacccaatagactcacacacacctcccttctcatacaataattttataaaatttcaactaaagttctataaacatcaacacttagtcacatgagataaaacttaccatcaacattaaaaattctaaatagcctcttgttattatccaaaaaggagttctaaatatacatatatatatata

SEQ ID NO: 321943 - DNA, 955 bp, Cannabis indica
ctccaacagaaagctaaacttacatggatagagaagggtgatgaaaattctgaaattttccatgcaagtatcaaaggaagaaggaggcaaaacagtattctgtccacgtacaagagtgaatgatccaatcaaaatagctgaagcttttctgggatactataatgacctgttgggatctaaaatgcaagattgaaggcatgtgcaaatcaaggtgatgcagatgggccctactgttactcctctacaagcaaattctttgctactgccttacactattgaggagattaaggctgcaatgtttgaaatacctggtcttaaagctcctagagctgatgggttttctagctacttctttcaagacaattgggatgttgttgggaataagtttatgaagctatagtttctttcctggacacaagcaagctgttaaaggaaataaactcaactgtcataaccttgttccccaaaaccattatcccaacactgtcaaagattttagacccattgcatgttgcaatgtgatctacaaggtagcaactaaactcatttgttctagattaaaacacattcttccttctattgttgctcaaaaccagggaggctttgtaatgggaatatagattagtcacaatatcatgatatgccaggacttgattagacattatgggaggaaatccaagagggctaactgtatgattaaacttgatttacagaaagcctatgatacaatagagtggaacttcattgaagaggttttggtggctttgaattttccaagaaaatttgttgatctggttatgatatgcatcaaaactcccaagttctccttaatgttcaatgggaaaatgcatggcttttttgcctcgtgaggggattgaggcaagggcatcccatcgtcccctctgtatttttgttctagggatggaatatctctctagaataatgaagaaagtag

SEQ ID NO: 321944 - DNA, 878 bp, Cannabis indica
actaaaaaaaaaaaaaaaaaaaaaaaactttaagtacaaacattttttccctcaaattagtccatgaattctagtttatttttgcacactttttctttctttgctactaaaccaactccttccaaattattctaaaacaaataaaaataataataataatgaagttaagcaaaaaaaaaaataataataaataaataaaaatttcttttcaatcatatttattcagataactgcaaactatatatatttgaagacatggtcaagtattaatgttaaaatatgaaagtgtattgtttagaaagtagaattaggtgggtgaatggtaaggtgtatagagtttaatttaaaaattaattagtaataagaagaatagctcatgcatcttatgtataagatttagtttctacacattatcaatgtgaggctctataacaattaataccatttctttctttctcatttttctctctttcctcaaacttttaaaataatttttgatcacgttattattcgaatgagcctaaaaaaatattattttgatctactcctcaatgtgaacacttcaagatatgaaaaatatatggcttttgctatttccaaaaaataaaccatttagctactaatatagtaattaattactgttttatatattttttaaaatcttagttaacattcattttaaaattttattaattgaattatattatattatacaataattaattgactttcaaataaaagtatataaaataattggtgtataaaaataatagcttgttatattatatgacaacttattagtttttgaaatttcgtattttaatattcccagtttaattatttaattaagtgattaattaaatgcggaataatgaaac

SEQ ID NO: 321945 - DNA, 1476 bp, Cannabis indica
tattagctgcttgcttgtactcacaataatataacttcatttacaatggaacggtgttgatctaggtatcaggcccaacttcaaaagaatctgatgtatttagctgcaattgctgatgctcaaccacagacgccagcaatgcctccccaggtttgtagtaagcaatgaccctagttttggttaatttatcttttcatcttttaatgatttacttgctcatttactcttacagatggctccgcaccctgcgatgcaacagggaggatattttacgcaacatcctcaggctgcagcgatgatgcagcaatcaggtatttttcctccaaagatgccaatgcagttcaataatccacaccagatgcagcaggatcagcaacaacagcaacaacaacagcaacagcagcagcagcagcagcagcagcaacaacaacaacaacaacaccaccaacagcaactgcatcagcagcagcaagcagcaatccatgcgcaaatggtaatgagaccggctgggaccaacaatggtatgcatccaatgcatcacgttgaggctactgttggtgccggaggcagtgttgggcctaattcagctgctggcccaaacgaagggcgtggcggtggcaaacaagaaggttctgaagctggggcagctggcgcagatggtcaggggacctcagctgctggagatggagaggaccccaagtgacaaggccctgttagtcattccatatggatgcatgtggatgttgataatagatggttttgtacttttatgctcttgacaatcttgcttaaaatttagtggttacagattaggtaggtaagagtctgagttatgagtctcttggcatgcagtgagtcgtgtgttgaaatggaactagcagtaggaaagtgaagggttggaatggaagctagtggtatgctgtaatttatgtatgtcaaatagtagtaggttaagaagtcatcactctgttccaaaagttgcttgtctcagcaataagttttgataatttatcgttttagtttcttagaatcttctctgaaaaggtttggtcaatttttctatgcgaaatcactaaaaagaaaggggtttttggtaagtttgtagatataaaagtaaaatggaggacaataatttaataatgtaagaaactaacactacaacttttgtcttctcgacttactgcttgcagcaagtttgtatacattatacatgattcgaagaactatctttcctttaaaagaagagtaaatacgattgttgataaaagttatggattggattttgtgttttgttgaataataaaatactttattttacaaattagtattcggagttgattttttttttatttttttgtggcgtttggtaatatttttttaatcagttttttgtttttaaaattgaaaaagtgaaaatatttttcaaaaacatgttttataaaattgtttttactttttaattaagaatcaaatttt

SEQ ID NO: 321946 - DNA, 1299 bp, Cannabis indica
cgaatgaatggatctttttgccatgcctagtcctaatagaaatagtaaaaacaaaatcaacaatttcaattgccaataagtcttaagtttgtttatatctttgaaaaatgaaattattcatgaaagaaatgtgtgatggggcattcaataattataaatagtaatgatatttacatatataaattacacataaattttacacgtatatatgggtaagtaatttcaacttattaaagtgattagcctaatctctatttatgtaggaaagtctcttcccaaaattaattttgttaagtgaagatagactagaaaccattcattattaatgcatcccaaaatcaaatttaactttaagaagtttggccaaaaaagaatgatggggattggtaaatttggcatcctacattgtaaacattacttcattgaaatggattatagataaataaaatcttaaatccccaaaggacttagaagcacacaaggccaaccaattttccaagtgatccattttatattctttaccaaaagaatacatctaaaactttgccattaaaaattcaatttatttatgatacaatttataacataagaaataattaattaactaaataacatgtactcttaagcaaaacttccatccaaattctagagaaaaacttacccttccaattattaatatttaagtaaaatcctacattatttaaattaataaaatcgaaaatagtttcttagaccatctctcttggttgcactatttttgtatatattttttttattattaatttgatataaaatgtactatttttcagtgtaacaactctagtgatccaacatcaaatgtgaaatttaataaaagagaaatgtaagtaaatgaccctatttctaactctatagatagttaatgtccattttttaaaataataaagcaaatgtccttttttactttttaatacctaaaataccctttattatataaaatgtattatatattttattcctttaatagaaattataaaaaacaataaatcaaaatctctctactaattttgtcaactattttttcattatataaaaagtattatatattttattctttttaaattttactgatgttgttgttgtctaatatgttatttatgttagggtttataaaacacttaagatatatataaatcacagatctaaacatattcataaagtgctttaatatagaaaaccctaaatcataaatctataaagcctttgctaaattaaagaaaaaaatgatgataaaagatcagcggaagcactaacctgaag

SEQ ID NO: 321947 - DNA, 522 bp, Cannabis indica
agtattaatattaatattagcttcacaccataactactctatacaaatatatgatacctatattttaataataattaatatgatatataatatatgtggatatatatatatatatatagggagtcttatatggtttttgatatataaatgtggtgagtgattatgtaaggaccctatttatatggggggaaggaaagtacttgagttgaggagagatacatatatttatagaaataaatttaaaataatttataactgattttctactcgtatatataaaacatttatttctttatagttagttatagagcgttgcatcggtaaggtatatattaggctaaagtgtcaaataataatgctgaataaagattaaaagacaccagtagtgtgtgtttagtgttagaaaaattaataataaatttaaaatcaatttgtgtaggtatggataactgattgatctctaacaattatcttaaaactaagtattcttttctagatctctaaatcagaagcagtttattt

SEQ ID NO: 321948 - DNA, 1017 bp, Cannabis indica
ataaagtttaaatattttattgccatacatgtggtaagtactatttaaactttattattagcattgtaattttttttaaataccaaaacagataaaaattctatgagaacaatcatgattctactactaaatttttttatacatgtatattattttaagaataatactaataatatgtgcaactaatgcataagagtattacattcaatgactttgatacttatttaaaaaacaatcctaaaccctacttaaattaactcaacattcatcaccaaagaggtggtctagcacttaaggtgatatatgagtgttaagagttttttggtaccttttttggaaagtttaaatgtgaaggtagagacctgcccattccgattctcagtcttcttctacctttaggatctttgacccattccttaggtctcacattttgaccttaaaaaaaattaaaataagtctttacttgaagaaacttggaaattacaatgtatattcattttttatttttatttttactttttaatttatatttaattttataggttatgttccattatgtgttctctaattttaataaattatataagattatatttaataatttgattataaaaagagtatttattaattaaaattattttacaattatatttaattaatgtgtaataaaaaatagtaattttcaatttattcctaattgtgaaatttcagttatgagctagatagatcctaggcgtatatttggtctacttcagctcagagtcggtcttatgaatagataaatactaagtatcatagtaccgaatacttatgtgatgtataatatagttattgatgcagctcaataacaaattataaaaattacaaattacaaagggaaatttaattttctatacttagaaaatcttaaaattttttccctaaaccaaaaatttaaaccctaaaaaactatacattttttttcaaaaccccaaaaatactctcaaactctcacagcatctctctttctctctctat

SEQ ID NO: 321949 - DNA, 2124 bp, Cannabis indica
ttatcttgttagcaagttgtttaacacaatattgaattgaaacactatttttattcattaattggttataaatatgtgttgtttctgtgcaacatacatttattgatttcaaaagtttacaaaataaaaagccttcttctagaactcattctatggctacccctacccaacatgccaggcaggagccatcattgaagagtggtggatacataactctctctaaactaacttttataagtgagttgacaaaactactactgaagagtagcattcttataagttggtcattaataatactttcagagatgttccccattccaatatcttagtaggagaactaactccttgttctcattctacctatcaagcttgtatgcacctttgattgttatctctgtaacttggtatgggccttcccagcttggccgaaacactagtgctgcaggatcattggtatttaggaacactcttcgaaccactaagtctcctatgaagcatttcctttccttgaattttttgtaaaagtacctagaaaccttctgctggtaggcttgcaggttgaggttggtttggtctctcctttcttctattttgtcaagggattccactaacagggtgttgtttacctcttggtcataggttatcctcctatgggacgatggttccaattctacaggcaaccttgcttcaaagccataggccaatgcaaatggtgttttcctggtggtcatcttcttggtggtcatgtgtgaccagagtacctttgggagtaatttaggccaattttcttttgcctcttctaaatgctttttcaaagcttccttaagggtcttatttataacatccacctgcccattcgtttgaggatgagcaacagtggagaagctcttaatgatgccgtgtatgttgtagaagttagtgaacatgtcattgtcaaactgtttcccattatctaacacaatcttttgtggcagtccaaacgacatatgatgttcttgactacaagttgaggactttcttggaaattattgtcatcagtggtttagcttctatccactcagtgaagtagttgactatgactacgacatattgtacacatccttttcccttagggagttgaccgatgaggtctattccccacaaagaaaagggccaaggagactgcattagtgtaagttcatttggtggagctctcaatatctttgagaatctctagcacttgtcacattttttgacatagtccatagaattctcgatcatgataggccaaatatacccttgtctgagtatctttttggacaggctttgcccccagcatgattgtcacataagcctacgtgcacttctatcaataatcgctcgacttctaccttagtgactcaccttaggagcgacattgagaaacctcgtctatacattacttcatataggattaaatactaagcaactttcctcctcatctttcttgccttatttctattttcggctaggactctagtttagatgtatgctgctatatgtgtcatctaggttggactgtcatccaacatgtcaacctcgtcttgaataataatgctcggttctttcaagttttgtatgggcaccaaatttgacttatcgctcaaggtgctacttgctagatgggcgagtgcatcagctgttgcattctcttctctagggacttgccttatggtacagcctctgagccgacttaataagtcttgaatttttctcaaataggctatcattccttaacctcagactgtattctcacctaggacttgatatatgactagttgagagtcattgtatatgtctaggtggttggctggtacatcatgtaccagcctgaggccaaaaatcagagcttcaattcaacctcattattggaggccttaaaacctaaattgaattcctcgtgcaactgttgcccctaggtgtaatgagggaaatgcatgcactagacaagtggttagtacaacttccgtcaacatgtaacttccaagcttaatctttgtgctcttgcttcttctgtggctctcgcctttctcttaaatcttgagagatttcaggggatatgcctgtacattcagcgacaaagtcagcaagagcttggccttttat

SEQ ID NO: 321950 - DNA, 860 bp, Cannabis indica
tggctatttaataagatgaagtgtcattattttaaatgacgtggcattattttaaatgacgtgtcatgccatctggtgtccagtttgcatgataacagcaaggtacctacacaatgtctgaaagtgtaacggaaggtatttatgctgccaaaattttaacttaggtattaaattacaactaaaagataaacttgggtatttatgctgcaaattactcttaagtttgatacaaaataggggtatttatgccttttttgactgtagaagcttcctccctagtggactctaccttgtcgcctctccactatatgcctactgctatcatcttcattgccattaccaacacaagcgtctcccactctttctcgcagacaacaggcgacaactaaccgtgaagctccatctcacgtttgctctagtgtgtgacgactccggtgtccaatagcgtttagatctcgatcgaccctaccctccctgacaccagaggccagccactctgttgtggcgtggagtcatcaagccagccatcatcaccgacgctgtggaccgcaacggcagccatcccagtgacgttttgacctttcttgaaggttgaaagcgtgcaggtaatgggtcgacgagcttcgagattgtgttcgcaaagggagccaacaccgatttatcgaaacggaaggccacgacaccgttttgcaaccgccaattttgaagattttggagtcgatttggcacttataatgttcaaagagaaacactctttttataatcgtcgaccaaagctacgtcgagaacggaagaggaggaggtggagggagcattcacggcagattcttgttgtgataaatccaacacgcaagtatacg

SEQ ID NO: 321951 - DNA, 543 bp, Cannabis indica
ttcaaaaaaaaaaaaacctaattagagtttatgggactcttattagtttgatatataaagaatataatggtttgcttcccaaggataatctcaaccactctttttctctattcccatcaattgagtaagaactcatagagagagaagattagtctgtggaaaatcatatacccacaattttatcttatatccaacatcatgaaaataggtttgtcttctatcttattatttcataaagtaatcttaataatctgacatgagttaagattcatgtatatttctaaatgtaatttctaataagtggtatcatgagctttatttatgttagattattatggttaatcatattaattgtgattattaaattcgatcaacatttgaattcgtattaatttagaatttattcatgtatgtattttattaatcatgattatatgattgtttatggatttaaaaattagtatacatatatatacaattttgttataaaataatataaaataatataaaatagatgagaagaaagaagaagaagatgaagag

SEQ ID NO: 321952 - DNA, 1123 bp, Cannabis indica
tttctctttcttccttgctcgaccaccacaagaccaacctagacttgggatttttttggtataattgaatgagagctagctgaaaacaagtaggtttgagcaaatgtaaccctagagcccttaatcttgtgttattgaagctttgattttggttgaatatgcaaagttgtgagtttggcgctgttagggttatgtttgtttataattcggtttctacgtttaatttgaattgattttgatgttttgttgctggtttggaggtttggtgacatggatgcacaagtttgagtttgaaaactcaagcttggttcatccatggcactttttgattttgtgtgaatttttgggttgtgttggttgatgttattgtaagtgttctggaaggtttggtgagaattggacatgttttggacaggttttgaattgtttgggaaaacctggtgcaaaccggttaaccggtttgtcaggtcctgtaaaactggttaaccgattctgggactgatttctcgaataattcttttcatcaattcgtgtccattcagagccttggttgggtgggtgattccatgtttcttaggatattatagtttcagttgtctatggcagaatctttagttaaaggttgggttttccagattagggttttggacatgttatttacctgattatgttatgtgattagggcatccatccaacacgaggattttcgttcaggtcagccaactctcttgaattcagaaatgaggtaagaatagcgtagaacatgtaatgtatatatgcgagtgtatgtatgtgtgaaatatatatatacatgcttattatgcttaatacattaccaacacttgtacggaagtgatacaaagtgcattggtatagtgtacaatgtttaagagtacattacggtgttactagcacaagtacgggaaagtacagggtgtgtgtggtatatcacttagtgatactcagggtacgaaacaaaccctaccaacacacgtacaatgtcggtacgtagtgtatgtggtatagttgttgtaccctagtaaagaacgttctagctcattcgttaagccttgtaaataggtgtatgggcgcctagatacaagtcggtattatattatttgtt

SEQ ID NO: 321953 - DNA, 1034 bp, Cannabis indica
aaaatgaaataaaaagacttggaatgatttgagcaattgtaaatttacaacacaattaattttactgattctccaagttgtatagattataaaagccgtaatggtgttgttaagttgtaaatttgagtttatgaaatacaatgattttgatttctcaaaaatactactactaataataataaaatattcagtactacactaaacttcaactacaaacgttaaaagacatcatgtgtgtatatatattttagagtaatttgcagcaaaaactcccctaactatcaacttacttacaaaaaaccatccaaaaaactttaaggttagatggttttttgcaagtaaattgatagttgggggattttgtcgcaaattacttttaattttttttttattttaattgctcattttaatttttattttgtaaaatatggccacgcaggataattttttagtgatctgtcattgccacgtaggtaaaattagaacttaacgaagttggacagacgacaccttaaaaatgtaaacggaacagtactttgtaggattttcccactaaaatatgatgttgaatgattttttacaagtaaattaataattgaagggatttcaccgtaaattatttaaaaataaaattaatattctttttttatcctagagaattatttatactaattttgtataagactataagagtatttattacaatgctctggtctggtgcacacttgcttagattggcttgaattgtaataggaatgtgactggccttccttgtgagttgaccaaatcaaacaaattataatatatagtttgctatttgctaaaaaatgagcatatgggtcaccactacttaccacgacatcatcataggacgaaagcctatattataaatattagaattggaccatgttaataataatatttcagtatatactttacaagttatttttcatttggtaattggcagaaaaacttctatccttcatttttttttttgtaatacttaaccttctgtttaatttcaaaaaaaaaaa

SEQ ID NO: 321954 - DNA, 1900 bp, Cannabis indica
acataaataaatggatcttccccctttggctgaaaaagttaccattttccgtttacagttaatgttggccgaatacttggacaaaaaatccattccaagtataatatcaaaatctgttagtttcagctctactaagtcaacacaactccctattttcaatcctaattggcatagacctaattcaccttttggagataaccaattctctgctaggcagtaggttcccgaaccctattttaataaaatcaaaaggcctacccaattgattaattactctcgacgccacatatgagtgtgtagcctcagagtcaaataatacagtaaaataggagttgttgataagaagttgacctgtcacctgagcagggctggctgcaacattgatttgagtgatagcaaacacccgagcaggtacaggctccgcctcttacttctgctctattttctttgtgtgggacccttatggttctgtatgaagtattctgcgaactttcaatcaatcttctgtgttctcgatgtgatcatcgtggagcaatatttcctgaggatctttcttctagatgtagggttcggtggggacctctccaagtagttttgggggaggactctcccatacgcttgatatatttgttagtgtggtaattaactacttgtcttttttccttattcttttttagttgctatcatggtcgatgtagtccaagctgatgagtcgttctggtactttcattatatgtcagtcaagatagagggctcgtccctcgctttagaccaaaatacaaagtatgcccgaagcaaaatttatatgtgagtgaggaaaccacgtgcgccaagtttaatgttaacttgggtgatggccaggtgttttggccaccaaatggtctcatttgcttcccaagagtacttgtatattaattagtgacaaaaaaaaacaaaataatgtctagaaaacttcattggaaaagttcttggaagtggcctgagttgacaatatgtcatccttgacgctggtgaccatgccttgtgccaacctgggcgctaggttggtcgttcggcccaggtgactttatttgttccccaaaagcacttgtattcggacgaagacaaaaaaaaaatgctcgaaaaacatagtcataaaagtagttggaagcacccttagttcacaatgacacatttatgagtcatttaatatatttagagcatctccgatacagagctataaatatggtgtattgctattttttagaatattttactaaaagttaactccaatggtgaggtaaaatgtgtgtcaaatttagctcaagctaaaaattatgccaaatttagtacaaaaaatagcatgtaccaaattttggcccacaataaatgccacattttttaattacttatttgtcactcattaataaaaaaatatttttatatttataagttattaaaataatataaataaagttaattttttgtatattttctataaatattaatggtattataaatttttatagctaatttgtactttgtgtattgcagcataaatataaaaattgggccaaatataattttatagtatattttagactaaatttaatccaaaatataaggcgatctttatatcttatttaactaacttaatataatttacatgtgagaaatttcaacgagatagaaaagattatctaaaatgccaaagtttttctcattcccacatcaacgtcttcttctgtaaggggttcaagagcagttgtctgagagtggttcagttcggcccaacgacatcctcagttttagatttttgttttcatttattaatttactattattagtttaattccaattaatgttttttatggggttagaattataaggacttcattccttaattaattttaatgttgtg

SEQ ID NO: 321955 - DNA, 1253 bp, Cannabis indica
tcattgaatgttaatacatacaaaaatcttactttctacttaatttacaccgtaaagctacagtgtcattctttcagtttcatagttgtgactcactcatcgatagatatttaaaccacgacacttagaaataaacatagaaactctttaataggtgttttatgtataaatatttaatgatctatttcgaccacctttttatctaacgttcacttcttaatttcctttatccatgcatcgttgcactagtcttgccttcccattttcccagataatagtctttggatccttttgttgtctgatttttgtatcactctattgtattttctttgctaatctctcctatggtgcttggtactccattactcccttcaatcaagttgacttgattatgggattagctagttttccacactaacttttgtctactttggtattacattgatatagtggtgaaatttaaatctgtaatgctgacatttatgtttaatgattgcttcctttattatactaaccctctaggtatcacatcacttcatatttaaaatacaacatatttttctagccatatttatgtcttgcatattgtagacctctttaattcacaaaacatatcccagcttcttaattgcactggtaaaacctccatatctctaaaaccaattcaattataaaaactatttacttttaattatgatcataacattaagcgctaaaacatcataagcgcactagtaacctttttaaaaatgagttcaaccttaccatgagtagcttagcccaactatttatttttctttgaaatttaatgatatgttaaccatataatgtcataatacattaatcaatcaagtttctagggtaaggatactacatagatataattggcaaatcatgccgaacaaaccttactctgtccattactactatacctcctacatcccgacttgtacctaattcgctactggaagcttgacgatttataattatttagttaggtgtaacgccctaagatttaggcacgctacccaatatgattaagaaaccctaatcccctaaacgggattggttttaaaataagcgcggaaattaaaactttaaacgaaaacgaatgaaaataaacttgtaataattttaaccttacaaacaaaagttacatgtttcgggatcccaaaaaaaatcattttacaaaatattacaagtcttttctccttagccgacctaagcggtaaaaatagagttacaaaagtttc

SEQ ID NO: 321956 - DNA, 1794 bp, Cannabis indica
tcttcctctttggctgcttgttgctgttgtttcttcctcctttgcagccttctttatctaaaaaaaaaaaaaaaaaaattgtaactagaagggaaagacttcccctccaagcttatatccctataaatagtgatccatactcactgggcaaagggtcgaaacttctgtctaagaattcatattcagagtaagaaaaggaattattctccttgttcttaactcaatacaaataacgaggattaggctattaccgaactcctcggggctgaacctctataaaattcttgtgtctttatttgctttattatatttcactcgtattaaactacttgtcgcttacaaattagactcattgtcgttggctaacagcaaagtcaacagacttttttactagaattggacaaaagtctttaaatccaacaatctcaattgttcagggggtatttttaacgacctttaaaaagttcagagagcatgatttgatacatgtcaaagttcaagggtaaaaattctaattagttttttttttaatttaaataatttaaaatttaaaactaaaatcatttaaaaatgatattattaaaggtaaaacttatttttataaaaagataaatactattttggatcttgtgttatgtaaaagttactaattggatcttttattttgttaaatgacaaaatagactctatattttctaaaattgtacaaatagaatccttaacttttttttttatgaaaataaaccttaataataatatgataataaaactagttacattttctgtatctattcgtattaaaaatagtcttaaaattagttatattaaaaaataaaattgttaaaaattgagttaggttattattattattattattattattattattattattattatatattttttaaagacatccacaattattaaagatgcaatttttcacaaaaataattaataaggtggtggagtggcaccaccactttcatttatcaaaattttgtgattattatttttgttttgagaaaaagtttatattttaactttcaatgtcttaccagactgaaaaagacattttttttaagagataaacattaacttgaccttgttttctcacaaggttccagatctttccacaaccttcttctcattccttactcatcgacacttatattccccttcaacccattcgttcttcttcatcttcgtgaagtattgacaagttaattctcttattcattttctctccttttctcctttgaaagtttagagctttgtgatcataccaatggcttcagaagctgacgcttcagagttttcttccttatttgagaggatggtgaggaacagagacttctctctgttcttacctttcatcttcggtctcccaaacggtgtcgttcaaaacccagactcgcaagatcaagatagagaaaacgacagcgtaccaacttctggcggtgacggtgacagagtcattctgatcaatccctcactcaaggcatggtcgtgttcgacggggtttcgagtttcgattcccttctgcgggatttgggtaacaggatggtcaaccaccggcttccaaggcgtccatgaggctagtgccaagtgttgtgattttctgatgatgatgatgatggtgagactgggggagggtgtgatttgcttggatgaatttcaagctggtggggttgctaaagagatgccatgtaagcataggtttcatggggattgtaatggaaaagtggttgaagcttcatgggtcttgccctgtctgcaggtttagatgcctga

SEQ ID NO: 321957 - DNA, 1141 bp, Cannabis indica
attatgagggaagcggttttgcgaagcgaggagagagaactctaagaccctaggctgaggaggtcgaacaagaggattttcaggccaattctcaacaacagtggaagaaatttactggtggtaagatctcgtatgatgaacctaaactagcatttatggagcctaaactacaggattagaagaaaattccaaaagccgatgttgaggaagttaagattcaaacaactaactggagttctgttgttgtttgtatggtgcttggggcgaatccccaggcttcattaaaagagtttgggggaaagtgggaataactcaaattgttaggatgaatactagtttcacgattgtgaaattctatgatgatgtgactagggatcttgtacttgaggaaggagttattcaatttgatcgtaagccagtgattgttgggccttggtcaactgatctggatgcgcttagattggtaagatcaattcctttgtggatcagattacaagatctatggttgtaatattgagagaacaagaacttgagtgttgtagttagcacaattaggaaaccgataatggtggataaagttacaaaagagagatcaatggtgagatttccaagagtattagtggaaatggagtttgctgattctccacctcgaatcattcaatttctcaatgagaatgggcaattggttgatcagggtgtggattatgactgacttcctataaaatgtaaagcttgcgatggttatggccatggaatggcagactgcatgaaagatgataagtgtaatgccctatcctatagggacaccacgtgtgtaattttatgaactagtttagtactaataaaataattaataattaaaatatgagataatattaaaaacttcactaaaataaaatactaaaaataaacatcataacagcactagaactgtgttatgggtaaaagttttacaaaaaggggaaatttgataacaagtcaaaagactatatcaaaatatatgacatgtactactcaaaaaaaactcatggtaactcagcaaacaggccggtatggtcaatatgtacattgctggagaagactgtcacctcatggctgctctagctttttcttgcctttacctgcaccacatagcacccgt

SEQ ID NO: 321958 - DNA, 882 bp, Cannabis indica
atcaaaatcaactgtgatgtcaaagttgggggcgaatccatgtgtgctgctgctctggctagggaccacacaagagctgttctatgggctgctgtgtccatggtcagcttcagcgactcgttcattggtgaggcagctgcttgtcggcttgctcttgaatcggctgggatcaagaatcacaactacgttttggtggagagcgactcggatctggttatcaaggcactcaaaggaattcactctatttggaatattgataactatattttttcttgtaatcatctttctagaaattttttattttgtaatttttcgtttattccttgcttgtgtaattttgcggcccataatatggctaaatgggcattcaccaagaacttaacaggtattgtggattcgtccgtcattcctgaagatatcctgtgtaacgaccatgaggtctaattttccttttatatattcagtcttattttcaaaaaaaaatatatgtaatatatatgtatataaattggccttaaaaaatataataaccccaagatatgctctgtgaagagctctctgtttttaatgttatttcagttaaactgagccctttggtggatttaagtgatttaattataaatattatacaacaaacgtttgtcatgtgaaaacatttgtcgtttttgagaatgagaagggaaagcaggatgtaatattcttcaatccaatgcctactttctcttcctctgattgccttttacattacgttctgataattatgtaacggaagtaattaattatttatataacaccaccgactaccataacattaccatgtgagttgtgacatctatttttagttttcaaataaatctagcaattaattaccaaaaaaaaaat

SEQ ID NO: 321959 - DNA, 538 bp, Cannabis indica
aacttttattttgacaaaaaataaaattaagtattattttgtactatttttttgtcatttaaagaaaataaaaagtcccattaataattttaaaactattgcatctaccttatctttaaagttagctgcaacatctacattcattttaaggatattaacatcaggtggcttacatggtatctcatttgttggcctcccaatattatttgaagcttcttgctgagccaagtcatgctggtgcgacacgtaatgaaatgatattaatttacccctttgaaaatataaaaatcaatagaataatcgaaatttaagtaactcaattttgggaaactatacatatcattttagacgaaaaaaaaaaagaaacttgagtacgcgcgtgagatacttcgtgatcaagaaaattccattaaatttgaatttaaatttatgtcggttaatttcaaaataggtgagtggcgcctataaatatagattaataaacccttttttttaaccctaaaccattaattaacagagaaagaaagagattgtattt

SEQ ID NO: 321960 - DNA, 954 bp, Cannabis indica
attatagttttttagtttttttaaatcagctagtctaattattttttttttttttgacgttttaagcttgaatttcattactttacaaattcaaataacatctttaacagtggctatttatgtagcacttatatgagaatctgtataaatctataaaatgaaaaattacaaaaaaaaactcaaaagactagcaataatagaaaagaaaaaaaaaaaaaaaaactaaagtgtgagttttcaacagtaactcttttcagccgaacacataaaatcttacttttgctagcttttttacaaactgtacaattacatttagattttcaatgatggagccccaaaccttttcattttcggcctgctagatgtgataaatcaggatttctacgacagccaaaaatgttagcttcctaaacttagaaagcttttaatctttcaatccacctcagcaggttagaaagagcagtatgagacacacttcagtattgtgaataataatatttactctctcaaatttaccgtcttttttctctttgagtctacccctatttatagaaatatcggttggcagttgtttttctggggattaatttatttataactgttaatgaaacgaggacaatttccaagttaatttcatttaatcatatatgggataatatctaataactacctaatcgctctttatttttatccattagatggttatgttgacttgaaaggttgtgtctcgtcacacatgagctctcctttttgtccatcttgatgggaaaaaacgctaagtgttagaaaataattcatctcatcatatccctttattggtatattaatactacaaggtaatcttcacgctatgtgtgatgcgaggcggctgagtgttgtcacttattgttgggaatattttaccacgatctagatttactaacaagtatgttgaattaacatcctaaatatgaa

SEQ ID NO: 321961 - DNA, 882 bp, Cannabis indica
aataactaataataatctatatatatataaagaagaagtataaaagagtgacatagcattcttttctgctcgttaattctctaattttattaattttttaataagtgcatatatatattaattaaattaatttaaatttctctccttgatttactattttttttaaatatgttccaaattaccctatcaatatcaacaacaaataataataaataatctaattatttatttttaaaagaaaaaatactcggttagacttaaaaaaatatattgttgatcttataaaaaaaatactatttctctttcgttatataaaaaaagccctaaattttctaaaccttcaattttcttaggtctcagccgcacttttctttctcagccgcaccttcaatggtttcgtttaaaatggtagattctttaattcccagctgttaagggagattgttttgtcagcaatgagaattgctttcttggattgtgttcttttcgttttctttcttcagttgtcgattttggtattgaacgtgggttggatcttgatttgggtacatatggtgcattgattaagaagttagttgatttgtcgttatataattcactgttctaaatagtgtttctgtaaaaaaaaaaaattgggttaaaatttaagggcatactcattatctgagatcagtgaatagaaaaagaactgttgactaggtattgctggatgtaaatatccaaaacaaccacgaccaactcccagccttctcttaagatctataaggttgctgattgggtgcacaacctattcaaaatgagtaactaaaatgatatacatcccatatagcaagaaaaaaatcttctgtcccaaaaaccatgtctccaccctgtcccaccaat

SEQ ID NO: 321962 - DNA, 646 bp, Cannabis indica
cttattgacatcacccaaaaacttcatcatgtatgggctatacccaaagcctggaagcccttttcctgagaagactgcacgaaagaaaaagaagaagaccaaggttggcagggtcaaacctactcccatctaggtacccatccgaaataatgatgcgcaagaggctcctgtttgtcgacacgcgcaacatgttgaaagaaaagggaaggccattgtcaaagagcttgaggagtcatcttctaatgatgacgccccttcaaattttgtccggaaggagtattttagctattagaccacttgtgtttttattattttgactaccaactctaactctctttacccttttttagaaatgtcgaccaggatgaaatcaaacttcaaaaggaaagtgggcgggtcttcaggcaaggaaagcacgagtaaagtgttgaagaccgaccccaaagttcatgctcaagaaggcatcattgttaatcccgacctagtggtgatcgagactaaatcttcttcggccaagaactccaatgtccccccatttcctcccaccctaaaaacttagagtgttgggttttgtgccctaaataaaacccatttcaatataatcagatttacttattaataaagatcagaaataacattttatgtt

SEQ ID NO: 321963 - DNA, 576 bp, Cannabis indica
caattggactatgattaaaatcagatcattagatatgtcaacaagttaatcatacaatttagaatcaaataataataaggtttgttaaaaaaaaattaaataaacaatataaatataacaaacaatgtccatgtaagaaatgtgaaataagaaaattattactcatataatttaattattatttaaccaactgatgagtgtgtaaaattgcatattattaagtgtaattggatgaataattagaattaaattatctattttgataagtttaattgctaaaattatttaacttcgaaatatttgacttaatctaattttgtgttaatttttagatttcgtacacaaattggtataattgaaaataaagaatgtgagcccaaataaattggttaaagtcccaccgcatcccaaatttttttcattttcaccatttagggctattttcaaaaatatgggaaaaattattaagattatgataaatatgacataaaaagtaaatgtcactatatatgacattatctaaccaatcaaactaaaaatatgaaaaaaaaaaaaacatataaaacattaaaaaga

SEQ ID NO: 321964 - DNA, 2467 bp, Cannabis indica
ttatttgatccctaaaaaaataaaattatacgaattacaattaaaatctatatgaccaacttaacgtaatatttgattatacttaatagcatttttattgaagtgttgtatatatatatatttttaataaaagatggtgtttattcaataactttcagtagctacaatagcccttaaatcaaaaagaacatcagtctcactgaaaatacaatctgactttaaacaagtccctcttgcaacacaatgaacatccttgtttgcaaatcgtttaacaaaaattaaagaaatattatttaatgtagaaagaagttctcgacaatctctagcaatcaaaccaaattgtgatggcatacgtatcgaacttttgattgcttgaacaaccatcaaatcgtctatctcgatcaccacatttacccaattatttctttttatccaacttaaagcctctttaaccttattatttctgccacttcaggttgaaccaaaccgatacggctcccagaaatagcttaataagctgtccattatgatcccttgcaacacatctaaacccaaacttattctctgcttgaaaaatggcaccatcaacattaaccttaatcgtgttcaacattggtttcttccagtgctcattaacattattaatatcatctattaataatgccccaattttttgtgattgagcacttaaccattggtcaaggacgactctagccgatcgcaccacatcatacgctgaacaagttttgccattccacacacgatcattgcgaactgcccatattttctagcttaccatggctgcttcacgcacaacttcagcaggtttagaggcaattaaatcaaaaagccaagtgctgaaatcacagtaattcgcaccagcaacgttcaccacagattaaaaccagcaagatctactaaagctacaaccgagaaggatgtgaaatattatttcagtagaaaagttgcagataggacacatcatttcaatattcacatgcttagtgttcagttgtaccttagttggtaggcatcccgatgttgcacgccatagaaagtgctgaaccttttgaggaatatcaagctgccataactttttatacccttctttgttctgtacaatgtctaccgatgcaatattctgctgcaaataagagtatgcactcttaattgtgtagagacccgaaggagacttgttccaaaaccaaagatcatcttccaccgaatcgctaagttgtatagacaggattagctctttatccctctcctcaaataagtcattcaacacctccatatcccatctcttctgcccaaccgaaagtagattagaaaccctcttccctaccaatgtaggatgattggagataatgtagggattttgattatggggaagccatggatctctcaaaatgctaacagaagtcccgccctcgattgatcttcttgcaccagcacacaccaaatctttggcttctaaaatgcttctccatataaagctgggcaactgaccaatttcagtcgtaaggtagttaccagtagggtaatatcttgctttatagatcatactaaccaaagagttctcattggtcaataatctccatccttgtttaccaaggaaagaaagattataattacgaagatcctgaaagccaataccaccctcattcttatgacaacaaagtttcttccaactcatccaactcactcccttactagtagaattggattgagatttccaccacaatttagacatcattccttcaagattagaaaaaattgttattttaagattttttttaaaaatagaaattcaatagtatgttaaaaattatgttagctttttttaatatatgttataagtttttataaatttaagaagataaaataatacttaataaatatactttttatttaagttataatatttttgttagttattttttaaaaatatttgatttatttattattattattagatatttttatttgtttgattgtacaaaagtaatttttaaaaaattatttactaaatataatccttgctccttaccaaacatatttataacataatatttattttttctaataatgtttacaaattttaatcaaataccttcaaatttttaaaatacccaaggtacaaacataaatcactctcttaccaattgtgctatatgttcttttgtgaaaattattgaaccaaaatttatatatatatacatatattatatttttatttttatatataatattaatttcaattttttgggcctctaaaattgtggggcctggggcctaggtcccggctgccccaccctctggccggccatgtgtgcaggattggacaccctacagccatcccctaatccctactttctggcaagatttttatttggaggtatgcaactgtaagtgtttccatgttgattgtccaacaagtctatttcttttgaaatagggaggctta

SEQ ID NO: 321965 - DNA, 685 bp, Cannabis indica
tacttgtaatacatgagccaacacacactttcatcctctatgttaaagaccaatgctaaagtataatcaggtattcatgatcccaacattcatagtgatttctaaagcctagaaatgtttcaaaatacaataccatatatcatcaattataaaattgtttgagttttatgccataaataaaacttaatttcaatataatatttttattaattaataaaaatttaaaaattattttatattgcttggttcacaaattatgtaacatcttactaaataggcgtgttaacgtaacttcgtataatattgtgcaactgaaccatggaaacttaacttaactatctaaaatcacaaggaaagaagaagaagaattaccatcaataatatgaaaaacctagctcaaatgatcccctaattccttagaaaagggatcagaaaatctagttttccttacttgtatgatcgacccaaagagagagtgataaccaaaaattaaattttctaagtaaataaaaggatcatcaatcctaattttagcgtatatctatctaataaaacttgagtttaattaaaaacccactaatttaacaaaagacaaagttgggtgaaatgacaaatctaccccttgcataggaataaagtaaccaacaattaggggtaaaatagtcctaaaccaaaaccccaaaca

SEQ ID NO: 321966 - DNA, 2025 bp, Cannabis indica
aaacccgtccccaaactactaacatactaagttgtgatttctacagagccaaacgccgagttccaaaataccgggcaccggaaatgcaacatatgaaaattactgaataacataaccatgcatttctgaattccataaataacagtaataaattatttaaatagctataaataatttcataattaattataaacaactgctagtttccaaattaactaagcgggctttacaggcttagtgcccaggtcaacaaatggcctagttcgttaggtctacttatctgaatctgatgccgctttgaccgtccatctattttttcacaagttaaatgatccatgaagtcagaataatgcaattcacaaattcaattttttggcaaattgactcacctaaaaattaaaaatttcgagtctttcgtgtttgcaaaataacaacatctccaagaactagtgaccagctttgccaaaaccagtaaatcgactatgtgatgtcaatctattacttaggaatctctaaggacatcccttggatgtttttcacttatacaatgtctaggttgacattagatgtcaacctaggggttgagacctaagttgtcttcagtaaaatggacataactcatgcaattcaacttgcattttgaagctatttaaatgatctatcaagtcatgtctcacaccgcagtcgtagttctgaagatatcattaaaaaaatttactgctaagggagctataaaaataagctccaagtaacccgcaacaagacctgccagggaccaaaaattggacatcaccactagaagctaattttcaccgttagatcatcatcaacagtagaaaacaacttatttgtattttttatcttatttttgttggcctccttcacctataaaataagaactcccttatctcattttacacattcagaaaactacccacatggtcaaagcatctctctagcctttctctctctagagtttggagtttttgatacttagtccattgttgtaattaccatctcctgagaaataaaaactcgaagtagacgtagccccattactatcgcgatataggggtaaactactataaattttgtgtgcctatctaaattatttatttaaacttatgaatcatctcgccaatctagcaagctgatgttggatattttttagcatcaacacttaactatatctattttaaaatttattatttgattattttaattttataaaattataagattagaaaataatatagaaaatatctgatttagttatatcatatcatttatcttattagatatttaatttaattttataaaataatactaataaaacctaaattttttaattataattcaaatttgaaattttgaaaaagatatttttggttgttttaacaactctaattttaatcatgtaattattaaatatctcaattcacaattgttacatgtttctttgtttattaatttaaatttatttttttttaaaaaatattattcaattaatttaaatagttatgattaacttgttagtggatctttatccaaattaatcatggtcaattattaataaatcaataaaataatttgtaagaagtgtttttcacatttctttcatccgtgtcataaacctagtaacatgatattactcaatgcatatgtaagcctatattttgcttattggcttagatgcctatagaagcccatttaatttttggatatttaaatagactaaagtttctaattaaattggatcacattgacagatttaatttggacacaattagaattggacttattcaatgaatgacaaaaattttaataaagattaaattcctctcttttgggccttgtgtgagagttgggggccaatagaagtgggtacgacatactgaacccagctccccctcacatgaactaccccaattgtgaaggcccatttgccttatttaaataattgtattaggttaattatattagtctaacctaattaaaattgaattagcaacataattaactttt

SEQ ID NO: 321967 - DNA, 2905 bp, Cannabis indica
aagcagggttcaaacagtgtgttttacacgcgagtattttatttttatatgcgtgtaaaatagattatttgaacactactttctatattgtaaattatttcgaatttctcaaaattttataagatatcttaaataactataacgtacactaatatgaaaaaattagaccaaaaaattcttttgggtgccgaaataaatagagaatgtattagtgcatctcttttaagggagtacattatagaagcaccctataaaagcaataccctataaagagttatatttaaaccctatatataaattcgaaaaattctacaatgcactttttaaaatgggtgcatcgatacactcgtatctgtgtcggtattcgaaaagattctttaatttaattttttctcatgatcgtgtacgttgtagttattaagacatcctgcaaaattttaaaaaattttaaaaaaattaacacgccaaaaattaggttcaatagtctattgcatacatgactattttttttttatatgcgtgtaaaatagactgtttgaatactgcattctatattgtaaattattcttaatttttcaaaattttagagaatttcttaaataattctaatgtacacaaataatgaaaaaaaaaattacactaaaaaattattttagataacgaaatagataaataatatatctcttttaaaaaaatacattaaagaagcacctataaaatcaatacacttcatttgaaagataatttatagttttttttttattgaataagaaattttattgctcataaccaaacttacatcatagcttacatcacatttttacaatgtttacaactattccatcaccaaatataatcatgtacaattttaagtttccaatatccaatctatgtcgtccccccttgcttttttaggcggccatgcttggatttttagcttacttagctgcttagccttctgtactgtcttgttggtgagccactgttgctggttctaaagtgcttcgtttcttgtcttccatatgtgatacacaagactagccatgactgtgttcaccatgctcttccttgatgcagaaaacctttttgcttgatggcaggattgcagcagcttgaaaatatcacctgctggtgtgttccattgcaggaaccctttaatttcttgcaagcattttgagctgtattcacactgaaaaaacagatgctcaatggtttcatcacctttgctacacagaacacatgttgtgtctatgttttggaaacctaaggatttcattggacctgcattgtacatgcatcgggctaacaaattaatttttaggaaatgttgatgtaagtaaataaaaacctgctcatgcgacaaatgatattagggatgttcataaaatagtcgatccaatccaattcaatccgcaaagtgcggatatccgcacacttgtgcggattggattggattaaaattcaaaatctgcacttatgcggattggatgttgattgacatataaaagtaatcgatccattccaatccacacatttataaaaaattaaaagattatatatacaaataacattttaatttaaagaaaatagtaatttaaaagtttaatacatataatacaattatattttaaaacttaatagatcaaatgtatattctattctaatatataatttgtttctatatacaatttaaaatgaaattaaatgtttctttatacatacgattttttctttatttaaatttattatttattattttatttattttaatgtgttgttggagacataaaataactataatatttattttgttgctagttatgtgaaaaaaaatatatttttttcataaatattaaataatttaatattcataagtaaccaatctaaataaccgatccaatccgcacttttgcggattgaattggaatggaatttgagctatagtgtggattggattggatccaaaaaaataaaatccccacttagtgcggatcgggcgtactatgaacaaaatagtgcggattgaattggatgagcacccctaaatgatattgtttaacaaagtctaacaagaattcaacaagaaaatgtaatatacaatacataacaatacaattactaaaattcaacaagaattttaacctctataggtgcaagactttatgttgtgccccttgccaccacacttgttacaagttcattttatcacaatcctttcaccatcacaagcagttcggtttgacttacttcttctaaccttttgctttttgggtcgccttagtggttgtgtctcaacaggcactcccactatcatattctttatgtcatcaggaaattctcaatcattctcattacaaacttgcataattgcgccttcatatgtgctcttccaatattttgtggtgtaacatggcgagcatagtgcgtacatgttaatacttcgttgttgagctgcaacacatgcatgaggacaagaacatttcatgatttggaataaagcgcaagtgtaagcttgttccttcaagtccattatgacaccggtctcaactgatcctccagggtggacattcaacgtgtaagatccacatgtgtcaatgttcaaatattaatatttatcaaactgccatgccaagtctgcctccatttatggtgatagggtcttcgtccacttctcagcttttttttttctcgtagcaaaccactgctggactttgaacctcaggaattctacagaagcagtgatcggaaaacctcttgagtccttagttggttgttggatatattttaccaggatctagattgtaatgaccgctctagtatatggattagtaaaggcatttagcactaatttttattattttattattatttgtgaattaatttaattgtggaccccaatatttag

SEQ ID NO: 321968 - DNA, 1003 bp, Cannabis indica
aacaaatttatttcatacatattaattaaaggctaattatgtaaaatctcatgtcttttttgagagatgtcaaacctcaatggtttttgaacctttagattgatggaaattattttatatcctagggttgtatatctccataaaaaatttagtaaaattagtaaccgagtaaccgacccaatataattttattattgtatatgatccattaaaaataatcttttaaattagtaaagaaaattatatttttacttagttatctatttttaacagcaattttatttatttgtttttgagaaatattaaggagcaccctaagatactaagcatcacaagatgtggcatactgttattggtgcaattcaatatcagggtctcacatattttgatttaataaattatataagaaattgttacccactaacaatgcatcacatttgtatattgggcaccataaaataccgaataacaatactctttattgtttgatagaactacttttactatttactgttgttatattatttaataatataatatgtaaattaaaatgtggtaatatatattcttatgcaaataatatacattaagtgtttagtaaataaagttgtgtaatatataatttatttaacctacactttgtaacatagacaggagtttggttgatcatatttttgtgtaataaaagagattttatacaaatttgatgacagaattcaaatgttatgaaatatagttattacaaaatatattaatactcatttttatgagaaaaatgagatggtgtgtttgaattctaagtgtgatcacctaaacactataaaaataagtctttggtgctcatttgggatgaaccaagtttctctcaacaaagcactttgctagaaaaccctaaggcttgataattcccaaaagtattttcatgaaagttaccttatagtgcttagagataagaagaaataagtttttagacaaatgtgtaatactttattcaagtcatggt

SEQ ID NO: 321969 - DNA, 1918 bp, Cannabis indica
agagcacccgtaagccaagcccagcaagacagtataaaatatcaataacatgtttatcacactatataaacagtaatgccattctcatatgcctgtatgacacagacctgcatgttacgctcacatgcctatttatgtatacgtagcgtagacctacgtgttacactcacacatctaaatacaataaggccttaaaacggttcatctcgattctaattaccgagtccaacctggttatgccttgaacacataaccctaaatcccaatatattcatatacacaacatgacatagcatttttacaacatatatcactagggtaataaccctaggctatcaaaccgctcatggtaataaccctaatcgttattaattactcacatataccatttccaatataatcgccaccgtgcataactctacatgctaactactatcttacctgatgtcctgcaatagtagagattccaaatccccagttgctcctgaccaggtgccggtaatcctagtcacaaataccgagattttcacaaaaagggttaacctctgattccacattcataatatatattcatggcatttaaaatttagataatcacatagagctcggaatgagctttccaacaatatatagaactccgaaatcggagttcagatcacaaagttatgcattttcaaagttacactcaaatctgcccaaaaactcgagggcgggccgcggcatgcaaaaaccatgccgcgacacctaggaccaattcccatgtccagaaaagaggcgggccgcgacatgccaaagaccatgcagcggcacctgggttccaaacccagaaaccagcatgcaaactcacgaaaattcaacaactaaacacatccaattcaccccaaaacataatcaaactcttaaatcattaaataaagttgctaacaattattaaagagtcaaaaatacttatttcatgcatcaaaacccacaataaaccccataattttagattgtaacaatacccaaatcaagcttcaaactaacaaagttcaagctcatgaacttgagttttaaatccttcaaccccaaatattttccagcaacataatcgacaaataaagaccaagttcgagcattagaagcaccctagaatttcatttatatttcaacaatagaaaccaccacaagatcatgaaattaatactcaaacttatcaagatttaacattcatgcaaccaagaacattaaagcctagaaaagcatgactttcaatttttacttcagccacaaatcacaagttaaggccatgaaaagtttacctcaattcaaactcaaacacaagcaccaaaatccacaattttcaagcttcacaccaagcagtttctcttcaatttcaagattgaaattcaatgagggtctgagagggagaggggctcgggttttgggggaaaatcagtcagaaattctttttcattttcttaaaatccatcacatttaccaaatatacataaagatcataatgaccaatttgcccttagggctaaaaaggcatgcacacacacacacataaggacatttaggtcatttcacacacacataaatctaaacatattttcagattattcatcaataaataaaatgccaataattccatttcaaattgcagttcgggcccaaactcgattcggcccgaaatacccgattgtgactataccgcgccaacctatctaaacacacctgaaaaagacaacacagtcatactatataataatatagtcccataagcacgttaataaattaattccattattttacccttctcgggtcaaaattactaaaatgcccctggctcaccaacggggtcttaacatagcataaatcatataaaatttcatatattgaattatataataatataatttctcaataatacata

SEQ ID NO: 321970 - DNA, 784 bp, Cannabis indica
ttcaagttaattaaagtcgtattaaattcaagaaataaataattaagtgtagagaaggcttaattattaatttcctcatgtaaatcaccttggagaaactcgttactaatatccatgtgatgtaaatgccaatttttaatggcagtaagagagaagagaagtttcaaggtattgaatttagcaactaaacttgccttaaatcattcaatggagcaatcttggttgtatttgattttgtatacccatttgcttccaatagcatggtgaccatcgggaagggtaacaactatccgtgagtggttatcttttagggctttgatttagtacttattgcattcctccaaactaagtgtttggaagcttgtttatgaagtaggtccaatcttttgtgatgctgcaagaatggacaaccttgaaagtactggatacttttgttatacctgatttttaaaaaataaaaaaataaaaagtcaatcttgtgactttgaccaagacttataaatgtcaaataagttaatacatccatcttgagggtcccatggcatctctaggagactcaaaaacaatgaccttccatttggtgtcgggaatcacacactcgagtgtgcccaaactagggtttatgggctcgcatgagcgttttcaccctagagaccttaatccgacaaggaaactaataagaacttaactcatttaggtataaaaaggcttagacttgaacataaagtcaaaattgcacaagaatctcatgcaatatgacttatgcaaccactgccacatgaag

SEQ ID NO: 321971 - DNA, 558 bp, Cannabis indica
aactaattgatccacatatttgtacgtggagagaataactacattcatcaatctcgccctctacacgttgaagtaatcaccttgctaataccatcatgcctccaaaatgtttctagcacatggctcccggtcttcacaattaaattctgaatcatctccctttagcctacgagagacattggctatgtcttttcggaggattgtaagttcagccagtattctttcattcaaggcaccttccgaaactggtattgcttgtttctttttctcaaagtgattcctgaggtcacttgttattgagcttttatcttaaatcagcaaggggatgcttgtgatttttccttcctctttcctcgggctcttgatgcacgaattgctctttcggtcctcctggtctcgagggccagtgctctctaaggagcctccccctttgcagacattttccttttgggaaatcggagcgaacctttcgtggatcttgggccttattgttctttttagggctgaacatttagacccgcaaacccaaaaaatccgaccacctaccccgacccgctg

SEQ ID NO: 321972 - DNA, 846 bp, Cannabis indica
cctacacagtctcagaatcatcccacttgaccttccccagacgatgtgggattgcacagcttacccggtgtttccccttacagatcacaagactactgactgtcacaggttcccgtggaaagagtggaaaacgcggcaggggtcgtgggggtcggtttggagggcccaagcctatttgccaagtctatggcaagtatggccactcagctgcaatttgctacaatagatacaacgagagttacatgggacatcaaccaccaggagacctgaatcaagataaacagctcaatgcacttggtgctactccacaggttttaaatgatgataggttgtatgtggatagtggggcaagcaatcacttgaccacttatgatggacagagcaataagactgtgtatggtggtaaggagaagattactgttggtgatggtaataagctgactatatctcacattggctcaagtcaacttaaaactatttcccattcacctttagttcttaaaaatttactccatgttccaaacattaccaaaaacataattagtgtctctcaacttactgctgataatgatgtatctattgaattctttccccttgtttattgtgtgatggatcgggagatagggagagtggttctccatggagctcttaaagacggtctctacaaactcaacacatccctcatctcacagcaatacaactcaaatgtccagtctctaatttctaagtctgcctcttttacgggtgttgctactgtaactttagagtccaataaacttagtgttagtgagtctgtcttaagtttgtggcatagaaggcttggtcacccttctcatgccgtgttga

SEQ ID NO: 321973 - DNA, 729 bp, Cannabis indica
tttcagttggtgtgtaatctctttttgggtttacaaacttattttttattacattaccaactaggttgcttgtatcttgtggatggtctctagaagtaaatgtctaatgaacatgtatgtgcatgttctatttttcttatgataaacatctcaatcttgccatattttgatactaagaaagtccatttgcatttatcatcaagacatactagtttatagttaaatgttgatgacattttaccttaaaaggttgattgtgtcttattgagtgtaggccaactgcttattttagagtttagagtttcgttatttgtaaacacttgcccaacatatatttcaacaacatgagaatttaaaattatttgatttagttcgaggctttcttccattgctttttgagtttgttcaatgacatattctgccatcttggttgcatattttgtccttgtaggtagcagttgactggtttgtatactagattgaccaatataggtataattgatgctaacgttgtgtttatttgcttttggtgatgttgaaatgttaactaaaatagggtatttggtttcatcatcattttccttcttaattgttcataaaacttgcatccactgtcatctttgattcttattggtggtatgccttcttagcttgaaattggagatcaatctcataattgtttatgtaaagcccgcttagttaatttggaaattagcagttatttatgtt

SEQ ID NO: 321974 - DNA, 2028 bp, Cannabis indica
aaaaaatgtagcacaaatgttgcaaaaataaaatctcatgctcaaatgtcacacacacgtcgcacaaatgtcgcagaaaaatcagataaattgctaaaaatagaaaatcgcatgtattcacacaaatatcacataaacataaaaaatgtcacacaaatatcacatgaatatcgcacaaaaaactctaacacttgcacataaacaaaaataacacatagcataataaatatcaaaataataatgataaatagagaaagattcacatacccttttctcaaacagtgcagccacatcaggttgcttcacatcatgcttcgtaaccaaatcgggggtactcaagttcaatatttgagggaatctagtacattttcactaaccatacttcttccctaaatcttgcatgacctcaaacaccctgcaaggccggtgcatatctatagacaatgtacttcacctctagttgagtacattttttctccttcttctctttcttctttgtcttatctttcgtaatagaaaccttatccatgtagttcttcctaaactgcatcatatttttagttgtggatgacaaccacttttgataagaaaggatgccccaaggatactcggagaaattatctacattttctactaacttcagcatatttgtccagatataagcaccctcagtccttgacaacaacacacattcaacaaatgcacataaccgcaacttgtacacaccatctacaacatcgcacgcctcaaaagctagccaaagggttttaaaagtgacccttttcgtgttattgagatagtcccgtagtatccaatcataattacattatgtactcaattcttctgtcgccgggccactgctcatctttatgcctgtgatcaaaccgaactcagaccacccaaatttggcttcagttttacccacgtaaaaccacacttcatcatttttgacctcactcactttctctgcacaatcaccctggagcattttaattcactgacattccaaaaaactccaaagggagttttcttcaccttctcagtcaacttaaaggcttcaaacttagcttttattgaagtaaagtaacaatttcctctgtaagtgatacgccctggaaaatgcttacacaatggtggaatgagttctggagccatttatatttacaaacaaatatgattattattaattagaatataaatcgcacatatcacaaagaaattgtatagaaattacagaaatattgcatagacacaaaattcgtactggcaactgacataaaatcgcacaaatattgcatacatatcgccaaaacatagctcaatatttaagatacaatatccaaacaggaaaattgcacaaaatcacacaaatatcccataaatcgcatagagacaaaatttatactagcaactgacaaaaagttgaacaaaacatcgcatacatatagcaaaaacatcgcatacaaaatccaaataggaacctcgcacaaaatcgcacaaatatcgcaaatatacaaacacaaaactagggtgtagtgactaagtaatcacacaaaatctcacataaatcgcctaaaatcgcacaaataatcaaaaacctaaaaaagcctatatcccctaacctagattcttccccaaacataaaaaattagaaatcgaacatttaatcaacaacatattttagttttatcacagattctaaatttgaaggataaattacaaaaaaataattaaaaaaccaaacctggtttgagtgggtttgtggacggtggcagggacaacggtgaacgaagactggctcaactgggtctcgtgggtcgttggggtttgagtgggtctcgttggtcgcgtgggtcttgtggtcccacgtgggtcgagtggatttcgtgggtctcctaggctgagtgttgccgtggtcaagaggttcaaatagggtgggtggttagaattgacaaagtggttcgatggagggggtggctttggtacggtggtgagaagacaaccgagattggaagagaaagaggagag

SEQ ID NO: 321975 - DNA, 588 bp, Cannabis indica
tcggctgggtcacgaagaaggagactctcctccgtttttttggccggtatttttgtaaatagaaacttttggtttatatttatgtttattttctctttttacgttacaaatgtaaatttgttccctttttagtttattattgaaaaatctcttttaaaaatctactaaactgctttataaaaaaatgtgacaatataatttagtaactaaaatgttaactatttaatattggtctgaaaaaatatatctgaacttaaatttttaagcagaaataattgtttaatcttaaattctatttttctttttgttaattaaactaaaaagaaaataaaagattacttttaatttcaattatctggcatgtttactaatatgtaatgagaatcaatggtaaggtaattattcccttacatttgtttacttacattattaaaattaagaaagggagaacttgattaaataagggagaaaagaaagggagaacttctcccaccaattttataaggaatgccattaagagtaatggattttaattatttttattttattttttaatattaaatatataatgacaattttgtcatttaa

SEQ ID NO: 321976 - DNA, 689 bp, Cannabis indica
ccaccattcattcttacaatctgagcaattcctaatgtcccccattttctccaaatgaaaccctcaaacacctttagaggaggattagctcctaagatcatacaaacaacagctgcgttccaacttgcagcttcttcctcaacttcatcaatatcaacctgtgctattttcatcccatccttcgatatcggttcagtaaatgacaatttagcatcaatgtttagggatttacctgcatcaaaccgcttccattgctgccgagattttgagacaaaatcgtcttgttcaacttcatctgcccagatcgatttctcccgtgctgctacatcgaaatcgcacttccccgaatcctcttcctggttcaccagctgtatatttccctcctgtagggcttgagcaattagctccaggccttcagaatcctgctcctctacatgaatttcttcttggattgaaggaagatcctccagattcagctcaatcaccggctttcgaataacccttttctttctcgccatggagagagaaaaaacgcaatcgcacgcctaattcaatttattttcataacatctaattataattttataaatattaaattaaattctatttagagtttattctaaatttgatatttaataagtatatatattataaataataaaagataatacattttaaataatgagctt

SEQ ID NO: 321977 - DNA, 852 bp, Cannabis indica
ttgaccaaaactaattatggaccaatacatatacggctaatcagtggtattgattatataaacagatattgtagttaaatttactaaatataattctttaattactaagagtataatttaatatttttagtggaataatagtgaaattaataaataagagtatttgattgatgagattcaataagtaatctaatttatttgaacttggtgttaaaggtcacaggttaccgcatcaccactatataacattggtaagagtatggatgatacaaaatagtgatgttgagaaaaatctattttgaaatagtaaaatattaattatttatttttgaaataaatagtttatttttaaatttattacttatataaattagggagacaatgatgtttttagaacaagacaccgtcttgtaataatattacaaggtggccttagcactttgttccaacacaatgataggcgcctactacaatggcgtacgtccccactttgtgtatttttggattaactaattaattaaaaagataaatatttatttaaatttaaatttgaaaagttttatagatatttatttatggttgagatgagagatggttgagaaatttgttaggtctttttttggcattaatcaaaatatcatttaatttattgtgtaatttaattaattttcttgtgttaatttcgtggctttgattgctctttttctataagaaaagttttattttcaactgttcttttttgtttaggaaacttgtcattcaagagaatgaattatctttatggaaagttgcctgtttttgaaaaaatgactttccctttttctaattattaattttggttttgctatgtat

SEQ ID NO: 321978 - DNA, 1183 bp, Cannabis indica
aaatatcaagatggagaacatggaaaattgccaggctacaactcaaatgaagaaatcgagccattccatccagatatcttaaattcagaatttccttaggaatttaagaacccacatgtctcgccgtacgatgggatcacgacccagttgctcatctgaacaactttatttggttaaaaatacatcttatttcaagcaaagattcatcaaaaatgaagtaaacaaaatgtggcgcatagtacgttatttaggggcacaattagctagtcttgatacccccaagtgagctaatatgtgtggatatctccaccttcctggtcatgacttgtttaaaacgtagcttgcggcctaaaaaatgtaaagggtaaacataaaatactgatattctcattatatgatgctagaaagccatttttctaaaagttaattacatagactgtttacataaaactactccagagtgtgtcacttcccgttatcttctgcctactggtaatattggcgcaaatggtccgcattccaagcattggggaccctccatccatccatctattttagccaaaatgttccctttcccacctttttgagtatctcgtaggagccttccagttgggccaagtacccccactcccgattcctacgaagccaggaagaccctttgtaggacaagataactaatatcaaagatagtgagattgaatataaactggagaataatacattaaaattcgtgagtatggataaactccaagtccatttgcacagtttttttaaaagcatgggttcattgcccaatacatatgcctattgaacccaaattatggtgtgtgacaggtttaagaaactaagaattgttggacatggggtggagtctgcataacatactataaattttcttaaattcttatcggttgatattcttcaattggagtgtatatatcaaatcgtgttctaaataaagttatttttccaacttattttgagttgtgatacggttgaaactgactttatgacatgtacacattttagaaatacccgtatacagttagagtacaattgtcaaaggaaagaacttggcccaaataccataaatgaacatttcatcagaaaagctatgaggtttaagggttacacattttattatccatctcacaatactagaattgtaaaattaagaattgac

SEQ ID NO: 321979 - DNA, 1126 bp, Cannabis indica
acctgaacaaagcatgtccaaaagactggttcccgctccccaaaattgactatcttatataagccatactagccatgaaatccttagtttcctggatgcgtattcaggttacaattgaataaagatgcatccactagattaggaacacacgagcttcatgatggacctaggtctgtgctgctacaaagtcatgtccttcgagctgaaaaatgtaggggccacatatcaaaggctggtgaacatgattttcgtagatctcattggctgcaacattgaggtgtttgtggacgacatccttgtcaagtccaaaaaggctaagggcacgcggatgacctagacgagtgcttcaaaatcctttgtagttaaaacatgaagaacaacccccttaaatgctcttttggtgtaagcttaggaaaattcgttggtttcatagtcaacacaagaggaatagaagcaaacccagacaagattcaagcccttttggacatgaagtcgctgacaattatcaaggaagtacaaagcctaacaggatgcattgctgcattaagcagatttgtgtccaagtatatagacaaatgtataaccttcttcaacggtcttagaggtaacaaaaaatttgagtggatagaggaatgtgaaaactcattccaagggctgaagaaataaatggctgaaccactagtgctgtctaaagccctagataatgaagacctaggcgtgtacctatcagccacaaaacgtattatgagtgttatcctaacaagagaagaagacggtgtaaaacaccatgtatattacattagcagaaggcttattgacgccaaaagtgggtacccactcatggagaagctcacctatagcttgcttttggcttccagaaagctaaggccctacttccaggcacaccccataaaagtgtaccccgatcaaccgctaagtaaggtttcgccaaaacctaaagcattcggtcgactactcaaataggccactgagctcggcaagtttgagatcacataccaaccaagaagaacaatatgttgggttttatgcctaaataaaactcatttcaatataatcagatttacttattatatagatcagaaataacatttaatgttgcatggtt

SEQ ID NO: 321980 - DNA, 1847 bp, Cannabis indica
ttgctggttatggcagtgattcttcagaagaccgcattgaaatagtgtctgggcgggtttgatcaaacaaaagcaacaaaaacaaaaagcttacaagtggtcgaaggaacctttgaataggatgatactatgcacggaataagaagttatcaactttgtaaactgggtggttcattatccttggaaatcttatgatttccccacaatgttgtaccatgtagctttaaaaattgttcatttaagtttttgatgtgtacactaactaatgagaagagtctgcatagcacaccagtttctatttattcatcacagaccctagccatgggtccaaatagaaagagcagagcagatatttacgaattccaacatatgttatggtatttgatccatttggaagtcactgaatcaatttgtggcattgacaaggagcaaatacgaaagataggcatttttagtctactcaattagtaaaatctgaacaaagattcattacaactactgcaccacgcaactcttagcagtgaactaactaacaactttacaagcttactaatagtagtaatgtagtacataagtaacaaaagataccagcaccagtaattaaggcaggtttcaacttccaactcttcaagagatggtaatctcaacttttttgggtttcggaggtggaggaagcttctcaaccacaacagtcaaaaccccattttcgcatttggccgatatagctccgacattggcattttcaggcaatcgaaattttctcaaaagcttgttgttcaccctcctctccagtctcaagtatttgcacccttcttcttcaccctcctcacgtttcctcttcccaccaccacttcgaataatcaaagtgttcttgtcctcaaccgtcacctgcactccaattcacaattatcacttttacttttattttgttaaaaattaatattacgatcacgatacatatgaatttacataattatgaaaaagtacctgtatatcagacttggacaaaccagggacatccatatagaagatgtagtctttcggagtgtccaaaatgtcgacagggatggttgaaaaggttttgttctcacgtgtttcttgacctcgagaagggaaaataagtttctctatggtctccgggaaatggaaaatgtgattcactgctgagcccaagtctccattgaagaggctcgaatctgcgactccattactcatttcttttctttcaaatatcaaatcaattacctaaaaaaaccaaagaagaataaaaaaaattgctcaacgatttggcgtagcaaagctagagagagtgttagtaaaagtgatcaacgatcagtttgtagtgatgtttggtggctgagaaaattgagggagagattttctataaaagagatgagtggaaagtatcgttaaagttccagaaaaacagagcggaaaggcacagaacggtctagaagcctcgcagattttggagagggttatggacatacacgtgtctaatcgttattggcttgccctatacgtggcttcacttaaaaagttaatttgtcatttcacgtctataatttgactattactttctagtaaattttttaatgttaaatatttgatgtttttgtcaaaaaaagaagaaaagaaattaattaactaatccattatctcgaaaaccatttttttttaaaactatttaacttttgtagatttaggtcctttaattagttattttgttaaaagcattgatgaaaccagtgataaattattctcagcaaactttatttgaataaactaatattttataatttttctaaatatttatataaaaaaaattattacaagttttattttca

SEQ ID NO: 321981 - DNA, 479 bp, Cannabis indica
acaaaaccgaacactttttccctaagtaagtttttgtcctttagtgaattataagagaatgaattaaatctgattttagcttaatgattttattagataaactaaaggaattattcttttatttttttttttttaccaaaattagaaaagaacactctctttctttcttcaaccctctctctcaatctctcttgaatgcagcaagttgggttttcttcagctcaattctcggtgttctagcagaatttgtaggtttcaatctaaggtaaacttccaagctctctttccatggtttttttctaagttgtgagataggttttgtgcatgacttttagagttaggtttctgtagttgttgatgatgtttgattttgttttctgacgatgtgtgcatgttatttgagctggtttggagttgatttgagtattgttgttgtgtttgaactttatgttggatattatttgtgacagtcagtagtc

SEQ ID NO: 321982 - DNA, 551 bp, Cannabis indica
tttatctcgattttttttttcaaggggggcgactgccccccctcgctacaaggtgggtccgcccctgtataagattaatttttagttgtagataaatatttaaatttaatttttagtaattataatatcttattatatttttgagagatacctgaccattaagtgtcaaatcaatagccatgtgacaatctctaagaaatgatacgtgggtaatgaattgacacttaaaaatacttacatacctatgaaagttccataaatataagttaagtattattactgtcaaaaattaaacttaaatataatttgcaactaaaaattaattaaacttaaatatttatgccacaaattactctttatcgttatcgttataattagttttaataatatattacattgaaatatataaaatagtatattccacgtacaatttcaaaaaaaaaatcaaaatatatatatatatatacaaaatcaaagttacaccaagatacataataagtcacataatattccaattcctttggggggaaaacagatattttgaataaaca

SEQ ID NO: 321983 - DNA, 1065 bp, Cannabis indica
attggatcattaacaatattaaccacagatttttcatcaaaacccatctacatcttcacacacctcttagaagcgggggagagagagtagaaaagaaagaaagaaagagatatggatagtggtaatgataatggtaataagaatgaggtagcaaagatgtaaaggacaaagatgaaaacccagagagaatttgtttccaaaattgagtttttccatcacagggcaacatcattatcacacaagctaaatagcaatagtaagaactcagctaaaagatcagtaaacaatacaacgaagaaaacgacctgaaaatgaacagaagctccacactcgctttaagattaagagtggattcagatgaagcttcctgggctgcatgtccatcaaccaactgctcagagcccactgcattcatcatcatctcactctagacactataaaatggttcaaaataagcattgcaaaagaaaaaaaaatcaaacaaacataataaagcaattataaaaagtgaactaaaaatataataaaaaaagccctcagatcacataacttgagaagaatcatctgcggaagaagctaatgggtgttcttcagaagccataacacgccactacctaaccacctttaataaacatgtatgtgtgtgtgtgtatatatattgtatgtatgtatgtatgaagaagaagaagaagaagaagaagtagtagtagtagtagtagcagcagtagtagcagtagctaccaaagatggtggcaatggcgagttaaagctggtgaaaacaagaaccacgctaccgctcattgtgatttgagtttttccatcatcgggccccaaaacaaaaccagaaaaaaaataataaaagataataataattaattacttaaaaaaatgaagaagaagaagaagaagacgaacctagaaaaattagggttagaatcaacaaggttgtatttatgtgagacttgaacttcccaaaataccctccagcgggaaaaattgactgggccatgaggatggtccattcttgtctcgttggataatggggcccaatagtttatgctattt

SEQ ID NO: 321984 - DNA, 600 bp, Cannabis indica
cacaagacgctagggttgttagagcctttgttggtccccaagcaggccatgggatagcgtctcgcttgatttcattactagtctgccaaagacatgaaacttgaatgtgatcttggtaaccatggacagattttcaaagtacgcaaccttcatcccagtgtcgaagcagtgtccggagagacaactcaacttttctttaaacatatagtaaaatactggggagtaccccaaaatatagtgagtgaccgagatcgaagattcactgggactttctggtccaactatttaagcttcttgggtcacaaatgaacatctccgtagctcaattttgtttactctcaacagagttcttcatcgaacaagagccaatttgaagttgtgaatagacaacaactactgttaacccacacagtggatgagtaccacggacggaatctacgagccttcaattttacaaaagactagaaaaagaatacagaaattgaccaagcatacttagagaaagccccacgaagattgaagaagtgggcagatcacaaacgccgaccgctggagttcaaagcaagtgacttagtgttgatcaaactacggccagaacaa

SEQ ID NO: 321985 - DNA, 656 bp, Cannabis indica
tggtgaatttctttttgcaaaccggtttacttgattaactattgcttgtgttcatcttgctctttttacgatcttcttagatccgttgacgaaaaaccgcgtcaacataaacaaaaaggaggagtattttgggttttaatttgaattgtacactcaactatccagggggagttgaggtttgggtctgtattaaacttttgttaaatttagtcttttattttggtttaatgttgtgcttctcaagaggagtttataatatgtttttttttactaactttcttttgcaagtgtttgttaattaaaaatattttgattatttaaagtgccaaaaggagagattgttaagtcctttttggtaaattagttgacaaaatattttttaattaatgtgaatttttattgagcaattaaattgattttattgtgataaattcgtgccctaattgctccatttcttgtatggaaagatctattcccagttgtttgtaattgtttgagaagcttatcttacaagagaagaaattctctattgggaaagttgtctattttaagaaaacttgactttccatttttctaattgttgatatcgattttgccttaattagagcagatcaattaaaatttatttggcaggtttgaagtctaaattcgtgatc

SEQ ID NO: 321986 - DNA, 1544 bp, Cannabis indica
tgtgaatttgttagagtgctttaatcaaggtctaaattgactgagaatctattcaaggtgattgattcgtgtgaacgttcaatatacttccaattgaatttagaagtatcattgatttttttgaaaacatcggagtaccatattggtcaatttcatatctaaatattttctagtatagctgctaagctctataaatctttgagtttagatttagggaacatgaattttcctatgttttggtttcagtgaaaattcatttgtacaattccttgtctattttaatactcaaatgattatgattttgtgcatatttacaaatttaaatttccaaatgtatgtaataaggagatggtgcatatgttcatttattaatacattttgtcttcttaatcaactcttctttataggttttactcatctattttgctttattttacctcatacattctcatttcattgattaaggataatgaactggaattctgaacaaccttggtctgaaattgttagggcagagataagtttcttagtgtcttctttgttacgaataatgttttgatattttttttgctaaacaatatatgaataatgttgtcagggtttattcttagtttcaaattatagtaaaacttattaggtattttgttaattaggtctactgtgagtatttttttttgttataatttgttatcaagcggttagaacaaagggatcatattgtagactgtaggggagtagctgagtatctttgagcacttgtggttacaaaagtcattgctgaatttcttggagatgacgaatttggaaaaacttctagtcttccttcattggcaaggggatcctctttttcatttgttttaccttttatataatgatccattttattgtacctatcattttatcttatctttatgcctttctttgactataagtagtatccgcacataactctatcttcttggttttaaatatttataggttatatgttaatgttatttataaaatcttaagattgtttttccttcttcatttgcccattttggtgttgttggctcaagataactagtgacatataccatagcattcaagaatatgatacacgaatggaaataatgcagtaacaatataaaaattcatcatgtggagcatagattgtagctttattttttgtatgtatttgatgcaaatataatactttgttattagatgaataaaacttatgtttgtatcctctctcccccctctctctctttgaatgaagattctcatagtcttttgtgattcctatagctgaatttcgaaagtctttccattttagctgctttcgagtactgaattaattggtatcataaggaacctcacactaagtgaatggccatattttgaaaaaaacataaagtacataatgatttcctttaaattaaatcttttacaagtttttgtatctgttttgcaagtaaacttcaaagaggaacgtgttccatttttaagtttcattacccacatttgtgccataaatggagctgttctctccctccctctct

SEQ ID NO: 321987 - DNA, 1130 bp, Cannabis indica
tacattgtgaatgaaaacgcaagaaaacacaaatatattaagttcgaatgtaaaagtacaatacatttaagataagaaaaaaacaaagttggtctacgaacttgtccttacaaaaatgtcactaggggcaaaccattaggccattttcctaaacaaagaacacaaggttaaaggagagagtagatctcgagaaagaccggctccaagcaaaaggactcgacctgatgtactgattcagtaacatttccttctatggtcctcgttgcatagacctcattctatgcaaaaggggccttcattccttgcattagaagatctcatttcttgcagcagagacctcattccctacagctgagacttcctagcctcaggaaatttctcaagacagtgatttgctggcttaaagatttcctcgtgtaagctttggtcttgagccgttcagcttctttagtgaaatccatgccctcgttaacttgggttaccgtcttcctgaattttttatcggctcagggaagacctttgaacatgctctcaaaatctacgtccattgctgtagaaacaaagataaaagatcaatgaagcaatagtggaaaaaaaaaaagaattcagattagtccactatttacaaagaatgatgcttactttttgaaatcccttgttagaatcgcctgtaacagttggcagtatctccttggtttggattaatcgggtgatcatcagtcttggaatctttcatttccaatttaatcaaaggtttgaagtttttgggaacataaggagaggaaaagcagttggtatattccggtgttacaagttttgagggataagtttctaagcctggatgggacatctccgcaggaaaatggcaatccaacttttggatgaaattcaccaaaaagcaggagtttatggaatatggctagcctgagccatcattttatacttataacccagtaacggtaaggccaaaggttggaaaatctaacagttgggagtgaagtagaagatgaaagggcggttcattaatgctaataatgaaccttaaaaccgtgaaaccgtaaagtttaagggcatgcatggccttgaagaaagagattatgacaaatgtaccctctgtgatcatttaaaaa

SEQ ID NO: 321988 - DNA, 960 bp, Cannabis indica
cccaatgatttggtagatatcaagcagcaggaagatgagccccttaatgactacatccaatagttcatagaggttgctgctaagaccaaaagtcttagtgaggacacaaggataatggcacttgcaaccagacttagttagatgagtcctttgtggtccagcattcgtcccagagcggtatacaccacgaatgacttcttagatatagcagatggatttatcaaactagaagaagctgtcacccgggccaaggtctcataggttggcaagaagaagtcaccaaactccccatcccctgacactgaggcataggacaattgaaagaaaggaggaaccaacagaggtaagagagccaacaatggtggtaagccaggcacctcccttggttgaaagaagctcaagactagggtcaggatcttaaaaaagtatgagccttgttttaccacctactccattctcttagccccaagagaggagatctatatgaccacacagtcaacaaatgtcatatcacaaaccttttcccttcaaagatttagggaagagggacatgaatagattttatcataaccacaacaattacgatcatgacactaatgagtgtaatcagttgccagacgagataaagtttctcatcagcaaaaaaaacatgctgctcttcaactgtttgtacgacctaaagctccagctggaggcagtgcaactctctagcctgagctagttacatgcaggctagagattgtgcaaaaaggtcctggataatttggagaagcgtatttaagagtccttactgactcagcctctccaaacgggtctacgaaaaattatgcgcgtaaaaaaaaattatcactaggtgataatacaaacacaattgttatattttatctttagtttatatccaaagagatcaaataaagataagaattttattttatgctatcttacaatgtcttatgctat

SEQ ID NO: 321989 - DNA, 1183 bp, Cannabis indica
ataataataataatagtaggtgataaatattacttacctaagagaaacactattcattcatgtataaacattatattaatattttaaattttttgtggaaaaattacaagtaatgggtaaaatcataacaattagaacttaatcaacaaataattaacaatgacaagattaataatttatacacaataattggagattaattaaggaatgaacaaagtattaaaacaggaaacagttaaagcggtaaaataacaaaattaacaccaagataaatactggttaaagtcttatagatcgatgtgatctatgactctactttagttctagaacaccaccaaatctttattgattgtgcaagaacatagtacaatacagttgaaatcgattttctattgaattcactcaaagtgattatctctcacgctcttacccaagaattttctttatcttcagaaaatttttcatacaaaactcaaacccaaactcaatctctattttttctccgtacctctctctttacctctcaatctttctttctcaagatcacctttggaaactcgtctgaacttgttatgttgtaaaataatcagtgttggtggtatttataggtctagaaaatagatcctaaagccagtaactgcaagtgcaaaattgttaagttagttacgacttaacaaacttaataaattcctcgtaatactatctccacgttagcacaagtcaaagttcttccggatgagagatacacttccaggactaaggaccaaagcgcatgttgaagggacttcccgaatagaaagaacacagttagagtcgactattcgaaactccattctaggaggaaataactagccatctggaactcctttttgaagaaaggcaagctttccttgagaatccttccggatggcacctatctttcaacgagacttgttgacatctaactttctataactaaaacaacttagagatattttgagaaactatactattcatttttgtagtatatgtgtgtgtgtgatattattatatttatttatttaaattttaaaaataaaaaaaataaaaatatattaaataaataagaagatatagagaagttgctatatggtgtataagataaaatagagaaataaagttttagtgaagtattttaaagaatagagtagagaagctgatagag

SEQ ID NO: 321990 - DNA, 1734 bp, Cannabis indica
tttttgagaaatgagatgggaaaatgacaaaatggcaaaattgcaaagtggggcccaatccaattcctatggccggccactatgcatggattttaccatttatttttctattattttaatgctaattaaatctaacctaaacctaggtggttacctataaatagatagtgatggctcacacttaacagattgatgaaatttaactttcaaaaattttcctgagccttctttctctttaggccgaaaccaccttctcttcctattctcttcataatttcatacccttgagtgatagagtgagtgcccacacacatcaagtggtatctcaatcatagtgtgtaagactgtgaagaatccaatcaacaagaaggagaatcgggctcaagaaggagagaaagagatccaggttcagatcttgataatgctctgctatagaaaggaatcaagggctagagatatgaacggaaggagtcattacattccactgcacccaatgtaaggttttcttaaacctttatgtgtttatttcattgtttgagaaattcatattaggatgttaatgaaacattcttgttagtaaatctagatcttgtaaaatatttccaacatatactgggaaggaagatccgttatcacatcttaagtattttgaaatgcaaatggacctacaaggagtatgaggagatgtatgttgcagagtttttcctgccacaatctcagaagccgcccaacaatggtatttcaaattgacgtttggaagattcaactcttggataactttctcctcagaatttgatgcacaattctcttcttctcgcccattcccattgcattttgaagacttggtcgaagtgaagtaaaggccaggagaacctctccgagcttatatcagcagattcatggcggaggcaacgaaagttgcagggttaatcgaagaagggaaattgaccacgatactggggggcatcaaagttttcagagaactttgaaaggacatcaaaaatgaaggactagtagattctatgggtaacttccttgatcgtgcataaggattcatcaagcttgaagaggccatttagctagcagaagccgagctttagcctggccaaccaaaagctccctctgctggaacaaccgtccagctccctcactacccaagcaatttaagctcgagcggtaaacggtcgaacaacaacaataggcaaggtaatgaagaaaagggaaagtttgatggcaaaaccgaacaagcccctagagacaattcttccaacttcgctgctttctcagttttggctgaagatttggagactatctgcatggctactcagtcattagctccatacaagaaacccactcccatgaaaaaggacgtaagtaagagagacatgaccaagttttgtcgttttcatggagattatggccatgacaccaacgaatgcaacaatttgaagtgggaaatcaaatttttaattagaaagaataacccgcacgtgcaaaaatatttcaagaccgatcaaaatcaaaggactgctcaaacagataataatcaagaattactgccaccaccaatggacgggcatttacaagtcattattggagacccacacatagccggagattcaggcaaagcccgggagatgtatgcccaaacactgtagcacgagcaagaggaagttatcttggccgtcgaagaaaggaagccaaaaataccacaggcaggggaacccaccataa

SEQ ID NO: 321991 - DNA, 2264 bp, Cannabis indica
tccatgtttctccctagttggtttttgaacattgggctgaccatctgttgatatgtagctttatcatttttaagcccaaatgacatcaccttgtagcaataaacgtctttgttagtttggaagctggtgtgttcctcatctgtgacatgcattttaatttgattatatccagagtaggcatccatgaagttgagtaacttgtactcagacttggcatctaccatctgatgtatctacaaaagcaaaaagcaatctattgggtaggccttgttcaggttggtaaattcaatgcacattctccatgagcctttgagttttagaaccaatactgggtttgcgagtcatactggatataacacttcctggaggaaatcattggcaatcaacatatctacttccatcttcacaactttagcccttaccagatctaaaggtctcatcttctggtggactggcattgcatcttctcaaatgttcaaagcatggcaaatagtgttacggtcaatcccggtcatatcagaagggctccttgcgaggacatcttggttccttttgaccgtgcttatgatattctctcttatggatggaggtatctttcttcccactcttacagtccttgtggggtcttcatcactaatgcttacctcctccacctcttccattggttttaaattccttttagtcccaatcttgggatccaattcgtcttgaaaatcctcttggatggctccaatgtccatcaggtcttccgttctgagagcagtaggtgtctcatcccggaccatgtacacagctcgtgtggagacattgtagaaatttctcacgctcttctgattgcctttaatcataccaatacatatgttatcacacgggaactgcatgcacaaatgcctgatggaagtcaccgccccaaaatccacaagggttggttgccctagtattgtattgtacacggtcgggcagtctaccaccacaaaagttgagtgcttgaaagcatttgcattgttttctcctttgagggtgataggtaactggactttccccatcgacattagggcgtctccattgaagcttgccattgaatggggcaaaaggttaaatctacctcggtaagctctatctcctgaaatgcgaatttgaataggatgttaattgagctcccactgtccacaagaaccctggaagctcatttgttggcaatctgtgcattaatcactgaaggatcgttatgggggaagcacactcagtaaaggtgattagaaaattcatcattttggaccgttgtgtgggagattgcactagcgcacacacttcccctttttttacctctttcaagtatcttttctgtgagtttcgagtacttttgacgagatgggatccactaaagattgttgtcatgtgtccgtccactggaggtggagcgaatccgagaggatatgggcttcccgatcttggagcaagtaaggccaccctagctaaggctggcagagcagggagtgcatgcaatgatgttcctagagcttaagaacgtcctaccccctgtggaggatttacaacgttcggttgtccaaggacgatcatgtgtccatgtacaaccccctgtccgagatagatgatcgagattcagacccgttgtcccaaatttcctgctcagaccaatgtttcaatttcatctttgaaataatcacactcatttgtggtgtgacccttctccccgtgatacttgcattctttgttttgatcacgtctattccttcctccatgtgacatttgtggaggtttcgtgtaatggaccatattgcaggtcactttgtagacgttttcacgagtgtttattagacttgtatacttagtgtattttggatcatattccttccttgttttttttttaaagaatcattgtgaatgtggctcttaccctctctttttctccaagaatggcttacattagaattcgggacctcagtttttgcttgtctaagagctactctacgtctagtctgtgctgccttgtacccaaaaaaatgggtctacgtaggggaaaaactagaagtagtaggtttgtaattggttggagaaaactcggctcctaagagagtcaaggctggagccgaaacttggggtgtgaagttaggagctgtcgtggaaggagttagagctagagggactctaaaggcttgtatgtaggcattctcaaggttgatgatgccttgggcctttaccataaactcactcaaagttttagctctctttctctgcatttc
